United States Patent Application Publication US 2026/0103690 A1 - sequence listing, part 94

SEQ ID NO: 466000 - protein, 422 aa, unidentified
MIMDEITEEPGALVERVAALDIGKASLAVCIRVPQEGKPGARRQEVRTYATLTPALLELRDWLICQGVTLVVMEATSAYWKPPFYLLEDDIECQVVNARDVKNVPGRPKTDKLDSVWLAKLAERGMLRASFIPSRPQRQLRDLTRYRRTLTQERTREKQRAEKLLEDAQIKLSSVISDIFGVSGRAMLDALIGGQRNPHELAALAYKNMRAKASVLQEALTGHFTDHHAFMLGMMLARIDALTTQIDTLTTRIGEAIAPYAHQIAQLDEIPGIGITAAQDLLAEIGTDMSRFPDAGHLVSWAKFAPKARQSAGRSKAAATGKGNPWLGGTLGEAAAGAARTKTFLASRYKRIVRRRGRQRALVAVGNSLLTIAWHLLSDPAAHFTDLGPDWHDRLAPLRRKRQLIAEPERLSGKKVTLHDAA

SEQ ID NO: 466001 - protein, 371 aa, unidentified
MGESSKTLFVGLDVHKDTIAVAYAAEDRSTEVVSLGMIGTRQCDIDKLIRKLESKGAPFAIAYEAGPCGYWLYRYLTRRGLSCIVVAPSLIPRKPGDRVKTDRRDAVTLARLLRSGDLSAIYVPTVDDEAIRDLSRAREEAVRDLKRSKVRLKAFLLRQDIRYEGRANWNAAHLRWLARVVCPTAAQQIVFQEYVHTVTEQTERVQRLEVELHTAVKTWRLHPIVEAVQALRGVDLTGAVTLIAEVGDLTRFDTPRKLMSYLGLTPSEYSSGERRRQGGITKAGNGHARRALVEGAWAYRYPAKVSRHLQLRLENVPTEVRAIAWKAQLRLCKRYRLLSARGKHVNQVVVAIAREMAAFAWAIARTVPMAS

SEQ ID NO: 466002 - protein, 419 aa, unidentified
MSFKIIRKNCCGLDVHKTWIYACIGIADANDRVEYKQSRFSSFTKGLQELCDWLAKYNCTDVCMESTGKYWIPVFNILEKNDLWVTLSHPKYTKPIKGNKTDRKDAKWICDLYMCGMVKPSFIPPADIRHLRDLVRYRFKLTCMITGEKNRAHNCLTVSNLKLDDVFTDIFGKSARSITNQILEHPGEYFDVTPFVDGRCKTPIEEIQAAVDGAISPEQTVKLKACLTHIDELEKHKSEIEQEIHSLSEKYSAALDLIRTVPGFDKNPMTAIQVLSEIGGDMSVFPTAKHLVSWAGCCPRNDQSNRKIKSTRISRAGSYFKPVLVQVANAIIHSKNHPEFTDRYRRIKARRGHKKAIIAICRMILTAIWHILSDLKPYTPDGFLEPRPVNVSKTLTTLQALNLLRQRGYIITDESVVTS

SEQ ID NO: 466003 - protein, 413 aa, unidentified
MRVMIERCCGLDVHQETVVACLLIGAPGVRPTKEVRTFRTMTRELEALRDWLKAAGVTHVGMESTGVYWRPVYAVLEGYFELIVGNARHIRNVPGRKTDVKDAEWIADLVRHGLIAKSFVPARPLRELRELLRYRRKLVESQSAERNRLLKLLETANIKLASVASDVFGVSGRAMLKTLSEGNATAEEIAGLAKGQLRRKHDDLVLALEGRVEEHHRFLLAIQLHRLEAAEHDIEALDSRIAERLEPYRTQHALLMQIPGVDWVVAAVLIAEIGIDMSVFLSAYHLASWAGVCPGNHESAGRQTSGRARKGNVHLRTILVGAATSASRTKGSYLKDKYHRLKARRGALRAALAIAHKILVAAYHMLAKGLAYRDLGEAYLDQLHQTRTAANLKRRLERLGYTVTLQLKEAAAA

SEQ ID NO: 466004 - protein, 392 aa, unidentified
MFYIGIDIAKHNHEVSIIDDNGKALGKSFSISNSQKGVDKFNTYLDSFNITSENCVIGMESTGHYWINLFSFLVNLKFNVFVINPIQSDAFRKMYIRKTKNDSKDSYIIAQIMRFGEYSSSNISDENIFALRQLSRYRTSLVDECSSWKRKIISILDQVFPEYSNLFSDTFGVTSKELLSKYPLPENMLELSTEELTNLLNKASKGRLGNEKAQEIKESAKNSFGVSFAKQTFSFQIKQIINQISFIESQLKELDNEISNMLKELNSEITTITGIGDTLGACILSEIGDISRFEKASQLVAFAGLDVAVKQSGEFTGTEMKITKRGSPYLRRAIWLAATVASFKDPALSIYYKSLIARGKKHLTAIGAVSRKMCNIIFSVLKNKKTYTPNIW

SEQ ID NO: 466005 - protein, 347 aa, unidentified
MKFYTQQHRYYCGIDLHARTMYLCVLNQQGEILLHRNMPCSPDFFLKAIAPYREDMAVAVECIFTWYWLADLCAQENIVFVLGHALYMKAIHGGKAKNDKIDAHKIAVLLRGGMLPMAYVYPALMRSTRDLLRRRMHLMHKRSELLTHIQNTNSQYCLPQFGKKIAYKKNRQGVAEHFADSSVRKSIEMALSLIDHYDKLLTEVELYITQNAKIHDVNAFNRLRSVHGIGKILALVILYEIHEIDRFPTVQDFVSYARLVKCSKESAGKRHGSSGAKIGNVHLKGAFSEASVLFLRANPAGQRYADKLTSKHGKAKALSILAHKLGRAVYYMLKRDKAFDMNKFLNS

SEQ ID NO: 466006 - protein, 428 aa, unidentified
MQIDSSTTPLYVSIDIGKNVHCFGGFAGGTLQLIHPQQEVRNNQPGYAIFRTWLQMQVTSQRYTPIIVGLEPTGIYHETWAYALQQDFGDQIELRFLNPYQTRQKRRQLQNGRKKKTDPIDVEAIAHCLRDGQGNPACLTKPQTIHFDLWAAEFRQAYREHQRLQLSILTQWDRLWPGALVDVKAFQKAHPHLKPPKPLVRSRPLERQLVRYLLGENPDPYYWRTFSADALHRFLHEKGLHCGPITAQRIFDLAHEALLPPQHLAQALAERLHNDFQHFLQLDERLAQLQSQAETLVPQSPAAVLTTVPGIGAYLAAQYLAYVIDPQRFDHADQIWSLAGFDVEQDDSGDRRRMGRITRRGDPAFRAVLFAIGLNTSQHCPAIAKARQQALKHGKKHIGAVIHAAHKANRMCFYLLLHQVAYDPKIVH

SEQ ID NO: 466007 - protein, 357 aa, unidentified
MVTGLKHQKEKRSMDHFAGLDVSVKDTSVCIVDDTGRIVREVKVASEPEALLAVLTNRAYHFKRIGLEAGPLSQWLFSAMAEADLPVICVETRHMRAVLKARINKTDRNDARGIAQMIRVGLYRPVHVKTLRSQKLRMLLTHRQLLQSKAIAVDNDLRGTLRNFGLKVGVVGAVKFEARIRELVEDLPDLAVLVEPLLVVRRVLREQIAILHRRLLAVVRDDEVCRRLMTAPGVGPVVALTYRATVDVPARFRKSKSVGAVFGLTCARDQSGERDRAGAISRCGDKMMRAMLYEAAQSMLVRSTRWSWLKAWAMQIARRRGKKKAVVALARRLAVILHRIWVDGTEFKWTREVVPAA

SEQ ID NO: 466008 - protein, 347 aa, unidentified
MNSLTDLVDVVIGVDTHVLTHTAAVVDAGTGGVLAQRTVDATAAGYAELVEFADQHSGLRAWAIEGTGGHGAGLARHLEQRNELVVELDRPQRAQRRNGAKSDPLDAIRAAREALARSRLGTPRSAGERQALSVLLAARRSAVESATDAQHQLFSLVIAAPEPVRAKLRGQKLPAMLRTAARMRVNPSWDLETATTVRVLRALARRALELAAEAAGYEREILRIARSMRPDLLEQMGVGPINAAVILCAWSHPGRVHSEAAFAMLGGVAPIPATSGQVVNRHRINRYGDRQLNRALHNIVLSRLRYDDRTRAYADRRTSQGRSRREIIRCLKRYVARDLYRLLEHPA

SEQ ID NO: 466009 - protein, 317 aa, unidentified
MARVAPSVGIDIAKDHLDLAVHPAGEAWQVLSTDAELSALVIRLRALRPARIVMEATGGLERPLAAALSVARLPVFVVNPRQVRDFARAMGYLAKTDRIDARVLAQFADAAKDRLVPYVLPDAQAQALDALVTRRRQVLSMLEAEQHRLRTAPPTVRARIGRHIVVLHAEIKDTNTDLTDLLENSPAWRERDELVQSVPGVGPVLSATLLAELPELGTLNRKQVAALVGVAPMAHDSGKLHGKRRIAGGRGAVRKALYMNALVASHHNTVLRAYYQRLLKAGKLKKVALVAVMHKLLLILNAMVRTNTPWDPDLALP

SEQ ID NO: 466010 - protein, 344 aa, unidentified
MNSTTIAVDVAKAVFEVAVSEHAGQVRERHRFSRERFRRYLGEQPPATILMEACGSAHYWGREAQTRGHRVVLLPPHAVRPYVVRNKTDRTDAKGLLEAARNDEVRPVPVKSETQQALAALHRLRSTWLATRTARINTVRGLLREFGVVIPTGARYVVPALGAVLEDADGGVPSLLRPALAEAAREIREIEGRIRTVEHQLDAVAEQTPVVSRLRSIPGVGLLTATALVAAVGDVQRFPSARHFASYLGLTPRERSTGQRRQLGTISKRGDTYLRMLLIHGARAVLFHANTKTAPAPDRLRAWALHLERLRGHNKAAVALANKLARIAWAVWKYDIDFAAAPAA

SEQ ID NO: 466011 - protein, 321 aa, unidentified
MTEDAVCVGVDVAKSTLDVAVSGCEETRQFANDHEGISQAIRNISGLKPAGIIVEATGNLEMPLATALQASHLPVVIVNPRQVRDFARAIGVLAKTDTIDARILALFGTRVKPDIRPLPDQKAREMARLLTRRRQLVEMLTAEHNRFLQASEDIRSGIETHIKWLEEALSEINDDLERRIRRSSSWCEKDNLLKSVPGVGKVVSSTLLIELPELGRLNRRKIAALVGVAPLNRDSGNMRGKRTVWGGRARLRAVLYMAALVASRRNPVISAFYQRLLDAGKAKKVALVACMRKLLTILNAMMHTMTIWQPETIIRGVSVEA

SEQ ID NO: 466012 - protein, 404 aa, unidentified
MTVVVGIDPHKGSHTAAALNEVEAVLGELRVRSGAAQLEQLLAWAAQWPERTWAIEGAGGLGYLLAQQLVAAGERVVDVQPKLAARVRLLATSSSNKNDPNDARSVAITALRSPEANQVRAEDHAAVMKVWAKRRHDLVSARTRVVCRLHAVLCELVPGGISGQLYASKAAKMLDQLEPENAVAAARHELGLELLEDLRRVDEQMCETKKRIAQAVAASKTTLTEIFGVGPIVAATVIGYVGDVTRFASSDRFAAYNGTAPIEVSSGPRKIYRLSRRGNRRLNHAIHMAAVTQIRSLQSEGRAYYDRKLAEGKTGKEALRALKRRISDALFRQLQIDSQRARKSIMGPGGQTGNDSVACVTDSHPDGRLFGEAIPEPKTTLRPAATAFRSRRSKTPTRSARRAS

SEQ ID NO: 466013 - protein, 355 aa, unidentified
MEPDLQHHWGKTLEHYVGIDVSLEQSSVCVVDATGRILRETKVASEPEAMISWLRGLGLELTRVGLEAGPLSQWLYAAMRDAGLAVELLETRHVRNAFKVMPVKTDRKDARGIAQLLRLGWFRPVHCKSVSAQEMRALLTARKLLQTKYLDVTMSLRGVLRGFGLKVGSTTPRHFAARIRELVAGHATLTAIAEALLAARETLGAQLRDLDKRLRDQAHADKRTRLLMTAPGVGAIVALTFVAAVDDPARFRSSKAVGAHFGLTPKKYQSGETDIIGRISKIGDASVRTVLYEAANVILTRPVKGSALKSWAARLARRSGLPKAKVALARRLAVVMHRMLIDGTPFDAQRAAARA

SEQ ID NO: 466014 - protein, 416 aa, unidentified
MVSPKFFAGVDWSEHLNDLAVVDRSGEVIASTRFEATPAGVRDALAVLSGLRTSHTFSRRSVPVAIEASRGLLVNALRRHSQTVIPIHPSTVARYRGRLNPGNRKKSDAGDAALLANILRTDGHAHRPLHTNSEEADAVGALTRAQLRASRTRQYHYLQLRSQLRAVHPAAVTAWGHLDGRLVRPEAREVIALAPSSGQAARLTRRQIRAALDRAGRTRLLDSETDRLFTLFREPVLRNPPAVEDALGQEVLATLRLLGEACLSVDELTSAAGELFSQHPQSRIYLSFPGVGLLTGARLLSELGDDPTRFATAKGLAAYAGARPFTWASGTSRTVLHRRVAANKRLAAYGHYWAFTSLTKSPQCRAHYDKRRAAGDRHNAALRRLFGKLLASLHHCLLHDELFDPEAAWPRPPGPA

SEQ ID NO: 466015 - protein, 342 aa, unidentified
MTCYVGLDVSMKETAICVVDETGDRIWDGKSRTDPDAIAAVLARRAAGAVRIGIETGPMTVWLWHALTERELPVVCLHARHAAAALKLQMNKTDRNDAFGLARLVRSGWYRPVAVRSMDTHRLRALLITRDQLVGMSTALINKIRGLAKTFGILVGPGKGGTFERQVRATLPDDPVVAALFESLLAMLSTLREQQLAIAKQLARVARQSGACRLMMTMPGVGPLTAVSFMTTIEDPHRFRRSQDVGAYLGLTPRRYQSGEVDINGRISKCGDRLTRKLLFEAANVMLSRTSQASALKDWAAAIGRRSGFWKARVALARKLAVILHRMWIDGRGFDPKVTAMA

SEQ ID NO: 466016 - protein, 347 aa, unidentified
MSISMIGLDTAKSVFQIHGVNERGKVELKRKLRRSELIAFFQKQESCTVVMEACGAAHHWARMLTGLGHTVKLIAAEAVKPFVKKGKKSDAADAAAICEAASRPDAKFVPVKTVEQQGILGLHAARSLLVKQQTMLANAMRGLATEFGVTVPKGIRKLDELMTLVDEDENIPKQAKQAITGLHDYCNDLSEGIETFEAEIVTHARTDETARRLATIPGIGPITASLIAATVVDISLFKTARQFAAWLGLVPRQNSTGGKTRLGRITKTGNREIRKLLVLGATSMVYRADGWNSAVGAWLRTILERRPVRLVTVALANKMARIAWAVMTRKEVYRPKGGVAVAAPAAA

SEQ ID NO: 466017 - protein, 419 aa, unidentified
MGSNKTKKLGKVKGNTLIAAIDIGKKMNYGYFRAPDGRDIKPFAFYNLRKGFEEFWTRLVDFQKGHHLEEIVVGFESTGPYAEPMLHFLRGKKVRMVQTNPTHTKRLKELTGNSPNKTDEKDPRVIADVIALGHALTLVIPEGPAAELRRLSQARERAIKSRTAIGNQLQHLLFVIFPEFLWTMKHMKSKSVLHLVENYPTPESIVAMGIEGLCAVIRRTSRGRLGQECAKQIFEAAQGSVGISEGKESIVLEINHLLLSIRNEERFIEDLESRMKHYLKQVPYSQSILSIKGIGEVTAAGLIGEVGDFGKFTTISEVMKLAGLDLYEISSGRKKGQKHISKRGRSYLRKILFFAAINMVKNKGILHAHYQQMVGRGMPKIKALIAMSRKALRITFALVRDNAVYVSDHQHRFGSRLAA

SEQ ID NO: 466018 - protein, 411 aa, unidentified
MEKLLERCAALDVHKRQVTACAHVPDRKGERAELRAEFETMTPDLLALRDWLKGLGVTHVAMEATGVYWKPVYYLLEDDFELLLVNASHVKNVPGRKTDVADAQWLCQLLEHGLLRGSFVPPKPIRELRDLTRYRKSLVWERQREANRLQKLLEDANIKLASVATRVLGASGRAMLAELCEGRNDPEALAALARGKLRRKLPELRKALMGRFSSHHALLVSHLLSHIDYLDETIAALSAEIEERLRPFEREVQLLTTIPGVAQRTAEVILAELGPDMRRFPDHRHVAGWAAICPGNEESAGKRKTGKTRKGDSWLRTALIEAANSAAARTRDTYLNAQYVRIKRRRGHSKAIVAVAHSILVAAYYILRNAKPYEDLGGDYFVRRDTDRQRQRAVAQLQALGYRVVLEPVAA

SEQ ID NO: 466019 - protein, 353 aa, unidentified
MKIYYVGMDVHKATIVIAVLDANGKVVSQSIIETSTQAVRDFCNSLRGEIHITFEEGNHAAWLYDVVKPLVTHLVVCNPKHNHLLKQGSKNDRIDARKLAELLRLKALKPVYHGEHGTRTLKELVRCYECVVKDLSRVQNRLKALYNSQAIRNRGRELYHLSQRESWIQKQENAGRRMRAELLFRQMDELKVLKRAARKAMIAESRRHEAQQVLLQVPELGMVRVAQIIATVDTPFRFRTKRPFWAYLGLAVETRSSADHELTNGRVSRRKVKIETRGLNEDYNRRLKSVFKSAATHACSCGVYKEYYEKLIAGGMRPEMARLSVARKLAAAVLAVWKKGESFDERMIMSKAA

SEQ ID NO: 466020 - protein, 338 aa, unidentified
MPLYGGIDLHANNSVVVLLNEQDQVIYQRRLANHLPTILEPLAPHQADIMGVVVESTYNWYWLVDGLMEAGYRVHLANPAAMQQYNGLKYTNEHSDARWLAHVLRLGVLPEGYIYPKAERAVRDLWRKRAHLVRQHTAQVLSVQNLMARNTGSRFSAKRLVDLTPADLQGMLPEAAHVLAVTSSLAVVHCLGQQIKTLEKTVNTCLKPTPAYAQLQTVDGIGTTLAQTIVLETGEIGRFPTVGHYASYCRCVGSTKISNGKRKGQGNIKNGHPYLEWAYMEAAQFAIRFSPTVQRFYQRKQAKSHLMIARKAVAHKLARACYDILRDLVPFDVHKAFG

SEQ ID NO: 466021 - protein, 326 aa, unidentified
MFYLGIDVSKAKLDCSLLLDVNTLRSRSKSVTNSREGFSTLLEWVQCQTQAGPRGLVVALEPTGVYHQALATALYDAGVTVVVVNPAQLRDFASGLAVRGKTDAKDSLVLARYAAQPQRTPWQPPALEVRQLQALVSRLEAVEGELQRELNRQQAAELGGDPQLVQSSIAQSIDFWRSEQAKLKQAIDEHIDSHPGLKQERERLLTIPAVGDKTANRMLCLLLARRFRSASQAAAFVGLIPIEHESGSSVRGRPRLSKAGNPRLRAALYMAAVVAIRHNPDVRALYERLLARGKAKMSALCAAMRKLVHICFGVIKNQQDYEPKTT

SEQ ID NO: 466022 - protein, 340 aa, unidentified
MINNFLGIDISKERFDVFLSFISKKGKREARKRSFKNDDNGFQGLLSFLQKHNVEQVKACMEATGCYSGALAEFLHNAGHFVSVVNPYCIKSYARSKLVRQKNDQTDAEIIADYCQRQEPSRWTPPSSELKKLKHLYRCSAALKDELTLVNNHLEKKERLPKEVVNAWEDLAMNIEQRIETIKNSVRELLKQHKELLENFQLLLTIPGIGEESAIAILAEVPDIKAFRDARQLAAYAGVIPQNITSGSSVHAKPRLSKIGSRTLCKALFFPAIVAKNHNPIIMSFCQRLKEKGKHNMAIVGAAMRKLLHIIFGILRSKSAFNPDHIKNYRARRLTEVLVI

SEQ ID NO: 466023 - protein, 339 aa, unidentified
MKLYSGMDLHSNTTHIGIMDEKRQRLIDRKVRNDPELILRFLEPYRASLEGIVVESTYNWYWLVDTLRDHAYRVHLAHPVANQQYHGLKHSDDRHDAFWLAELLSLGVLKEGYIYPRELRSVRDLLRKRVQMVNYRTAMILSVKNVIHRNRGITVEASQIKRLGQEGWAEVVKGDEALWLATRSSKEAIDCLTQQIQQIERWVLRRVKLEEPFSRLLSLPGVGEILAMTILLETGPIERFSKVGQYASYCRLVSSQWTSNDKVKGRGNVRNGNRYLAWAYSEASDHARRHDPLCRAFYNRKLNQRGHRVAHKALAHKLARAAYFILRDHEVYREEKMFS

SEQ ID NO: 466024 - protein, 334 aa, unidentified
MENLAVFVGIDYHKDSVQVCVMDDTGRVLGNRSCGNDPQAVADYANRYGCVRGAVLESCEGSADFADHLLARTGWSVDLAHPGYVRRLGQSPDKTDYSDARLLADLERVGYVPRVWLAPQWIRELRRLVRYRRQLVNERRNTKLRIRALLREHRCPCSAPCWGKAWFDWMGQVDLPEDSRWILDRHLDRLQQLNGDVRVVEQRLDDVTKDDAVVQSLLTRPGVGPVTAWVLRAEVGRFDRFRSGKQLARFCGLSPCNASTGLRQADSGLIRACNKNLRSVLIEAGHRLKRYDARWSALAKKLREAGKPGSVIAAAVANRWMRWLYHEMKTIQAA

SEQ ID NO: 466025 - protein, 452 aa, unidentified
MYPRRRVRGKPDAQIEEAVFGTFTADLEDLSDWLRKHRVRQVAMESTGVYRMPVWNVLESAGRFELLLVNPATVRALQGHKTDRVDAQRIAEYLQYGLLRASFIPPKPIRQLRELTRMRAHVQHDRNRVINRIGSLLETVNIKLGAVATQIAGKSARAMLRRLAEGAASPGQLAELAMTTLRSKRAELVLALDGRPDEHFRWMLKGLLRKLDDLDAEVAAIDARLSEQMLPHEEQIRRLDTIPGVDRTTAQVLIAELGTDMSQFPDAAHVASWAGLCPGNKESAGKRFSGRTNKGNRYIRRILVQSAWGASRKRNCFLASLFFRISRRHGRKKAAVAVAHRILIVAWSMLRNGVDYQERGGGSEDQLRPERTARRLVSRLERIGFQVTVTRASQPKAALQKEKVAQPKQTTVPPGKCRKCSQWGLADCIHVRPKGVQIRQERPASSTTDSIT

SEQ ID NO: 466026 - protein, 322 aa, unidentified
MSQDGEMLVHRNMQAAPEPFLKAIAPYRDGLVVAVACIFTWYWLADLCAQEGLPFVLGHALSRKAMHGGKAKNDKIDSQKIATLLRGGMLPKAYVYPAEMRATRDWLRRRTHLMRKRAELLAHVQNTKAPYNLPEIGKKIAYKANRAGVAERFDDPAVQKTIEVDLALLTYDDQMRSNLELFMLKTAKHHDAQTLYLLQTVPGIGKILRLVLLYEMHQIDRFPRVQDFASYCRLVKCAKASGGKRLGTSGHKIGNAHLTWAFSEAATLFLRGNEPGQKYLARLEKKHDKGKALSILAHKLARAVYGMLKRKTAFDLEQFLRT

SEQ ID NO: 466027 - protein, 342 aa, unidentified
MAQTVSVLGIDIAKLVFHVVGMNDRGQVVLRKRLARSELLHFIATLPPALMGMEACGSAHYWARRFREHGHDVRLIAPHFVRPYVKSPKNDARDAEAICEAVTRPTMRFVPIKRVEQQDLQALHRVRERLIKARTALVNEIRGLLHEYGIVLPQGITKFRRLIVERLEAEQAQLTPCSRELFQQLYEEFLALETRLESYDVKLATMGQAHPECQRLQTIPGIGPVSATALLAAIGDATQFKNGRQLAAWLGLVPREHSTGGKPRLLGISKRGDVYLRTLLVHGARTTLRWIETKSDERSRWLKALIARRGKNRAAVALANKNARIVWALLVHHQEYRVRTAA

SEQ ID NO: 466028 - protein, 331 aa, unidentified
MFPVGIDVSKNTLDLCMLYDGIKGRIKTRKIQNNRHSVENILRWLRLQHCGPEDVHVVMEATGVYHEQLATELHDAGFRVSLANPHRSREFARGMGIMTKTDKVDAYMLACYAFLKKPHRWEPPAPEIRYLGALLRRRDVLLGDALREENRLEKYLSTDTPADIISSCRRMAQLLREEVSNIERQIKAHIKASPALRRDYTLLSSIKSVGPQQGMHMLVVLRSHNFVSAEQAAAFLGVVPIEKRSGTSVRRRPRMSKIGPPQLRAKLYMSALCGKIYNKRMRNIYDEMCLRGKPKMVAIGALMRKLVHWCYGVLKTGTVFNDESLKPVLST

SEQ ID NO: 466029 - protein, 345 aa, unidentified
MKKSTTIAIDLAKHSFQVCKLQGSSDEFNKAFTRDKLKAWLIQQPPTTVVMEACSTAHYWGRFCCNHGHSVRLIAPKYVTAYRTGQKTDKNDATAIAVASQQANARFVALKSIDEQALQSIDRIRQHLTDSMTATSNMVRSLLSEFGFNIPKGHSAFKRHIIEILEDGQNSLPDILREHVANAFHLHETLAKKRADLETSLTQHLKHHDACKKLEALEGVGPVNALGLYLSLGANGGNFKNGREASACIGLTPKQHSTGGRVTLLGISKKVGQKKLRSSLIQGALAVAKVVDKREPRNAKETWLKLLIQRAGLMKAAVALANKTTRTAWALLHYGSEYQAPLTYE

SEQ ID NO: 466030 - protein, 353 aa, unidentified
MSSKYNYKGKTIYIGLDVHKNTYSVVTIYDNEVVKKDRITASPEGLVTYINKYFAGACVYSAYEAGFSGFHLHRYLIKGGINNIVVHPSAIEISARDKVKTDKRDALKIATQLSDRRLKSIHVPSEAREAKRTVTRLRSTLMRDRHRINNRMKALFFQYGLINAYDDTRISKRWISKILKELKQNNYAKDFYYTLGNYTKQWLDITERIKEIDKHLVEQAKSESGLDMIYRSVPGVGALTARILANELGDMSQFSSEKKLFSFTGLTPSERSSGEIKRLGHISRQSRSVLRQILVEASWIAIRYDHSLKKIYENIAKRAGGKRAIVGIARRLIARIRACLLTGELYKIRTGEI

SEQ ID NO: 466031 - protein, 348 aa, unidentified
MPMLAERVDGVIGVDTHCDTLTAAAVTNLGGVLAHTTTSADAAGYQRLLGFAHHHLPGRRCWAVEGTGSFGAGLAGFLHQHGERVVEVGRPKRPASRSGAKSDTLDAVRAAREALGQDHLATPRRRGQREALRVLLTTRRCATRARVAAIGQLKALIIGAPEELRAELRGRSTASQIDYCARLRARSTRSLEHQATVRALRATAQRIQALDAEADQLQAELAVLVQALAPWLLEVPGVGPLSAAQVLVSWSHAGRFRSEAAFAALAGTNPIPASSGQVTRYRLNRGGDRQANAPLHRIVLVRLRWHQPTKDYMARRLKQGKSKREVIRCLIGRVSGRGPHRSRAVTAR

SEQ ID NO: 466032 - protein, 394 aa, unidentified
MGKDRHHVCIRDLSKDMYCKTFSITNGRSGFMELIAALEKLSPKKSDFLIGVEACSYALNLSYFLMAIGFDLVEVNPFRAGQFRKAQGKKAKTDKIDARTIAAILLLGDHKPLSIPDPILDNLKELTRFRVDLINEKSTMIIHLREALSVLFPEYEKVFRQLDSAGSLALLAAYPGPEHMIGAGEEAVGKTLSLASPRRMSRGMARRIIEAAKRTVGVVQKQPSLGVKISVLAKTIADLQSTIRDLDKQITTLFNSLPCKPRGFPVGRAPSLATIISEIGDIHRYPTLKKFLSHLGWCPQSFQTGNYHLKHPKMSHAGNKYVRRLIWMLSIFAIQFVPRYREYFQRRVSEGKAKMHIIVAVGRKLLSALYAMLKSGMAYDPNWEVNSRPALARR

SEQ ID NO: 466033 - protein, 412 aa, unidentified
MKKIKEVRLLISVGVDVSKGKSTVCILKPYGEVIMSPNDYEHTLSDLKKLADQMDSFEDEIHVTMEATGNYHFPIATYLKERDYDVRIINPLEMKRYRCQGIRNPKTDSIDAFMIAQYGIDFWFRPFQDYVVGDERIELKTLGMQYFKTMKTRQDRYLVLESVIDRALPGIGGVLNGYDKSTGKDKKSDFVYDFYHAKKITVYSENRFCDRYESWSTKKGYRYSEKEARQLYSIAKDSIPTLTSSENTKLMVQDAVKILREVDTALHDILIRMNEIAKCLPEYTTVMDMKGVGVSIGPRLIAEIGDPRRFHSAKALIAFAGIDAPPYQSGKFTGTERHMSKRGSRVMRKIGFELMDTINKHQKLYAGDPVCEYFLAKRAEGKKYRVAMFAAFNKFLRIYHSRVSAVLNENVK

SEQ ID NO: 466034 - protein, 370 aa, unidentified
MKKNITETPKKNRQSRSQLTGSLTVGIDLGDRSSRYCILNQEGEVVAASAVATTKKDLSRVFGALRPSRLALEVGTHSPWVSRHLKALGHEVIVANPRRTRLIAESSNKEDRLDAETLARLARVDPKMLFPIRHRGEAAQADLAMIRARAALVEARTRLINTARGLTKSFGERLRACDAGYVDGRLAQDLPAALREAIEPLLEQAAELSARIRQYDERIQQMARKQYPESALLTAVAGVGVLIALTFILTLEDPHRFPKSRAVGAYLGMKPRRRQSGGRDPELGISKEGDVYLRKLLVQGAHVILGRNGSDSDLRRFGQRLISRGGKGAKKKARVAVARKLAVLLHHLWVTGEVYEAVHRKPAQPVPTAA

SEQ ID NO: 466035 - protein, 406 aa, unidentified
MDILYERCCGIDVHKRIIVACLKCGKQQEIREFGTTTDEIRTLTKWLQDSDCQMIAMESTGSYWKPLYNIFELSALDAMVVNARDMKNVPGRKTDVKDAEWIADLLQHGLLRASYIPSREQRELRELSRYRKSLIEERARELNRLQKMLEGGNIKLASVVSDINGRSARNLLSRMLKHDTPLTKDEVSGMIHGRLRHKVEAIMKAVDGFLTPLQKQLMLKVVDHIDDMTKRIGEMDELMNQYLTEYHEAVHKLDEMPGIGRQSAETILAEIGLDMSRFPTERHFSSWAGLAPGNNESAKKRRNGRTTKGNITLKTTLIQCAKAAVKKADSFLSAQYQRIVVRRGANRATVAVAHTMLISIYHMLKDNVPFVDLGAAYYNKFNVQSKINHHIKKLKQLGWEPNDATI

SEQ ID NO: 466036 - protein, 360 aa, unidentified
MAKFSLSSLQAFVSGFEQQPFWIGIDVHKRSYYIALKRSDGQSTTWVAPASPQKFAEQILHLGICVAAVAYETGPTGFSLARSLEQAGIPVIVAAASRIPRSVTAGAKCDRLDCLKLADYAAKGMLKPIAVPTPEEEARRSLIRRRHNLVDAVRRCKQRIKSMLLFLGLSEPVAVTNWTKDAQKALQELDLEPLTRLTLESYMRELTFHQTELCTVATQLKEMVTSSESCQSVAYLQTVPGVGSTVATSFALELFRPDRFRRAEEVASYLGLAPVVRHSGGKTPSGRLVPVGQKRLRSLLIEAAWMWKARDAAAADLYNRLVSRTGIAQKAIVAVARRLAIVLWRLMVEQRPYRMAIVTP

SEQ ID NO: 466037 - protein, 282 aa, unidentified
MLEGKIDHVIGVDTHRDSHTAAILDPNGGLVAELTVTSNQAGSEALLGVVAQRAPGRRCWALEGTGSYGAGLASFLADQGEWVTEIDRPKRPRGRNGAKSDPLDAIRAGREALGRDHLASPRQRGHREALRVLQLTRSGAVKVAADSRRQLKALLVTAPEPLRAALCGGTWLAQARACAVLTAEASDPVEYRATVRALRLTAERALAAHAEAKQLAEELQMLVAVMAPALLAQPGVGPITGAQVLISWSHPGRLRSEAAFAMLAGVAPIPASSGRVVRHRLM

SEQ ID NO: 466038 - protein, 342 aa, unidentified
MSHYVGIDVSLKESSICVVDEKGKIVREAKVLSEPDALVQFFSELGLPLTQIGLEAGPLSQWLHAGMIKAGLPVVLLETRHVKAALSAMIVKTDRKDARGIAQLLRMGWYRPVHCKSLPAQEVRALLAGRKLLQSKLLDVELSIRGLLRGFGLKMGHVSKGRFAARVEGLITGHAMLEQVIGAMLVAREALRAEFNRLHRAVLAIAKKDPICQRLMTAQGVGALTAITYKSAVDDPTRFAKSKAVGAHFGMTQKKYQSGETEINGSISKVGDATVRTVLFEAANALLTRSQRFSSLKRWGLNVAKHRGMKRAKVAVARKLAVILHRMWVDETDFRWGQEQAA

SEQ ID NO: 466039 - protein, 348 aa, unidentified
MLYLGQDVHSKWTTVKGFDPETGETVEIVRVSNDKQSLQETFANLPGPLYGVMESGTNSWAVYRTLKPYFERLIVVDPATVWGRQGRRGAKTDRRDAYKLALKMYRGELEPLYVPDEKTQDQRALGRGKVNASRRVTKLVNEIGSLLRSWGIIVDCSLLSKKGEALIEDARPKLKKHSLKVLQLLLKELELAREVEDELEKDVEAEAAEDEECQRLMSIPDVGPLTALVVKSEVGDIQRFASFDQLICYSGLCPTVSQSSEKTYYGKLNKACNRYLKYVLVLRAQGMARSKKENPMRQTYWRVIIKGKNHAKIAVARQLVRVMWRMLKDKQWWDASKIDERRSRSKAA

SEQ ID NO: 466040 - protein, 350 aa, unidentified
MAMPTMADEEVRVTVGIDTHGEVHMAAVLDERGRLMAIEGFPTTTGGHRRLEQWACGFGVVEAIGIEGTGAWGAGVARHLTAQGYQVLEVDRPDRKTRRLRGKSDPIDAEAAARAVQAGTATGTPKTRVGQVESIRVLRVARRSAMKSRSQAALQLHCLVSTAPDELREGLRTLKLAELIETCARLRPGPLVDPVQATKAALRSIARRFLALTAEIAELDGALVPLVEATAPNLLALNGVGTDVAGQLLVTAGDNPGRLRSEAAFSHLCGASPIPASSGRTDRHRLNRGGDRQANAALYRVVLCRLRWDPRTIAYVDRRTKSGLTKPEIIRCLKRYIAREVYRELLRLPT

SEQ ID NO: 466041 - protein, 392 aa, unidentified
MYIIGIDIGKNHHEASIVSPEGKQIGRSLRFATTHKGADSLMSFIFKNIGNSPCVFGMEATGHYWYPIYSFLKAKGYTIYVINPIQSDSLRKMYIRQTKNDSIDSFLIAEVIRFGQFGTTSMADENILAMRQLCRYRDSVISSRTEIKLRIGTIMEQIFPEYEKQFSSLWVSTSMGILEKYLTPENIENAPIDELFEIIKDKSHNRLTRAKAISIKEAAADTFGIKIAQDAFSFQLKQLIDRMNFLDKQIEALDIEIMKYYEQFDCYLHTIPGIGIIGAATILAEIGDISRFKNSSALVAFAGIDPTVRQSGEFNSTHNHMSKRGSPYLRHAIFLAATTCSFHNSPLNAYYKKKRDQGKHHLTATGAVARKLTTVIYAVLRDSKPYEPKKFC

SEQ ID NO: 466042 - protein, 343 aa, unidentified
MLHYVGLDVSLKQTSICVVNETGSVVREGVVDSDPDAIAAFVRLNAPGMVRVGLETGPTATWLWTELKRQGLPVICIDARHAKAVLKMQINKSDRNDAAGIARIMQIGWFKEVRVKDIESHLVKALLVSRALLVKIKRDLENQVRGLLKNLGFVIGRAKFNVFSGRAEELIEDRPELIAIVAPLLKARKAIEQQIDDLDRKVLKLARHDPEVRRFMTVPGVGPITALCFKATIDNPARFKRSRSVGAYIGLTTRRHASGEIDWSGRISKCGDAMLRSYLFEAAGVLLTRVPKWSALKAWGMRLAKRNGLRKAKVAVARKLAVILHRMWIDKSEFNWSKKEVAA

SEQ ID NO: 466043 - protein, 392 aa, unidentified
MVVSVGIDVSKDKHDCFIVSSEGEVLADVFTISNTMDGFNCLLQRIQNCTTPQDKMKVGLEATGHYSYNLLGFLLDNGLTTYVLNPLRTNLYRKSLSLRKTKTDRVDARTIASMLLSDAGLKPYTDTAYHNEELKSLTRYRFDKVKERAKLKSSIARLVCILFPELEKLVPSLHIASVYALLEEFPGAKQIAAAHLTRLKALLETASKGRYKRDMALEIRDAARNSIGARIPAKSLELQHTIRLIRELDAEIHEIETEIETMMDEIHSPITTIPGIGYRMGAMILAEAGDLSRFDSPDKLLAYAGMSPSTYQSGQLKNCYPHMEKRGSRYLRYALYNATKYVCLWDPTFAAYLAKKRAEGKHYNVAISHAAKKLVRLIFAMEKSKQPYCSAA

SEQ ID NO: 466044 - protein, 475 aa, unidentified
MKMTAIAKENKNRSLICCIGCLIIQKPLSNRWPLLAKRVAQERSGAANYNEQILCEAATLREASLTLVFSSSVVVGRDISKKVSHESEEFCMIDYRSQLTKSFTNSQEIVMLYSGIDLHRRSIVICTVNDSGTIVERRNMKTHPELVRAYFQQWPGNEHRAVVECTTGWYWLCDLLHSLGVDIVLAHAKYLKAISYAKVKTDAVDAETLAQLLRMGYIPEAHQLPPEYRAMRDLLRQRMVMEHKRKNIIQRIASILAQFNVTTITFSPSDPRFSTFLETCSLPTEYRMTLLMYHRQCIEATEHRKQLEKYFKARLRPTLTLQLLMSIPGLGEITGAIIAMETGDIHRFADAKHYCSYCRLVPGAKDSGGKHAHRSGSKDGNKYLKYAFIETAIKAMMYYPEIKEFAACLEQRSTKAIARTVVAKELAKIVFYVLTKEQEFKTFKGIAIEKLRDWPRARKPVRITEEELASAMSVV

SEQ ID NO: 466045 - protein, 318 aa, unidentified
MSDSIFIGIDVSRDTLEIGSSAQPTSWRHANDTEGIASLAAQLQTLGPALVVLEATGGYEFEAAVALQAIGLAVAVVNPRQARDFARALGALAKTDSLDARMLAEFARVLHQHPERERFIKPLADAELQRLQALVLRRRQLVGMLTSERLRLRLAHASARPSIERMIEFVKAQLDDIEGECARHIGAHHAALAHALGSVKGVGPATIATLLAELPELGSLCRRRIAALVGVAPLNRDSGLMRGKRTIWGGRADVRKALYMATLVAVRRSPAFKAFYERLVKAGKPKKVALIAAMRKLLTVLNAIARSGSRWDDSLHIT

SEQ ID NO: 466046 - protein, 322 aa, unidentified
MSSELPQDHPSVVIGIDVAKDKLDVHAWPTQQTLQVPNTPAGIDSLVAGLARLRVSLIVIEATGRYERRVAFELMSQGYEVAIVNPRQPRDFAKASGQLAKTDAIDAKVLAQFGALIGPRKSEKPSENQVLLDELVTRRRQLVEMITAERHRMEHMFDKRLRGSIKNHLDSLADHRDHVEKQIADLIERDDDWRDRLTVLKSVPGVGAATAATLIAELPELGRLNRQQIAALVGVAPMNRDSGTMRGQRHIAGGRKSVRDMLYMATLTARSHNPLIKAMAARLSRAGKPFKVMMTACMRKLLTMLNVMIRSKQPWRSPTCPA

SEQ ID NO: 466047 - protein, 346 aa, unidentified
MNSDDPRYKLYLGVDTHLELHVATLINELGQVVKSEAFSANLSGYRKLLAWCKSYGFLQKSGVEGTGSYGAELTKFLIKNGIDVYEVMRPNRMERRLKGKTDVLDSENAARSVLSGEAKVIPKSHTGPVESLRSLLVTRNSAVKARTQAMNQIRALLVSGPDELKQSLYLPKPGACATACLIRCSNSSEPLMLSLVLLAQRWSFLNEQIKALEKVLKKLTLNTAQSLVSRFGVGANVAATLLVAAGDNANRLRKESSFAALCGVNPIPASSGKTTRHRLNRGGCRSANNALWTVAMVRMRSDPRTKDYVTRRTAEGLSTKEITRNLKRYIARELFPLILKDLARLA

SEQ ID NO: 466048 - protein, 334 aa, unidentified
MDNVALIGIDLGKHSFHIHCQDKSGKALLRKKFTRTKLMQFLATCSPSVVVMEACAGAHFMARHISDCGHEAKLISPQFVRPFVKSNKNDFADAEAICEAASRPSMRFVQPRTEVQQAMRALHRVRESLIRDKVKTTNQIHGFLLEFGISLPIGDAVIKRLSLVLAEHKIPEYLSRLLMKLHAHYLYLVEQITELESELNQSIKADAAAQRIMTIPGVGPITASLLSSQLGDGKQFSCSRDFAASTGLVPRQYSTGGKSTLLGISKRGDKNLRRLLVQCARSFMMRLEHQQSRLADWVRGQLSNKHSNVVACALANKLARIAWAITTNHNEYQA

SEQ ID NO: 466049 - protein, 357 aa, unidentified
MADLETTVIGGVDCHLDTHHAVALDTHGRRLGDQSFPTTSHGYHQLLAWLQHFGHVHAVGVESTASYGAGLTRYLVGAGLTVIEVNQPHRQVRRRRGKTDALDAEGAARSVLAGEATAVPKDTTGGVEAIRQLRLARASAVKARTAALTQLGEVIATAPAALRERLSGPASLHARATRCARLRADQARLQLPLESAKFVLRSLSQRILALDAEIARFDAHLATLVASVAPRTTALLGVGTLTAAQLLITIGQNAARIGDEAAFAHLCGVAPIPASSGKTNRHRLNIGGDRQANAALYLIAVCRLRYCERTRAYAARRTHAGRSKRDTLRCLKRYIAREVFHTLRADLAALTAQPAPA

SEQ ID NO: 466050 - protein, 357 aa, unidentified
MGKSIQKLSSVTRVGLDLAKRVFQVHAVDAKGAIVVARKLTRSQLIPFFAELPRCVVAMEACPSAHHWGRQLLALGFEVRLIPPAHVKPYVRRNKNDAVDAAAICEAAGRPGQRFVPVRSIENQAELMRHRARELLAGQRTAALNALRGHLAEIGIVAPQGAQHAYDLKRLAIDGFDEYGEVVVPDCVRVALRPLVSQIDALDEAIGAIDKEIAMSVKADETAKRLMTVPGVGPVTASAIIATIQDIGDFASGREFAAFLGLTPRQSSTGGKPRLGRITKMGDRYLRKLLVVGACATLRHRQGHNDALRLWASGMLERKTVKYKFKLTAVALANKVARIVFVLMTRGGQYDDRPVAA

SEQ ID NO: 466051 - protein, 358 aa, unidentified
MLEDADRERTIAMQVIIGIDTHQEQHVAVAIDRRGVRLEERYTPATTCGYRELERWSRNLGTIHAFGIEGTGSYGAGIARFLTSRDYSVVEVNRPDRSTRYRKGKSDPTDAEMAARAVLAGVADAIPKSGQGEVEMIRMLKSAKDSAVKARTQAINQMKALIVTAPARLRETLDGLSVSALSTRCRSFRIHGLSDPMSAAKYALRSLACRYRQLSEEIRNLKAELARLVGIASPTLLNILGVGPDTAATLLITAGSNPERLRSEAAFAALCGVSPIPASSGKTNRHRLNRGGDRQANAALHRIVVVRLRCDHRSKEYMRRRTGEGMSKLEVMRCLKRYVAREIFSTLQTPAGFVSSPA

SEQ ID NO: 466052 - protein, 452 aa, unidentified
MAQGSGLTRGDRNRNRKIGAVREVVRRDRAVLAVDLGEDKQAAVLVDHEGRVLARKTVKAKAHGLGGLLAWAADKAVAAGFAGLTVACEPTGHRWKALMGLADAAGAGFVCVQSLAVARSREGDDYTRDKTDHRDAYLIGKLVIRLDCYLPERADETWARLRHLGARRFALVGDVISCTQQVSDLLACAWPAALGTAARPLESTTWLAAMGVITDRCCGDPARLRKTGYEKFLAAVRRELPRWAASRVYHKIARALWDALADRGGVAAQRRGVLERVHLLMADWRSLLARLAEVEGRMCAVLEELGLTALVRSIDGLSAVGAAVILAETGDLSRFASARAVVKHAGLNPAENTSATLAGATRISRRGRPGLRTAAWRAVWAGMRHNRVLRARYAHLTGRAGGNRLSDGQARAACAAALLRWLYAVVTRRQAWDARIAAGTIPAAAVTAPAAA

SEQ ID NO: 466053 - protein, 401 aa, unidentified
MYSSFVGIDIDKWNHQAAFLEVSGKETARSLAFQNTSEGFQSLSESLAPFDKGQTVIGLEATGHYWLALFSFLVDNGWTVKVINPMQSDALRNMNIRKAKTDRKDCVVIADVLRFGRYTETVLPDEDLLQLRELSRCRVAHVELLGDLKRRALGILDRIFPEFASCFSTVFGAAPTELLQECTDPEELADYDVDKLIKLLEKESRGRHSREKAEELKAKASRSVGTRFGRDALKFELKMLLEQLDFIKGQVKELDKFLKKLMKNHELIYTIPGISVTLGSAILGEIGDVKRFGTPQQLQAFAGMDPSVTQSGNFQGTQGKMSKRGSPYLRRAVYLAANAARRFDPVFKEFYDRMIARGKHPKQALAAVGTKLLRVIHAVMTSQKPYNPQKLLPPSARISPN

SEQ ID NO: 466054 - protein, 420 aa, unidentified
MEHATPFAALIGLDWSDQKHDLCLVDTTSGSRELSVIKHTPESLNEWARSLRARFDGAPVALCLEQSRGSLIYALLKYDFLILYPVNPQTLAKFREAFTPSRAKNDPSDAEFLVELLSHHRERLKAWQPDDERTRTLHLLVEHRRRLVGDQTRISNRLTALLKGYFPQVLEWFPDIRTDMVCDFLLRWSSLDALKGVRRATLEKFMRLHNSQRKGTLEVRLNAITEAVPLTTDKAVINSSVVMVRALASQMKTTLAAVKEFDREIEALCCAHEDFELFSSLPGAGKVYASRLLTAMGSNRERWATAAELLCFSGVAPVIERSGKSSWTRWRYFCPKFTRQAFVEYAGESIRHSEWAQAFYVAQKEKGKSHQAAVRALAYKWIRVIWKCWQTREKYDEARYVECLRKKGSKLVGEVTSAEA

SEQ ID NO: 466055 - protein, 471 aa, unidentified
MLIVAAGVVADIGLQPRVRRRVWREDPGGPRTVATSTNPSIRFAWSSPAASNPYMGGEAVKRIRERVAGLDVHRDTVVACCQVKQPDRSIEVTKQTFATTANGLGQLAAWLSDTGVQTVAMEATGVYWKPVYYCLEGLFDELWLCNAQHVKNVPGRKTDLSDAEWLADVAAHGMVRPSFVPPPEIRELRDVTRYRKTQVEARAKEIQRLEKTLQDAGIKLSSVASKVWSQSSREMIEAMIDGERDPAVLAQMAKSRLRAKIPQLEEAFSGRFGSHHALVCHQVIEHIDFLDRSIATLTADVTERLCPFESAVTILCSIPGVSRTTAEVMISEMGVDMTRFPTSGHLCAWAGVAPASHESAGKRHPAGTRKGSTWLQRALVEAARGASRTKGTYLSAQYSRLARRRGSNKATIAVAHSILDVSWHLLTNGALYDDPGARFFELRHDPAVEAKRLQRRIEDLGFEVSIAPAAA

SEQ ID NO: 466056 - protein, 334 aa, unidentified
MKKEIIKQNVGLDVSKDDVKAAFSILTIDHHVEVCSTRTFSNTCKGFQQLQEWLNGKTRATHPVHFTMEATGVYYEKLAYFLYERGFSLHVVLPNHAKKYAQSLGIKSKTDKLDARSLAQMGLERELRLWQPISPALLELKQLTRERDALVRNRTSSSNLLHAYRHQGKPNKDSITRSIKHIAFLDKQVKQIEKEISDFVNRDKQLKNRMEYLLSIPGVGLLTAATIVAETNGFAAFENIKQVTGYAGLDIRIAESGKWKGKSKISKRGNSHIRKALYMPSLSKIRHNRETKQFYERLKEKKGIGMVAAIAVERKLLGLMFSLWKKEEMYGHAC

SEQ ID NO: 466057 - protein, 328 aa, unidentified
MTDLRPLGLDIAKSKFNACLIRESGKLRHTSFANSPAGFAQLSAWLAKLGAGTAHACMEATGTYYEALAAYLHGEGHTVSVVNPAAVKAYAQSRLSRTKNDRVDAELIAGFCAERRPPAWQPPAPELRELQALVRRLDSLVEMRTMEENRFSSGVTVAAVRASLEESLAHLTRQIEKAEALIRSHIDRHPGLKRQRELLDSIPGIGETTAAALLAEVPDIKQYRSARQVAAFAGLVPRERQSGSSVRGRVRLSKVGNARLRKALYFPAITALRCSPFFQSWAEGLRQRGKSKMAVIGAAMRKLVHLAYGVLKSGKPFDPEWTQKAKNA

SEQ ID NO: 466058 - protein, 355 aa, unidentified
MSQEKYIGMDVHQATISVAVMESGGKLIMECILETKAATIIEFIRGLRGPLSVTFEEGTSAAWLHDLLKPHVSKIVVCDPRKNALLTDGSKSDRIDARKLAELLRGNQLRPVYHGDHGLRTLRELGRSYLTLTQDLTRVMSRIKALYRSWAIPCSGTTVYGARHRSEWLAKIPEPGVRLRTERFYQQLDLLRSLHGEARRDFVAESHKYPAVKLLRQIPFIGPIRSALLVALLQTPHRFRTKRQLWAYSGFAVETHDSGEYRYVRGKLLRNRERISVRGLSDNYNRDLKNLFKSTAISASTRPGPLRDFYLALLAKGMRPTMARLTLARKIAAITLTIWKKGVDFDAKQLDQQAA

SEQ ID NO: 466059 - protein, 407 aa, unidentified
MEVIFARCAGLDVHKQTVVACVRIAEGGAPRQEVQTFPTTTSGLLSLADWLESFGVRQVGMEATGVYWKPVWHILEGHFELVLANAAHVKNVPGRKTDVNDAMWLADLLAHGLIRPSFVPPVPVQELRSLTRTRKQFVRERSAHIQRIEKVLEDANLKLGVVLSDILGKSGRAVLDAIVAGQTDPERLLACVSQRVKAPRADVLEALRGHIRSHHRFMLKLHLDHIDALDRAIATIEKEVGSGLEPFRAAARLITTMPGMSDVASHVVIAEIGIDMSRFETPGHLLSWACLCPRNDESAGKRRSTRLRRGGHWLKTTLVQSAWSAVRVKGGYLQAQFHRIRARRGAKKAIIAVAASMLTAIWHMLRDGTEWQDLGAAHFDRADAQKTANRLIRRLQQIGVKVQVATA

SEQ ID NO: 466060 - protein, 363 aa, unidentified
MEETKQRYVGIDLGKRTYEIAIVDSNGKVTMSNGKTTMEGRLNLYKKIKARDKVALEAGNLAFKMVKELEKMVRCEIRVLNPSHLPLIYGTMKKTDKEDALKLAHIIEDYKEERLPVVAVPSDEEMKRRKMVGSYRREQRARNQAINRLHSLFLTQGITDVVKSDLATREARTETAKALSGLEGEEANHLLECLRLYEERIEVLEGHIEKEAEGDKEIARLQTVPGVGPKVSFAFVAHVAPERFENAGQVSNYIGLVPSVYMSGDTVKYGRITKRGNRYLRALLVQASWALIRSKAGGCLKERYEYMTVEKGISKKKAIVAIARRLSELLYTLMRNGTTYELRKFKHGNAIEGKQLAQLAISV

SEQ ID NO: 466061 - protein, 403 aa, unidentified
MSKCFAGLDWASQTHAACVIDERGTVVVQFEIKHDAAGLAELCRRLRSAGATAVAIERPSGLIVDALLEAGFTVVPIHPNVVKATRPRYRSHGGKSDASDAYLLADLLRTDGHRFKPLAPQSDDIRALRARVRGRDDLVATRVQLANQLRSLLESFWPGATEVFADVDSPIGLAFIQRYPTPESASRLGPKRMAAFCAQHAYSGRRSAEELLARLHQAPAVTLGELEMQAKGELALSLARTLSRLVEQIRLLSSRIEHHVGSIEDGRILMSFPRAGRVCAAQILSELGSVRERFDSDEHLAAEAGVAPVTYASGKSKAVTLRWACKHRLRAALTCLADNSRHANAWAASVYAKAKARGCDHPHAIRILARAWLRVIWRAWTDRKPYDPAMHGGAQLLLKTAGG

SEQ ID NO: 466062 - protein, 466 aa, unidentified
MTEVRLGIDVACRADHQASLADETGGLVWSGWRFRTTPTDLERLWAKIPAGSDVVVVMEPTRNAWVPLAGWLRARGVRVVMVPPEQSADLRAYYNKHTKTDRLDSRVLARLLLLHPEGLGEIDDLGPAEPLKRAVRHRSSLQKRRTSAMLRLDALIELLGPIWADVLGAGDYNKTALAVLERYADPRALKRLGRKRLTALLIRTSRGHFREKKADQLLAAADETLELWAAGGLDFAELAEDIAAEVRVIKSLELELEAIEDRIDVLYDETDPKGIVVSVPGLGVTLAAGILGRTGDLNRFSNLAGVRSFTGIVPKIDQSGLTDRHKGLTKAGDPGLRQALYLAADQARKVDPTLAARYHRLVVHQGKHHVSAVCSISSVLITRIAACWRNGEHYVLRDIDGTEITETEGRAICADRYKIDPAVRAARRRTNTAKQLKQRASQRKKESTKAAPASDSPTDNPTEKVA

SEQ ID NO: 466063 - protein, 309 aa, unidentified
MKIHPGFVGIDISKDFLDVFDSSIGVVHRIDNRPEAIGRLMANLAGSDVFVLFEATGRYDQALRQALGRAGIAFARVNPARARDFARSIGLLAKTDAIDARMLAAMAQCLRPGADNAADPAREQLAELHKRRDQLVACRKQERTRIAATSADLLDELTQHIAWLDHAIRRIDVRIAELIGKQEGLQKAQRLMRSVPGIGPVCATTLLALMPELGSRSSKAIAALAGLAPFNADSGRMRGTRHIHGGRRRVREALYMAAVAVTRTTSRFARIYRALRDAGKPAKLALIAVARRLLVTLNAVVRDQQPFHQ

SEQ ID NO: 466064 - protein, 336 aa, unidentified
MEIIKNKVCGADIHKKFLVATILSRDGTQISERFGMMFDDILKFKEWVIANNCEQVAVESTGVYWVPIYTVLEDKIEVIVANPYQIKHTPGRKTDKVDSEWIAELCLKGMIEPSRIFPKEDRELRTLTRARENLVNNRTQIKNRIHQILEYSCIKTSSVLSDIFGKSGRYLLDSLLEGKTIDEILIGTKSKTIRKKEQQLREAIKNSLDPAQILVIRYYLEQMEETQKKIDNLDTEIMNRIKSKKEDVEIAMSIPGIAFTSASSILAEIGNYRDFANGNKLAAWCGLVPSIYESANKRITGSITKQGSKHVRRMLVQVAHAISRTRNSRLKPAFGR

SEQ ID NO: 466065 - protein, 321 aa, unidentified
MIKKCNYVGIDISKLSFDVALKNEKEKYSHYKFSNDLKGFKALLKLIKSSQSICVMEASGPYYLNLATYLNKQEIGVCVINPLIIRRFCQMRMMRAKTDKKDAQMIAEYGKTETPSQWNPEADYVLELKQMQAFVEQLNKNRTGFIRQKEAFSFNSAPSSLVIKGLCKMIKSIEKEIQLIEEKMEILIKIEHQNLFNQLQSIPGIGRKTALALIVLSGGFTKFENAKQLCSYVGLSPRIFESGTSVKGRSKICKMGMSRIRAMLYVCSWTAKKYNKACIELYDRLVEKGKPKKVALIAVVNKLLKQAFALATKNEFYLEIN

SEQ ID NO: 466066 - protein, 447 aa, unidentified
MRQPGKGIRLECIEPNAAGIDVGATEVYVAVPPESDSEPVRCFKTFTEDLRQMAAWLRQCRISTVAMESTGVYWLPPYEILEQAGIRVCLVNSKHVKHVPGRKSDVQDCQWLQYLHSVGLLHASFRPDEKICAIRSLSRHRASLIEIAAVHVQHMHKALTQMNLQIHHVLSDITGISGMAIVEAIVAGERSPVKLAALCHQGVRSDRETVIKSLVGNYRSEHLFTLNQSLTAYRHYQELLAACDREIEQLTRQLNGKINPDQDPPSTAPRPHKRRKNQFYCDMGSELQRVLGVDLTCIPGISALTAHTLLAEIDPDLSRFPNVAAFASWLALCPTNKKSGGKVLSAKTRQSNSRASRALRIAAQTLARSRSHLGNFYRRMRARLGAPQAITATAHKLARIVYRLITTGQAYDESVFGSEVNKQAQRREKHLRKQAKNLGFQLVPIAP

SEQ ID NO: 466067 - protein, 261 aa, unidentified
MLIIGCDYHPSFPQIAYVDNESGEFGKRRLDQPEEAEQFYGELKQRNLAVRVGMEASGHARWFERLLRELEFELWIGDAAEIRTKRVRKQKTDHQDAQLLLRLLTGDRFPRIWVPDAENRDLRQLLWHRHRLVQMRTRVMNQLHVVALNEGLQRKKALWRPAGRKEMESLALAPWAGRRRQDLLELLDQLTPQIQKLTQALELEVEKRAVARRLKTHPGVGPLTALAFELVIGTPDRFHCGKQIASYVGLVPEENSSGNRR

SEQ ID NO: 466068 - protein, 428 aa, unidentified
MNGNDSTNTNHKPDPSAEPPQAWIGLDWGDQKHSFALQERSGQVQTGTLEHSAENLHRWLKELEQRFGGRPVRLGIETSRNAVVAALLHYPWLEIYPINPVTSARYRRAFTPSGAKDDLPDALVCLELVRDHAAKLRPLQPQDPQTLKLTGLVQARRDMVDRRTALLNQLTSLLKNYYPQALSLLENLNSPMAVAFLKRWPDLISLKAAKAATVKRFFYQHNVRSEELVKERLELIAQAVALTTDEARVSVAVLQLHEQVDQLEVFQKHVGRLDDEIQSAFVAHPEASLFRDLPGAGRQLAPRLCAAFGTDRSVYPDPASLQKYAGLAPVREKSSNQLWTHWRWNAPAFLRQSFVEWAGQTVRYSQWARVYYERMAKKGKKHAVIMRALAFKWIRILWKCWQQRIAYDEARYLKQLIHRKSPNAVTVQ

SEQ ID NO: 466069 - protein, 317 aa, unidentified
MQIIGIDISKSWFDAHIHATGKKARFKNTPEGWQTFKSWAVQPFHAVMEASGPYYMSLACWLSEQKLAASVVNPLVIRRFSQMKFIRAKTDAKDAALIAEYAALNMPERWTPPAPFVRQLRQLMACQRQIVQMRTQVRNQAEAFAQDYGTSDWQRQFTEEQLADLARQLEKVEARIQAIADQHYSHTLRCLRTIPGIGPKAALLLSVLTENFTRFDDSRQLCGYVGLCPRIYESGSSIRGKGAICKVGHAAIRQVLYMCSWSAKKYNKACAQMYKRMAAKGKPERVIKIALAHKLLRQAFYVGKHGVPYDEKKALAT

SEQ ID NO: 466070 - protein, 390 aa, unidentified
MRYFIGIDVAKFKHTACVIDTDGIALVEPFDFTNDIIGFQSLLKNIKPFLKKKHLVGMEDTGHYGDNLRNFLLEKQYKVVMLNPIVTSHIRKASNKAKNDRIDCFVIANTMMNPNFYRDQQVQSIDYATIRQLTRMHHTHTEEINRYKCQLQKSIDIVFPEFNSLLNTKYSKTYLEILDTYRGAYTIANTDIRLLRNTLKNVGVGRSVSISAEQLKKSAKESIGQHNLAIEMDIPFLISLIRRLTSILGEIDKKIEEFSHQLNSPILDISGISHFSAMSIISELGDITYFSNEKKLIKFAGVNPCVYESGTYSMTHTRLEKKESKYLRKTLYQIIDSVIRFNPIFQAFYQKKISQGKSYRCAQGHCIRKLLRVIYKIISTGEGFDSAKLK

SEQ ID NO: 466071 - protein, 323 aa, unidentified
MNERTDMNTIPAILPVVHIGVDVAKTELVADLAGSICRFANHPKGIAALLRAATRCATNVCLVCEATAGYEQLMATACFKAGVPICIVPPQRPRHFARALGLHAKSDPVDAALLSRFGSQTGPVPVRPKDRSRQELESLMRARGELIDSLARENSRHEHHAHPLALKLAKARIVALKKDIAFIDKAAAAVIAADPLLAQADALLRQVTGVSHQSSRALLAFMPELGTLNRREIAALAGLAPYDRDSGNKQGKRFIQGGRKRVRSTLHMAGTSAARFNKVLAPAYRKLREAGKPFKVAITAITRKLLVHLNSIMAEFLKNQVAA

SEQ ID NO: 466072 - protein, 386 aa, unidentified
MQRNDLSRSLVAFEQDSTLVAVVELSLKRWLIAGLVPGIAREPLKKQDADPDALLKLLHRWRDEALKAGKSITRIVVAFEAGRDGFWLARWLRARQIEAYVIHPSSVPVSREHRRAKTDRIDTQLLMRSFLGWLRGERKHCSMAAIPTVAEEDARRPNREHQRLREESTALISRMKSTLVRFGIRNFNVKLIKASERLEALPGPEGAPLPPNTLGEMRRDMARLRLVREQMKIIEKTRLERLVKAPREGTSPMVLMLARVLGIGIETADMLVHEVLMRNLRDRRALARYAGITGAPDESGNKRREKGLARGGNARVRRGIVQLAWRWLMFQKDSALAQWFRKRTASARGDIRKTMIVALARKLLIALWRYLATGEVPHGVIVRPAQ

SEQ ID NO: 466073 - protein, 343 aa, unidentified
MRTITTIGLDIAKSVFQVHGVDAVGQVVIRRQLKRRYVLAFFQKLPSCLIGMEACASSHHWSRELEALGHTVRLMPPAYVKPYVKRHKNDATDAEAICEAVTRPNMRFVATKAPAQQSCLTLHRTRHLFIRQQTSVINAIRAHLAEFGIVAPVGRHGVEQLLSVAADANDKRLPEVARACVTALGAQLRMLKAQILEFDRMINAWHRSSEASRRLDDIPGVGPALATALIASIADPKAFRSGRDFSAWIGLVPKQNSSGGKDRLGNISKRGDRYLRSLFMTGALAVIRYAKIHGTRRRPWLTALLARRPTKVAAIALANKIARMAWAMMARGERYREPAALAA

SEQ ID NO: 466074 - protein, 378 aa, unidentified
MEHDSTVYVGLDVHKESITVAYAVGMGDVELLGRIGTAKGDIDRLCKRLRSKGRQVHVVYEAGPCGYGLYRQLVEEGFECMVCAPSLIPRKPGERVKTDRRDSVKLARALRAGDLSAVYVPGIEDEAFRDLARAWVTAKDDLKQARQRLKSFLLSHGVRYPGKADWGSSYRRWISQHSFSNEWQQLAFEEHRHTLADRMAQCERLEAALRDAVVDWRFYPAVLGLQAMRGVQFTTAVGMLAEVGDLSRFEHPRQLMGWLGVTPSEHSSGDKRRQGGITKTGNSYARKLLIEAAWSYRHQARVSENIERRHAGLPKRIIDRAWDAQVRLCRRYRKLAARGKNANIAVVAVARELAGFIWDITRMSMALAVPRTELTART

SEQ ID NO: 466075 - protein, 460 aa, unidentified
MNQYFLGIDASKGYSDFVMLNAKKQPVIENFQLDDTFDGHARLYELLGSFSQAHPEATIYAAVESTGGYENNWFQSLLKSQGSLPIKTAHLNPLGVNYNHKADLKRNVTDKISAQNVAEYMIAHPEKVSYQHQDALASLRKQWGFITMLTKQSTQMLNQLESLVYNANPEILTYCKDGSPQWVLKLLTRYPTALRLSKAKAKSVARIPYVSKDRAQQLVTTAKKSVASADDEVTEQLIIATVKQILDLNSTIKAQTKILTDKCSVPEVELLKTFIGISDYSAIGLMLEIQCVNRFLSSKKIASFFGIHPAYKKSGDGTWKYRMSKKGRKEPRRILFMVAMSAIKSNPLIRSIYQQAVARGMEKKVAVGLCMHKILRIIYGMLKHNKAFDPEIDRKNRQKKPLRQRKVRQDKDRRYQNFDSKAPISRRQKMKRKERKQSQNVNNVECGISEASVPATELTN

SEQ ID NO: 466076 - protein, 338 aa, unidentified
MAILTVGIDLAKNVFAVHGINEAGKAELVRPAVARDKLHEVIAELPPCTIGMEACTGAHHWARLFLDCGHTVRLVAPKFVTPYRMSGKRGKNDAADAAAICEAVQRPHMRFVPIKSLDQQSKLMVHRARQGFVEQRTATLNRIRGLLSEFGIVLPLKANTVRRRACECLEDLPGYANTVIGDLLSEVTRLDERIAQYDHHIQTIARQDARAKQLMQLSGVGATTATCLLAMIGNGRDFDCGRQFAAWLGLAPGQYSSGGKTRLGRITKAGDAYLRSLLVLGARALLAAAKGKTDAVSRWATALAERRGYWKAVVAIAAKNARMAWAVLHRGEAFVLPA

SEQ ID NO: 466077 - protein, 414 aa, unidentified
MEQIHERVAGLDVHRDSVVACFRQLGPRAGVVREKERFTTTTAGLRVLEAWLADRRVQLVAMEATGVYWKPVLYALEGRFTVWLCNARHVKKLPGRKTDLTDAEWLADVAAHGMVRPSFVPPLPIRELRELTRYRKTQIDARAAEKQRLEKVLQDAGIKLTSVASRVLTQSGRSMIEALADGERDPARLAELAKGKMRPKVPALTEALAGHFGSHHAVACRRILAHLDFLDDTIGALTEQIDARTASFEAVYKSLLPVPGFDRLTIDVIIAETGADMTRFPTAADLASWTGVCPGSYESAGKRRNVSTTAGNQWLRRALIESARAAARTKGSYFGAQYRQITRRRGPNKAAVAVAHSLIELVWHLLSTGEVFNDLGDDYFKTRQDPGRQARRLLAQLEDLGYTVTVTAPPAITA

SEQ ID NO: 466078 - protein, 340 aa, unidentified
MLYVGLDVHKEFCQASILNEKGFEEDNLRFPTTRRGLESFLDRFEDASFVLESTGVWEFVYEIIEEKGFPVKLAHPLKVRAIAEASVKTDKVDARTLAKLLRLDMVPESYIPPKEIRDLRRLTRLRSYLTQTNTGLKNRTHAELLTRGIHRPDDLVKPFTQKSNDWMRSLDIPGVDVQLNMIEAVQGQISLVNEMIRREYDRREEVRNLTSIPGIGIYSALVILAEIGDVRRFPDPEHLCSYAGLTPTVSQSASSVHYGGISKEGSKQLRWILTEVVHSHHRFEPSSNLSRFYDKIARKRGKQKAAMAAARKLLHIIYWMMLTGETYHSHGFNPVLKPAA

SEQ ID NO: 466079 - protein, 381 aa, unidentified
MTTAATHNEPGTTTEATLFVAFELSEKTWKLGFTTGHGQKPRERTVTARYQERVLDEIAQAKRRLGLPETAPVVSCYEAGREGFWLHRFLQGHGITTHVVDSSAIEVNRRRRRAKSDGLDVRKLLSMLIRYEHGERQVWQVVKVPSVEAEDQRHLHRDLETLKQERASTTTRIQGLLSSQGIRLTSLTKLPEQLDALRLWDGSPIPPGLRRRVLRVYAHHTFLSEQIAAVEAERRAQLQASTDACIDKVRQLMQLKGIGINGAWLLVMEFFGWRAFKNRREVGGLAGFTPTPYQSGESAREQGITKSGNRHVRWMTTELAWSWLRFQPDSALSVWFRARFGGGGKRLRRIGIVAVARKLLIALWRFLETGVLPEGAVLKEA

SEQ ID NO: 466080 - protein, 429 aa, unidentified
MNYNTQNAKIASITEKTLIVGIDVGSETHYARAFDWRNYEYSKKPFAFNNDEAGFAAFKAWMEDMADKHGKEAVIPGMEPTGHYWLNLGAYLQEQGMKPVHVNPHHVKKSKELDDNNPNKNDRKDPKTIAGLVNEGRFSYPYIPTGIYAEIRNLSNLRIQTQEELTRIKNRIARWFSIYFPEIKDVYKNPDAVSGMMVIKKAPLPCDIKELGVDGVNQVWRDAKLKGAGLKRARTLVSAAEHSIGSTEAPGSARIEIRNLLNDYEVYKNRMDDLMREIEAKLSEIPYIDKLMEINGIGLKTVSCFIAEVGDIRRFDNPKQLQKLAGYAIVADSSGKHNGESRISHRGRKRLRYALYEAAISVIGKNKEFREIHDYYRTRKQNPLKKMQSVIAIACKLIRIFYTILTKGVDYDGQKMLSDIVSPETIMAA

SEQ ID NO: 466081 - protein, 375 aa, unidentified
MSKIRFLGLDVHADTIAVSVAEPDGEVRPLGIIPNRLESVRKVVAKLGPVNQLKACYEAGPTGYVLYWQLTSLGVACEVVAPSLVPVKAGDRVKTDRRDAAKLARSYRAGDLTPVWVPDAAHEALRDLVRTREDAKQDQLRARHRLNKFLLRHDRRPPEAVKKSWTQKYMTWIKEQVHFDQPALEATLLDYVHEVDHMAERIQRLEKSIDIAIEKAPPEMRAVIAALQALRGVAKITAVSIVAEVGRLSRFEKPRQLMGYSGLVSSEFSSGNRIQRGGITKTGNAHLRRVIMEAAWAYQRRPWVGGALLKRQHGVEQEIKDLAWKAQWRLYHRYCKLAARGKNKNQIVTAVGRELLGFIWAIAVRIEGRAAACAA

SEQ ID NO: 466082 - protein, 416 aa, unidentified
MNAVGIDVSSRKSTVAVLRPLGEVVCLPFDVTHDIAGLASLAEKLKALDGETRVVMEHTGRYYEAVEKALHEAGLFVCAVNPLLIKEYGANSLRRVKTDKADAVKIARYALDNWADLRDFTPMDAIRYDLKTLNRQFQLASKQRTASANNLIALLEQSFPGIRKCFDSPVRSDGTQKWVDFAHSFWHVDCVRKQPFAAFCERYRKWCKRHAYLFKQSNAEEVYALAKRAVVLTPKSKVVKVLVQEAANQLISISRSVEVYRAEMDRLAAMLPEYPVVMAMYGVGKSYGPQLMAEIGDVRRFERKQALIAFAGIDPMPNQSGDKNVRSNKSSKRGSPYLRKTLFNVIRTYLQCAPQDEPVFQFLNRKRAEGKPFYVYMLAAANKFLRRYYAKLRDYFASLDTLQPVAPIPTILKATL

SEQ ID NO: 466083 - protein, 391 aa, unidentified
MQVTADRPAAPSAIRSDLGAIFVSLELSRSIWLITSLSPGGGEKMSKHSMPAGDICALLTRFLELKQKAFARTGNSFPVIVIQEAGLDGFWIHRVLQKEEIESHVVDPASIATSRRRRRAKTDRIDGEALLRTLLAYKRGEPRVCAMVRVPTPEEEDRRRLSRERKVLIAERVEHVNRIKGLLFAQGISGYEPLRRDRRQRLDELVTGDGRTLPTHLKTQISRELDRLELLLDHIKVVETTRDALLAEQQAAAPPTAGRMLLDFKGIGPEFASILWLEALFRHFDNRRQVASYAGLAPTPWQSGSVDRDQGVSKAGNPRLRATLVELAWIWLRHQPQSALALWFKERVNRNGGRMKKTAIVALARKLLVALWKYVTAGVVIEGAIMKAQIP

SEQ ID NO: 466084 - protein, 413 aa, unidentified
MKEKVYVGMDLAKGSSKVAVVDGEGNSLLRPFSITNSKDGIKEVLSKLHSYKTGQILFGMEISSNYWENMYSYLKEKDILCILLNPYQVKKYRQAIGSKIKTDAIDATSIAELIRGRRYGSIYISDEVVLELRELVRIKLSFGRRVKDLKKSVLSLLYVVFPEYTKIVSYPFSKVSMDILTRFPTAVHMAKDASVSKLVKIFRRYQGCNYSVDKAKELIAIAKDSFYSGRAYRSRGMTISMQIEEIASLSGKIKQIENEIKSILTPDDPGGGLSSFGILNSIKGVGIGTIAAFLAAVGDVSRFSSSDKLISYIGFYPRIFESGKYRRKSPTIQKAGPKELRYMLYLASVASIKHNSQLKKYYYDKVSAGMPAKKALIKVAVKLARMMYSMLKHKTCYDSSRVFLQSLPLKDAA

SEQ ID NO: 466085 - protein, 277 aa, unidentified
MELHTIGIDLGKTVSHLVGLNLRGEVVVRKKFSRLQLLRLTANRQVQLIGMEACGGSHFLGRALREQGHEVRLIPAQYVKPYVKTNKSDYIDAEAIAEAVGRPTMRFVPIKTDDQLDLQSLHRVRERWVMRRTAVVNQIRGLLLERGITLRKGRCHLDAALPGILEDGTSKLSGAVRLLLAQLKLELDQLAIRLEEADALVQKTAQQSEVCRRLDAIPGIGPLTATALVAAIGNGAAFRKGREFAAWIGLVPREHSTGGKQKLLGISKRTNPAGPAS

SEQ ID NO: 466086 - protein, 323 aa, unidentified
MTRTICGIDVSSQSLDARIGQEGAYAQFSNTTEGITALASFCRTHLVDLVAMEATGGYEQRPLALLSEQGLAVAILNPRAVRQFAQSMGQFEKTDRLDAGIIAYFAETKKSQPVCLSSATQKQLRALVTRLRQLTDVRTAQKNQSRLVTDPVIVSHFKELLDVIDKQIKELEISIAAMLAADPLWHQLDQAFRTIKGVAGRTVARLMAEMPEIGSVSNKTVSKLAGVAPLANDSGKHQGQRAVRGGRASVREILFIVASVVGRYEPDFIAFQERLSAAGKPRKVIRIALAHKLLVRLNAKARDVRQRLENLQPNPVDLAAVSI

SEQ ID NO: 466087 - protein, 459 aa, unidentified
MTLLERLGPLPRRYYLGVDVGYKEHVAVVISLKTFVRGDERWKRARCLHFPSTRGGLRKLQRYLDRFSTDPGEFLGLCEPTGGHYGATVFQYLLDQDYNMNLVENATTRHMREKIFAGLPKTDEMETRVMARIGYLHEAVGEEFTLRPLELPDPDDTHLLALCRDSWKLSTMITRARNQFTQLMAVTFPELKTFFTSSVSTVVPVSLMAAYPTPALLAEAPEGKVREVLWKAGGYQHAHRVAELQALAHDSSGLLPDPGRAWRLEWLTDFLLANFRHQAALDRRIKKVVGQRDGYDLIVNVPYSGPATLGVILAVTGDVNRFSNYRKYVAYTGYFAGLEKSQTIDRTRMSHRGNRDMKRALFQISAPLVWFDKGDNPYKELFQRKIAEGREWYKAMPFVCAALARHIYHCLKFNDPYDVEKAFKDSSLFPASEKGRLNLGANLDQKFEAMEAHLCQMEG

SEQ ID NO: 466088 - protein, 372 aa, unidentified
MYYNTIYVGMDVHKSSFTLCSYTIEAEKASHFQRTEVDYKKVLKYLEFLRTVYGDDARFVCGYEAGCLGYTLYHQLTEHHVECVILAPTTMLEQRSRKRIKTDKRDAEVIARCLTQHNYSAVHIPTATDEETKEYLRMRNDHKLALKRIKQQILAFCLRHGHIYGGKSNWTISHLKWLKELELNSMHREILDEYLLTYTTLTDKLERLDSRIEEIASKPEYNESVKKLSCFIGIKTHTALSTLVEVGDFHRFAAASKFASYLGLVPGEDSSGDDQTRLGITKAGNRHLRLLLTEAAQCYARGQIGYKSKALKARQSGNPPEIIAYADKANERLRRKYYKMVLQERKTHNVAKTAITRELVCFIWGMMTDRIA

SEQ ID NO: 466089 - protein, 318 aa, unidentified
MDKDVYVGIDVSKTELVVAVRPSSESFTLAYHRAGLKQLVGRLGELKPKLVVVEATGGLQRQVVAALWTGGIAVAAVNPSWVRSYARGGGLLAKTDRIDARLLALFAQREQPVPRPPLDAETQALQELATRRDQLLEMRVAEQQRLKRSSAQVRKELRQHIAYLEGRITQIDDDIDKTVRRSEAWRRKSEVLRSFPGVGKVFCTTVLSKLPELGTLSGKAAAALVGIAPFPDDSGARRGRRVIRGGRYPVRSKLYMCALSAIRFNPLLKQFYERLLARGKLEKVALVAVMRRIIVILNAMLKTNTTWRQPCAVAVDKN

SEQ ID NO: 466090 - protein, 345 aa, unidentified
MNKISVIGLDLAKNVFQVHGIDIDDEVVVYKQLRRSEMRKYFAKLTPCLIGMEACGGAHFWSRELTRLGHTVRMMAPAFVKPYLKSNKNDRNDAEAICEAVQRPSMRFVQPKLPEQQAVLHLHHGRQLLVRQRVALSNHMRGVLSEYGIVVPQGVKVLSRQLPEILEDAENTLPMLARHLLAELKAEHDQLIERVGRFEKQLKVWHANSTVSQRLASIPGIGVLTATALAATVGEGQDFKNGRQLAAYLGLVPRQASSGGKDRLLGISKRGDGYLRSLLIHGARAVIHHIRRRLKAGRPGGNPWVEQLLLRCHVNEAAVALANKMARTAWVLLVRNESYCPARPV

SEQ ID NO: 466091 - protein, 363 aa, unidentified
MKIMVGIDLHSNNALCGLMDESGRRLIHKQLPCDLAAILQMLKPYKKRIATIAVESTYNWYWLVDGLQDHGYHVVLANPARMQPYSGKKHTDDVSDAYFLAELLRLNLLPTGHLYDRKTRPVRDLLRRRLLLVRQRTTLILSFKSLNERALGQRVPLARVKTMSAGDAQARFSEPADQLLASEQITLMDHHTDSITKLEQHILGVVGEWSTYQRLQELPGIGKILGLTIALETGDAKRFADSGNFASYCRCVKSLRQSNHKKKGENNRKCGNKYLAWAFVEAAHFACRYDDQCRRFYDRKKQQTNPVIATKSLACKLAKAAWHVMAQDVPYDAVRVFGPGKKKDFGETGREPANGSGQPSQQD

SEQ ID NO: 466092 - protein, 475 aa, unidentified
MPAGQQVEVDEHEEIVGRVAAIDVAKASGMVCTRVPHATKAGRRVTRVWQVPSTTNQILELAEQLAGEGIERVVVESTSDYWRPFVYVLEARGLVVWLVNARDVKHLPGRPKTDKLDAVWLCKLNERGMLRPSFVPPAQIRRLRDYTRLRADLTADRTRHKQRLEKLLEDALIKLGTVATDIFGVSGRAMLEALIAGQRDPKVLAELARGRLRVKHAALVQALTGRFDDHHAELARMLLDQIDTLGGQIDQLTARIEQTITAIPAAQPPAPATGPGGDAAATLHAGIESAESVPGHPNSDGVDPETGELLAAPLPVVDRLDEVAGIGHHAAQVIIAEVGLDMGQFPTPAHLVSWARLSPRTIQSGTRHRAGATGKGNPYLKSVLGEAATAAAKTDTFLGERYRRLVRRIGKRKALVAVARSILVIVWHLLADPTARFHDLGADYHASRIDRDRKTRNLVHQLQALGHKVTLQPAA

SEQ ID NO: 466093 - protein, 345 aa, unidentified
MSPRHEEEEARMRLYCGIDLHSNNVFVVVLDEHDRVVQRCRLPNDLAVILPALEPHRAGLVGIAVESTFNWYWLVDGLMDAGHRVHLANPAAMQRYSGLKHVDDPSDACWLAHMLRIGVLPEGYIYPREQRGLRDLLRRRTCLVQQRTAMMLSLGNQVQRSTGKRPSVRRLEEMDLEPIGDANVTLAAEATRRILECVTAEVERLEKEVWRQLRADPLFGLLNSVAGVGKILAPTIRLETGEIGRFAEAGHYVSYCRCVGSRHISNGKTKGQGNTKNGNPYLAWAWLEAAHFAIRYYPAVRRFYERKQARTHRIVALKAVAHKLARAGYYVMRDRVPFRIELAFG

SEQ ID NO: 466094 - protein, 491 aa, unidentified
MKKGRKSTFERLAGKSLNRKQRRQLQQRFDSPEPGLELIHRNAAGIDVGNTSHFVAVPEGRDPEPVQEFGCWTADLVRMCQWLQACGIETVVMQATGVYWIPLYDQLQQHGFAVVVANAQHTKNVPGRKSDVREARWLRQLHSYGLLANGFQLEGEMEKVRTVWRLRDRHVKEAGRAVQHMQKALTKMNVQLANVISDLSGVSGQAILGAILEGERDPYRLADLRHERVRASREEVARSLEGNWREDVVFELRQAVEQYQFAQRQMQGCDEQLKQYLSALPSALPRPRRKEEGGSGSDSETARPAKKATRGNAPSFDVRGELQRIAGVDLTSIEGINVMTAQTILSEVGVDLSRFASENHFVSWLGLTPSHDISGGKVIGRGRRKVQNRVAMSLRMAASTLRNSPSYLGARYRYLCRKLPSKASAVKAMARYLGILVYRMLTKGPEWVDRGAAAYEQKRGDAELASLSKRAAAKGYGLVPKAGFQPSAIQV

SEQ ID NO: 466095 - protein, 317 aa, unidentified
MEQDKPTTKIAGIDVSKLKLDVAVHGQDAISQVTNTPAGFTELGPWLRSHRVTRVGLEATGGYERAVVAWLQAEGFEVVVHQPLEVRLFARLKRRKAKSDRIDAYLIAAATAQVDGVKAASDPLLVELAERMTAYEQASDQLAQLKTFLEHVTLPDLEAGYAAQIRQVREWKRGLLRDLLKRIKARPDLARRYQLLLSLPGPGPVTAASLVIRMPELGKLEQGQAAALIGVAPFDRDSGQYKGQRHIWGGRARPRRMLYLAALAAKRCDPASRAFAERLVKAGKPPKVAITAVMRKLIEAANIVLKRGTPWVIQTAA

SEQ ID NO: 466096 - protein, 421 aa, unidentified
MSKVIVGMDPHKNSATIEVMAGDEVVVGGGRYGTDAAGYAAMLASVRRWPDRIWAIEGCRGIGRHLASRLVAGGEQVVDVPPKLSARTRVFTAGQGRKTDATDAHSVALAATRMRGLHLVTDDAQLEVLRVLADRRRALGEDHTRMICQLHRLLLELIPGGAKRSLSAAQARALLARIRPRDLAGQARRRVAAELIADLERVHQRKKAADKELAAALKATGTTLMQLEGIGPSGAARLLVEVADITRFPDRGHFASWNGTAPIDASSGDHVRHRLSRAGNRQINRVLHIMAVVQLRHPSKGRAYYDRKVAAGKTPMEAMRALKRRLSDVVFRQMAADARAARTGPGGHTGAATSSSAAGSDPDAGSSDKSLPGPATSDPTPASHPIPPVTPAASNRRRTAAAVKRAVLDGGEDRRTLAGRE

SEQ ID NO: 466097 - protein, 320 aa, unidentified
MPVLGIDISKADFHCCLLDGTKRAQASFPNRRAGFNKAISWVRRHGAKDVAVCMEATGAYWRGVAMALYDAKMTVSVVNPSRTAFFARSQLRRTKTDRVDAHMLAEFCQTQKPHPWTPEPPEILELRGLRTYRRHLVEERATLKQMVSQVRVNKALKAAHAAQLRATENTLKTVDHEISELVKRHKSLAEDVARVSSIKGIGPVAATAIVALLPVQRLPNGKAAGAYAGATPRERQSGTSVHGKPRICKTGNSELRRDLYMAAIAARRFNPVFKAFGDRLEAKGKPPKVVFVAILRKLVVLAYTLLKNKTTFDPAIGAKA

SEQ ID NO: 466098 - protein, 419 aa, unidentified
MSFKILKFNCCGLDVHKTWIYACIGITDSNNRTEYKQARFSSFTKGLNELCDWLAKYNCKDVCMESTGKYWIPVFNILEQHEIWVTLSHPKYTKPMKGNKTDRKDAKWICDLYMCGMVKPSFIPPADIRALRDLVRYRFKLTCMITSEKNRAQNCLTVSNLKLDDVFSDVFGKSSRSITEQILQHPGEKFDVSPFVDGRCKTPIEEIQAAVDGAISKEQAVKLRQCLDHIDELQKHISEVEREILRLSDKYEAALNLIRTVPGFDKNPMTAIQVLSEIGGNMSVFPTAKHLVSWAGCCPRNDKSDRKIKSTRISRAGSYFKPVLVQVANALIKSNKHPEFTTRYKRIKTRRGHKKAIIAICRMILTAIWHILTDLTPYTPEGFLESHPVNKEKVLTISQALNLLKQRGYLIKNDPSPVS

SEQ ID NO: 466099 - protein, 406 aa, unidentified
MDILCKRCCGLDVHKRTITGCIITPEGKAIATFGTMTKDLQALVAWIKEKGCTHVAMESTGVYWIPVYNLLETENLEVIIANANHIKNVPGRKTDVSDAEWIADLLRHGLLKGSFIPPREQRELRELTRYRRSLIGEHTREVNRIQKVLEGCNLKLSSVVSRITGTTASLILKALIHGEIDPEVLASFAKGRLVRKKRQLMEALNGFIGPHQQKLLAIQIDHLEYLEKQITALDEEIAERLRPFEDDLTRLDTIPGVGRRNAEDILAEIGPDMDLFPSAQHLSSWAGMAPGNHQSAGKWKSGRTTKGNRYLRATLCESAQAIGRMKPNFLSQQFHRIAARRGRKRAAIAVGHSILVICYHLLKRKTSYVELGASFYDQRKEESIVRQVLKRLESLGYAVSLEKVGA

SEQ ID NO: 466100 - protein, 372 aa, unidentified
MTSIIYIGMDVHTTNYTLCCYTVDSDDAFAVVNVKPDYHEILKYMERVRSTRGGNCDFICGYEAGCLGYSLYHQLAKHGVACIILAPSTMPQQKGKSIKTDKRDAKNIAKCLAFNLYSPVYVPTAEDDAIKEYIRMRDDVKADLKRTKQQIISFCTRHGFHYEGKSRWTQAYFKWLDSLVFENALYKETLQEYLALYYTLYEKIAVYDARIEELAHQKRYEENVRKLCCFKGVSTHTALPLLVEVGDFHRFRTAQHFSAYLGLVPGESSSGEKVIHTNITKAGNSHLRTLLVESANSYSRGVVGKKSKVMKDKQGGNSPEIIAYADKANERLHRKFYKIAIRSKKNVAKTAIARELSCFVWGMMTNHISRAV

SEQ ID NO: 466101 - protein, 341 aa, unidentified
MEQVSVIGLDLAKNVFQVHGADERGRCVIRKSLRRTQVYAFFAKLSKCTVGMEACSSSHYWGRVITDCGHEVKLIPPQYVKPYVKTNKNDAADAEAICEAVSRPHMRFVELKTPDQQSILLIHRERDGLMRDRTALINRLRATLGEFGIAVPSGPARLKQWFRDSYGINEDQLPVLMQRHIERMRARWVELERCIGELDREIDQHVQHNSACQRLLEVPGIGRLTASALVATVGNALAFKNGRQLSAWLGLVPRQHSSGGKTVLRGISKRGDAYLRRMLVHGARAVLRHSATKKNAVSNWLHALSVRANKNVVIVAMANKLARIAWALLNKGQRYIEPAAE

SEQ ID NO: 466102 - protein, 343 aa, unidentified
MKLFVGLDVSLEKTTICVISEHGKIVKEAQAASEPEALTRWIGQLDGTIAAIGLEAGPMSQWLHRGLTGAGLDVVLMETRQVKGALKAMPIKTDRRDAEGIARLLHLGWFRPVHCKSVSAQEVRAVLGARKAVQQGFIALEMSLRGLLRNFGLKVGTISRGRFEQRIRELTMGNPMLEAATEPMLRARLSLRQELAGLERRVRHLAQEDPACRRMMSMPGVGAVVALTYRSAVDDPGRFTSSKKVGPWVGLTPSRNQSGERDVSGGITKAGDVNLRRALCQAATVMMHRGRSTWLRTWAAKVARRRGSKRAMVALARRISVILHRMWVEDNDFHADGPIPHAA

SEQ ID NO: 466103 - protein, 352 aa, unidentified
MWHCGIDYHKKYSTACVLDGNGDILREERLEHEDDGRLIACFFNGMSEPCEVVFEATQNWVWLYDVLEPLRMVSGIHLANPYQTRVIAAARIKTDKLDARKLAKLLRGGLIPEVHIPGPVTRADKLVLRQRMFMVRLRTRMRNRIHKILARQHGLEMPQVSDLFGAKGVAALRAAKLGDPDRQMLDDALAVLKTLDEQIKKEEKLIKERMGDSDMMKLLSSMPGFGPILGGVVAAEIDDIGRFLDARKLCAYAGIVPSTYSSGGKTTHGRTLKACNKWMKWAIVEAAWVAVGHSAYFGGLYRSHVARGKTKTRAIIIVARRMCQIIWRILKEQRPYEDRPLQRNSPAAPRQF

SEQ ID NO: 466104 - protein, 400 aa, unidentified
MRAVFGIDVSKASSEVAILVNGEKVHGYTISNDAIGFSRLLGDLRTVHKPEIIFEAKGVYSRRLQTFLDEHGYAYTRLNPLEAKKQLDSLRVRKTDQIDAEKLAQSQFVLNRKTTYVQEEVYQNLRDLSRFYQNLTEDIVRAKNRLHKALQVTFPELENILSTPTGEQYWNLVIAFPCKDFVLELSKDKLSESIRQSTSKRISDKRVAYLAEKLIALANQSYCAVKKTSPMLEEVRYYTKELLRLSEQRQAVLDEMVELAQPLPEYDILLSIPGIAETTATSIIGELGDIRRFQSANQINAFIGIDLRHYESGNFLAKEHITKRGNPYARKILFKCIHNIASASHTNPCHIADFYEKRKRQSQTTSTKPHTIASIHRLIRTMYYLIMHNKLYDYASTQNR

SEQ ID NO: 466105 - protein, 391 aa, unidentified
MDRAWAGIDAGKEMHWVHVLDVSGEKLLSRKVKNDEADLSALIDEVLSLAEEVVWAIDQPGGGATLLLGLLWQREQRVLYVPGLTVDRSRDTYPGESKTDARDAHVIADQARMRPGLQELTAGQEELAELEILLSRRRDLVTDQSRCVTRLRETLLSAFPALERALDLNRRGALTFISHYQRPAQIRRAGRKRLAAYLRNRSVQGAEDIADKALEAPTAQSVTLPAEEVAARIVAELAEEILSLKDRIDTLDEELEQRFFALPEARVLASLPGMGPILGAEFLVAVGVLSAFASADQLAAYAGLVPAAHDSGKRVGNHRRMRGGNKVLKRVFYQSAFASLRSAPESRAFYDRKRREGKKHTQALIALARRRVNVLWAMLRDGTTFEDRSAA

SEQ ID NO: 466106 - protein, 344 aa, unidentified
MKQYVGLDVSQRETAVCVVSETGQLIFEGKAKSDPGDLTKLLRKHAPLAERIGFETGAMASWLWHELRRVELPVVCIDARHAHAALSVRMNKSDQNDARGLAELVRVGWYREVKVKSEESQKIRAILVARARLVSMRRDIENQVRSLIKEYGLLFPRAIGQQFRNTVSDLLGEDHQLLVVVAPLLSIHEHISRQQSEFDDQVRRLAKQDETTRRLMTVPGVGVITALTFRHTIDDPSRFRSASLVGAYLGLTPRRKQSGETDTSGKISRWGDRLLRTYFVRGGDRSALSDQEVVLPQGLGDEACKADRHEEGEGRHRAQDSRHSPLHLGRRYIVRLGSRQVDLI

SEQ ID NO: 466107 - protein, 394 aa, unidentified
MCQQYKTEASMIKHNILFIGLDTHKTFTEVAYIEDQRGKKPIHLGKILSNKAAFKKLARQLQSKYPDATLHFVYEAGPCGYWIYRLLTSLHHCCYVIAPSLIPKKPGERIKTDKRDALKLAKLLKSEDLTPIYVPEPEDEAVRDLSRSRETAMKDLKDAKYQLKALLLRNNINCKVKDNWSLQHLRWLAELVLPHPCQQIVLQEAVSTITERLKRLKRLDNELTHQVKNWRYYPVVKAVQALRGVRLLVATGVIAELGDLTRFDHPRKLMSYLGLVPSEHSSGSKRHLGAITKCGNSRARRLLVEGAHSYKHNANISKEMQLRQEGLSKEIINMAWQAQLRLCKRYNRLMHKGKHRNVVVTAIAREMIAYIWAISREVVLPKVDVKLRISRMPA

SEQ ID NO: 466108 - protein, 310 aa, unidentified
MDHLFVGLDVAKDHLDGHVRPSGEDFVVTHDEAGLTQLVARLRAIGPTLVVLEATGGYGATVAATLASASLPVAVVNPRQIRDFARATGMLAKTDTLDARVIARFGEAVRPAVRPLPTEHAERLGELVARRRQLVEMLGAETNRRHQTRDRGLRRRIDAHITWLERALRDLETDLHDTIRSSPAWRETENLLTSVPGVGPITASTLIAELPELGRLDRRQIAALVGVAPFNQDSGTLRGRRMIRGGRSPVRRVLYMATLVATRHNPALAAFYQRLRASGHPTKVALIAALRKLLTILNAILRDRRPWQPA

SEQ ID NO: 466109 - protein, 396 aa, unidentified
MKKISTVAAQPSRNLSQAQLTIGLDLGDRSSWYCVLDEAGAIVLEQKLGTTPKAMKEVFGAIASSRMALETGMHSPWVSRVLSELGHEVIVAHARNVRLIGESRRKDDRIDAQTLARLARIDPQLLCPVQHRSARAQADLTVIRARAGLVRARTALVNTTRGLAKSYGERLRGCNVRNMNPEKAQGLSPELRTALEPLLAGIESLSERIRECNEGIERLARESYPQVAQLKQVKGVGTLIALTFLLTLEDAHRFRKSRDVGCYLGLQPGRRNSGQSEPQMHISKERSVSANFAGAGSAPHSGAVWSRQRSAPLGFEAGRARRQEREETSHHCSGAKAGRLVASPVGERRGLRTVAQSQANSDAGGCIKPRTLFERKSQSLKPSSGDCVNRLAQLSS

SEQ ID NO: 466110 - protein, 345 aa, unidentified
MTSVSTIGLDIAKSVFQVHGVDTAGQVVVRQRLARRRVLAFFEKLAPCLVGIEACSTSHYWARELIARGHEVRVIPAQYVKPYVKRGKNDAADAEAICEAVTRPAMRFVPVKTPEQQSVMMLHRVRLMLNRQRTQLSNAIRAHLSEFGIVAAIGRRGLDQLLAIVLDEEDTRVPAEARLCLKMLAAQLAVVKAQILENDRHVRASARATDLGRRLMEVPGVGPLLASALTATISDPAAFKTGRNLAAWIGLVPKQNSSGGKERLGSISKAGNRYLRQMLVVGSMAVIRYAERHGTRTPWLVQLMQRRSTKVAAVALANKTARIIWALMTSGKRYREPTVAGALAA

SEQ ID NO: 466111 - protein, 478 aa, unidentified
MNSKDRKAKNQANINKSVNVLSQEELGRRIAAVEADMKASTWKDLEVGGKFDKNAKLTFISDDMLIVGCDIGSETHYMRAIDTRGRELSKDAFSFSNNAEGFSSAKAWAMQIAAEHDKKQIVLGLEPTGHYWFCLAAWMITNGISVVQVNPYAVKQTKELEDNSQLKDDRKDPKLIANLVKDGNYGMPYLPEDVYAELRRLSMLRDQLTEDRIRYVNRLHREMKIYFPEYMDAFGKLDGVFTLMILKKAPFPADILELGADGLREIWSEAKLRGRGYSRAEHIVKFASESVGLKHGTGGSKEAVRCFVEQILYLTAKLDEIEENLHQKCREIPYAENLLEIEGIGENILAGILAEMGDVRRFDDVKEIQKLSGLGLVACSSGKHKGETKISHRGRKRLRYWLFQAARSAVSHAEEFKTLHVYYTTRSDNPLKKMQSLIVIACKILRVIFAILRTGQKYDPAKMLRDIKHPSVAAVQAA

SEQ ID NO: 466112 - protein, 349 aa, unidentified
MSEAYDGPQVVGMDLHRRRSVLVRMTADGRKLETARIANSPAGLRGVIARAGKRPKVVLEATYGWYWAADTLAAAGAQVHLAHPLGVKAFSYRRVKNDEKDAADLADLLRMGRLPEAWIAPAEIRELRELTRYRIKVVRLRTSCKDQVHAVLAKLGIEVTCSDIFGVAGSAWLDGLELPQPYAGKVASLRTLAAELTAEITLLEAAIADLLAHHDGYHAVQALPGIGAVLAAVLVAEIGDITRFSCPARLCSWAGLTPRHRESDTKVSRGHITKQGSPLVRWALVEAIQHVPAGHPLRQRKEDILARRGDQAKHIAKIAVARQLLTWVFYAMRDGQVRALAPATGQQAA

SEQ ID NO: 466113 - protein, 350 aa, unidentified
MTKNKTLSFEGETIYCRVDIHKKNWKVNIRNLHMELEHFSQNADHDCLASHVQKRYPGANIKVAYEAGFSGFWPCRKLQAAGIDCIVINAADVPTSDKQKKQKNDTVDARKIAKQLSINNLDAVYVPTLCEQNDRSLVRVREQLVADQTRCKNRIRHLLHFNGLKVANSIDKEKYWTLAFIKALEELDCTDSSLRMTLNLLLAELKDIRKKVLEATTAVRKLAATNTYKEDIELLRSICGIGPNNAMVIRTELGNIKRFKCFDHLCSYVGFVPSTDDSGDTKATRGITHRCNNRLRTALVESSWMLISKDPAMLMKYSAYCKRMDKNKAIIRIGKHLLSRIKYVLTKREK

SEQ ID NO: 466114 - protein, 342 aa, unidentified
MDHYVGIDVSLEASSVCVVDASGKIVREAKVLSEPAALIAWFKGLPFGLARIGLEAGPLSQWLYAGLKQAGFAVELLETRHVRDAFKAMPIKTDRNDARGIAQLMRLGWFRPVHCKSAPAQETRAVLTARKLVQGKLYDIEMSLRGILRGFGLKVGRTTKTGFASRIMELTEHHPALKAIAKALLAVHAVLLKELNGFEAQVRKLARSDSRVRLLMTAPGVGVIVGLTYVAAIDDPARFSSSKTVGAHFGMTPKKYQSGETDITGRISKTGDKGVRAVLYEAAHIILTMPIKGGALKSWAAKLAKRVGMRKAKVALARKLAVILHRMLASGASFDAAKAAAA

SEQ ID NO: 466115 - protein, 348 aa, unidentified
MVTDELDAVIGVDTHRDIHAAALVRPTGAVVSQTQIDTTGEGYQALLDFALQHAPGPRLVWAVEGTRSYGVGLTRFLHAHGQVVVEVDHPKRPTRRRAGKSDALDAVRAAREVLARDHQAIPRQDGDREGVRVLLVARASAVTSRTAAINSLKALVLTAPDPLRDRLRHHAAAAQAGVCAKLRRSPHRSPSDQARVLALRATARRVLALSAEIDELERELAMMVKQWAPQLLAHTGVGVVVAAQLLVSWSHRGRVRSEAAFAMLAGVAPLPASSGTVVRYRLNRTGDRALNRALHLAVLSRIAYDDETKAYVARRLAEGKTKPEIRRCIKRHLARRLYRAMQALPDQT

SEQ ID NO: 466116 - protein, 370 aa, unidentified
MSQSSTLYVGLDVHKESIAVAYVAQEHHAEVVSLGTIGTRQCDIDKLIRRLQSKSPHLVFVYEAGPCGYWLYRYLTKKGQVCCVVAPSLIPKKSGDRVKTNRRDAIKLARLMRSGDLTPVYVPAVEDEAIRDLCRAREDAIHDLKTAKFRLKAFLLRHDIRYTGRATWGPAHLRWLSEVVCPTPAQQIVFQEYIRAVTDHTERLARLEHELIEQVQTWRLAPVVDALQALRGVQCTVAVTTVAELGDLTRFENPRQLMNYLGLTPSEYSTGERRRQGGITKTGNSHARRALVEGAWAYRYPAKVSRHLQLRLEKVSKPIQDISWKAQLRLCKRYRQLSARGKNANQVVVAIARELSAFMWAIAQEVSLAP

SEQ ID NO: 466117 - protein, 461 aa, unidentified
MSRRKSKRTKGIEEAHPFAGMSQVNANAAGVDIGAEEIVACVEGAENMQIVKGFGNYTVDLQAIGQWLGEHHVKTVAMESTGVYWIPLFEVLEGMGFQCLLISSRSLRRVPGRKSDILDAQWIQTLHSYGLLESSFRPQADLVALRTLLRHRAQLLEHRAPHILHMQKAMLQMNVQLSQALSDITGETGMAIIRAIVAGERDAEKLAAYRDRNCKKSAEEIGRALTGTWRAEHLFVLKQSLEMYDSYTRQVEVCDAEIDRLYALTRPDWDGGELKPLPMKKRNSHSKNAPKNQEAIRAHLKRISGVDVCAVEGIGVGVAQTVIIECGTDLVQFPKEGNFSSWLGLAPKHEISGGKVLKNRTLKTKNRAGQAFRMAAQSVKRSDCVFGMMFRRFRARMDNRQATVATAHASARVVYRMLKYKVEYDQIDVTEYEKQYEEQQIKYLKKKAGKFGFQLVPTASA

SEQ ID NO: 466118 - protein, 313 aa, unidentified
MAQMVTTAGIDVSKQWLDVALWPKRDEVLRVNRDAAGLRELTAWLQEHNAVRVGLEASGGYEREVFDALEVQGFEVALLNPLQVRRFAQAKGRLAKNDRADARTIAHFTAVMVEAPSPSRRRELDELSEQLNFRRQLRAWIDDCTNQLEHLRDKGLRRKTEARRLKLQAELKAHDKALAKRVAQHQEWSALAKRLCAVPGVGPVLSQTLIALLPELGKLSRRAIASLVGVAPFDNDSGQRRGNRRIQGGRAVVREVLYMATLSAKTWNPAIAAFAKRLAGKEFKVIMVACMRKLLVILNAMLRDGADWKAKSA

SEQ ID NO: 466119 - protein, 376 aa, unidentified
MLRQPDCVSVSKTGAKPGAPRRRPTLQNPNSWQSQSSNRTARTDASGRSSAAGTKPGERRMHIGIDVSKAHLDAHVHETGLGFRVSNDESGIEQLLERFAVLEVERVVLEATGGYENAAFAALSLRGLPVALVNPRTTRHFAKATNRLAKTDQVDAACLAEFAATLRPRITPLPDETASELDFLVTRRRQLVEQLVAEKNRRSGPLQQQQAPGSRVRQSLERHIEWLKKEIAKFDDQIKRLIQNSPAWRQKDELLQSVPGVGPTTSANLLAHLPELGTIDRKQVAALAGLAPYNSDSGQRSLPRHIRGGREAARTALYMATVAAVTHNPMLRTFHQRLLAAGKAGQVALTACMRKLLTILNAMLRDQRPWTPAFNP

SEQ ID NO: 466120 - protein, 415 aa, unidentified
MDAIYERCCGLDIHKRTVVACLIVPGSGRQSRKEIRTFGTMTDDLLALADWLAAQSVTHVAMESTGVFWKPLFNLLEDRFQLLLVNARDIKQVPGRKTDVKDCEWIADLLRHGLLKASFVPDRPQRELRELVRYRTTLVRERSAEVNRLQKTLEGANIKLASVASDPLGLSGREMLNALIDGSTDVASMAELARGKMRAKRGLLERALAGRMEAHQRFLLTEQLCHIDALDEGIARVSGEIAERMRPFAEVLERLDTIPGIGQRMAEILVAEIGIDMSRFPSAAHLASWAGMCPGNQESAGKRKTGRTRKGNVWLRAALIESAHSLGRGRGTYLAAQYRRLTARRGKKKAAVALGHSILVIVYHLLSRGEVYHDLGVQYFDEGRRERLQHGLVRRLQDLGYKVILEPTQPTTSAA

SEQ ID NO: 466121 - protein, 475 aa, unidentified
MKALPILDERATGIDVGSESLHVSIGGGAPKVTGTMTSEVQALVAWLVQQGVRSVALEATGVYWLYLYEALEAAGIEVLVVNGRHVRNLPGRKSDMSDCQWLATLHAHGLLRSGFVPPADIRRLRDYIRLRQDHISMAASHVQHMQKALERMNIKLHDTISSLTSVSGLKVIRAILAGQRDPQRLLALCDAQIRRNKAERVRESLRGTWRPEHLFALEQALRAWEFYQELIAQCDKAVEQQLHELARSATAAGAQTGGQDRLDGQGGQGGPDDRNGPGVGGNGAAGKPGKGKPASVNTPRIDGLHRLLLQVCGNKDATQLPGMAEHSLLQVIAEVGVDLSKWPTQQHFTAWSGLAPAAAQSGKRRTRQASHRNRTGELFCTMARSLARSVDKGFGGFYRRLKARRGGLVANKALARKLAAMFWQIMVHGTEYVERGLRQYEERVKLTEQRLLNKLAAKLNCQVVPKINDLAAVPG

SEQ ID NO: 466122 - protein, 413 aa, unidentified
MALKIVYPICCGIDVHKTFVVACIASTNKGVTTYKRHRFSTYSKGLKELSQWLCENNCKDVCMESTGKYWIPVFNILEDSCNITLAHPKYVKAIRGKKTDKKDAKWIADLFKHDLIAGSFMPPLAIRQLRDLMRYRFKLTNFMSSEKNRLQNSLTVSNIQLGNVVSDTFGKSSMNIIEKLLDDPTDISFDIEPLIHGSMKDKLPELELAIDGFITHEQAEKIKVIKQHYEDLKSRKDDLERIILILSAPYSEEINLILTVPSFKNIFSAITVVSEIGVNMDVFPTAKHLCSWAGLTPTNNESAGKKKSVRISRAGCYIKPLLVQCATAVVKSEKHPEIRNRYLRIKTRRGHKKAIIAIARMLLTAIYNILKKKEPYNAELYRKSDVLPVNREITVEQAILLAKTQGYRIKTVV

SEQ ID NO: 466123 - protein, 438 aa, unidentified
MRVIHRRAAGIDVGSEKLYVAVCDGPVRVFDTFTASLHALRDYLLSERVRSVAMEATGVYWLPIYEVLEEAGIEVCVVNGAHVQSLPGRKSDMADCQWLAELHSHGLLRSGFVPDQWIRRLRDYQRLRQDHVQMASTHIQHMQKALDRMNLKIHEVLSDLMGASGQRLVRAILDGERDAERLLALCDVQIRRTKADRMRHALQGYWKPEHLFALRQARQAWEFFQAQIAACDREIEATLQEIAALHPPSPPPSAAAGAPKRIHHNAPHITDLKQLLVRITDGRDLETLPAYTDYSILQLLAETGPSMAAWPTVKHFTAWTGLAPSSRQSGKRRRRERRFRNRTGRLFCVMARSLARSNKLALGGFYRRLRATRGPAVANVATARKLAVLYYNTLRHGLQFVEEGLTAYEQHYREHSLRRLKAAARKLGMTLSPLPNAA

SEQ ID NO: 466124 - protein, 364 aa, unidentified
MESVRFVGLDVHADSIAIAVAEPGRDEPSGLATIPNDTVMLLKRLKRLGRVRCCYEAGPMGFVLQRDLAAAGIDCIVVAPSLAPMKAGDRVKTDRRDAVKLARFLRSGDLTEVHVPEPATEAMRDLERARDAAKRAERTARHQLGKFLLRHGRRYPGKTAWTRNHLEWIHTQRFEHEAQQRVLEDYLRTVEDLGERVNRHTRSIVELVEGWSLKPLVKALQALRGANIIAATILAAELGDFARFATAPKLMGYLGLVPSENSSGETRQQGRITRAGNGYARRILVEAAWAYRFRARRSAAIQARSRGVSEEVQSIAWRAQERLCARYRRLTARGKNKNRTVIAIARELAGFVWAIGRQPQLLAS

SEQ ID NO: 466125 - protein, 311 aa, unidentified
MKSSIFVGIDIAKASLQVACQELTLEPVIAYEAQALTALVKQLKKRRSKVQIICEATGGLEALLVHSLSAAQIKFSVLNPRQVRDFARAQNLLAKTDKIDAALLADFGRRMQPAPTAAPHRLIQQLAALSARRQELLDFCVAEQNRLAQATQRWVRHQHLALLSQLRAHLCQLDQRIQTLIDSTPWLKARFQRLIQTKGIGPVSALTLLATMPELGSLSPAKAAYLLGVAPLNCDSGRYRGRRKIYGGRRLARSVLYMAALSASRFNHILRPFYNRLRANGKPPKLALVAVMRKLIIYLNSCLASLPTPTE

SEQ ID NO: 466126 - protein, 338 aa, unidentified
MDHYVGIDLHSNNSYLGIIDTDNKRIFKKKARNDLSTIIKLLAPFSTQTKGIVVESTYNWYWLVDGLIDNGYRLHLANPSAIKQYEGLKHSDDITDAFHLANLLRLGILPEGYIYPKEQRPVRDLLRKRMQLVHQRTAQILSFQNLAARNLGRQMHVQTINKLNEEDLENLFEEQHLILSAKACIATIHFLRTRIIQLEKAIQRAAKLKKEFKLLKTAPGIWNILALTIMLETGPIERFEKVGNYASYCRCVQSNRFSNSKSKGKGNRKNGNKYLSWAYVEAANHALWNYEYVKRYYQRKAAKTNNVVAIKAIAHKLARACYYIIRDQKEFNPGKAFA

SEQ ID NO: 466127 - protein, 338 aa, unidentified
MDKITTIGLDLAKNVFHVVGCNAHGKIVRKRMLKRSQVLAYFANLPVSLVGMEACASAHYWARELGTLGHEVKLIPPQYVKPYVRGNKNDYNDALAIAEAVVRPEMRFVGVKTPEQQDIQALHRLRERRLGDRTALCNQLRGLLAEYGLVFPKGVTTLRRCLPELLADGENGLSGLFRQLLAQGYQQLQELDGHIDFYTHELVYQSQQDDACQRLQTIPGFGPIVASVFRSVVGGGEAYRRGRDVSASVGLVPRQHSSGGKEVLLGISKRGDRYLRSLLIHGARSVVIQAKRKDDRLSRWINRLVSARGFNKAVVALANKMARIGWVILAKKTTYQAV

SEQ ID NO: 466128 - protein, 343 aa, unidentified
MDQHIGLDVSLKDTSISIRQEGKRIWRGKCASDPKLLAEVIRKRAPNARRVVFGTGPLSVWFFHALIAEGLPAICIDARHAKAALDMAANKTDANDADGLAHLAEVGFYREVRVKGFDSMLMRTLIAARRQLMKMRVQMSNQIRGLMKTFGLVVPKGAGSVFERNVFTLLEGEGDLSRIILPLVKAWSDIRLRVAELTKQLVAMAGTDQRCRLLTSVPGVGTVTATAFAAAVEDSMNFKNSRAVGAWVGLTPKRYQSGEVDYEGHISRRGDAKLRTLLYEAASVILNRSTETNALRTWALALKDRVGFKRAAVALARKLAVIMHAMLKTGELFDPNAGATAPA

SEQ ID NO: 466129 - protein, 340 aa, unidentified
MIGIDPHKATHTAVAVDDDEKVIGEFTVEASNDQAERLTGWAEGFTKREWAVESANGLGYLISQQLVAVGETVFDVPPVLASRVRLLGSGKSQKNDPNDARSIAVAALRSDRLHVVEPDDHVVVLRLLVKRHRDMARLRSKHCSRLHALLLELEAGGIGVKISVTNASRLLDRIGVTDEATRYRALIAREVVDDIAKLDATLKASKKRIAVAVTASGTSLTDIVGVGPVGAATIIGYTKNVSRFPTRGHYATYNATAPIEVSSAANTRHRLNLRGNRILNHAIHIAAVTQLRHDTTGRVYYDKKVAEGKTPKEAIRALKRRISDVVYKSLTADTARTTTS

SEQ ID NO: 466130 - protein, 338 aa, unidentified
MKTHVGVDLHQRFCYLTAVNASGKVFKQGQVVNEGAALRAWLRPLPCPRQVVVEASGFWPAFARGVAPEFERLVMVHPQRVKAIASAKLKNDRVDSETLAHLSRCDLLPEAWMADEATQQLRLLVRLRITLGRQRARAKNQLQAVLHQEGFKKPVTDVFGKRGRAWLKGLELSAAGRLVVDTWLREVDHLDVELAAQTRELERMARADARARCLQSVPGIGAYAAMVILAELGDVERFGNKRALASYAGLTPVVRESAGKRKRGGITHQGSNTLRWIMLQVAQVAARCSPGARSYYAGLRQRKPAQVARIALARKLLTVVWALLHHGVCFDEGLFIRN

SEQ ID NO: 466131 - protein, 385 aa, unidentified
MSQLNDLSRSLTSLQQDNAIIAVIEMSQSSWLVAGIVPGIERHPLKKLEPNEGELLRLLMRWRAEATKMGCTITRIAVAYEAGRDGFWLARWLRAHDIETYVIHPTSVAVSREHRRAKTDRLDTGLLKRVFIGWLRGEPDHCHMVTIPTLAEEDAKRPNREREGLVRDRTRIVNRMKSCLARFGVRSFKPTLRKAPERLATLVTPEGVPLPANTLLELRRDMARLRFIMDQIKEVEEARAQRLEQAPQEKSHAMVRLLARVIGVGIETADMLVHEILSRSLRDRRAVARYAGLTGAPDESGSRRQEKGLAKAGNARVRRGMIQLAWRFLLFQKDSALAQWYRTRTESAGKKRKTMIVALARKLLIALWRLVTIGEVPAGVVLRAA

SEQ ID NO: 466132 - protein, 318 aa, unidentified
MDGTLNCVGIDVAKDSLDVACLPSLERLTLAYDDASIARLVETLRRVGPTLIVVEATGGYERRLVVVLIDAGFRVARVNPRQVRNFARGFGQLAKTDRIDAEFLARFAQHVQPQPLEKSSEKQVELEQLVTRRRQLIDLKTAERNRLELTLAQVARKSIQRVLKVIEQQIDALDDAITRLIETDDDWNHKSQILDSAPGVGAVLVSTLIAKVPELGRLNRQKIAALVGVAPFNRDSGKLRGTRAIAGGRADVRGVLYMAALAARYCNPVIRAFADRLEAAGKPFKVVITACMRKLLVILNTMIQTNSPWRTPCATENA

SEQ ID NO: 466133 - protein, 313 aa, unidentified
MPRLVTKITLGIDVSKDELVICDWDTEALTTLSNQGNIIKSWLKSLYGPVRIAIEPTSSYHLKVLEQAHALGLEVYLISPRQLVHYREAVNVRNKTDPQDAWLLARYLAHESGSLRPAKPLCAKAQQLWSLLKRRAAVVKARTQLKQSFAETTLSTKSLFTELKRLLDRIDQRMRTLVRALGWWADYQRCLSIPGIGPLNATALVAAYHRGVFASSDAFVAFIGIDVRLRESGKYKGKRKLTKRGEAELRRLLYCATQPARSYSLFDDYYQRQLEKGLSKIAAKVILARKLARIAFTLLVNQQSFKKKELAYS

SEQ ID NO: 466134 - protein, 467 aa, unidentified
MNKYTKKTKISAKTKNLLKQVNPTAAGIDIGAHSIFVCVGKHDGSTEVREIPTFTADLLAMVDWLRHCGTTSVAMESTGVYWIPPFDILEQAGFDVILVNAYYLKTVPGRKTDVKDCQWIQQLHSYGLLRGSFRPDSECLTLRGYVRQRSKLVELASSQINLMHKALAQMNIQLHQVVSHITGITGMNIIRAIVAGERDPIVLSQYRNYKCRASENKIAKALEGNFRPELVLALQQAVEAYDFFYVQMTVCEQFVEKNLENYAQYNQNEHLQSGGEKSADDKCKSRRKRSSKKSSYNFDVASKLQEILGIDLTEIPGLNANSIVKILSEIGTDMTKWPSAKHFASWLGLCPGNKISGGKILSSKSKPTANKAAQTLRMAANSLYRSSTALGAYFRRMRGRLGGPKAITAAAHKLAKILYYMLRERKNFQDIGQAAFEHRHQERTIANLRKRAAAVGFELVEKEAMVA

SEQ ID NO: 466135 - protein, 373 aa, unidentified
MGHHTEAFVGIDTSKSRNAIAIADGSRGGEVRYLGEFAATEAAIRKLVARLAEKYRCLTFCYEAGPTGYGLYRLLKRLGHECQVVAPSLIPRKPGDRVKTNRRDAVNLAKLSRAGELTAVWVPDERHEAMRDLSRARQAAMKDLQGKRQQISSLMLRLGRIYPGKKTWGPAHMRWLTEQKLEHREQRIAFEELLEGTRQESERVERLEKAIREAVPDWSLAEVVTALQAMRGIDLIAAVGVLAEIGDLSRFQNPRELMGYLGLVPSESSTGDKVKRGGITKAGNGRARRMLIEAAWSYRYPPRVSRDKQPRVAAAPRRVREIAWKAQTRLCGRFRSLERKGKRRTVVATAIARELSAFIWAINRELMSGDGRA

SEQ ID NO: 466136 - protein, 395 aa, unidentified
MNLVGIDIGKNKHFFCVMNKDTGELLVDPVSFSNNKEGFDFLVNKLKPFSKDSILIGMEDTGHYHFALLKYLLNKHFTVALINPKITDFTRKMQGGITKNDKLDTLMICDVLDTPKRKKQYRITKVNSFDLYEQKQLTRHHHNLKEELNVYSNRLQKCIDIVFPEFNSLFKSKYGTVYINLLRTFGGCAETIANTDIRTIRKCFEIKGRGKRISLTPEKLKGCAKQSIGISSAAEVIQIKHLVNQIELINKQIAEIDKKIEEFSVKNNSPILSIPGISHFSGTSILAELGDISNYKKPSQIIKFAGVAPMHYESSQFTAQHTAITKKGSKYLRKTLYQIILPVINHNPVFKQYYELKISQGKGHRCAQGHCVRKLLRIIYHLLSTNQKFDPALLR

SEQ ID NO: 466137 - protein, 378 aa, unidentified
MPDVSSIAPAHVDRWVVFDVHKNSLVAGVLPATGGSPEITRLENTERAVRRFLGRFGDPGALAVAYEAGPCGYELFRLLSGMGVACDVIAPSLVPVRAGDRVKTDRRDAKKLVRLYRAGELFFVEPPSPAHEGLRDLVRARDDLRRARTTARHQVAKALLRHGHVYREGKHAWTKRHAAWLDRQALSDPLAQLCHMRSHLAAIDAELAAIDSELSQVAESEPWCDPVRWLCSLRGVGPHTALGLIAEIGDFRRFSNPRELMSYLGLTPTEYSSGEGQHRGHITKTGNRHARRLLVEAAWHYQHSPRLSARARALAPHVPRAVSSRAWQAQVRLNHRHRTLTAHGKRSTVANVAVARELCGFLWAAMTHQPLREEELAA

SEQ ID NO: 466138 - protein, 250 aa, unidentified
MSAEVTTDAAGLSELHARMNGCEYSVMMESSTYSYVAYRFFERLGIETHVVHARSLKMITDSDKKTDRSDAEWIGRCLRLWKLGEIELSMSYFPTEVEAELKDLCRYKEELSSKLGDDVRRIRSHMSRNCLELPPQFQNLSTRKSRNFIIVTYANDYTLVKRVSGYASLLIESEQVVKEIESRGANDMNVELLESIPGIGRQTAVQLMSMIVDVTRFKDPERLCAYFGMVPRVRDSGGKEHHGRMTTRTT

SEQ ID NO: 466139 - protein, 437 aa, unidentified
MSGKKSLELRVSVDVGYRRHSVAIGLPSGEVLEEFEIAHRPEGFEEFFSRIEKHHKARRCGVAVGMEGFNGCARPLDAMVRRRGYRLYNINNLKLARFKEIFPGAAKSDRIDARKGLELFQLSDHLPLAKEVLQEVKGTPQANEVLKRLTRRRRRLVDERVRVISNLQTDLQAVCPGLLEITKNAGNQWFLNFLVSAATLPQLARLRPSTLLKVPAVGRKYARLIEDWQKRAHFSEEVEWVSEMIQEDAQRCLELDEKIKALKAKIKGVAKDSKIAKTLLSIPGFGTICTAELAGEIGTIERFSKEGSLALYLGMSTLDNSSGKYQGSKQPKHVNRRAKAAMMVALDRHRKYVPESQRYYEKKRREGKKHNQAIRALGRHLCRIIYKMLNDEREYEIRPEKGNTKTKVKSRSCVKTQIRKPKISAKGKITTSTNGAR

SEQ ID NO: 466140 - protein, 346 aa, unidentified
MKQYVGLDVSMKETSICIVDKEGEVIREVKVATEPTAILAVLMDETLAIERIGLEAGAFSQWLYGALAEADLPVVCVETRHMKAALSAQRNKTDRSDARGIAQMMRVGLYRPVHVKTMTSQKQRMLLTARQLLKAKAIDIESELRGTLRNFGLKVGMVGEAKFEARIRELIDDDPDLAEIVEPVLIARRSLREQLRVLHRKLLELVRHDQICRRLMTAPGVGPVVALTFRATVDVPSRFKSSKTIGAAFGLTPRQYQSGETDRMGAVSKCGDRMMRAMLFEAALALMACTRKWSWLKAWGMKIARHRGMKRAIVAVARRLAVILHRMWVDGTDFRWTRPEAAAAPN

SEQ ID NO: 466141 - protein, 326 aa, unidentified
MTLSHLTDNIFVGIDVGGAGLDVAWHRGDSAHYANRPDAIAALVERLRTGPEVTRIVLEPTGGYEKALVKALRQAQLPVEVIHTTRFNAYRTLVGVKAKSDTSDAKLLASYAAAPDEVRGRKAGHVELPEDAIREALSELASRRDQLKHMIHAETCRLGTVRMAELRQAIMTHLEALRAEDKQVHRMMLELVRQRIDLRHDQRLLKTIKGIGVKSALGLLASVPELGRIDNKAAAALIGVAPFVRKSGTMVAPARIHGGRAAVRSLLYMAAVTASRHNPVLRPFYERLIANGKPPKLALIAVLRRLVVFANAVLRSGQPWRGAITS

SEQ ID NO: 466142 - protein, 331 aa, unidentified
MNFYQGQHAFYCGVDLHARTLYLCIFSQAGDKLLHREVAAEPVTFLEAIAPYRAGLVVAAECMFAWYWLADLCAQENIPFVLGHALYMKAIHGGKSKNDRIDSEKIATLLRGGTLPVAYVYPKGLRETRDLLRRRMHLVHRRAEAITHVVNTNSQYNLPPFGKKLIYAKNREALKIAQRFADPSVRKNVEADLAVIDRHDEVIAELELYLERTVKVEDGQTYYLLRTIPGVGKILALVLLYEIHDIRRFADVGNFLSYARLIRPDHESAGKKCGFGQKKIGNAHLRWALGEAVALVVRDSDQAKKWLARRQKKSGKGKAMGILAAKLGRAI

SEQ ID NO: 466143 - protein, 345 aa, unidentified
MSMVSGVIGGVDTHADVHVAAAIDTNGGVLGIESFPTDTAGYRSLADWLCGFGPIVKVGVEGTGSYGVGLARHFHNEDIVVVEVDRQNRQARHRFGKSDPIDALAAARAALSGTATVTPKRRNGPVEQMRVLVVARRSARHQRIQSLNQIRQIVICGPDEIRARFKDRYKVGLVAEAARMRPRRGSDPVAYTTNIVIRSLARRVQDLNDEIRSIDGALGELIDDVAPSLLGLYGVGIITAATLLVTAGDNSDRLHGEASWAHLCGVAPIPTGSGKTSGRVRLNRGGDRQANAALHRIVLTRMASDDRTRNYVRRRRAEGLSTPEIMRCLKRYVARETFKHLARAA

SEQ ID NO: 466144 - protein, 326 aa, unidentified
MNASELIFVGIDVSKDTLEVALDDKSKTQCIANDDADISTLVKKLVIESERIGVIVLEATGRFERKVAVALCLAGLDVMVINPRQARDFAKSLGHLSKTDAIDARALSHFARTLHQSERRERLLMKLPEANQEALEALLVRRNQVIGMRVAEENRLTMSHRSQHKSIKTVLKILDAQIKALDKDMEGMLKKHFSEKLALLKDFKGVGPCTQASLMGVLPELGQLTHAQIGKLVGVAPLNADSGRHRGKRITWGGRATVRTALYMAALSAIRYNPVIKAFYDRLIAKGKLKKVAMVACMHKMLTIMNAIVKSGIPWNPDHQNVSKNA

SEQ ID NO: 466145 - protein, 403 aa, unidentified
MNNVAGIDVSKGKSMVSVLRPFGEVVAKPFSVGHTGSELKELADYLKSLDGETRVVMEHTGRYYEPVARFLHEEGVFVSAVNPKLIKDYGNNTLRKVKTDKADSRKIARYGLDNWAELRQHTPMDTIRMQLKTLNRQQSLYTKTKTMMKNNLIALLDQTYPGVNALFDSPVREDGSQKWVDFATTFWHVDCVRNMSLAAFAERYRKWCKRHGYNFSQSKAVEVYAGAQDLIAMLPRDALTKTMVRQAIDALNAISASLERLKAEMQALAAQLPEYPVVMAMHGVGDSLGPQLMAELGDVTRFTHRNAITAFAGVDPGADQSGTHEAKSTRVSKSGPPELRRALFLVMDCLLKTQPQDDPVYRFMDKKRAEGKPYLVYMTAGANKFLRIYYGRVKEYLASLEGN

SEQ ID NO: 466146 - protein, 346 aa, unidentified
MDHYVGLDVSLKLTAICIVDQTGKIEREGTVASNPEAIAAFVRLHAPHVARIGLETGATSTWLWTELNKMGLPIICIDARHAKAALKMQINKSDRNDAVGIARIMQCGWYKEVRIKGLDSHAIKALLVSRALLVKIKRDLENQIRGLLKNLGLIIGRAKMNVFAVRAAELIEDRPALAAAVDPLLRAREAIERQIVGLDRKVTRMARSDVQVRRFMTTPGVGAITALCFLATIDNPTRFQKSRSVGAYCGLTTRRYASGEIDWKGRISKCGDAMLRSYLYEAANVLLTRVAKWSTLKAWGIRLAKRSGLRKAKVAVARKLAVILHRMWIDGTEFNWSSKEVATQVA

SEQ ID NO: 466147 - protein, 410 aa, unidentified
MQTLVERGCGMDVHQATVVACLLVVLKDGKVQKQIRTFGTTTRELLTLREWLLSEGCTHVAMESTGVYWKPIYAILEGAFQIVVANAQHVKKVPGRKTDVKDAEWIADLLCHGLLRSSFVPPQPIRELRELTRYRRKLVESRSAERNRLLKLLETANIKLASVATDVFGVSGRLMLQALVQATATTQQMADLAKGLLRKKIPELKLALEGKFEEHHRFLLGVQLRRLQAVEEDLRLLEQRIQEKLKPYAMQLALLQEIPGVDWTLAAVIISELGVDMSVFGNVSQLASWAGICPGNNESAGKRRSSRIPKGNVYLKTALVEAANAAAKAKGTYLRDKFYRLKARRGYKRAAVAVAHKILVAIYHMFSHQVCYHELGDLYLDKLNQHHVTRNLVRRLQRLGYSVTLEKKAA

SEQ ID NO: 466148 - protein, 503 aa, unidentified
MNRGQLFGLMRTSKKRSIYKSQNARIQAIFEKAQDPRKVLCVAIDYAKAKHVALICDGNGDILKNPFTVLNSTEGVAFLLEEIAATARHRKIPKTQIILGGEDIPSYVDNFILALKKSGIFVARVNAAEAKLNRENSLASTDQLDLLGIAKTLLSRRARSAGDPLDEDENHYLRIRDLSRTRRHLVKQKTACGNRIHTLSDRLFPGYLSTSSGVLSPFSPPCLDLMKERFSAPQIASRKPESLAKFLRKYSVHHPDEKAAKLITLARNALPPEADRVFALQQSLAASVELYLCLDRNAKHLKLEAATALLQTPYAMLTSIGGVGLTLAAGLAGELGDPKRLGGIDSLCGYAGIVPRSNQTGGPDKPARQGGTSPKCNRVLKDWLVQASQKVALYGPDEWKQRHTRWQVGGQHAAFAGAKRLLRLTRTMTRQQIPWISAAARAQNATRETRARDAEVTFGILVHKWRTLPDWQELVFAPDRPLGFWRKLSMEIHGAQLPLRGDE

SEQ ID NO: 466149 - protein, 326 aa, unidentified
MEHELHYIGIDTAKEKLDVDVLRPDGRHRTKKFANTTKGHDELVSWLKGHKIDHAHICIEATGTYMEPVAECLYDAGYIVSVINPALGKAFAQSEGLRNKTDTVDARMLAEFCRQKRPAAWEAPPPLERALRALVVRHQALTDMHTQELNRTETAREVQRPSIDAHLLWLEAELKRLEKQIKDLTDDDPDMKHRRKLLESIPGIGEKTSAVLLAYIGLKDRFAHARQFAAFAGLTPRRYESGSSVRGASRMSKAGHVSLRRALYMPAMVAISKTEWGRAFRDRLAANGKKGKVILGAMMRKLAQVAYGVLKSGVPFDASRHNPVAA

SEQ ID NO: 466150 - protein, 456 aa, unidentified
MGQEKGRGGSLSLECIEPNAAGIDVGATEIYVAVAGDRDGEPVRCFATFTEDLQAMAKWLQHCGITTVSMEATGVYWIPVYEVLEDAGIGVCLVNARHVKHVPGRKSDVRDCQWLQYLHSVGLLRASFGPESAICALRALSRHRANLVEIAAVHVQHMQKALTQMNLQIHHVLSDLTGKSGLAILDAILAGEREGEQLASLADGRIHADRETVIKSLVGNYRSEHLFTLRQSLEAYRQYQKMLVDCDRELEQRMGQLPNGGKGGQPPASLESSKRGKRRKNQFHFDMGKELYRVLGTDLLSVPGLSALTVHTLVTEIGTDLRRFPNVAAFTSWLTLCPGNKKSGGKVLSSKTRKSNSRAAAALRLAAQALHKSHSYLGAYYRRMRARLGAPQAITAAAHKLARIVYHLISTRTAYDESVFAHEEQKQNIRHQHRLHKQALALGFQLVPLPHPEVVH

SEQ ID NO: 466151 - protein, 369 aa, unidentified
MESQEVKYVGVDCGKKSIEVVRINSENSLERRQFSTTESGINNLLQWLTLNDIVGLEAGSQSFRIAKSILNKGVQVIVLNPGNLATIYQSLKKTDKEDSLKIARLIQRHPIEELPTVPIPNDEEEDNRRLCSEHENWTKQLTQGKNRLHSLFTQAGLTQITKKHLRTKANREISVALLPSRYQKEAERILKVLDLVEQNLKLIEKEIQEALKKNKAYVQTIMSMPGIGMITSLAIKANSISHSLWVVMSYMGDCKRFSSAKQAAYYAGLVPRVDISGDTVRYGRIINRGCHSIRRVIVQAAWSLVRCQHGGKVKEFYQRLYLKKGAKKSIIATSRKMIEVLYVMIRTGKLFDSMPENILNRKLTQYGLM

SEQ ID NO: 466152 - protein, 420 aa, unidentified
MSAEGEEFRVHVGIDWGSAAHQVCVVDTGGTVLSERQVRHDGQALQDLATALIAHAGGEAAAVAVAIEVPHGAVVETLLARGLVVFALNPKQLDRFRDRFTVAGAKDDRRDARVLADAVRTDRRAFTRVRLPAAHVLAVREETRIHDELRTEWSQVTNRLRQQLARYYPQLLALGDVDEPWLWALYKLAPTPAAATRLRRARLTQLLRTHRIRRHTADSVLAGLRTPALTVAPGTVEAAQRHIELLLEQVRLLHRQRQDCERRLATLLTRPEWTAAPSSDGPRREHSDLEILLSLPGAGTLVVATMLAEAGQALMDRDYTTLRTHSGVAPVTHRSGKKLTVAMRYACNALLRNACHHWAQAAIRWDPRSQQQYAALRAKGHRHGRALRGVLDRLQAMLIAMLRDGTLYDPTRHGVRCAAA

SEQ ID NO: 466153 - protein, 365 aa, unidentified
MSKPSRQQDFEIVFTPEMIAKYDGMAPPAIGIDLAKNSFSVYGVDAKGKPVLQRTLTRAGVIRFFANLPECLVGMEACASSEYWARTIESVGHTVRRIHPRYVKAYLLGSKNDLNDAAAICEAVQRPNMRFVPHKSLEQTDIQCVHRIRQGFVRSRTALVNQIRGLLGEYGIVMRQGVSAVRTQLPALIADEANDLSPIMRRNLSSLYESLRFLDDRILDQEKLLRNIARENEACKRLMQVPGIGLLTATILLCVAGVASNFKNGREFAAYLGLVPRQNSTGGKTKLLGISKRGDSYTRTLLVHGARAVLYSLITGRTPQARQNAWLAELVARRGTNRASVALANKTARIAWSMLAQGTEYKLAA

SEQ ID NO: 466154 - protein, 405 aa, unidentified
MGLVIALDVSMGKSFKVVYEGQTCLSEEEILHNKEGFQALLNEIQLLPKEPILVFESTGIYSKPVETFCQKNQLRYCLLNPLEAKKQLESGTLRSWKTDKQDAHKLAQVHPYNHRIEKSHQPDIYHELRDLSRFYQEVEEEIKRTRMYLHNALQLSFPELEQFFSSRITPYALTLIELYPHPELVLESSQTKIKNRLIKSTTKKISERRAKEKASQIIDYATNSYPAVSSTSVQTRKVQYYAQQLIHLLADKEQISNQLIDNAKTLPEFKLLISFPGIGDISAALFIGELGDLSRFSNHKKVNAFIGIDIRRYQSGKHIGLDHINKRGNPKGRKILYFIVRNMIRQQKAAPNHIVDYYYKLKKQPVPKKDKVATVACMNKLLKCIYSMVKNNTKYDYTYAVSLDQ

SEQ ID NO: 466155 - protein, 347 aa, unidentified
MHMQYFAGLDISVKETSVCIVDADGRIVRETKVYSHPEDLLRVLTEGGYHYKRVGLEAGPLSQWLYSALAEANLPVFCIEARHTRAFLTAQINKTDRNDARGIAQMMRVNIFRPVHVKTITSQKQRALLRARKMLQSKAMDIENDLRGILRNFGLKVGIVSTLNFEQRIRELIDGDAELIAIVEPLLAARREIRSQFNILHRRLLAIAKNDGICRRLMTVPGVGAVVALAYRSTIDVPARFQNSKAVGAFVGLTPASHQSGEKSRVGKVSCSGDTMVRTLLYEAAVTLLTRGQKWSWLRAWGMRIAKSRGVNKAFVAIARRLAVIMHRMWQDQTDFRWAKEEQTATI

SEQ ID NO: 466156 - protein, 421 aa, unidentified
MQTEPEFTAFIGIDWADQKHVWCLQAAGSTQRETGELEHTPEAVESWVAHLYQRLGQRPIAVAVEQSRGALVFMLSKYELLHLFPVPSQMASSMRQALYPSGAKDDPRDADLLLDILLKHRNNLRRLSPDSEATRRVQNLVEERRKLVDEKTAQINRLTDHLKVYFPQVLDWFGRLDSDVVCALLERWPSLEELQKTQPANLRAFLRKHRCRDQERIEGRMEAIRQGIPAIHDRAVIEAKSAAVRVIVRVVRVLGEGIEELDGQIEEAAAAHPDFFIFNSLPGAGPVMAPRLLAAFGSQRERYRSADELQSFSGIAPLTETSGKRKWVHFRWACPKFLRQSFHEWAGHSIVQSGWARAYYQQQRSKGNSHHEAVRSLAFKWIRIVFRCWQDRVAYDENTYLAALVKHGSPLAAIVATGKTM

SEQ ID NO: 466157 - protein, 356 aa, unidentified
MSQTLKTSVAVIGVDIGKNSFHLVGQDRRGAIVLRQKWSRGQVEARLANLPPCLIGMEACVGAHHLSRKLQMLGHDARLMPAKYVRPYSKGQKNDFRDAEAIAEAVQRPTMKFVATKTADQLDLQALHRVRERVVGQRTSIINQIRAFLLERGIAVRQGLRFLRAELPGILATRNDVLSPRMLRIVEDLATDWRRLDERIEGLSGEIERLARQDKGCERLMTVPGIGPIISSAMVAAIGTGDAFSKGRDFGAWLGLVPKQISTGDRTILGSISRRGNRYLRSLFVQAAWVVLVKVGPKHWDRYGLKSWIEAARKRLHHNVLAIALANKLARIAWAVLNKGRAFECVRASEMTSRPA

SEQ ID NO: 466158 - protein, 368 aa, unidentified
MAARSGEEDERGELRPNLDRLTVGVDLGDQWSHYCILGLEGERLAEGQLRTSEEDFATFFQGLNAARVVVEVGTHSAWVQEVIRGCGHEVLVANPRLMDGSKRRKRKNDRIDANKLARLGRVDPESLYPIQHRSREVRQDLVMLRARDALVAARTELINTTRGLVKSMGTRLPKCSSRSFAQKGEEAVAVEMREALLPLVRLAATLSADIKEYDKKIAELGREKYGHTALLRQVKGVGPITALAYVLTLENPKRFAKSRDVGPYLGLVPKQEDSGESQPQLGISKAGDTMVRKLLVGSAQYILGPFGPDTDLRRYGLRLCERGGKNAKKRAAVAVARKLAVLLHRLWVSGEVYEPLHHAKSVPIAAAA

SEQ ID NO: 466159 - protein, 357 aa, unidentified
MDPSSMPHTTGDATVGVDTHADQHVAAAFTSDLGRPLGHLEIPTTPTGYRELLAWAKPMGETVTFGIEGTGSYGAGLTRFLRDAGCTVIEVNRPNRQTRRMRGKSDPVDAEAAARAVISGEASCIAKDDQDRVGMVRTLRVARRSAVKMRTQALNQMRALLVTAPADLRERLRVLSVKELVATASSFRPGSITTGGAATKLALRGLANRHELLGSELDALDAELAALADAAAPKLCALKGVGPDVAGALLVTAGDNPERLRSEASFASLCGVAPQPASSGKTTGRHRLNRGGDRTANNALWRIVIVRLATHQPTKDYMGRRTKEGLSKREIIRCLKRYVAREVYRVLVPARQLKVAA

SEQ ID NO: 466160 - protein, 400 aa, unidentified
MISVGIDVSKGKSTVCVLKPYGEIVCRPFEMQHVEKDLEAFHNLLQKLDGEIRIVMEATGIYHLPILIFFHNKGYFVSVINPFAMKKYAKDNSIRGAKTDKLDSIMIANYGIEKWFKLQSYEGDEEIYAELKLLGRRYRYYMELHVKALQELTHILDYVMPGIKKLFSSWNEANGKDKLSDFVERFWHFDLITSMSLETFTDEYLVWAKEKKYHRSRSKAETVYELASSGIPTLPSSTPSTKMLVQEAISVLRTVDSSLSLIVTRMQVLAKSLPEYSTVREMGGVGDVLAVKLIAEIGDVRRLHSAKALIAWAGIDPPPYESGQFIGSKRKITKRGSSTLRKIGYEVMRVLKSHPAPKDDAVYNYILKKEGEGKSKKHAKIAGLNKFLRIYYARVIAVYQ

SEQ ID NO: 466161 - protein, 345 aa, unidentified
MEIRTIGIDLGKTVFHLVAVDARGKVVARKKCSRTQLLRFTSNLPPCLIGMEACAGSHFLGRALREQGHDVRLMPAQYVKPYVKTNKNDYIDAEACAEAVTRPGMRFVPIKTDDQLDLQSLHRVRERWMVRRTAVINQIRGMLLERGITIARGRRRIEESLPGILEDADNKLSGALRALLGELRLEMQYVHRQIGESNKQIERIADELEDGQHLMTVPGIGPMIATATIAAIANGSAFKKGRGFAASIGVVPGERSTGGKQKLTGTSRRGNKYLRKLFVQGAHAVLQRRTKQDPVLRAWVERLAARKRPQLVAVALANKMARMAWAVLSKGEVYRPPLAAQAAAA

SEQ ID NO: 466162 - protein, 461 aa, unidentified
MRESRGQEGKATPGAAGGLPVVRADAGGIDAGSTEHWVCCPPKPDGSANVRRFGTTTVELERIAGWLAAEGVKSVAVESTGVYWIPLYELLESRGIEVVLVNARQLRHVPGRKSDMADCQWLQTLHACGLLRGSFRPAGPICALRALMRECANLMEERTRAVQRMQKALDQMNVQVHRAVSDVTGATGMGIIRAIVAGERDPLALAGMRDKRCQKSAAEFAEHLRGTWREEHLFNLAMNLELHDKLAEMIETYGTKIAGLMEALVPEDRRDGGPPQHPNPTKARTIERGGDQSLRQTLWRMSGVDLTRIDGVNVGVAGVALAEIGPDLSAFPTENHFSSWLRLAPNRPVSGGKVLKKKRNAAGATRLANALRQAACSLQRSKTALGGQFRRLARRKGYSVAVFAMARKLAILIYRMLRHGQDYIDEGLAAYEERFRQRRLHNLASTANEMGYQIIPIPVAA

SEQ ID NO: 466163 - protein, 333 aa, unidentified
MEEAPSSSSNLAFSLGIDVGKTDLELALRCEEDIVAKTTLPNDSEGHSALVDWLSKQGASPKETCVCMEASGDFEEAIAQHLYDKGYRVSVVNPRRIKGYASSQLKRTKTDAADAALIARFGQREDPRPWEPASAAESRLQELTRARQALQKEKTRTQNRLDEEEDEAVRKAQQNLLDEIKRQIEDLKEEIEERIEENSELSDRCSLLETIPGVGRQTAAIVVSELGSPQQFESARQAAYAGLVPRHRESGMSVRGKPRVSKAGNGRLRRAMYFPAMTALRFNSAVKAFGDRLKERGKEKMVVVGAAMRELLHVCYGVLKSGRPFDPSLHPGT

SEQ ID NO: 466164 - protein, 351 aa, unidentified
MSGVVVGADVHKRTHTFVAVDEVGRQIGSKTVAATNAGHHKAVAWARERFGVEVLWAIEDCRHLSARLERDLLTSGQSVVRVPPKMMAEQRRTARTRGKSDPIDALAVARAAQREPDLPIASHDEASRDLKLLVDRRDDLVKHRTATINRLLWRVHELDPAIAPPERSLDLAKHQQALAAALERFDGIVAELARDELADIVDLTTRINDLERRITVRVREVAPTLLALPGCGPLTAAKIVGETAGIGRFKSEAAFARHAGIAPIPVWSGNTRGRVRLTRSGNRQLNAAIHRIAITQARLDGLGKTYYAKKKAEGMSTPEALRCLKRRLARVVFNHLTTDHAASATGLAAAA

SEQ ID NO: 466165 - protein, 369 aa, unidentified
MTKSITYVGFDVHKNSIDVALADAGRESEIRYYGTINGDLASLDKVIRKLVSRGTRPSFVYEAGPCGYEIYRHLTQQGYDCKVVAPSLIPRKSGDRIKNDRRDAEMLARLHRAGELTPVYVPCLEDEAMRDLCRARIDSKSAERKARQQLGAFLLRSGFRYSGKTPWSKAHWNWISCIKMPHPAQQITLQEYIDAIRSCTERVERMTEQIRQLAEPWRMNPVVEAIQALRGVSLIVATTTVAELGDLTRFDHPRQLMAYLGLVPSEHSSGETVKRGGITKTGNGHARRMLVEAAWSYRLPARVSRRLLERQRHLPQAVWEIAWKAQLRLCSRYRLLTAKGKRSQVVIAAIARELSAFIWAIAQTVPRPA

SEQ ID NO: 466166 - protein, 411 aa, unidentified
MLFLGDDWAEDHHDVELVDGNGGKVVRKRLPEGLEGVTRLHALIAEYMPADWADLDPAEAAAQVRIGIETDRGPWVQALLAAGYQVYAINPMSVARYRERHSTSGAKSDAGDAHVLAEIVRLDHAHHRPVAGDSAEAEAMKLVARTHQTLIWDRSRQMLRLRSALREFFPAALDAFDDLTAPDVLELLGRAPDPTRAARLSRSQIAAALRRANRRNIDTKAADLQQRLRAGQLRQPDAVQAAYAAIVTAQVRLIAALNAEVEQLGRVVADHFGRHRDADHYLSRPGLGVVLGARVLGEFGDDPHRFTDAKARKNYAGTSPITRASGTRKVVLARYARNRRLSDAVHQWAFCSLKGSPGARAYYDTLRARGTGHQAALRQLGNRLVGILHGCLKTGTAYNETTAWAHLHPSS

SEQ ID NO: 466167 - protein, 316 aa, unidentified
MYLGIDVSKLTIDCCLIADGQNHQKKFQNNKVGFEQLIKWLQSHKVSDKLHCVCEATGTYYEALAEYLYSRYTITVENPRKIKGYAIAELQRSKTDTQDAKLIAQYCQDRKHKLKAWQPPAKEQKQLQEIARYLDYLKQQRATEKAKQHEAPDYIKSHIQTTISNLTSQIQTVKKQLLQFYKDNPSYNNLRKRLKTITGIGEQATAILLSTYKRHEFKNAKQFTAYLGLDPRKYQSGTSVNGKSRISKIGSSEIRKSLYMPAVVAYRCNAFPEFVGRLKNKGKHIKLILIAIMRKLAVIAFTLLQNGQDFQVERYK

SEQ ID NO: 466168 - protein, 476 aa, unidentified
MVVPNEEPKKPTKPKKPAKPRKSRERSLPVPVPASAAALQVINPDAAGIDVHSDMHMVCVPADRDANPVRQFGANTADLQEIVAWLKKCRIKTVALESTGVYWIPLFELLESEGFEVNLVEPGQLSRCGARPKTDVLDAQWIQRLHSYGLLRASFRPPDSVLALRAYWRQRQMQVRYAASHVQHMQKAMEQSNVKLAEVVSNITGVTGMLIITAILEGERDPVKLAQLRDERCQHSEEQIALALQGTWRPEHLFELRQAYELYQFHHRQITECDQQIEAELANFPNRAGEKTHTVKPRKRGRKSNDVGFEATGPLFQALGVDLTLIEGIDVGTALVILAEIGVDVSRFPTEKHFASWLRLCPPQDESNKTNRRRGHRKATNRVTIALRMCAQSLGRTMTPLGLFYRRIRSRIGGLGAAKATAHKLACLVYRMLKYGQEYVTQSMEEYEAKVKANILKSLKRKAAALGFQLSPLPTQ

SEQ ID NO: 466169 - protein, 311 aa, unidentified
MENILDKCCGIDVHQESLTACIMKGSGKGMYKEIREFSTFTDGIQTLGSWLREHEVIHVAIESTGVYWKPVFNILAEEHFDFMLVNAKHVKNVPGRKTDIKDSEWLCKLLKNGLLERNFIPPEEMRNLRDLTRYRNKLIATVASEKNRIIKVLETANIKLSSVLSDVFGESGSHILKALVEGETDPKKLTELIVGRVKRSKEEFIRALTGRVTPHHRFLIQQALDHICDIGKIIEKIEKEIQTITSKHIQEFELIQTVPGINSTVAAAVLAEIGVNMDQFPSDQHISSWAGLSPGSYESAGKKKVPESYQG

SEQ ID NO: 466170 - protein, 409 aa, unidentified
MKLFIGLDVSSQDAKVCFLNGDGDRLQAFTITNDLPGAITLKEKILDTASRSTCETIKIGLESTSIYSYHPAMFLHNDKELRTYGSQVFMINPKQIANFKKSYSEMDKTDAIDAFVIADYVRFGRHTMSIVKEEQYIALQQLTRSRYQLVHALTKEKQHFLQHLSMKCSQFSQDVNSSVFGNAMMELFLEQFSLEELIQMPLQELALFLQEKGRNHFGNPEEVAKSIQKAVKGSYRLSKVVEDSIDLLLSTSIRIMRTYQTQIKEIEKGIESLMSTLPQTLESIPGIGPVFAAGIVAEIGQIERFTDETKIAKYAGLFWKKYQSGRFTAENTSLSRAGNQYLRYYLVEAANSVRRNVPEYRDYYAKKSAEVPKHKHKRALVLTARKLVRLVDALLRNNQIYAFGRSADR

SEQ ID NO: 466171 - protein, 354 aa, unidentified
MSATAHSRIAVVGIDIGKNSFHVVGLDRRGAIVLRQKWSRGQIEARLANLPPCLIGMEACVGAHHLSRKLKMLGHDARLMPAKYVRPYSKGQKNDFRDAEAIAEAVQRPTMKFVATKTADQLDLQALHRVRERLVSQRTGIINQIRAFLLDRGIAVRQGQRFLRAGLPTILATSPAILSPRMVRMIEDLAADWRRLDERIECLSGEIEVLARRDSGCERLMTVPGIGPIISSAMVAAIGTGDAFAKGRDFAAWLGLVPKQISTGDRTILGRISKRGNRYLRVLFVQAAWVVLIKPTSWERHGLKPWLTAAKKRLHPNVLAIALANKLARIAWSVLARGQAFAARAITVAAVQPA

SEQ ID NO: 466172 - protein, 318 aa, unidentified
MGSMERVKSTTKVAGVDVGKHRLDVAVHGQAEQLEVTNDADGLARLVAWLKEHAVTRVGLEATGGYERAVRSSLEVAGLEVVIHQPLEVRLFARLKRLRAKTDRLDAALIAAATAQVEAVRAAQDPRLMELAERLTAYEQISDQAAELKIFMEHVTLPDLALALREQIQSLVRLKARLAAEILARIKAQSDLLDRYRLLLSLPGVGPVVAASLLVRMPELGDMSMGQPASLLGVAPFARDSGQWKGLRVIGGGRARPRRMLYIAALSAKRCDPDLKAFAQRLIAAGKPAKVAIVAVMRKLIEAANLVLKRQRPWVRHA

SEQ ID NO: 466173 - protein, 342 aa, unidentified
MEISTIGIDLSKTTFHLIGLSPRGDIVLGKKLSRKQLLTYTATRMPMLIGMEACADAHYLARALRDQGHDARLMPAQYVKPYVKTNKNDYLDAEAIAEAVQRPTMRFVSIKNDEQLDLQALHRVRDRWVARRTAVMNQIRGFLLERGIAIRKGPSYLAAQLQVIFTEGDSSFSGRLLHLIRELKHEWDELERKIEEASAELARIAKKDDGCHRLMEVPGFGPIVSTALVAAIGNGISFRKGRDLAAWLGLVPRQHSTGGKTRLLGISKLGNEYLRRMMLHGARSVVMQMERKPSALGEWLTSLSPRRHRNVTVVALANKMARIAWAILSKGTHYSAPAFVAA

SEQ ID NO: 466174 - protein, 394 aa, unidentified
MYFLGIDIGKNNHVASMIGEDGKTVFRAFSFSNTTEGGESLLVKLSFHGVGSHELEIGLEATGHYWLAVYSFLRDKSYKLHVINPIQTDGWRKGVEIRKRKTDVIDSLLIAELVRYGDFIEARLPEEEILSLKNLTRFRSYLVDSTGDLKRKVICVLDQVFPEYQSVFSNIFGKTSKEILLQFGSPAELENVSAGTLAELLAGLSRKKLGLGKAEELSRAAAASFGVTFCRDSFTFQLRMLIEQIKYIESQVKDTEDEINRIMLNLGSPITTVPGVGKTLGAVIIGEIGGIERFDHASKLVAFAGIDASVNQSGEFEGSNNRMSKRGSPYLRRALYQASVVAVTGKNPDPALQAFYQKKRAEGKHHSTCIGAVSRKLCYIIFSVLKENRPFELR

SEQ ID NO: 466175 - protein, 326 aa, unidentified
MSKKKLDLCLRSNGKDILYDVIPNDLSSIKSWLTRTFEKFFLSEDSLVVCAEHTGQYTYPLVCATKSIGVYLCLEDAAKIKYCHGIPRGKNDKIDACRIAMYAERYNDCLQPYTASELIIQKLKNLSTERSMLVADRAKYQSQLKDQVDYMEHSIYIAKCNRVEGIINTFTDYIAQIDLEIKELINQAPVIAHQMDLLMSVDGVGERVALKMIMETDAFTSFTDPRKFCCHAGVVPFVYVSGSSQRSKNRVSNRADKSIKHLLHMAAQSASQVKNSPLKKYYDRKVEEGKNKMSVLNAVRAKLVTIMFAVSRTDAFFSRNYQNSLA

SEQ ID NO: 466176 - protein, 338 aa, unidentified
MNIVFLGIDLAKNVFQLCGLNQAGKPVYTKRTGRKELLQTLANIPACLIGIEASTGAFYYWQREFEKLGHKVRVISPQYVKPFVRGQKNDGNDAQAIVVALMQPTMQFVPPKSPEQQDIQALHRARQRIVNHRTATVFQIRGLLLDRGIPIGSAVSRARRAIPLILEDAENGLSSRMRRTIAELYDLFNDPGRRIHFFDKEIETVFRQSEACQRIAKVKGIGPETATAVVAIGKGTEFKNGRHFAAWPGLVPRQHSSGDRQVLMNMTKKGDKHLRTLFIHGARAVVRVATNNNDGHMNQWVNRLKERRRFNKTTVAVVNKNARIIWSMLRNDTGYQVV

SEQ ID NO: 466177 - protein, 408 aa, unidentified
MELTPMHRRVIALDVHQAKINACAIVEHDDGRVEITRCDFGAFKRDRRALAQWALQIGPEVVVMESTGVYWKSPFSALEAVGIVAWVVNARHVKAVPGRKTDVADAQWLATLARAGLLRASFIPPVQMRQLRLVARQRQKLVGMCSAEKNRLHKVLVDAGMRINVLVADIHGSSARAMVKALIAHKPMHEVLDCKGRLRASREELFEALDTEQFSAAHRFVAHEIMEHIEQIEQRIARLDAYLLEGLKSWQPQLKLLQTIPGIDEQGAAMLLVEIGSDMDAFGSAERLASWVGICPGNNESAGKRKTGRIRKGNAWVRRLLCEFAQAAARTRCALKAKFDALSIRKGRRKSVVALAHKMLRTVYAMLASGAHYQDKEVDYEALNVQRNAPRWLKMLRKHGFIATPVAA

SEQ ID NO: 466178 - protein, 410 aa, unidentified
MEVLHAHCAGLDVHKDTIVACIRHMVDGKVTTVVKTFKSTTPELMSLSEWLSRESVTHIAMEATGVYWKPVWHILSDGEFELVLANAAHVKNVPGRKTDVNDATWLADLMAHGLIRASFVPDEPTQQMRDLLRTRKQIARERSSHIQRIQKTLEDANIKLDSVVSNIIGLSGRRILKALIDGQSVPQALAVLAHRRIHASSDELEAALRGRVTKHHRFLLKLHLDQIDAFDATIARIDEEVDSNVEPFRVAIEMLSAIPGVGQLSATVIVSEIGIDMSRFPTASHLISWAGLCPKNDESAGKRRSTRMKKGAPWLKTTLIQCAWAASRSKDSYFQAQYLRLRSHRGSKKAVCAVAASILTAAYHMLKNGTVYQDLGANYFDNRAKDKQVLRLVGRLQKLGFEVNITSVAA

SEQ ID NO: 466179 - protein, 357 aa, unidentified
MHTPQQVSFAKVHFFIGLDAHLRNWKVTIRLDGLELKTFSMNPSPLELLTYLQKHYPDGIYHIVYEAGFCGFWALRIFHQHNIDCIIVNPADVPTTNKEKVNKSDPIDSRKLARTHENKELHGIYIPDTFHEELRALMRLRYRIIQSQTRIKNRIKGLLYTQGIQIPLQFSGRARWSHPFILWLQQLQLSTSAGNFTLQNLILQLNEIRQHNKNVLKQLRAEARHPAIAPIMKALQGVPGIAFVTAMYLYTEIMDMKRFANDDHLVSFVGLVPSIQASDTNVHDNGISVRQNPFLRTMMIEAAWTAVREDPALTLKFKELTKRMKAQNAIIRIAKKLVKRIRHVWLTQEEYVYALVA

SEQ ID NO: 466180 - protein, 342 aa, unidentified
MDKQIGTIGLDIAKRVFQVHGADSRGAVLFRKRLRRGQVLSFFAGLPPCTVAMEACASAHYWGRQIGKFGHSVKLIAPAYVKAYVKRQKNDVADAEAICEAAQRPTMRFVAVKSEEAQAAAILFRARDLLVRQRTQVINALRGHLAEFGTIVAQGPQHVPKLLVVVDDLTSELPTEARQILALLVDNLRGLDSRVIELDREIGRRAKADAVACRLMTIPGIGAVTATALTALTPPAQTFRRGRDFAAWLGLTPLQRSTGGKQRLGRTSRMGERTLRRLLIIGASAVARWATRKGVPAGSWLERMLRRKPPMLVRVALANKMARTVWALLAHGGIYRAPVATA

SEQ ID NO: 466181 - protein, 343 aa, unidentified
MAIIGGLDLHRGQLTYDYLDVVTGQVDRGRVVPADRGHLRSFLARFDGQGEVAFAVEGCTGWRYVVEELERVGIGAHLAEPAETAAKRGRKRRAKTDRSDARHLRELLVKGDLPCSWIPPAQVLEARARVRLYKDPEEERTAWLQRVQATLYHQGVPVIAALTSVAGQARLAAAELSPAGRQAVEVGLRQLDRLTGELDPLRAELARFSRRQPGCRALRTTHFGIGPITSVAIWAEMGDTRRFSSSDDAVRHSGLDITVYASDTKRARGHLARQGPATLRWALYEAAVCATRPNSPDHASFLAVKRRADGHLGVISVARKLARRVHHTLRALGDQAWEPVAAV

SEQ ID NO: 466182 - protein, 349 aa, unidentified
MYNAVGIDASKLKSTITIIQPAGVVIRKPFDVLHTSDELNTLVTYLKSLEGETRAVIECTGRYHEPVVKSLSEAGIFISAVNPKLIKGQKQNTLRKVKSDPADARKIAKYALDNWAELREYSSMDTTREQLKTLNSQFTFFMKQKVAAKTNLISLLDNTYPGVNKLFDSPTRDDGSEKWVDYAYSFWHVDCVRKIGLKAFTERYEAFCKKHHYNYQKNKPALLFEESKQLVAVFPKEKSYKLLIQQSIQQLRLASEHIEIIRKEMNELASTLPEYETVMSMYGVGETYGPQLIAEIGDVSRFTHREAITAFAGVDPGVNESGQFKQRSNRASKNGSTTVSYTHLTLPTT

SEQ ID NO: 466183 - protein, 341 aa, unidentified
MNQVSTVGLDLAKYIFQLHGADSAGAVVFRKKLRRGQLLAFLATLPPCTVAMEACGSAHYWGREIAKLGHTVKLIAPAYVKPFVKRQKNDMADAEAICEAAQRPTMRFVALKSANQQAAVVVFRTRDLLVRQRTQAINALRGHLTEFGVIAAKGPVHTSKLIAALEDPASDLPQAARAILAVLVEELRSLDERVAVLDREIARHAKESAVARRLMTIPGIGAVTAAALTALAPPAETFRRGRDFAAWLGLTPVQRSSGGKERLGKTSKMGERSLRRLLIIGASAVARWAARKGVPAGSWLGRMLARKPPMLVRVALANKMARIVWALLAKGGVYRAPVAAV

SEQ ID NO: 466184 - protein, 494 aa, unidentified
MKTSKHTKITSVYRNQNVLIRAVFQRAGDTRKVLCVALDYAKRKHVVLICDGNGDILKAAFPVENNPAGIDFLIKEVSATARRRKIPKNQIFLGGEDEAAYVANFTAALREHDYLVVRVSAYEAKENRENLIASTDPLDLLGIAKTLLARRARLTGETDCSNPVYQHLRELNRCRRGLVRQKTAASNRIHALADQLCPGFLNDSKCGLTAFSEASLALMQERFSAPEIARRRPVALANLLRRHRIHHPDETATKIITLAREALPPAPHRVVTLQRTLTATTELYRCLERNALELRSEAAHALATTPYALLTSIPGIGFVLAAGIAGELGDPRNLAPLDSLCAYAGIVPSTYQSGGPDSPAVQGRTSRRCNHILKDWVVQSAQKIRLYGPPELKDRIIRWNANGQHGIFAAARRYLRLVRTLAQNEVPYLGPEGRARNVDPDQLDAAAQHTWGVLQRKWRPLSGGLDLITDQSHPIGFWRRVIKETHGIDLPEHS

SEQ ID NO: 466185 - protein, 364 aa, unidentified
MWFAGIDWADDHHDAVVLTDQGQLLGALRVPHTAEGLDHLTRFLRGGASTSGAAEPVICLVETPHGLLITALLEAGFTVCPVNPLAVGRLRPPSGVKTDALDARLLARLGRNDWPEYYPAALQCFDGLTRQVTLAFLQAFPTPEAAAAASLEQLTQVLAQAHYPHPRQKAEQLAALLQAPQLHALPGVARAKARLMAALRAQLAVLTTQVADFDQAIQQLFAQHADSVVFASLPGAGRRLAPRLLAEWGEDRTRYASAASVRALAGTAPVLFQSGAFRGVRRRRACVNAWRQALYHFAWESVLCEPWAKVYYQRKRAHGKTHAMALRAVANQWVRIIYAMWQARQPYQRAIFLAAQQTHGSMAA

SEQ ID NO: 466186 - protein, 428 aa, unidentified
MNYNTQNAKIASITEKTLIVGIDVGSETHYARAFDWRNYEYSKKPLEFSNTEAGFLTLKAWVEDIAEKHGKTAVIPGMEPTGHYWFALGKFLQDSGMKPVHVNPHHVKKSKELDDNNPNKNDRKDPKTIAALVNEGRFSYPYIPAGIYAEIRSLSNLRFQTQEELTRIKNRTARWFSICFPEYKNVYKDLKAVSGRMVLKAAPLPEDIIKLGAEGVNRIWRDAKLRGAGMKRAKTLVSAAEHSIGSKEASEAARIELKNLLNDMDVYTARLEELIRSIEEKLKEIPYIDKLMAIQGIGLVTVSGFIAEVGDIGRFDNPKQLQKLAGYAIVANESGKHNGESRISCRGRKRLRYVLYEAAISLIGKNAEFREIHEYYRSRKENPLKKMQSVVAIACKVIRVFYAILTKGVDYDAKKLMGDIRRPQIQAG

SEQ ID NO: 466187 - protein, 292 aa, unidentified
MGLDTHKVSTEVAHIEDQRGAKPVHYGEIKTTITKLARQYQSKYPHTTLHFVYEAGSCGYWIYRLLTSLGHCCYVVSPSLIPKKPRDKVKNDKRDALKLTKLLEDEELTPIYVPEPEDEAIRDLSRARETAMKDLKNAKYQLESLFLRNNISCKVNDNWSLQHLRWLTELILPHPSQQIVLQEMIQIITERIQREKRLANELFHQVKSWRFYPVVKALQAIRGVRLLIATGIIAELGDLRRFDHPRKLMSYLGFVSKEHSSGDNRRLGSITKCGNGRERRLLVQGMCIVIKL

SEQ ID NO: 466188 - protein, 323 aa, unidentified
MDKITIFFGIDISKNVFDVVDLNDQHFQFQNSYKGFMKFKKLLTDDSVCVMESTGYYHLKLAYFLLENNVKVSIVNPLSIKRFVQMKLSKIKTDKADAKMIRLYAQHNEIKLWKGNSENQIQALQIIRLLDNYSKQTTALKNKIHGENTIGNPAPIVLKSLKKTLNNINKEKKLLEEELIKLVKQQNAAMLTNLESIPGLGRKTAIMLIVITDGFSRFDSAAALCSYCGLTPVIRKSGSSVNARPRISKIGNQKIRNNLFLCSFSASKHNNACKNIFQRITNKGKSKKLALIAVSNKLLKQAFAIAKSGIPYDENFKSVLTVH

SEQ ID NO: 466189 - protein, 421 aa, unidentified
MRGPRRRRMKAVKESTLLVTVDIGVASNTGYCATGDGRDIKPFKFDNTREGFEKLWHMVVASKMRFGCDEIIAGYESTGPYAEPLAQYLMGKPVTMVQVNPMHTKRMKEVNDNSPLKTDDKDPRVIADIVRLGRTLAVVVPEGDAAYLRRLNNARERHVGEQTALLNQLQQLIFVIFPEFKTVVKNMKGKTARYLLTRYTTPEKISTVSKETLGEEMRKRSRGKYGHRDAELLVDLARNTIGIKEGVLGIVLDIRHILMQLEAEARFIAEIEAEMVMTLQRIPCSGRLLSIKGLGVVSVAGLIGEVGDFSKFRTKSEIMKLAGLDLYEVSSGKRKGERRISKRGRSLLRKILYYAAIQMVRTNGIMYDYYTRLTNRGMLKMKALIAVARKLLGIIHAIVRDNRDYVGAYQAPRRRMIKKAA

SEQ ID NO: 466190 - protein, 411 aa, unidentified
MEVVYRRCSGVDVHKESISVCVLLMEEEGVKKQIRRFGTMTRDLLELSLWMQQLGVTHVAMESTGVYWKPVWNLLEGLFELLLVNAQHIKQVPGRKTDIRDCEWIADLLQHGLLRGSYVPKQEQRDLRDLTRYRVRLNEDKTRLANRIQKMLEDANIKLASVATDVLGASGRTMLQAIAAGEDDPEKLAQMARKGLRKKLPQLRLALQGRIRDHHRFLLRQLLEELRFTEEKINELDQRIQQCMLPHHHAISLWTSMPGIRMTTAWSLVAEIGTNPEQFPQGSNLASWAGMCPGNNESAGRRKSGKTRRGNRWLRRALNQAAWAAARTKNTYLAARFHRLAARRGSKRAIVAIGHKILVLAHYMLQHDAPFRELGAEYYQRLRTPSLSQSLVRRLQRLAFQVTLTPTQQVG

SEQ ID NO: 466191 - protein, 357 aa, unidentified
MVQKHTILDWLGQHVFVGLDIHKRSWVVAIVTEQADFKTFTQPPDVKLLVSYLDRHFPGATYHCVYEAGYCGYWICDELRAHGIECMVINPADVPTMDKERKHKTNKVDARKLARSLRNGEISPIYVPSRAALEDRTLVRSRQMFVSKQTRCKNQIKALLSFYGITVPEDIADRHWSARYVAWLESLTLHSPSGTYALKTLLDELAHLRKSILDTTRAIRLLAGTEAYAVNVVNLITIAGISTVVAMILLTEIITLERFHSLDHLACFVGLVPGESSSGDERTMTGMTERKNRYLRWVLTESAWVAIRNDESLALAFNTLSRRMPKNQAIVRIARKLLNRVRFVLKHQQPCTVFKAA

SEQ ID NO: 466192 - protein, 313 aa, unidentified
MSEQYVGIDVSKDHLDVALSDGTSLRVGNDEAGHQELVARFSAAVPRLVLMEATGGLERALAAQLSAAGVLLRIVNARHVRHFAKATGLLAKTDRLDAQALVRFAQTLKPEPRSIASEQTLALQALIARRRQLVEMLGMERNRLRTAHSGVRKSLQASIRWLEKRLAEVDEDIDGALRECGVWREKVELLESVPGIARVISVNLVACLPELGELNRRQISALAGVAPFNRDSGRWQGRRSIYGGRPQVRRALYMAALVGARHNPVLRAFYQRLRSAGKPAKVALTACMRKLLVIVNTMLKTGKPWTTDLVAQT

SEQ ID NO: 466193 - protein, 461 aa, unidentified
MEKHYELFVGIDISKGKADAAILQVSNLRSVKPKFLRKKLSFKFTRSDVLSFLSAVRSKYDDNCTHVTFGLEVTGIYSNNVYNFIKSQLNDLEEIRFLNTEFVNKWRKTHNIAKSDPLDAQTISNIIGTDPDVRFVNHVAFDNEKGYQDLKALIHRYYQVKKTYSQEINRLISTCDVYFPELQYVFEPKSAAFPAILSSYPTTQDIINASKSEVFDCAYEATKHRVTLDKIDMLFNYCNDTLTDFNISYTSRSIILDLTASVTRLKSLLKELEKKIKVLASMFDVYELLLTITGCGPITAATVIAETGDISRFHSADKFVSYAGASPRIDRSGKSVETIGRISKKGSKYLRHALYMIAEFARRHNPVLKAQFDRIKNGNKKRHRLAVIAIANKIARYIYYKSSFIITYESLMRLSEVTRNTFFQNITTKFSKRIRRQIYQYSDVNGEIHQFVYIQNKDIEI

SEQ ID NO: 466194 - protein, 346 aa, unidentified
MKILALDLSKFKSVGCEYEAESGKHGYRRVNTRPAELHDLLVELEPDRVVIEVSSVSGWVSDLVRALGIELQVVNTNGEAWRWRSVKQKHDQADALKLARLSAMNQLELVHVPAPQIRQWRAVIKYRQHLVGRRTDIKNHVRELLVREGVILPRGRKCWSQEGYAGLEEQARRWEEVGIAELWRGELQSELQQLQVIQERIREVEAKLETLAAADDRVGLLRTIPGVGPRLAEAMVALIDDPHRFKRARDVGAYLGLVPRQYQSGEMNRLCRITKRGSKLLRSLLVEVSWLSLRHNPWLRSLYERMNRGSKTRKKIAIVAVARHLAIYCWAMLRDGTTWRQPCTTQ

SEQ ID NO: 466195 - protein, 382 aa, unidentified
MKKHTTAKKSPKALLKGQQKQIRKEAAKQRLTIGLDLGDRSSRYCILDEAGEVVSEGQLPMTKTGLSSLFGKMPASRVALEVGTHSPWVSRQIAAAGHEVIVANPHKVKLITQSVRKNDRIDARQLARLARVDPQLLSPIRHRGEQAQADLAVIRARAELVEVRTGLINCARGLAKPMGERLKKCDADQVGEALGKPLSEAVQVVIGPLLKSVEAISRQMKVYDEKIEEIAKRYPEVELLTQVYGVGTLIALTFILTIEDAERVVHSRDVGPFLGMQPKQRDSGNSQPQLGISKTGDRLLRSLLVQGAHCILRTGAPDSDLREWGLAKMGQGGKNAKRRTIVAMARKLGVLLHRLWVTGEVYDPLYNRKAAQAAKAQGKAAA

SEQ ID NO: 466196 - protein, 425 aa, unidentified
MGCNAPEVLQPVERASPMASADCRYALANARSVGAPDFYRLAVERFFSRDCLQTRGETLWNGPPLPPGEIVLPENQTEERMMKIAVLGIDLGKNVCSVVGLDPSGAVVLRRRVRRDTLIDLVAKLPSCIVGMEACCGAHHLGRLFAAQGHDVRLMSPEYVRPYVKAQKNDDRDAEGIAEAATRPTMRFVEMKTEDQLDMQTLHRSRERLVGERTALINQLRAILLDRGIVVPQGKRKLEQYLVILMNEHNGEGLSARMRMLVADIRAQWQELDRRIGEFDAEFVRWAKENEDARRLVTIPGVGVTTSTALIAAVGKAETFEHGRDLAAWLGLVPRQSTTGGKPRLMGISKRGNKYLRKLLIHGARAALPYVAEKDTALGRWAKSLLSRVHQNVAVVAFANKLARICWAVLRSGQRFAAQEAPLVV

SEQ ID NO: 466197 - protein, 343 aa, unidentified
MEHVAIDLGSRESQVCVRDERGQILLERKVATARLPAYLSKRPRSRVILETCSEAFFVADAASAAGHEVRVVPASLVRQLGVGERGVKNDQRDARKLSEVSTRIDLPSVHVPSELSRERKRVCNSRRVLLQSRVQLINYVRGQLRAHAVVLHKRNPSTFPASVRSLLLERPEGIASHLERVLSSIEALNEQLKEADRELLEIAEQDPLCKRLMAVPGVGPVIALRFVAVVDQPERFHSAHHLMSYVGLTPGENSSSLRSQRRGITKAGASDLRHALVQGCWSMLRAKPSEPMAKWALALAARRNRQVAVVALARKVLGILWAMWCKGDDYRPELAAGTPVSPN

SEQ ID NO: 466198 - protein, 331 aa, unidentified
MTAYVGIDVSKKKLDVGFYSDKLGKNGQRKKKTKVFKNDRQAFSQLESWLKQQTQHKAQNIAIGIEATGIYHEALIYTLHEQGFKLFIANPGRAKKYFESLGVTHKTDKSDSLLLARFTEDKAHKGDITWWEPESPEARHLKLLLRRLNALQKDVLRERNRLEACANTDTSPRVVKSIEDMIAVLNEEIKALLKEIDDHIDGHPQLKKNRELLESIDGVGPTVSRELTSLFSVKRFSSAKEAAAYLGLIPRLQESGSHKGMTRLSKIGPSAIRALLYLPAVVASRCNPDIAYQKQRLLAQGKTKMQALGAAMRKLVQICFGVIKHQEEYRP

SEQ ID NO: 466199 - protein, 324 aa, unidentified
MAKRITICAGIDTGKRKLDVAIDGSSLQLQVENTAEGHKVLLEWLRRHKVKRIGIEASGGYELPVVTELRRKRFVVVVFQPAQVRAYAKFHLQLAKNDKIDAALIAACTAAVKKIHTAPDPRLQPFAEHLTLIEQIGEDIKLYKNRIETCRDPRIQKLWKEEISRLAKRERAELKALVAAIRQHRDLAQRLDLIYSVSGAGMSTAVAILVRMPEIGTLSREQVAALAGLAPYDDDSGERSGARHIDGGRKRLRRALYTAALPASFFWNPHLIALYKRLKAAGKGHKSALIACARKLLIFVNTVVARGTPWQEQQPVRATNPAAA

SEQ ID NO: 466200 - protein, 347 aa, unidentified
MLHAGLDLSRKKLDVCLLSDQGEHLDQLAVPPDVDSLKTLARRIEEVHGEPVCAVVESMTGARLVHDTLEGCGWTVEIADAQKVKGLAPLALKTDRTDSMVLAVLSQRDLVPAIWLPDPEVRQERELARFRLHLVKHRSMLKHRIHSTLINFGRPCPVTDLFGVEGRKLLARLDVPEPWRSNVTASLALIEDLEDQIDNTNRRLKDGHAEHPYVPLLMSAPGIGWVLAFTIASEIGQIERFASPQKLTGYTGLCPRVIQSGEADRRGPLSKHGPTYLRWALLEATMHALKHPAYAERYQRNKRRLGKQRGAKVAQIDIARRLAHAIWHMLTRKENFAPRGAAFRLAA

SEQ ID NO: 466201 - protein, 346 aa, unidentified
MQPVIGCDAHKKFSVFVSVDQHGNPSRPVRVDHDRDLYCKYLRSLPSGSEIALEATGHWYWIVDAMEQAGHHPHLANPFEAKRRMAKSNKTDALDARGLAILLRCGTLPESWIPPGELRDQRELLRTRMALRDLRTSLKHRIHAGIDRYGLQADAISDLFGTKGRAYLASILKALPTETAYMIAMQLHSIDQLEEKIEAIEHRIAETLKASPEIRLLRSVPGLGPILAPLVWLEVGDVERFPRAEHLASYAGLVPRIIASGGHIHHGSTCRNVNHYLKWAFVEAANCAIRMKAHRDDHIGLLYHRLYPNKGHGRAVVAVARHLAEASYWVLRKKQHYRAPKPRIAG

SEQ ID NO: 466202 - protein, 500 aa, unidentified
MKTKRSKAKIRVGQKGLSVICSEPEQKLEILRPDAAGIDCGAQEHYIAVPLDRVRPGEPTVRRFSAFTEGLDAAVDWLKDCRISTVAMESTGVYWIALHQKLETAGIEVYLVNARHVRHVPGRKTDVQDSQWLRQLHRFGLLNASFRPQDIICRLRSLHRHRDNLVSSSASEIQHMQKALQQMNLHLHHVVSDITGLTGLRIIDAILTGQRDPEQLVKLRDKRVYKSTPRQMQAALEGDYRAEHLFVLSQSLQAYRFYQARIEECDREIEPLLEKLAQQVQVTSANLKLDTLKPSSAKDGATTSEPLSESKPACGLKAKRRHKPRANEPKIDLAGLLERICGIDLTRVVGLNVLNVLLIVSEIGVDMSKWRSAKAFCSWLGLCPGNKISGGKVLDSRTRQVVNRVADALRLAAQSVGRTETCLGIFYRRKQAHLGAPKATTATARKLACLIYHLLKYKQPYQEPDPATYQLRLKKSALTKLQRQAIALGYTLLPTTPPPA

SEQ ID NO: 466203 - protein, 466 aa, unidentified
MENNYILYVGMDVSKGKADAAILKVSDRRSVKPKFLRKKLSFKFVKSDVASFLETVRNYSDVNCTSICFALEVTGIYSTNVYNFIKDNLNDNESIKFLNTGFVNQWRIAHNIAKSDPLDAQTISTIIGTDSDVQYVNDNVFENKNGYQDLKALVHRHYQIKKIYSQEINRLIAQCDCLFPELQYVFEPKSAAFIAVLSSYPTTHDIINASRVEVFDVIYEATKHRCSMDKVDKLFELCQDTLVPDDISSYGKSIILDLVENIKNIKGRLKSIERYIRDVASLNPAYKLLLTITGCGPITAATVIAETGNIRRFKNADCFVSYSGTSPRNKRSGTSVETMGKISKKGSRYLRHAIYMIAEFARRHNPVLKHQFERIKNGNKKRHKLANIAIANKIARYIYSIMKNKSSFVISHDHIMRLPEETRDTFFNSISLDFPKNTRKQIYQYSDINGELHRFVYIKTDEMIPA

SEQ ID NO: 466204 - protein, 387 aa, unidentified
MAQQLDDLSRSPTPLEQDSTVIAVIEMSQATWLVAGIVPGIERHPLKKIEPSEVELLSLLLRWRAEAIKKGRPITRIAVAFEAGRDGFWLARWLRARDIESYVIHPTSVAVSREHRRAKTDRLDTGLLKRVFIGWLRGEPDHCQMAAIPTLAEEDAKRPNREREGLVRERTRLVNRMKSCLVRFGVRTFKPTLRNAPDRLATLCTPEGVPLPPNTLLELRRDMSRLRFVMDQIKEVEAARAQGLRQAPQEKTHAMVNLLARIMGIGIDTADMLVHEVLVRNLRDRRAVARYAGLTGSPDESGSRRREKGLAKAGSARVRRGMIQLAWRFLLFQKESALAQWYRARTADARGGTRKTMIVALARKLLIALWRMLTTGEVPAGVVLRAA

SEQ ID NO: 466205 - protein, 450 aa, unidentified
MRAIHFSTALERLPEIGELTLFGLDTVELIKKTVVRNACYGARLCGNGTRLRCPGGFRVERYCFRILKLGGFGGWRCIGSSMAKIGCSRRCMPTKFGVVALFPGRPIVDQYVALDVSLQKTAVCVLNASGSVVIEAELPSEPAALTAFIQTHAPRAARVGLESGPTSPWLWHSLRAAGLPVVCMDARHAHAALSVRPSKSDRNDARGLAEMVRMGWYREVQVKSLAAHERMALLGVRRRLVDMRVEIDGQIRGILKTFGLVVGSGNKGAFAQRARMLVQDHPVLSALVDKLIEVRAVAVAKVAALDKEIRRFVRDDPTLRRFMTVPGVGPVTALAFRSTIDEPDRFKRARDVGPYLGLTPRRYQSGETDRQGRISKCGDRFTRTCLYEAANVLLTKVQRWSPLKAWGTRLARRIGSKKARVAIARKIAVILQCIWTDGTEFWWTKEPATA

SEQ ID NO: 466206 - protein, 398 aa, unidentified
MFKSPSIQSNKLRRVRVTPSGARSHADAADGPQPIVSRHKTPATELGSSRRLVRSPEQPTEPSPRSKRSHKQERVHVTDSGLSSKTSVGIDVSKEFLDIARSDSKSAWRRPNDPAGIQAHLEELRTIAPACIVIESTGGLERPLLEALLEADLPVALVNPGNVRNLAKGLGILAKTDAIDAHLLARFGQLASPRLLEKRLQIQTELAALVACRRQFVKSRTEQVNRRSTTTSKTALRAIDAVVATLDKQIAKLDRQINDHIDSNDQWKQLAATLQSAPGVGEVLAATLIAQLPELGKVDHRQIAALVGVAPFNRDSGYFKGKRAIRGGRGSVRGVLYMAAVSALRCNSQIKAFGARLKDAGKPTKQIIVACMHKLLTLLNVMARENLQWQQLNLVKNA

SEQ ID NO: 466207 - protein, 388 aa, unidentified
MAVSKPSAATPHSWKGLPMMHVNTFVGLDVHARSIKAVALDVMTGEVRSAGFGYDHAAVAEWVRSLPQPAKCVYESGVTGFDLQKRLAEDGVGCVIGAVSKMIKPAADKRRKNDRNDAEFLARMLAVGNIVEVWIPDDECEAARDLARALEDAREEVARSKQLLSKFLLRHGYVFDERTPTGRRKGNWTAAHWAWIRSISFAQKADGEVLAYYIDRVKQAIEDKKRLDALVAAEASKPRWKKRVDSLRCLKGIEVATAADLVFEAGEFSRFRNARSFAAWVGLTPSEHSSGESERKGGITKAGNRHLRKALVEAAWHYLGASPHPKDPAKGQAPDPKARRHAAKGVRRLHDRRAAMLERGVHKNKANVATARELACWAWAIGLMAENA

SEQ ID NO: 466208 - protein, 392 aa, unidentified
MVVSVGIDVSKDKHDCFIVSSEGKVLADVFTIPNNMDGFLCLLQRIQECANAQDKIKVGLEATGHYSYNLLGFLLDNGLATYVLNPLRTNLYRKSLSLRKTKTDRVDARTIAAMLLSDMGLKPYTDTAYHNEELKSLTRYRFDKVKERAKLKASIARLVCILFPELEQLVPSLHLASVYALLEEFPGARQVAGAHLTRLKTLLENASKGRYKRDMALDIREAARNSIGSRMPAKSLELQHTIRLIRELDTEIYEIESEIETIMDEIQSPITTIPGIGCRMGAMILAEAGDLSRFDSPDKLLAYAGMSPSTYQSGQLKNCYPHMEKRGSRYLRYALYNATKYVCLWDPTFAAYLAKKRAEGKHYNVAISHAAKKLVRLIFAMEKSRQPYRSAA

SEQ ID NO: 466209 - protein, 348 aa, unidentified
MAKRSTEEAVGLDLGDHFSQVCFFHAALGSFVEERRVRTHPKTMRNYFGELPRTRIALEAGTHSPWVSRMLEELGHEVFVANPRKLRLIFENPTKSDKVDARYLARVAALDPGLLAPIQHRSARAQADLASVKSRDLLVRTRTQLINHVRGIVKSHGERLASCSTAAFANRVAAALPESLQGNLEPILDVLRSLNEQIRRLDMRIKELAETTYPESALLQQVPGVGPLTAVAYVLTMESPQRLPNSRAAGAFFGLVPKRKASGDRDPQQRISKQGDPYTRRLLVGSAHYLLGPFGPDCDLRRYGEKIAERGGANAKKRAVVAVARKLAIVLHHLWRTGKVYQPFLAAA

SEQ ID NO: 466210 - protein, 341 aa, unidentified
MEDLYVGIDLHSSNSYVGILSKDSERIMSRRLPNDKEKILMTLFPFKERIKGIAIESTYNWYWLVDSLMAENYPVHLGNPAAFQQYKGLKYVNDKHDAFWLAQMLALGLLPEGYIYPKAERGLRDLLRRRSQLVRQRTSLKLSLQQICCNQAGAQLTNNFIEHKMDKENIAEIFEDKDWQMNGESLLSTLRFIKKEIEKIEQYILKQLKEKSYYKSLTSVPGIGEILAFTISLETGPIDRFGSAGEYASYCRCVPSSYWSNEKKKGQGNSKNGNKYLAWAYAEAASFCIRYCEEAKKYYQRKQSKTNIPKAYRAISNKLAKACYYLIKEGTLFDAKRLFGS

SEQ ID NO: 466211 - protein, 410 aa, unidentified
MEVLHPRCCGLDVHKDTVVACVRLVIDGKTVKEVRTFSTTTADLMALSQWLAENKCTHIAMESTGVYWKPVWHILADGEFELVLANAAHIKGVPGRKSDVKDADWVSDLLAHGLIRASFVPDTPTQEMRTLMRTRKQLSREQARHILRIQKTLEDANIKLDSVISDLMGVSGRKMIEALIAGQRDPAKLARLADPRVQASQETLRQALRGRVTRQHRFLLRLHLDQIDGLDAAIAKIDREVEAAIAPFRTAVEQVSSVPGVKNLAALQIISEIGTDMSRFPSDANLVSWACICPRSDESAGKRRSTRIRKGSPWLKTTLVQSAHSAVRMKGTYFQALFHRIRSRRGVKKAIVAVAASSLTAIYHMLKDGTMFQDLGADHFNHRTKEQQKNRLVKRLAELGYAVEVAPLPT

SEQ ID NO: 466212 - protein, 407 aa, unidentified
MNAVGIDVSKGKSMMAALRPMGEVALPPKEYPHTEVGLERMALDILALGEDTRALMEATGRYHEPVAAALHEYGIRVTVLNPLFIKQSGGGSIRKVKTDKADAMKIAKYALDNWVDLREYTPMEAIREQLKLCSRQYNLYMKNVVALQNNLISLTDKTFPGVNELFTSPERADGSQKWIDFVTTFWHCECICLVSETAFTERYRKWCKRKGYQFSAQKAAELYMDSMGHITTLPRNSNTKLLITTAAKELATSKSTLAVLRAEMTRLAQQLPEYETVRAMYGVGETTAVQLMAEIGDVRRFPRRSSIVSFAGVDPAVDDSGKHISKSNPTTKRGSPHLRKTLYQIVCTYLRKAPADEPVYQFLDKKRAEGKPYFVYMTAAENKFLRIYYARVKEYLIAADSKELSED

SEQ ID NO: 466213 - protein, 370 aa, unidentified
MKSIAHVGLDVHKDSIVAAILPEGADKPVCERRLRNDALELKRFVCRWERAYDLRCCYEASSCGYVIHRWLADVGVACDVIAPSLVPKRPGERVKTDRRDAVKLARLHRSGELVSVHIPTQQDEAVRSLVRCRETMNKEVQQSRHYILKFLSCRGIRYPGKSNWTQKHWQFLRSLKFEGPEQIVFEEYLVLLEFKQYRLEELDRHIEEIAGTQTYQDVVGILRCLRGIDTLSAMVLVTEIMDFSRFGAARQMMSYLGLVPSEDSSGGTRRQGGITKTGNSRCRRILIQTSWHYARKPSLSKNLKQRQQGQSARVVAHSWKAQQRLHKKFWGIALRKDKRTAVVAVARELVGFIWALMSSDVVWCNKSQAA

SEQ ID NO: 466214 - protein, 322 aa, unidentified
MIEDAICVGVDVAKSTLDVAVTDSGEARQFVNDDEGIRQAVRYIAGVKPVGIILEATGNLEIPLAAALQAGRLPVAIINPRQVRDFARVTGALAKTDRIDARILALFGARVKPEIRPLPDKKAREMGSLLTRRRQLVEMLTAEHNRLFQAGDDIHPSIETHIQWLEEALSDINDDLDRRIRLSPSWLEKDNLLKSVPGVGKVVSSSLLIELPELGMLNRRKIAALVGVAPLNRDSGTMRGRRTVWGGRAKLRAVLYMAALVASRRNPIIAAFYQRLLDAGKMKKVALVACMRKLLTILNAMMRTMTVWQPESILRCVSTKAS

SEQ ID NO: 466215 - protein, 355 aa, unidentified
MNSEKYIGLDVHQATISVAVMDSMGKLIMESILETKAATILEFVAGLRGTLSVTFEEGTWAAWLYDLLKPHVDELVVCNPRKNALLKDGNKSDRIDARKLADRLRLNDLKPVYHGETSVRKLRELARSYLNLVKDQTRVMNRLKAMYRSWAIPCAGRDVYYARHRAEWLGKIREAGVRRRAEHLYQQLDMLQHLRQQARRELLAESRQHPITAKLRQIPSLGPIRSALAVALIRTPHRFRTRRQLWAYSGLALETRTSGEYRCVEGQIRRSKKQISIRGLNKDHNHDLKGLFKGAATRASIQPGPFQDFYQRSLAKGIKPTMARLTLARKIAAITLTLWKKGENFDAEKLKSQAA

SEQ ID NO: 466216 - protein, 374 aa, unidentified
MQLLRYCVGLDISKDSLQVCLSVIDTNGRVVVKGSTKVANKPAAFAQLEPWVSKHCKTDNLPLRYIMESTGVYHEAIAWYLYQKDQAVCILLPNKAKHYLKSLGYKSKNDKIDAQGLARMGLEQQLTLWKPLSKNIYSLRLLTRQHQRFQEWKTQCRNQQHALDYSAIGDDFITKQNAKLLAVYDQQLEALEKAIQKLIEEDTVLKAQVERLTAIKGLAMLSVAVLIAETNGFEGFANQRQLVSYAGYDVIENQSGNRSGKTRISKKGNSRIRRILHLPAFNAVRFGEPSCQALYERVYQKTNTKMKAYVAVQKKLLLLAYGLWRHQTMYDPMHSIQAKRETLSTSKSDQNDKKIVPTSGTTQDQSTVAELSFG

SEQ ID NO: 466217 - protein, 379 aa, unidentified
MKQIRSFVGMDVHKETISISVAEEGRGGPVRFIAVIPNTPEALHKMAKQLTRHGELDFCYEASGCGYGIHRQLTRLGHKCTVAAPSMIPRKPGERIKTDRRDSEKLAILHRSGDLTPVWVPDTTHEALRDLVRVRVDASMHLMRARQQLLAFLLRHGRSYPTGKHWTQRHRSWLAGQTFQEHAHGIVFQDYLETVWTAQQRRDALIERISAMVGSWSLGPLVEALRGLRGIDMISAATFIASTGDLSRFESPRLLMGYLGLVPSEHSSGGTIRRGGITKTGNREARRMLIEAAWSYQYPARIAKEKAEILVRLPKNIRDIAWKAQTRLCTRYRSMVARGKKPTVVVAAIARELAGFIWAIGQEMRLQMAASQQKLCTLA

SEQ ID NO: 466218 - protein, 405 aa, unidentified
MGKVFVGHDWAEAHHDVHVEDEEGRRLGKARLPEGVEGVGRFHELVAPFVEDPAEVVIATETDRGLFVGALVAAGYTVLAVNPMSTSRYRERHSTSGAKSDPGDARVLAELARTDAHNHRPIAGDSDLAEAVKVLARAHQSMIWTRQRQTNQLRSTLREFYPGALTCFDDLDGGDALAVLAVAPTPVLGRSLSRSKIAAALRRGGRQRRVEERTEEIQAALRADQLAAPDVVSQAMGTTVAALVGVIAELNAQIANLEESLAERFERHPAAKVIRSLPGLGMILGARVLGEFGDDPNRYADAKSRKNYAGTSPITKASGKHRVVLARYARNRRLADACYLWAFASLNASPGARAFYDGRRAASDTHHRALRALANRLVGILHGCLRHGVLYDEETAWGHRMEEAA

SEQ ID NO: 466219 - protein, 344 aa, unidentified
MSEAFIIGLDIAKYVFHAHGVDERGRAIFSKRISRKKLLDFFAAQPSCTVALEACGGAHHWARQLSQLGHEVRLIPPAYVKPFVKRQKNDAIDAEAICEAAQRPNMRFVAVKSEQQQAAGLVFRTRDLLVRQRTQLINAIRGHLTEFGWIAPKGPSHVAMLAGLIEEEEMASSLPEAARAMLRLMLDLLADLDGKIADLDKEIARRAREDEVSRRLMTVPGIGPISATAIAALAPPAETFAKGRDFAAWLGLTPLQRSTGGKHKLGSTSKMGERTLRRLLIIGSSAVVLQASKRGAPKGSWLEQMLARKPRMLVTVALANKTARIIWALLVKKENYRAPVVAKA

SEQ ID NO: 466220 - protein, 344 aa, unidentified
MSKVITIGLDIAKNVFHAHGADERGAMVFSRKLTRGKLLEFFAGQPACTVALEACGGAHHWARQLQALGHDVRLIPPAYVKPFVKRNKNDAVDAEAICEAAQRPGMRFVAIKTEEQQAAGLVFRTRDLVVRQRTQLINAIRGHLAEYGWVAPRGTASMTMLADLLEDGDMASSLPEAARPMFKLMIDLLAELDEQIATLDREIARRAKDDEAARRLMTIPGIGPIAATAIIALAPPIETFRKGRDFAAWLGLSPRQHSTGGKQRLGSITKMGERTIRRLLIIGASSVVLQASRRGAQSGSWLERMLARKPRMLVSVALANKMARMVWALLTKDENYRAPAAVSA

SEQ ID NO: 466221 - protein, 350 aa, unidentified
MDQVSTIGLDTAKRIFQVHGVDEAGAVVLRRQLRRSEVLKFFAKLPRCVVGMEACGGAHYWGREIAALGHEVRLMPPTRVKPYVKWGRKSDKVDAAACCEAVTRPSMRFVPLKTVEQQAALMMHRARQLLVEQRTRLGNAIRGHMSEIGIIAAKGGAGLGALVAFIGNPEDQHLPAVVRTILVPLVEQWRSAGAQIAELDRQILAWHRNNADSQRLETIPQYGPILSSAMAATIGDAARFDNGRACAAWIGLVPTQNSSGGRERSGGISKTGDRYLRQLLVIAATGMVRRARAHPEDHPWFAGLLERMPPKKAAVALANKLARIGWAVLRHQTPYRARRPPAVAPALEAA

SEQ ID NO: 466222 - protein, 316 aa, unidentified
MTSTQFVGIAVAKHQRDVAIRPGDEVWQVANDPAGLTTRITRLHSGQPELSVVEARGGYERPVAAARTAAGFPVAVINPRQARDFARAVGVLAKTDRLDAQVLARFADAVRPTPGRMAAPPSQSLASSLTRRQQLVAMITAEEHRRQQAAGALGERIGAQLTWLRAEVAQLDQELTAAIRTEPLWQARDALLRSVPGGGPVLATTLIAGVPELGTLTRQQLAALIGVAPLNRDSGTLRGKRMIWGGRKHVRTVLYMAALVATRHNPIIRACSLRLCGAGKPTKVALVACMRKLRSILNAMVRQQQPWAPTPAALAA

SEQ ID NO: 466223 - protein, 359 aa, unidentified
MSTQSKPFSFKGQKIFVGLDVHLKSWSVTVLSEQAVLKKFTQDPSPAALNKFLTNTYPDAEYYSVYEAGFCGFWIHWELHNLGINNIVVNPADVPTMAGERLRKTDAVDSGKLARSLRSGELKGIYVPDSITTEIRSLIRLRDSLTKDQTRHKNRIKAHLRYLGIDIPEEFCRPGRTWTNRFVLWLKSLELETAYGKKTLDLLIAQYEDLRGQQLEMMKELRVLSRSERFDEPLRFLMSVPGIGQLAGLTILSEVDDISRFKDAAHFASFVGLVPMCYSSGEHEGTGNITVRRHAKLRWLIVEAAWIASRKDPVLSAAYVEYCRSMKPSKAIIKIARRLVNRIYFVMKHQQPYVNCYVS

SEQ ID NO: 466224 - protein, 341 aa, unidentified
MGEVTTIGLDLAKLVFQVHGADAAGQVVFRKTLRRAKVLEFFGRLPPCTVAMEACAGAHHWGREIARLGHTVRLIPPAYVNPFVKRQKSDAADAEAICEAAQRPTMRFVAVRSAEAQAGAAIFRTRDLLVRQRTQHINAIRGQLTEHGLVVGKGPAHLPRLIAQAEAEGCDLPETARAMIEVLVDMVGLLDERIARLDQEIRRRAREEDGPSRLMTIPGIGPITATALAALAPPPETFRKGRDFAAWIGLTPLQRSTGGKQKLGAISRMGERTLRRLLIVGASAVVRHASRRDLPESSWLARMLARKPRMLVIVALANKLARTAWALLAKGEVYRAPAVAA

SEQ ID NO: 466225 - protein, 399 aa, unidentified
MDRNRTVAGLDVHKDSIYLCIMGHDETIIFEKTYGVLTPDLRQMCQDMIERGVTEAAMESTAVYWVPVWNELCGSMELKLVNPYFIKQLPGRKSDVKDAQWIAECLLKNLIRGSFVPEPIVQDMRKLNRRIMDLNEDMTYNCNKLDAALQRCGFRLSNYVTTIKSRSYQSVLQAIINGITDPEELVKMVHGRTVNKHGRDTVKAAVSGLFSKTDITVFRQIKEVINTIERQIEECQKELTALCREHFPEQYRRIQTIPGVKERAATAIIAETGVDLKMFATAACLVGWCGLKPRNDVSNGRYKSRKVTHGNRYLRQILIEIAWVASRTRNCFFSNFSYIQTTVKKKSKMKIQVAIARKILVALWHMLSKGEDFIDIYLRRLEEQKLMEEKLKSLEAKMA

SEQ ID NO: 466226 - protein, 385 aa, unidentified
MPQFSGSPQAAIDYNSTIIGALELSEKKWVLAVQLPGVDRHSRHVLDACGERLVSFVERLKARCASAGRKVARVILTHEAGRDGFWLARFLARRGIEVHVMQPSSLPVDRRARRAKTDMIDVEMLLRTLMAWLRGEPRVCSMVPIPSEADEEARRAHREREDLTRERRSIVNKIDGILATLGVKGYRALRRDRREQLNCARQPGGDPIPQKARARIERLLDRLDLVLKLIDQVESARDAVLKKDAPADEAERMIRSLTDLRSIGPDVATLLVREAFVRQFRNRRALAGYVGLGGTPFSSGGSEREQGIGKDGNRRVRAAMVELAWMWLRWQPDSALSVWFRARVGAMGGRIRKIMIVALARKLLVALWRYVTDGVVPDGAKLKAA

SEQ ID NO: 466227 - protein, 422 aa, unidentified
MVINRPAIGIDVAKDFCVYAAVSPNGTILLNPFKALNTKQGLFFALREIKKVEDAFGSKPAIVLESTGHFSQRIVHFFLKQELDVFLINPLISHSIKNSSVRKVKTDQVDAVDLAKLFFTQGLRNTYIPSEALANLKILSRTRFQLVEQRAGILNQLIAAIEQVAPLFPKVFEPSSLTALTLLTQFPAPAQWVKTSNHKAILQMLESLPRRGKDYAQKKFNALLDCAKDATFTGIELSANFRVIQIYADNLRFMDTQIKAIDDEINQWTEQLPEIALLKSIPGIGGTLAPLIVGEIGDIMRFTNAKQLVAYCGIDPTVRQSGNFVGTRNKVTKRGSPFLRKALYVAAITAIRKNPNGSLVNSVIHEYYKKKIESKPKKQALGAVMNKLLRIIFSVLKNKQPFCLITSEQQVALYQSLRKKAA

SEQ ID NO: 466228 - protein, 416 aa, unidentified
MGAIRVCFKVACGLDVHQAEIVACLSIQDARGRLKRETRRFRTVYSELVQLREWLVSEGCEVVGMEATGHYWKPIYSILEGHVRLIVGNPNQMKGLKGRKTDQQDAEWIADLTRLGLIKPSFVPPAEFRALRDLLRTRRGMIQARTTLHNETLKLLEIGGVKLSTFMSSVFGVSGMAMLRALARGESIAGQVHLLAKGKLRSKLAELRLALEQPLAPHLQQILAIQLERMDQLEVHLQSLDLHVEERMAPYEAERRLLIAISGLGRASVNVILAEIGVDMGVFPSPAHLAAWAGLAPGSHETGGKNRRAPTLKGNTYLKAMLVECAGAAVRSKGTFFSAKFNQLRRRGVGYRKALVAIAHKLIVVIHRVLSGKAPFQDLGAAYFEQRNRANTIRNLTRRLESLGLVVSLQNRSIES

SEQ ID NO: 466229 - protein, 322 aa, unidentified
MAMLSFGGIDVSKDRLDVMVLPEEQCSSVSNDAAGWAELVEQLRGSSIAAIGIEASGGYERGVMRALLAADLPVRQVNPFKLRQFARASGVLAKSDPLDARMIASFVAIMPTRPAQRQAPAAERLTEMLAVRRQLSAEKVAADNASRLLEDAMLQRLSRRRIARLAADIGLLDKHLVEVVATDDALVHRYRLLTSMPGVGAVLACTLIALLPELGRMNRKQVAALVGVAPYAFESGTLKGRRCIWGGRAHVRHVLYMAAMSASNWNPAFKTFHGRLKAAGKLPKVAIVAVMRKMITTLNAMVRDDVVWADRLTGRHSVPTAR

SEQ ID NO: 466230 - protein, 426 aa, unidentified
MLNSQINKIQAITSDTLIVGVDIAKSIQWAQFINFRGIEVSKHICFENNYSGFNSIMEKIEEIKSKNNFLSVIVGMEPTGHYWKTFATFLHNNGIKAVQVNPYHTKKAKELDDNSQTKSDKKDALVIAKLIKDGRYSAIYFPEGEYANLRNLSNTRLEVSRLLNICKNRIHAFVDEYFPEFETVFKSFIKGKVALHILKRIPFPTDILGLTLKEIILIIREAAKKSVGKKKAEELIRAAKVSIGVKVGLEGARIRLNNLLEEYGLYHNQLEKIEKEMAQELEKTGYKDILTSIPGIGIISAASFIGEIGDPKRFSNPQQIIRLAGYNLVEDSSGKHKSKTMISKRGRKILRTVLYKISLIVVCKNQEIKLLYKYLITRKENPLKKKQALIVISGKIVKIMYSLIKKEEVYDKEKVLGIYRKQQIVA

SEQ ID NO: 466231 - protein, 348 aa, unidentified
MMIIGCDFHPSWQQVSWLDTETGATGEQKLVQSAGDAERFYRQVAAPALIGMEATGNSHWLVDLLAELGHELWVGDAAQIRASYVRQQKTDKRDAAHILKLLVEGRFPRIWMPSSEVRDLRQLLLHRYKLVMIRARVKNELQHLCLNKGVQRKTRLWSKAGQQVLRELPLKPWASRRREDLLQLMAMLDQQIEPLDMAVKAEAQRDKMALLLQTQPGVGPITALAYVLTMGDVSRFPRGKQVASYLGLIPREHSSGGRQKLGAITKQGNRMLRMLLVEAAQTTVRLDPEFRKEYLHRCHQKPKAVAKVAAARKLAVRLYWMLRTQKPYPEVVRIESSPRVPLVARPGE

SEQ ID NO: 466232 - protein, 408 aa, unidentified
MPRYYLGVDWADRVHQLYGGDENGIKVMEMKVQENPEGLAELGRWLNQSRVEQVELWAAIEKPHGRIVDFLLDHGVVVYPVNPKVLDRARDRFRMSQSKSDPFDAWVLSDFLRTDHDHLRPLAPNSEQAQELKLLTRDQQRMVRHKTRLLNQLKFTLKEYYPRPVEVFADLESRVAVDFLKQYSTPAALSKLSRKQWSRFAEQHPHLTQARSTKLWEELKKPQLMVPDHVVRAKAQLLEVLLDQLEASLRTAEKYSDKVERFFASTPAAKLVEKLPGGKSGTLLPALWAELGDAPARWESFRHLQAEAGAVPVTKSSGKSRIVEFRFSCNKQLRYAIYWFAFLSINRSEWAKAFYRDQRARGHSHPQALRALGAKCLKIIFVMWRDHKPYDETYHLANIARQKLRQAA

SEQ ID NO: 466233 - protein, 332 aa, unidentified
MFVGMDVHRNRTQVCVLDRKGNEVRNRNVTNDRQALRKELAGLRRGTPVAFEAAYGTGWIAELLGDLGFEAHLAHPSGCRAIADAKLKNDRVDARTLANLLRTGYLAEAWLAPKEVREQRLLLRERARLVRIRTTAKNRIRAQIADEGVPAPSHGLWTKEGATWLDSLDLSPMHRWVVTDCQALIEVLQSRISLLEAEIRRRAKPDKRIDALTAIHGIGLLSAMTLVSEIGDISRFATARKLCAWAGIIPSMRNSDRTVHHGHITRAGPSAVRHVLAEAAQVAIRKEPYHSDYLATKQRRGTGIALVRVSRKLLTEAFYVLKALEDEQRQCS

SEQ ID NO: 466234 - protein, 334 aa, unidentified
MNTITLIGIDLGKHTFHIHCQDKSGKALLRKKFTRNKLMAFLAGRPSATVVMEACAGAHFMARRIADLGHEAKLISPQFVRPFIKSNKNDFVDAEAICEAASRPSMRFVPPRTETQQAMRALHRVRESLVRDKVKTTNQIHGFLLEFGISLPRGDAVIKRLSLVLAEHELPDYLVRLLMQLHAHYHYIVEQIAGLEAELKHTITTDDTAQRLMTIPGVGPITASLLSSQLGDGQQYAKSRDFAASTGLVPRQYSTGGKNTLLGISKRGNKNLRRLLVQCARVFMQRLDNYSGKLADWVRQQLERKHANVVTCALANKLARIAWAITTQHTVFDA

SEQ ID NO: 466235 - protein, 413 aa, unidentified
MKKNFILFDQVVERGAGMDVHKETIVVTIQGKGIKTETKSFRTFTSSLKKLREWLKQHGITHLAMESTGVYWKPVFNVLGDDFMIILVNARHVKNVPGHKTDKQDSKWLAKLLLSGLLKGSFIPGKEIRDLRDLVRTKTQLTGEISSAKNRFIKFMESANIKLSSVLTDVFCVTGQKIIAEILDGDYKPERLLHHVHGRVKASRQDIIEALTGNLDEHYRFMMKTMLEHIANIENVIAKIDAQIMQKTEDHKEILELLETIPGVGRDGAICIVAEIGTNMEAFASHKHLASWAGMCPGNNESAGKNKSGRITYGNAFLRTFLVQMAWAAARTKNTYLSSKYKSLVGRRGKKRAVIAVGHKILIAAYFIMKNKVGYNELGEEYLNNFRRDKLINYYKNQLQKLDPNVNFDKEVA

SEQ ID NO: 466236 - protein, 394 aa, unidentified
MKQDSKGRQVAEWDARRSDRKYVGLDVHKATIAVAVADEGRGEVRSYGTIKNTPEAVAKLVKQLGSAERLLCCYEAGPCGYGLERQVRGMGAGCVVVAPSLIPTRPGERIKTDRRDALKLARLLRSGELTAIWVPDAEHEALRDLSRARETARDALHQARQHVSKLLLRLGIEAPNGLKRWTQRYRSWLGEVKLEHAQQQVVLADYIQTVDVATARLKRLEVSLTEAATQGRHAPLIAAVQSLRGVGVITAVSIVAELGDLGRFPSARPLMAYLGLVPSEHSSGGSQRRGRITKAGNRHVRHLLVQAAWHYRHPPKLTAALNKRQAGQPTAVTDVAWRAQERLHARYRHLAGRKGRQKAVIAVARELAGFIWALARAHADHRATTTTTASTVAA

SEQ ID NO: 466237 - protein, 354 aa, unidentified
MIIFGIDLGSTSRKASKSYISVLNTDTGEIERTSCPTTSEGLLAKIGTYRPHRVVVEQTVGTGWFVDMCRGAGVPEVQVANPRDPAWRNRTSKTDRQDADLLTHLSASGQLRTVHVPPDQIRQWRILIDYRHELVHRRTRIKNRIKSLLRNRGLPTGSLWNREGMASLRAMAMPMDACSITELWRGELFTEYCQLKEIEEHLGSITEHLDRLVAACAPARAMADLPGIGPRTAEAMVATIDDPLRFSDRKKVGGYLGVVPRVRQSGAVARYGGITRSGDALVRTMLTQAVHSAIRRQDGWMYDIYQKHHRTDERCPNRAAMATVRRVSIILWAKFRDHRRANPGQPLFPERVAA

SEQ ID NO: 466238 - protein, 344 aa, unidentified
MKINYIGADVDCIMTELAVEINGKIVVRDRVPTDIRSLGSFLNSITGKKIMVIEEGTMAGWLYRNLRSKVDEFIVCDPRRNKLISCDGDKDDTIDAGDLAILLRGGYLRKVYHTDDEDRLALKEVVALYHDRVRESVRQMNKLRDCCRSHGIKIPAGTVKHLPVRAQWLKQLDPPVLARQLSIRWIGFDAVATQVKMARQEMTRRSKSYPIIGFWKDLPGVGPIRAITLFAYLDTPWRFGSSKKLWKYSGIGLKRFASGSDKEGRPKAGNLRLFRGVNRRLKDAIMGAALSAICQSSNPFADHYERMVRNGVTPSNARHTVARKMLSVMWGMWKTNCRYDENLV

SEQ ID NO: 466239 - protein, 414 aa, unidentified
MFAVGVDVSNGRSTVAVLQTKTSALMKPFEIPHTAEGFASLAGKLAGLDGEVRIVMEHTGRYYESFARAMHSAGFFVSAINPLAIKNYQDGINIRKVKTDKADAMKIARFALDKWEILPQYTPMDTIRYDLKTMHRQFQLSSKTKTALSNNLVALLEQSYPGANRYFDSPARPDGSQKWVDYVDTFWHVDCVARVSQNAFVERYRKWCKRHGYNFSQQTAIDLHTDARQKFPLVPKSDTCKLLVREAVSQLNAVSRTVETYRTEMDRLASQLPEYETVMAMTGVGKSMGPQLMAEIGDIRRFPHQKSIVGFAGTDPIKDDSGDKVSDSKPSSKRGSPYLRKTLFVIMSILLQLHPQDDPVYQFLDKKRSEGKPYYVYMTAGMTKFLRIYYGKVRDCLKEQGLWEQTPDAPGMAD

SEQ ID NO: 466240 - protein, 320 aa, unidentified
MDPNTAQIQFALGFDVSKATITFFDTRTGKIGTVENSKVALRAALKPYAGRGDMLAICEATGGYEDDLLDVLEDLAIPAHRADAVRVKAFIRACGANAKTDPIDARHIAQYGLSRAQSLPRWRPSPPHEAKVKLLVLRRTDLVSMRVQEENRLKAPRNKPIAREIAGHIAEIKRRIEAIDKQIETIISLDKRLKDRKAILQTVPGIGKVIAPMLLALMPELGHIDRKQAASLAGCAPHPRDSGAHKGRRFTTGGRRQLRPLLFTAAMAASHSKSHLAATYRRLLHAGKSKLTALGAIMRHIIVIANARLKEYQNEKIRLT

SEQ ID NO: 466241 - protein, 432 aa, unidentified
MKHKLKQKQNQRITRMTETTLVVGADIAKKVHVARAVDFRGIELGKDCVFHNDQAGLTKLATWMKELGQAHGKSDIVFGIEPTGHYWFPLAAFLQEQGIQVVVVNPHHVNKTKELEDNSQTKSDYKDAKVIADLIRNGKYSEPKLPTKEYAELRILMNLREKVAASLTQVKGRIGNWFDRFFPEYGVVFKDWDGKASLMTMRAFPLPADITAKGARDVLAHWKTEVKRGVGIKRAEQLYAAATSSIGLTEGVIAARIELSTLLAQFDLFSEQVEAIMKQVMGILENIPGAAEMLSVPGIGAITVAGFLAEVGDLNNYDHGQQIIRLAGLNLKENSSGKRKGKTGMSKRGRSRLRALLFRAVMPLVAKNEAFQALHKHYTTRSQNPLKKKQSLIALCGKLICVLYTLGTKQRVYNAIDVLGPARQHQLQLEAA

SEQ ID NO: 466242 - protein, 411 aa, unidentified
MNPVIGLDVAKGESQVQAYLERKKPYKKSFKVKHDLDGLASLLDFIKELEDISGERPPLVMESTGHYHTPVVQYFEDKGYLIIIVNPLISYKAKSSSLRKVKTDIIDANHLCELYYKEDLEPYKKRGIQLTNLRHLTRQHDNITGMFVQTKLQFQAVLDQVFPEYSNVFGDLYSDVSLKILQTFPTSEDILRADNEVLTTKIKEFCNSRSLQWANQQAEKIMTAAAQNPFQKALYSSLALSLDMYINMLFEYKKHLSLLENEIDALAKSIEESKIIRTIPGIGEKIAATIVSEIGEIERFNHPKKLVAFAGLDPSVFESGTFKGTYNRITKRGSSRLRQALYMAVKCAIRDCRKQKTTDEILPRNKKLRAFYDKKREEGKPFRVAVIACANKLLHWIYALLKNKTSFQDLA

SEQ ID NO: 466243 - protein, 361 aa, unidentified
MAEYVVGLDVHKHRTTFVQQDGTGAVTARGEFATTRAGLEEWAGRSSLPAGTRVALETGTLAFFVADELHRLGLLPVVIDAHEVRAKASRPRQKSDRRDAFELCDGLRRAIYRTVVHVPDAGIRRLRVLLARRRHFVRVQTAQTNALKRTLRATGRGALGRSLRTGTAWERLQHATSGLPDVADAVTGHYAIWDAARRQRDAVEAALATEAVAYAPTVARLVTVPGVGPIVALTALAAFADVTRFPGAKEAASYAGLVPSTYQSGACDRHGHITKRGSAELRAMLIEAAHHAARRDHPLHAVFARLCTRRGYKPALVAIAHRLCRILFALLRDQTSFNAGTLGGPVRRPRRRRSVLAAALT

SEQ ID NO: 466244 - protein, 385 aa, unidentified
MAPTGAAGLICLAWEEAGVHRVRRPAGACHPFNQRKEMALTIVETRAITGGVDTHADVHVAAALDPVGGLLGVAEFRATPAGYARLLSWLGEFGTVCLAGIEGTGSYGAGLARHVATAGIQVVEVDRSDRQDRRRQGKSDPLDAVSAARAAQSGRARGAPKGRDGSVEAIRALMVAKRSARAERTQTINQARSLIVTGPDDLRARFAGHTVAALVAQTASLRPRPGSTVGYATRIALRELGRRAQFFDGQLERLDELIVPLVTARAPGLLALYGVGPDTAALLLIAAGDHPARLRSEAAWAHLCAAAPIPASSGKRTRHRLNPGGDRQANHALWRIVITRMSSHPPTRAYVERRTAEGLSKTEIIRCLKRYAAREIYPRLRAAAD

SEQ ID NO: 466245 - protein, 318 aa, unidentified
MSTEIFVGLDVAKDHLDVALRPSGEGWRVANDETGTSQLLARLRTLHPTLVVAEATGGFERAAIAALAAAGIPVVVANPRQVRDFARATGELAKTDQLDAAILALFAERVRPAPRPLPDATTQLLDALLTRRRQLLEMLVAEKNRLGFAPKPLHRSIGQHIRWLERQLDDVTTALTDQVEQSPVWRAKDDLLQSVPGIGPVVSCTLLGELPELGTLSHKQIAKLVGVAPLARDSGTLRGKRMIWGGRASVRTALFQAALSARRWNPAVRVFYDRLRAAGKPAKVALIACARKLLVILNAMVRSNTRWQVLPASAQHSC

SEQ ID NO: 466246 - protein, 341 aa, unidentified
MYRTKVGVDLAKNIIQVCTLHGKKVTSNVEMSTDEFSLWLAQSKPVTVAFEACSTSNYWYQQAIKAGHDARLISAKLVKAVRQNQKTDKNDALAIAQTLFLPEVSFINGKSIEQQQLQSIQRLRELAIKSQNASQKQIVSLLLELNIRLPNTQGGILRGLEGVLEDGEINLSDTFRATLSVAKVQLENMINAIREYDKYLEQSIQSLPDCKKLLKLEGVGPVNAVNLYIALGANQSQPFKSGKNASACIGLTPIQHSSGDKEVMGTIGKYCKNGFLRSQLITGAMSVVIKVIKYGAKTKKELWLQGLMQRRGNRCAAVALANKTVRTAYSMLQNNTEYHAA

SEQ ID NO: 466247 - protein, 412 aa, unidentified
MEVVYPCCCGLDVHKKSITACVLWAEAKGKSRKEKKRFGTFTHDLLQLADWLEQCGVTHAAMESTGVYWKPVWNILAEQFEVLLVNAQHIKAVPGRKTDQKDSEWIADLLQHGLLRGSFVPPQPIRELRDLTRYRVSLVQEINRIANRIQKVLEDANIKLASVATDALGASGRAILQAMLAGEQDAARLAEMSKGLLRNKIPELRLALEGRMTEHHRFLLRQLFEHLRFTESKLSEIEQEIDKRMRPFEDKVTRLCTIPGVDRVTAWGMLAEMGMNMNQFPSSGHLASWACLCPGNFESAGKRLRGKMRKGNVSLRRCLAQAAWAISMMKNNYLSALYRRIAARRGAKRAVMAVAHALLEIAYHMLKRKEDYRELGADHFDRIDVNRIRRSLVSRLERLGHKVTLEPLAQSA

SEQ ID NO: 466248 - protein, 323 aa, unidentified
MSFLSLGIDIAKLKFNVCLIREDGKFRHKVFPNTAAGFAQLSAWLVANNAPQVHACMESTGTYGEALATYLADAGQRVSVINPAAIKSYAGCQLSRTKTDKVDAELIARFCLTQQPPAWMPAAPQIRTLQALVRRLDSLIEMHTMEVNRLSSGVSVAAVETSIQSLIKTLEEEIKRTEKLIKEHISNHPTLKADRDLLLSIPGIGEATTARLLSEINFHQHETARSVAAFTGLVPRIRQSGSSVRGKARLSKMGSPRVRHALYFPAVTAIRCNPQIKAWAKNLRERGKCEMQIIGAVMRKLIHLAYGVLKSGKPYDPLYAQKA

SEQ ID NO: 466249 - protein, 347 aa, unidentified
MRFYTTQHPFYCGIDLHARSMYVCILSHDGELLLHRNMNAAPEPFLKAVAPYREGLVVAVECIFTWYWLADLCAAQGIPFVLGHALSMKAIHGGKAKNDKIDSQKIAALLRGGMLPQAYVYPAEMRATRDLLRRRTHLMRKRAELLAHVQNTNSQYNLPEIGKKIAYKANREGVAERFEDPAVHKTIEVDLALITYYDQMLSDLELFILKTAKQHDAQTLYLLQTVPGIGKILSLVLLYEIHQIDRFPRVQDFASYCRLIKCAKESGGKRLGTSGNKIGNAHLKWAFSEAATLFLRGNEPGQKLLARLEKKHGKGKALSILAHKLARAVYFMLKRQTAFDLEQFLRP

SEQ ID NO: 466250 - protein, 409 aa, unidentified
MLKIVYPNCCGIDVHKTFVVAVIAITNNQGITEYHRKRFSTFTNGLTQLRDWLEYYSCFDVCMESTGKYWIPVFNILEEQTNVCLAHPKYVKAIRGKKTDKKDAQWIADLFKHDLVVSSFIPPLKIRQLRDLFRYRMKLTQLQVGEKNRYQNCLTWSNLQIASVVSDVFGKSAQAIIKSILDNPQDKPNIEQLVHKRMKNKVQDLEIAMEGALTPEQAEKIRVIKAHYDALAICKEDLEQMIRELGQDYQHQVKLIQTVPGFKEDLSALRIISEIGCDMTVFDSAAKLCSWAGLVPANNESAGKKFSTRISKGGKYLKPFLVQVANAVVKSDKHPELRNKYLKLKKRRGHRKAISAICRRLLVSVYQVLRKQEDYNPVLQGLTEIRNPDKTMSVQDAVRFTQQHGFNVA

SEQ ID NO: 466251 - protein, 469 aa, unidentified
MKSTSKKSTSKKSTGKKSTSKVPSKKIVSMPVLHEHAAGIDIGSRSHFAAVGQELKDVRQFGVYDQDLRECASWLKSHGIETVAMESTGSYWQNLYDVLIESGFDVLLVCGRQTKNKDGKTDVKDCRWIQFLHSVGLLTSSFLPDLDTEELRTVYRHRDFLLKQMAKYICKMQKCLRLMNFRLDVVLSDVTGLSGQAIIRAIISGVTDPEKLAALADWRVKASKEEIARALSYNGRMDYMYELSDSFDIYQSYVQKIDACDKKMEELMLSQIIKLKKPQTDPPPLDHKKKINKNSPKIPLEKLSWQWNDQVNLMSIKGVSYSTVLTINSEVGQSIDKFPTAKSFTSWLRLSPDNRKTGGKIISSRVPKGSNRVAAALRHAAKSIGNQKDAPLYPFYQRILYRKGSCAAIIATARKLAVIIWHMLTKKETYQPYDTTKTASQIRTKNVKKINQLIRLYDVNISELILVSA

SEQ ID NO: 466252 - protein, 396 aa, unidentified
MFIVGIDIAKHTHQASVMNPDGSLIGKSIKISNTSSGFEAFIAKLKDIDPDLSHFEFGMESTGHYWLNLYTHLSDLGCTVHVINPVQSDALRGLYIRQTKNDIKDSAIIADVIRIGRYCETTVSDDKMLALRDLTRQRFYLVDMISDLKRKSLTLIDRIFPEYPKLFSDTFGSTSLELLANCNTPEDIIAIDTDKLVEMLSTASKGRFKREKAEKIKAAAQNSFGALLCTDSTSFMLKQFVEQIKFLENQLDELNEMISERLAEFNSPITSITGIGDVLGASILSEIGDISRFESADKLAAFAGIDPTVSQSGNFLGTKNKMSKRGSPYLRRAIWLAATAAILHDPAIKAFYNRKKAQGKHHYVCVGYICRKLVNIIFSVLKSGQPYRPVFPKNLI

SEQ ID NO: 466253 - protein, 334 aa, unidentified
MNYNFFIGIDVSKKTLDFAVLKDKDLLFKWAGENDESGIKEFWKQLKSQKSFCINEAIFCMEHTGIYNQHLLSFLYARKASVCLEAAIHIKLSSGLQRGKSDQIDAVRIAQYAYKNCAELRLWQPKRQVIQQLKYLSALRNRVINARKQLTVALNETVSFDKIAASECKKLCKASLKALDEDIKRIEIKMDQVIASDEELKALFLIVTSVEGIGKVTATEMIITTNEFKDITEPSKFACYAGVAPFEHSSGTSLKGKPRVSHKANKTMKSLLHMAALVAINYNTDLKAYYQRKVEEKKNKMSVINAVRNKLIWRIFACVKNNHPYQKNYQLTIA

SEQ ID NO: 466254 - protein, 301 aa, unidentified
MQYYVGLDVSLKSTHICVMDQDRRVVWRGSADTQPSMISERLKRWNDHLVKVGLETGSLTPWLYHELKDLGFPIICMDARRAADALKARPEKTDKADAQALAEMLASGWYSAVHVKTMESHRLKALLGAREHLVNVKRQLYGQVRGLLRPFGIKISARAGGKRFDEEVRSSCNRHDALYIGIAALLDTLAWVEVELAGLDKKVRQITAASKPYWHLMSVPGVGPLSSLAFVATVEDPRRFGKSRSIGSYVGLTPKRYQSGDRDVTGSISKQGGDMLRHYLYEAAGCLPTTVPRRRPCEAGG

SEQ ID NO: 466255 - protein, 443 aa, unidentified
MAKITKLPVRDQKWAAYAALDWGDRKNSWIVLAAGSDTPQQGEIENTPEAVDNWAMELHHRFQGRPVAVCLEQKRGALVYMLSKYSHLVLMIAHPNTAAAYRETFAPSGAKDDDGDTFSLLDLLMRHPDRLRQLDPDTEETRLLQFLTEDRRRLVDLRTSECQRMRARLKLYFPQILQWFDDLTSPLVSDLLKRWPTLEELQRLNPAKLCKFFTGHNCRNQEKIQARIQEIYAAMPATKDQAVIRAASVAVRAQVELISTLRSQILELEKQIQQLEAEHPDSRIFRSFPGSGDALTPRLIAAFGTRRDRYKDAEEIQTYSGIAPITRASGQKEKAYFRWAAPKFLRQTFHEFAACSIAKSKWAKAYYDYQRQEQKKDRHAALRALAYKWIRILFRCWKDGTLYDERIHLQALQRRAAPLAAARTDNTKAQWTRAAGFHKLSAN

SEQ ID NO: 466256 - protein, 386 aa, unidentified
MIYIGIDISKYKHDCFIATETEEHQFSFENSQSGFNELLGHFKPLVKQEMIIGLEATGHYGENLKSFLTLHGYSFMEINPFLVKKFSEAHSLRKTKTDKKDAHTISTYMRSVDYKAYHHQSYHISALKSLTRLRFKLISDRTKHYNMMTKVLDVIFPEYKPFMREQGYSETTLYILKHFSSSERIAKMNDVHFDKLRKLSMGRFNYPKFVKLKELAKSTIGVTQDHHLFKLKTSISYVEKLNRDIDETEKRITSLMDRYPTKIQTIKGIGIISAAVILCEYGDITLFSNPAEMLSYAGLDSTIKQSGTMSSTGKLVKRGSKYLRATLINVCMMVMIYNPVFYVYYTKKKQEGKHHRVAMVHLAKKLVRVIHHLETNHVDFDSSKLI

SEQ ID NO: 466257 - protein, 412 aa, unidentified
MDVLIERCAGLDVHRDTVVATVRRPGPGGVRRSETRTFTTMTGQLETLADWLTEQKVTLVGMESTGIYWKPVYYVLEDRVPVWVINAEHLRNVPGRKTDVADSMWIAQLIEHGLVSPSFVPPRNVRLLRDVTRHGRRLTEERTRAIQRLEKVLQDAGIKLTSVASTILGKTGRAILAALLAGEEDPAVLAELAKGRLRPKIPVLREALTHRFRLEHHGALIAQMLAHIDFLESAILETHQRIEVLLRPVADIVELVMTIPGVGRRTAEVLIAEVGLDMTVFPTAGHLASWAGICPGNNSSGGKRRPGRTRHGSMWLRIALTEAAQVAARGKGTYLAAHHAQIRGRRGTQKAIGATRHDILIAYYHIVTNKVAYHDLGPDWNDRRRSTEQQTKRLVRQLERLGLNVTIEPSGA

SEQ ID NO: 466258 - protein, 478 aa, unidentified
MSKQSSSTGSSTAENGRREDGPKVAGRKRKKTQGEPRVCQPAAAGCDIGAREIFVAVPPDLDENPVRKCGTFTWELNAMAEWMVSCGIKTVAMESTGVYWIPVYDVFEKHGLQVQLVNPRNMKNVPGKRTDFHECQWIQYLHSMGLLAGAFRPGADVRAVRTLMRHRSDLVEMASQHVQHLHKALTQRNVQFQHVISDITGLTGLAILDAIIAGERDPAVLAKLRDPHVKASEETIRRSLEGNWCPAQILVLTQRLSLYRGYQRQIEECDKSIENLLNTFTPMTDPDQKPMPADRKQKQRKRKKKTGDPNFNMREEAYKLFGVDLTQIPGLMTLVFPLFSEVGRDMSRWPSSAHFVSWLGLCPDNDISGGKVLWRGNRRVKNRAGTLFRLAAHSLHRDQTPMGAYLRRMKAKLGPSAATTATAHKIAVIFYTMLKNQVEYDATLWAERDLLREKRIEANLHRQAARRGYQLVPLEAVA

SEQ ID NO: 466259 - protein, 348 aa, unidentified
MQFYTNLHPFYCGIDLHARMLYLCILDARGEILVHKKIKDSPEQLLHLLAPYIGNIVVGAECMHCWYWLSDFCEHHNIDFILGHALYMKAIHGGKTKNDKIDAYKIAKLMRGGNFPLAYVYPKEKRAIRDLLRRRTHAMRHSAELKAFIKNALSQYNLPVPEKSDLSYTTGRDAMRGYFPNPQVQRSIDMNLRLIEVYDHEVSSIECYVEKLTKHDNGRDYYLLRSLPGVGRVLALTILYEIGTIKRFDSVQKFASYSRLVKCKAESAGKAYGTQGNKIGNAHLKWAFSEAAVLFLKGNPPAQAYLAKLQKRMSKAKALSALAHKLGRCMYFMLKNQTVFDSERFLAG

SEQ ID NO: 466260 - protein, 325 aa, unidentified
MDEKGKVHINCRMVNEKVSFDALKRRLNGNEPLKAVIEAGRNWGMMYDLLEEIGIDTTVAHPLKVRAIADAKIKHDSIDARTLAHLLRADLIPEIHVPPKDIREQKNLLRHRFWLVKLQTMTKNRIRQIIDRNHVRTPDVTDLFGKTGTKFLKALKLPGIDGKLLKDHLEILYELSEHIKKTEAWIDEVLNDNLYVTILDTLPGFGKIFSALAALEIDNINRFPTKAKFASYCGLVPSTFASGGKVYHGNLIPTGNRWLKYVFIEASWPAIRTSNYCRAYFNRIKYRKDGNVAIVALARRLSEIAYKCLKEERYYEERPYIPYTR

SEQ ID NO: 466261 - protein, 317 aa, unidentified
MAMQVGKVIVGADVAKAELVIHHDDRDEIVRLKNSKLEIKRWLKQQPLNTAIAVEATNVYHLDLVELAHSMGFEVYVIDGFQLSNYRKSVGGRVKTDPSDARLLSRFLKNEGEDLRPWSPPPTVYGKLQSLLRRRAALVTARTAMTQSWANESLLKAAFETFVKSIDRLDQLIQKKIKEVLREAGLQEQVARCQAVEGIGFLTAAALVMAFMRGEFKSSDSYIAFLGMDLRVSDSGQKNGRRRLTKRGCSEIRRLLHNAAMAASRSAAWKGLYEQHRNAGKATTQALVILARKLARVAFALMKNQDEYVTKGGKLAC

SEQ ID NO: 466262 - protein, 391 aa, unidentified
MIFMFFLGIDIGKNTHVASLLDEKAKIIFKAYSFANTLDAAEALLVKLEPYKDSLEIGMEATGHYWLSLYSFLSEHKFIVHVLNPIQTDGWRKGIEIRKRKTDVIDSVLIADLIRYGNFLETSLADEDILSLRNLSRFRVYLVNSVSDLKRKAIAVLDQIFPEYASVFSNVFGQTSKELLKSLSLPSDYENLSATKIEEVLSNITQKKKASKTISTLSDKASRSFGISFCKDSFAFQLKLIIEQICFIEEQIASVELEIDQLMSKLGTNIKTIPGVGSVIGAVILGEIGDIERFDNPSKLVAYAGLDASVSQSGEYEASSGKLSKRGSPYLRKALYMAAQRAEFCDPVFHAYYEKKRNEGKHHLVATNAVARKLCHTIYAILKKDVPYEVQ

SEQ ID NO: 466263 - protein, 342 aa, unidentified
MDVSLESVCVCVVDGSGRIVREAKLASEPDALIGWFTALDFPVARIGLEAGPLSQWLYAAMAQAGLAVELLETRHVRDAFKAMPVKSDRTDARGIAQLMRLGWFRPVHCKSLPAQEVRALLTARKLVQAKRHDLEMSLRGILRGFGRKVGKTTPRMFEGRIRELVAGHATLTVIADALLAARAALARELRGLEKRVRETARTDERTRLLMSTPGVGAIVALTYVAAIDDPGRFRSSKQVGAHFGLTPRKYQSGETDVTGRISKIGDGSVRTVLYEAANIILTRPVKGSTLKRWAMAVARRAGPRKAKVALARKLAVVLHRMLADGTPFVAEPATRAPIGAAA

SEQ ID NO: 466264 - protein, 341 aa, unidentified
MKKNLFFIGLDIAEADFAASIYKTPDQPIVTKEAIPNNPEGFNLLLLWLKEHHIDKTNSRICMEATGVYSQAIAYYLLFAGFPVSVEPPLKVKRAFDPIGHKTDPVDSKQIAEYAYRFQDELTSWQPRDEILEKIRQLLSVREQFTKQKVALKNAMQAYSKQRVQVALIKKAHQETLAQIEKQISRIDKELAKLIKQDPQILQKADYLKSIPGYGMLLAAHLLVITENFTKIQNSKRLASFVGIVPYQHQSGTSVFKKAKIRHFGPGPSRKLLRLAAQSVATHDVTFRRYYLRKLAQGKAKSLVLNNIANKLLKVACAMIRNNTRYIKEHRSIHPMYLKSA

SEQ ID NO: 466265 - protein, 406 aa, unidentified
MKQIVSVGIDVSKGKSTVCAMIHPNTIIKESFEVLHTVEEMSMLADYIGSLDGEIRIVMESTGHYHLPVAQFLYQKGFFVCVENAYIIRQFSRIMLHGAKTDPLDAKKLAKYGLAYWSELKPYKFHPSCYTELSLLSKQYQTYIKLLIAAKQNVIHLMDEMLPGFKEALDTASSVQFSKVKYVDFAKEFYHVDMIKTMGKEIFRENYKQWCKEKGYRFQSEKADELFHLAEDGIPTLPTEFPSTRLCMEVATEQVSQLGYALEQILSQMQNLAKTLPEYQTIRQMGGMGEKLCVRFIADIGDVRRFHNGKALVAYAGIDAPPYQSGQYTGTKRRISKRGNSALRKTGYEVMKSLKSHPPKTDTRVYDFIIKKENEGKSRKQAKIAGLNKFLQIYYARVIEIYKNIV

SEQ ID NO: 466266 - protein, 339 aa, unidentified
MKFTPVGIDIAKSVFQVHYVDERTGEVVNRALRRGVFLEHFANRGPCLIGMEACSGAQHWARALTKLGHQVRLLPARLVKAFNIGNKNDAADARAIWLAVQQPAKSVAVKTEAQQAVLALHRMRQQLVKFRTMQSNGLRGLLTEYGEVMGKSRAALDKAMPQVLARLCERLPAMLIESLREQYARLAQLDEQIAQIERRLRQWLREEVAVQAIAQIPGVGVLTATAAVASMGDPQAFRSGREFAAWAGLVPRQTGSGGKVQLHGISKRGDTYLRTLLIHGARSVLQHAKAPGPWVEQLGQRRPPNVVVVALANKMARTIWAVLAHGRAYQPGHLSVRPA

SEQ ID NO: 466267 - protein, 428 aa, unidentified
MNGKEIIRHEKYCQLRKEIRGSEDHMIVGIDVAKDKHHAFFGTATGKTLLKRLIFENDIDGYSRLLVRTEAIRVQNGLSKIVFGLEPTGNYHKPLATHLIKCDHNVVLVSGVAVKRNRELLDGRWDKHDTKCAANIADLISQGKCLFYEYPLPDINELRNLLSLRKRLKKEDHSLRMRIRNNLLAKYFPELDRFYGQCETENLAIVRWCLEPGKIAGMEFNKFFQMVTTRERGIAQKQRLRKIHSLSSESVGCPMGQASEFEAQVLVDKLKQVRQVIKKTEDLIEDVSLGLPEYSWMLTIPGFGPYVSSIVLATIGDPFRFKNRKQVLKMSGYDLNANRSGKTSLSAVPVISKKGSSALRYALYQAALVASTRNGYFINYYTNLLRGREREQGIKTKMRVKLAAKMLIIAWTLMKKKEPFNPNYLNKK

SEQ ID NO: 466268 - protein, 434 aa, unidentified
MRILYERCCGLDIHKVSIAVCVVITRDGKTEEETRRFGTMTADLLELAAWLKARGIQHVAMESTGVYWKPVWNILEAEGFDLLLANAQEVKIVPGRKTDQKDSQWIADLHQHGLLRKSFVPPRQVRDLRDLTRTRAMLAQEHSSTCNRIQKVLEDANIKLGSVASDVFGASGRAMLLAMMKGESNAEALAELSKGRLRTKIPELRRALEGRVTGHHRFLIDRHWRQMESLENQMRQFEAEIAERMKPTPEEVARMRESLPADAPLPPSPREEAILLWMELPGVGLTTACSMVAELGVNMEQFPTSAHVASWAALCPGNNESAGKRMSGKTRKGNVWLRRTMCEAAWAAAHSKGTYFAAQFGRIAARRGKKRALLAVAHSLLVVAYEMLKHKQHYRELGADFFDGLNKDQVKRRLVQRLAKLGFQVTVTRTPTAE

SEQ ID NO: 466269 - protein, 473 aa, unidentified
MIKSVGIDLGGIGEHRVRCLDEEAQMCDSFGFDTTRVGLEKLEERIFKDGSNPVIVFEPTGLAWLLVAVYLKSRYPDSRLVRVQAQKVVALRKYLNRSSKSDKIDSLTLAKMPFIDPEKLEEIYLPPGTIYAIQRFTRQRKRLESEIAGHKKRIGSIVDGHYPGLRSAFSDPWSAHARAFLRSRLNPLTVVRAGENALYRFLTRARKHGRIEASVESHGVYLVCRELSAIFKASNSVETIDDVFYSAIQEEISREMKLLEIKEAESAAIAKRVEKLYIEIHPSDNLRTIPGVGNHTAPIFVATIGDPKRFRSQSAFANYCGIVPGASQSSDSEAKGLRMTKAGPPIMRWALFQAGGIGRAHDPQLACLYYREMVHNGKNHMQAMGAVMSHLSARVLAVLREDKPYILRDIDGSPVSREEARKIIQEKYQVPESIRRERRRRKTPGSPSLQKKLREMLIPRIREAAETPQPVVT

SEQ ID NO: 466270 - protein, 451 aa, unidentified
MAPGYNSLGVPTDALITNTGGAIKMKNSTARKLEQLPTDYLIVGIDAHKKKHAAVVKTQDAFTRAKFKVSNSRDGFVELLERTKVQMVKTDSRCTIFAIEAGGRYWRTLAYFLEERGIPFQLISPFTLKRRREGEDINRRKNDYRDADMAAELLRTGKFTETRLPQGIYADLRAAYHTYYGLGRERSRATNLLSALLDSLFPEFYTVFKDISTKTALAVLAAYPSPHVIAEMSMEKFMDTMMTKYKGQYLIRKKVSAIYQAAHNSVGIHAGTGVICFEISLLVERIRLLTEHRRKVEDLIVTLVEWIPESKYLLSTPGLAHITIAGILGELGPLNHYRSGKQLVKMAGINPIQSESANKQASKTPMSKKGRPLLRYCLWEASLTILNHNQEFKAWAKRLQERPLHQNPLKKREARGAICKRLLYLVFALFNKHSFYEKNYKVETERELVAA

SEQ ID NO: 466271 - protein, 348 aa, unidentified
MTLYIGVDFHPHQQTVAWCETETGETQTIDLAHNVDDIRRFYASLPGPAIVGIEASAKAIWFENMLFETNHKLLVGNPVLIRKRATSRHKNDHRDAELILKLLLRDEFPAIWRRPPESNQIIEILRLRLKLVRQRTQVYNRLQSLAHNAGLPKGRMRTSVFQTVIKALDMDETDSMQRMHLFRLLENFNEQIEELGTWLRKKAEPDPKVELLLTQKGVGYLTALAMVHTIGDLSRFTRVPKQVTNFVGLDSLEDSSAGKIRFGKISKAGSSLLRFQLGQAAQIAARSDMKLKSFYKRLAKKKPKGVAKTATARKLLVKLSIMLRDNITADEFDRRGTHSWQCSKSLGV

SEQ ID NO: 466272 - protein, 343 aa, unidentified
MEMKVIGIDLGKSVFHLVGMDQHGKVVARKRLSRSQMMVFTAKIPHCLIGMEACCGSHFVGAALTAQGHEVRLIPAQFVKPFLKSNKNDYLDAEAIAEAVQRPNMRFVPIKTDDQLDLQALHRVRDRLVSRRTSVINQMRAFLLERGITFRQGRAYLRKQIPELLGDAEQKLSPRMRQLVDRLWQEWKALEEQIEALSREIESIASQDAACQRLLDVPGVGPLVATALVAAIGNGAAFTKGRDFAEWLGLVPRQHSTGGKAWLLGISKRGNAYLRRLFIHGARSIVMSLNRDNHAIGKWMSQSGARTHRNVLVVAVANKLARIAWAVLARGEVYRSTPAFVAS

SEQ ID NO: 466273 - protein, 341 aa, unidentified
MPAIGIDTHKRTLAACAVDDVGSVLDERTFSCDRAGFVELAAWAAGVALDVRIGIEGSASYGAPVAHHLIAARFVVREVPPHLSQRERGRSRLPGKSDPGDALAIARVTLREPDLPPVRLEDRSTELGLLADARDDLVHAQTRARNRLHAHLVVLLPGYGRTAAQLVSGRQLEAIERALAGSTGVRAELARGLLAEVRDLGRRAAELERSLAALVAGHPLLALPGVGILTAARLVAEAGDVERFRSPAAFAMLAGVAPIPASSGEVRRMRLNRAGNRRLNRALYTIALSQAWHHAPAKAYIARKRAAGKSWAEALRCLKHRVSRPVFRLLQAGQSEWARAA

SEQ ID NO: 466274 - protein, 448 aa, unidentified
MMEPNAAGVDIGAMEHWVAVAPDRDEQPVRKFGTFTSDLYAIADWLRLCDVKVVAMESTGVYWIPLFEVLVERGFQVDLVDARHTKNVSGRKADVTDCEWIRQLRSYGLLSPAFIPAADMAVIRSYVRHRQMLIQYAAIHVQHMQKALTLMNLQLHHVISDITGVTGMRILEAILHGERDPHRLAEMKDRRIKNDTQTIARALEGHYRQEHLLALKHSYDLYQTYQSKVADCDQQIQQYLKTLESKANPDTLPKSSRKRQRKPQRNEPNYDCRREMYRLTGVDLTRIDGIDAAAAQIIVSEIGRDMSPWTTEKHFAAWTTLAPNHQISGGKILRRRPKRSPNRFALLLRMCAQSLLHSQSALGAYCRRICGRIGTPKGLTATAHKLARLIYRMLKYGDSYVDIGQEQYEKKYKQRLLQNLRKKANEFGFALIERSALPQNSPSPQEVS

SEQ ID NO: 466275 - protein, 350 aa, unidentified
MTESYDGRQVVGMDLHRQRSVLVRMTEDGRKLDTARITNSAPELRRVIAKAGEHPKVVLEATYGWYWAADTLQAAGAEVHLAHPLGVKAFTYRRVKNDERDCADLADLLRLGRLPEAWIAPPRVRELRELTRYRIKLVRARSSAKDQVHAVLAKLGIPVPCSDLFGVFGSAWLDALRLPQPYAGKVASLRQLIGWLSGEVSLLDEVIADFLGAHRPYQAVLRLPGLGPVLAAVAVAEIGDVSRFPGPGQLCSWAGLTPRHRESDLKVARGHITKQGSPLLRWAMVEAVQHQPAGSPPRELKDSITARRGSQAKNIAKTAAARKLLTCVFYAMRDGEVRSLAARSSAAEAG

SEQ ID NO: 466276 - protein, 363 aa, unidentified
MKFKRIAIDTSKHVFTLHGVDDQERPVLRRELKRAQVESFFAKQQATEVVLEACGGSHHWGRLLSRLGHRVRLIPPQYVKPFVKRAKNDRNDAEAISEAASRPTMRWVAVKTVDRQADGIILKHREMLVGQRTQAINALRGHAAEFGVVAAKGTVKVAPLVTVLSADSAIPATARAMFAQMGAHIAALDQQVAAVDDELAALHKTNPVSQSLAAIPGVGPLGAITMALTVEPGNFASGRHFAAWLGLTPKDIPPAASSAWARSARPAMNGYGSYCSSAPCPSSASPTRQQIRLGVASAIAGAQAAQARRGGSGQQDSPDSLGHDVASGSVSASAGRGLSRAAAEGSRASKRWLSVEPTRDKIR

SEQ ID NO: 466277 - protein, 417 aa, unidentified
MNQYAACLGIDWADKKHDLCLLDTATGKKTRLVLPHTPQAINEYFTGLRARYPGQQIAVGLEQSRGPLLFALLQFDCLVIYPINPTTLAKYRQAFSPSRAKDDPTDAEYAAELLMKHSDRLKCWHPDDDQTRTLRYLVEHRRRLIGDRTRISNRMTSLLKCYFPQVLSWFPDLATVLVCDFLLRWPALERLRGVKRTTLLNFFRAHHSVRSDTLEKRLAAIKESVPLTTDRAIINSSVLMITALAAQMKTTIEAVRQFDTEIEKLCAAHPDFHLFQSLPGAGDVYASRLLAVMGTQRDRWTTAQELACLSGIAPVIERSGQSTWVRWRYFCPKFMRQSFHEYAGESVKHSFWARAYYQQQIAKGKNRQAAVRALAYKWIRIIWKCWQTRTSYNEVSYLENLRKKGSPLLSYVAKNAA

SEQ ID NO: 466278 - protein, 419 aa, unidentified
MTSSKTKKGKIINEKTMIAALDIGKGAHYAYFRAPNGRDSKPFSFHNARKDFDTFWMRLCQFKKEQGLKDVVIGFESTGPYAEPLFHYLRKKPVTLVQINPMHGKRVKELTGNSPHKTDKKDPRVIADVISLGHALTLVVPEGAAAHLRRLTQARERVMRSRTAMGNQLQHLIFVIFPEFFKVFKDISTKSALYVIKNHPTPESIISADRKSLTEILREVSRYQLTHGRINELFEAAQRSIGIEDGKESICMEIAHLVSAIEHASRFIDEVEQQMAHHLDHIPYSHCMLSIKGVGLITVAGLIGEVGDFKRFHTISEMMKLAGLDLFEVSSGKHRGKRRISKRGRSLMRKLLYFAAINVVKSHGIMHEHYQEMLNRGMVKMKALVAISRKLLTLIFALARDNTVYVENYSTIHNVKLAA

SEQ ID NO: 466279 - protein, 353 aa, unidentified
MDRYVGVDAHAETCTLAVVGPSGRRLTSKVVETNGQALVEAIRSIPGRVHLCLEEGTQSAWLHEILEPEVSEIAVVSPPETRGAKDDLRDAWSRAEELRVGAIRTRVYKAPKHWAALRSAATTYRMATQDVVRVKNRLKAVLRGRGILADAGVYERKSRGKWLQELPPAGHRPAAEWLGRELDQLVPLREEAEGWLLKEAKAHSIIKKLSTAPGLGPLRTAQLAAIVITPHRFRTRRQFWSYCGLAIVTRSSSDWVPGQNGKWTRAVVRQTRGLNRKRQPVLKAVFKGAATTVITQLREHPLHMDYERMLQSGIKPNLAKLTLARRIAAIVLSMWKREEVYDPERHKPVIAKS

SEQ ID NO: 466280 - protein, 462 aa, unidentified
MPKGIPVNRHAMVVPPTPAPHEPTGPVLVGLDISQCEIAACLLLADGQTVDRWTEPNNQPGATAIAERLVDLAKKHGFSRVRIGIEATNLYWWHLANFLKDTPLLTELTPEVYLLNPRLVSGLKKAYSDQGKTDRIDAFFIAERLRIGRLPAPFELDRLYAPLQRITRFRFHLANTLAREKNYFLTFLFLKFSAFSQVEPFGDPFGATSCALLDEFTTEQLIQTPLEELAGYLDEKGRGKFIDPSALARTLQRAARDSYRLDKVMHEPVTLVLGTTMATIKTLQRQLKDIDQTIARELEALPLDRRIIRSVPGLGPVWTAGLVAEIGDIHRLDNEASIAKLAGLVWHPHQSGSFQAEDTAMAKTGNTYLRYYLVEAANSVRQHCAEYRQYYQMKLVQSPKHAHKRALVLTARKLVRLIDTLLRTGAVYQPPEARQGHEEVRAFHQAARPGTLRRTRQGIAVS

SEQ ID NO: 466281 - protein, 365 aa, unidentified
MSSVTPAAGAIHLGMDTSKNTIVVAVLMPGEEIPVLDRIWNEEGSVRHLIGRLGEAGALRACYEAGSCGFELHRLLSWMGVACDVVAPSLIPRRAGDRVKTDKRDASRLARLRRAGELTPVRVPAEAEEAVRDLVRARAALLADRKRAQQRIIAMLMRHGRIWRASSWTQAHERWIAGQRFDEPALAAAFAHYRAALGTRLAELDAVEAELAPWAGREPLGPLVARLGCYRGIAELTGLTLAAEVVDWRRFPSARAFMGFTGLVPAEYSSGERVRRGSITKTGSGPARTALIEASWAYRHTPAIGVGLRRRQRDASPDTLARSWRAQRRLHARYKALTARGKPPGMALTAVARELAGFVWAEMTS

SEQ ID NO: 466282 - protein, 351 aa, unidentified
METQQTASSKLFIGIDIHKRSWKIHCATDLFSGKTFSMPPRPEVLKDYVAKHYSDYEVTTAYEAGCCGYHAHRCFESYGWSSLVVNPADIFRKGKERFTKTDRIDAQLIARELKDGRLKSICVPDKCREQLRSLFRRRNDLVKDMRQIKRYIKMQLLYYGIEIPPEYDNDHWSHNFRYWLDDLKFEYDTGTEVLRSRMRSFRFIDQEFRDVSTLLRRHTKTHFKHDYMLLRSIPGIGPIVASGILSELGDLRRFKSIKHLAGYVGLAPGIYQSGDTLRHTGVSMRAHRLIRSYFIEASWQAIRTDPVMQEYYRKHQGKNVKSIIVKVARKLLSRILAVIKTGIPYEIGIVE

SEQ ID NO: 466283 - protein, 338 aa, unidentified
MKLYGAIDLHSNNNVTVLIDEQDQVVYQKRLPNDLPLITQQLSGYRDRLQGIVVESTYNWYWLVDGLMDQGHRVHLANTAAIQQYEGLKYTDDHSDARWLAHILRLGVLPQGYIYPKEERAVRDLLRKRGQMVRQRTANLLSIQNLITRNTGSSISSNRIKTLDAEQVDDLLPNSDLALAVKANLAMIQCADGQIDILERTVTDRVKLRAEFSFLKTVPGIGQILALTIMLETGEIKRFPTVGDYASYCRCVGSQKLSNGKKKGSANTKNGNKYLAWAFVEAANFAIRYNARIKSFYQRKKAKSHGVLAIKAVAHKLCRACYYIVRDQVPFDVAKAFA

SEQ ID NO: 466284 - protein, 403 aa, unidentified
MNDCFAGLDWASRTHAACVIDERGSVRAHFEVAHDAAGLTELVRTLRRLGVTAVAIERPSGLLVDALLEAGLGVVPIHPNIVKATRPRYRSHGGKSDASDAYLLADLLRTDAHRFRPLAPQSDEIRALRALVRGRDDLVIARVRLANQLRSLLQSFWPAAAEVFADIDSPIGLAFIQRYPTPEAASRLGPKRMAAFCAQHGYSGRRSAQELQQRLHLAPAVNTAELEMEAKGELALTLARTLAGLVEHIRSLSSRIEHHVASLEDGRLLMSLPRAGRLCAAQILAELGSVRERFDSDAHLAAEAGVAPVTYASGKTKAVTFRWACNHRLRAALTCLADNSRHASTWAATVYAKARSRGCDHPHAIRILARAWLRVIWRLWQDRKPYDPTRHRAAATLLTAAGG

SEQ ID NO: 466285 - protein, 320 aa, unidentified
MMTQGNLVVVGIEVAKDKVDACIRSLSRRQMFPSSAEGRRALIGWLRKHKVGKAAMEASGGYERDWAKALREADIEVRIVDPKRVRSFARSAGRLAKNDAIDAEMIGWFAETFGEVPGQAYDAAREKLSQIVNARQGLLDLQTKLQNRGEHAGPEPVQKMQARLLKKIAVEVAKLEAVIAAMIKTTPHFAELAAIIESVPGLAGTTSAGLIARMPELGQVSNKIAPALLGAAPYDDDSGRRRGERHIRGGRRKVRNLFYMACLGAATRHNPVLKAFYRRLIAKGKEPKVALVACMRKLIVILNTMIARRQKWDPGRYALS

SEQ ID NO: 466286 - protein, 401 aa, unidentified
MKTVLSVDVAKNKSMIMLMNSDGEILIDTKEIKHNLEEFEKVKAEIKEINPQNLTVFMESTGTYHLPVERYFKENGFNTLVINSLTTKNNYDTIRKTKTDKKDCYRLAKLFFVNEVEYHELSKKDLYANLKAMTRQYFYLLQQNVSCKNRYKRLINICFPELEKIFKSTRIYDDTALNFIKEFPHAEIVKEKRIDALYNNLYKTNGRNLNFYKKLATTIKTASANSYPGVDKEHEDVQNLSYMAKIVQNNNNIINELREKMIETAKQSPYFKIINSFYGIGEILTAEILGELGDITRFDSPKQIIAFCGLDPTIKQSGKSINVKGAISKRGNKYARYILFNCSQMVVKLGASNYPEHPVYIYYQSKKAEGKHYYESLTACSTKILRMLYSMCKNNKQFLEN

SEQ ID NO: 466287 - protein, 429 aa, unidentified
MTIPHEISYYPLSFTHLYSPVAQSVEQVAVNHWVGGSSPSRGANLIKQLVSFTLVYKNRLRNGMDPPLLNAASDEPKWLSFDHLTKGGESMENPTLLGIDIAKDVFQLHGVDDKGKSVLRRKLTRTKLAEFMAKLPLCVSVMEACGGANYWYRKFKAMGHEVRLISPQFVKPFVKTNKNDPNDAEAICEAASRPSMRYVSPKSIEQQDLQAVHRIRTRLVEERTALINQIRGLLAEYGVVVPKGINQIRKKLPEILEDAENELSHLGRELFFDLYQEISEIDEKIEKYSVKLGSIFASNELCQRISKIEGIGIISATAVIAAIGDPKTFKNGRHFSAFLGLVPRQSSSGNKQKLLGISKRGDAYVRTLLIHGARSVVRTVGSREDSRSQWIRNLKERRGANKTAVALANKNARIIWALLAKEKHYEKAA

SEQ ID NO: 466288 - protein, 350 aa, unidentified
MIIIGADYHPGFQQIAFVDTETGDCGEQRLEHCDGAEKFYRDLATHGRKVRVGMEASGHARWFERLLGELSIELWVGDAAVIRAKRGRKAKTDRQDAQHILNLLLKDDFPQIWVPSWENRDMRQLLWHRHRMVQARTRIMNQLQAVALNEGLRCKKKLWREHGREQLETFRLAPWTSRRREDLLQLLDRLNPTIAELTQAIEREAEKSPQARLLMTHPGVGALTALAFVLIIGKAERFQCGKQISCYLGLVPLEESSGERRRLGHITKQGNSLLRFLLVEAAQATTRTIPEWRSKYMHLTMRRGRKIAKVAMARKLAIRLFWMMRQGWNYQQVMKFGSHVGQPGNRHGVQ

SEQ ID NO: 466289 - protein, 354 aa, unidentified
MKSKSIEFSGMNVYVGMDVHKKSWSVTILTDDMEHRTYNQPPSASALHRYLIKHFPGADYYSAYESGFSGYGHHRKLLGLGINNMVINPADVPTTGKEKAIKTDKVDSRKIAKGLRSNTLKAIHIFSEADQDLRSFARMRHIMQRDLRRSKQRIKMYLLFNTISIPLALDNESWTNAFEAWLKKVSFPTPRAKRAFEFLLCNYHFQKQQVRQISKELRAYFRKHHKQIYYLLRTIPGIGPLSAIAIITELGDINRFANINKLSSYVGLIPLMSNSGETEKVGRITYRCNNYLRTILVEASWQAVRKDPAMMMYYRQHAAKGNGKRAIVKVAGKLLNRIRCVLKNKQAYVLGVVE

SEQ ID NO: 466290 - protein, 346 aa, unidentified
MNYIGMDCHISTLDFAVVNDAGRLVKAGSVATSVNRFIEFVKEIPLPRTIYIEESTLAAWVLEICIRYGEKLVITDPKKNLWIASSGQKGDSIDALKLAQLARGGYIKEIHHPVGQRRRFRELMEAYHDTVRSEVRIKCKIKAKFRQNGIQCTGDTVYAKNHRQEWKDKLPQEATLLLILEGLWLQLEQLEQTEKEILKAAKAQAKHYPEIKHFEDIPGIGFINAATISAILETPYRFPNKRKVWMYAGLGLMKRSSGGKLYSEKLSTDYNRLLKYTIKQAAEAAIRAEDNPLRRKYLDMTLLHGIAPNLAKLTIARGMLASMWAMWEKGEKYNPEIRERATHKQG

SEQ ID NO: 466291 - protein, 369 aa, unidentified
MAETTEAFVGIDVAKLRNAVAVADAGRDGEVRFYGEVDASPESMRRLAAKLAGKHERLHFCYEAGPTGYGLHRLLTGLGHSCVVVAPSLVPRKPGDRVKTNRRDALSLARLLRAGELTPIWVPDTAHEAVRNLVRARAAAVKDVGLKKRQVGAFLLRHSRLFPRKKNWGARYRSWLETQSFEHPADQIVLQEGIESVRLAEERLARLDRALGEFLPTWSLAPLVEALQALRGVDLVTAVTFVVEVGDIRRFESPRQLMGYLGLVPGERSTGETVRRGSITEMGNARVRHLLVESAWTYRHPPRVGKAKLPKLERVSPKVREIAWKAQSRLTARYRALTARGKKTTVTCTAIARELAAFMWAVAREARPA

SEQ ID NO: 466292 - protein, 320 aa, unidentified
MACLIVFVGIDVSQDWLDVHLHPLREELRVANTAAGWRELADRLAVHPNAKVAAEASGGYEKGVLRHLCAAGFAVHCLNAGRVRQFAHAGGRRAKNDRIDARVIAHYLATFVLTPERFDAALERLAENVTYRRQLVDQRGVVANQARLLGDPLLARLSRRRLAQLDALIERQNQRLAGLIAADPALSAKAAVLRSVKGVGPILAATLLALLPELGTVCRRAIAALVGVCPYDFDSGKFRGQRHIAGGRMHVRNALYMPTLTAIQHNPRLKAFYETCCEGRNDKKPAVIAAMRKLLTILNARMRDHIAERHDSLKTVKHAA

SEQ ID NO: 466293 - protein, 356 aa, unidentified
MNKRSKLNFSGQPIYIGLDVHKKSWSVSIFTKHGEYKSFSQTPKAEALMNYLQHHFPGAQYHSVYEAGYCGFWIHDQLREKGIQNIVANPADIPTQDKERRNKRDRVDCRKLARGLRSGDIKGIYTPPRWKLEDRSLIRTRLSMGRKQGRCKNQIKSMLLFYGVNIPEQREMGHWSRRFIRWIEGIRMQRASGDVALQIHVEELCYLRQVMAKLNRAILALSRTDEYRGWVSLLRTVPGISTLTAMIVLLELGEINRFPSLDHMCTYVGLVPDVRGSGEKEHVGGMTTRGHSYLRWLLVEASWVAVRKDPAMMEAFNEYCKRMKKSKAIIRIARKLLNRIRYVLKNEAEYVPCVIE

SEQ ID NO: 466294 - protein, 380 aa, unidentified
MIALDEGWVRPAMSGYRWVPTLNRRGDAPMGYDYHIGVDYHKSYSHIVVQDAGGKMLRSGRVKNDGQSLASFLGPYRENAHAVMEATRNWTVMYDWLDEICDEVVLAHPLKVKAIAEAKIKTDKIDATILSHLLRADLVPKAHAPSHRARDLRSALRERMFFVRLRTMVKNRITTAFDRYPEETAQLRQVTDLFGVTGRKQLAALAVSDLDRIQIDRGLAFVDNINQQIKDCERTIKLLSKGNANVRLLKTLPGVGEFFARLIDAEIDDIHRFASAEKLAVYAGIVPSTYSSGGKTFNGRIIKQGNKWLRWAFVEAVVPAITHDLEFRAYYERLKAAKGANRAKVATARRLLTIAFRMLRDGRCYEQRGPNKEVTPSRLS

SEQ ID NO: 466295 - protein, 360 aa, unidentified
MTTSIPSKTTVSYDSVKLGIDAHAKYYWVSRQLDGATPQPVQKMTYDELLLFVVKQQKLTPNLVTCYEAGAFGFHLHRTFEQLGIKNYVVQPQDWDERGKGVKNDRLDAAALCQRLDRYQRGNTKAFSTVRVPSEDQERERAISRQRQQLMRERQRISAMGRSLLATHNIHVTGKWWKGKTWTVVQKLAPAWVVERLEVFIIILKPLEEHELKLMHQLQEAAQEQKIPRGVGPLTFEILRREVGDWGRFNNRRQVSSYTGLCPREHSSGGKRRSGSVSKSGNPRVRAMLVEMVWRMMRWQPEYKPLRKWAHVLYSPTPNAAAKKKAVVAIARQLAVDLWRIFTGQCKAETYGLIYLPEAA

SEQ ID NO: 466296 - protein, 354 aa, unidentified
MNSSKYIAMDVHTATISVAVRDAAGKLIMESVIETKTSTILQFIQGLRGDLHVTFEEGTWAAWLYDLLKPYVTNVVVCNPRRNALLKEGSRNDRIDARKLAELLRTNLLRPVYHGEKGLRTLKELARAYLTISKDLTRVMNRVKAIYRSWGIPCGGQSVYNPRHRKEWLSKITQASVRRRAELYYEQLDALVLLRKQARQELLAEGKKHQAWKLLRSIPALGPIRAAVLMAIVQTPHRFRTKRLLWKYSGFGVVTHSSADHRYVKGQLERSKKPVSVRGLDRDHNHQLKDLFKGAAIQASTRKGPFREFYEALVAKGMRPEMARLTLARKIAVIALTVWKKGGAFDAKYLKPTA

SEQ ID NO: 466297 - protein, 335 aa, unidentified
MQIYGIDLAKEKFDVSFFDLTSKKVSNQPSHKVVTNNLKGIGKFFKGLPSDAVLVAEHTGVYGDTLLKCCMDSNVKIAFVGGYVIHRYRATPDRAKTDVLDCALLREFGERYPDKLKYRKFPEEALYELRQLARHREMLVEQRKQLMTADKSEDCRPIRSLAVKRSMDRIKEMLDTEIAETEKEMLKVINGHESIHHNYELVKSVDGVGLITAVELLVKTENFTKITTARQYAAYAGTAPYEKSSGKMDKGAHISKIGNRRSKTLLYICAESARLHNKEIKLYYERRTLIDKKPRHYVLNAIANKLLRIIFTLVEKGEFYDVNYIRQDPRLVKHN

SEQ ID NO: 466298 - protein, 494 aa, unidentified
MRMASSSPASRRNAKNALKLKKQTRERAATATSPVEMEKLEPVHRRAAGIDIGSAENYVAVPPETVAPGESSVRVFGVFSEQQDALVEWLRSCQISTVAMEATGVYWLTLYDKLEVVGIEVYLVDPHGVKAVPGRKSDWLDCQWLQKLHTYGLLQRAFRPDAPIRRLRTLTRQRTGLVCAAASQQQQMEKALVCLNLQLGLVISDLVGETGISIIRAILLGERDPKVLVERYRSVRCTKASIGEMKQALQGTYNDEDLFVLQQCVDTWDFVQEQVRECDGKIELALAAIPTARAVERKAPPLPVPAAAEQPKKKANGTQGKNAPVKDFTPILRRICGVDLTQVMGLNLLSVLMLLGEIGTDMSRWRSAQAFCSWLGLCPGAKISGGKVLSRRTRKVTNRAATILRLAAVAVGRTDTWIGLFYRRMKARKGGPKAVTATARKLACIVYHMLKFQEEFVALDMEKYVAHAQAHRLRYLKREAEKLGYELVEAEQVA

SEQ ID NO: 466299 - protein, 434 aa, unidentified
MEEVTDEPLYRDRVCGIDIGKAELYATIRVPSDKDPARRMSETRCFPATRRGVLALADWLRCWQVPALVMEATSDYWKGPFYRLEAEGFECVLADARQVKNLPGRPKRDPSDSSWLAQCFERGSVRPCFVADPEFRIIRLHTRYRRDLTEDRTREKNRAEKLLESAAIKLSSVVTDLHGVTGRDIMDHLIAGERNPKVLAQLARGRARRKISDLEQALDGAEFFTPEHAALLQTMLARIDQINAKISELDAVIEQLLAPWEEQLQQAESMPGWGRRSAQDVLAETGPDMTRFATGGHLASWGGRIPLDKQSGKRHGQGRHKKGNKYIGAATGETAVAAGKTQTREGARYRKLARTRGKNKACVALGNTQLKVYHKLLSSPGMRYQDLGPDYYENRAATRRKIDYHVREIEALGLEVTLCRKPGPTGPGEDQATA

SEQ ID NO: 466300 - protein, 473 aa, unidentified
MSLERRALGKKAGMPQKKRNEFRLGSRTRIRVQEVIPVSKSRPYSLVSVKRVEVGVLAVDHRGQACVVGIDVAKLELIGVLRWPDGSFQRPWQIANPGEVGLLVEKLKELSILCPLTVAMESSGTYGDAVRQALGDAQIAVRRVSAKAVKDQAETFDGVPSQHDGKDAAIIADLCGRGKGKPWVMDQGDAVDQEIRYWVRQADWAQRVKQMWGGKVEALLARHWPEVTRLIPGSGATLCKALLYWGSPAALAADPQAAAKLRSFGGHYLADEKIAAIIASAKTTNGVRTNAWAIREIQELAGELTARRKQISDCKRHLRALTKNHKTILAQTPAVGLITACVLWMCLGDPRDYGSAAAYRKAMGLNLVERSSGQYKGQLRISKRGQRLTRKWMYFGALRWMRDAAVKRWTLPKKARDGGKGARAMVGVMRRLALAAWHVAVSGEEFDAGRLFPGAVKRPLDAVKARMMEASVK

SEQ ID NO: 466301 - protein, 405 aa, unidentified
MGCVRLMVRRTPTRECRTFATTTEGLLALLAWLTASRCTQVAMEATGVYWTPVWKILSAGDFTLIVANAAHIKQVPGRKTDINDAMWIADLLACGLIKASFVPEEDIQELRALMRTRKQLVREQTRHVQRLQKTLEEANINPGLNPGDIMGVSGRRMIEAMIAGERDPHRLAALAARGIKASPKALYDALYGRLREHHRFLLKLHLQQWDALDAAIRQIDRQVAGQIARMGEEAANETSPFRELILRLSAIPGVSRLSATAILAEIGRDMSRFPTAGHLVAWAGLCPGQNESAGKRKSARLRKGAPWLKTMLVQCAWAAKRAKDSYYMAQFHRLRSRRGPQKAICAVAASILTAIYHMLKSGTPHRDLGADYFDRRSPEAKAKRLVTQLTKLGFDVKLQPLAVAA

SEQ ID NO: 466302 - protein, 347 aa, unidentified
MLADQLDYVIGVDPHRDRHALAIVEVRSGGVLLEASIEADSAGYASALSLADKHAPGRRGFAVEGTGSYGAGLARFLADHGETVFEVGRLQRERRSGGKTDALDAVRAAQSVLGKKRPALPRAKGKREALRALMAARDGAVTAKTAALSQLRDLLVTAPEPLRAELRPLSRARLLARLTATRPDLRQDPELRGTHLALKTVARRIRQLATEERELGHEIEKLTHDLAPQLLAEPGIGPLSAAQTVLSWSHPGRIHSEAAFARLAGSAPIPASSGQTIRYRLDRGGDRQLNRALHQIIVTRRRMHPPTIEYIERRTREGKTSREATRCLKRYLARHLYRLLEHPPITT

SEQ ID NO: 466303 - protein, 351 aa, unidentified
MENPTTIAVDLSKGVFEIAVERQGRICQRKRLSRQQLAAFLSECAAGTVLMETCGTSHYWGRKAQGFGHTVALLPAQYVKKYRIGQKTDRRDVEAILKARRDERIVPVPVKSVEQQTISSLHRMRAALMKTRIARLNTVRGLLREFGVTIGEGAAHVQPAVREALSQTPSFVPEPLHKALLSMMAETRQLEERIGNVDKQLGALSKTVPLVERLKEIPGIGLLNATAFPALVGDFRRFRSGRRLASSLGLTPKESSSGKRRWLGSISKAGDPYLRTLLVGGARSMLLGAHRTKRPDRLQAWALEVERRRGRNRAAIAVANKLARILWAVATRGAPYRSVPLETKNAENAPA

SEQ ID NO: 466304 - protein, 316 aa, unidentified
MLTPCDWNRGIMMENVFGVDVAKSWVDVAGPEGYERVGNEDLKAFALRVSEQGGRVAFEASGGYERPLRMALAKARVPAIRINPRRARAFATSLGRLAKTDRVDAGVIREMAMRLDLPECPPEPKEVSQLKALQLRRRQLVEDAKREKIRLSQTSDKGMCASLRRVLRLLQREVAQIEATIAELIASSENLRDRAALLRTAPGVGPVSATALLAEMPELGTLTPRQVAALAGLAPMARDSGVRTGKRRIGGGRKGLRDVLYMAGLSAARNDPSLRAFSDRLRENGKAPKQAIIAVTRKLLIILNAMIRENRPYAPA

SEQ ID NO: 466305 - protein, 342 aa, unidentified
MNEVTIIGLDLAKNIFQAHGAGADGSVIFRRKLSRVQLLKFMGEQPPCVVAMEACASAHHWGRAISDLGHDIRLIPPAYVKPFVKRQKNDMADAEAIAEAASRPTMRFVAVKSEAQQAMAMVYRTRDLLVRQRTQTINALRAHLAEQGIVAPAGPAHVGRLAAVIDGDDDALPVAVRDLARLHLDQIAGLSGKIADLDADLRRAAGTNDTARRLTTIPGVGPITAAAITTFAPPMETFSKGRDFAAWVGLTPRQHSSGGKERLGRTSKMGQRDIRRLLIIGAVAVVRWAARKGAPEGSWLARMLERKPKMLVAVALANRMARTAWALMRKGEDYRDPAMATA

SEQ ID NO: 466306 - protein, 459 aa, unidentified
MRRNKPAANTWEGLKVIHPHAAGLDIGSEEIWAAVAPGQTVEPVRKFGTFTPDLHALADHLVACGTDSVVMESTGVYWIPVYEILEARGLEVFVVNARHVKNVPGRKSDIQDCQWLQGLHSVGLLRGSFRPAEELAALRAYLRHRAGLIEHRAAHIQHMQKALAQMNVQLTQAVKDITGVTGLAIIRAIVAGERDAQQLAALRQPGVKKTEAEIAKALTGNYRPEHLFALQQALALYDFYTAQLAACDAEIERQFANLKPISDDLPPLPPTEKCDSHSKNAPNYDARGYLYRLTGVDLVAISGLNESTVQTIIAEVGTDLSAFPTEKHFCSWLGLAPHNDISGGKRLRSRTLKTTNRAGQAFRLAAQSVAKSPESACGAFYRRLKARLGSKQAIVATAHKIARTFYHILKHRTPFHDLGGEEYERRAREREIKNLQKRAAKLGLAVVETPSAPALAGSF

SEQ ID NO: 466307 - protein, 343 aa, unidentified
MQIRSVGIDLGKTTFHLVALGDNGKVLLKKKFTQKQLITFTANMQTSLIGMEACGGAHFLGRALRAQGHDVKLIPAQFVKPFVKSNKNDFIDAEAIAEAVDRQNMRFVPIKTDDQLDLQALHRVRDRLITRRTSVINQLRAFLLERGLVFAKSPAKLRERMPEILENADEDLTPRMRNLLALLWNEWKELEQQIVDLNQEVERIASSDAACMRLRQIPGIGPLVATAIVAAIGNGAAFRKGREFAAWMGLVPKQYSTGGKAKLAGISKRGNLYLRKILIHGARAVVLRSKRERIAMGAWMTSLETRAPRNVLIVATANKLARIAWAVLSSGQEYRAVQELVAD

SEQ ID NO: 466308 - protein, 416 aa, unidentified
MLRIIYPICCGLDVHKSTVFACIAATDENGVTTYQSRKFSTFTHELRELSEWLAANSCKDVCMESTGKYWIPVWNVLEPTCNLVIAHPKYVKAIRGKKTDKKDAKWIADLFKHDLVSGSFIPPADIRQLRDLTRYYRKLVGVNSGEKNRAQNCLTVSNIKLDNVFSDVFGKSAKAITSHLIEHPGEYFDVTPFVDGRCKTPVSQIQAAVDGSICSEQADKLKIIRSHMDNLELCKAELESVVLGLASKYLPQVELVLTVPGINDPFMAISVIAEIGVDMSVFPTSKHLCSWAGLVPQNNESAGKKKTTRISHAGTYIKPLLVQFAVAVSNSEKHPEIRNRYLSLKKRRGHKKAVIAISRMLLVAIYNMLKKNEPYNAELYRKADKPPVNREVSFEQAVYILQRQGYLLTAPQAVTE

SEQ ID NO: 466309 - protein, 342 aa, unidentified
MAIVGGIDIHRAQLTFDYVDLDSGEVFRGRIAPADRAQLRQWLDRFLGRTDVAFALEGCTGWRYVVEELHRAGITAHVAEPAETAARRGPKRRAKTDRSDAQLLRDLLLEGRIPESWIPPQPVLEARALVRLYKDLLDERTGWLQRVHASMFQMGVPDLDVSTMSAAGRERITAAELSAATRTAVDVAMRQVDRLTAEMTMVREQIHAIGRRQPACRALQAAHYGIGPLTSVVIWAEMGDTRRFRSSDDAVRHAGLDVTVYSSDGRRSAGHLARQGPPMLRWALYEAAVYAGRPSSPDHAYFQQVKARLDGQLALLSMARKLARRCHHTLRNLDDQVLAPAA

SEQ ID NO: 466310 - protein, 403 aa, unidentified
MATPSQVSVWIGLDVGKESHFADVLDNDGERLFSRGIGNDQADIEALLDRAGQHGVPGLVIDQPGSIAQLVLAVAARRQLPVAYVPGLVMRRAADLYPGEAKTDRRDAYIIADTARTRRKQVHWLEASSDELLAQLRVLNGFDTDLAADQTRVANRLRDALTSIAPALERALGSRLQHAGARDLLAAFPTLTALRAVGPDQVRATVARRSPRIAGKTAEAVAKALASQDVTMPAERATGRVISELASELDRVFQRRDALAQEIEEAFLAHPFGEILASLPGIGPRTGARILAEIGDGTGFASGAKLAAYAGLAPVTRQSGTSLNAETRSRRGNHRLKNAMFLAAFASLRDPASKAFYDRKRAEGKRHNAALICLARRRCDVILAMLRTRQRYQPDRSQAALAA

SEQ ID NO: 466311 - protein, 354 aa, unidentified
MSQTPNTAIAVIGIDIGKNSFHVVGHDARGAIVLRQKWSRGQVEARLANIPPCLIGMEACVGAHHLSRKLASLGHDARLMPAKYVRPYSKGQKNDFNDAEAIAEAVQRPTMKFVATKTAEQLDLQALHRVRERLVSQRTGIINQIRAFMLERGIAVRQGIGFLRTELPTILATRTDALSPRLLRVIEELADDWRRLDQRIDGLSGEIEALARQDQACSRLMTVPGIGPIISSAMVAAIGTGDVFSKGRDFGAWLGLVPKQISTGDRTILGKISRRGNRYLRVLFVQAAWVVLVRIKNWERYGLKSWIEAAKKRLHHNVLAIALANKLARIAWAVLAKGRAFELTRTDDAGVRPA

SEQ ID NO: 466312 - protein, 340 aa, unidentified
MRALYAGCDLHGNNNLIGIIDGEGRRVFKKKLSNDLGVVRDALKPFQEELVGIAVESTYNWYWMVDGLMETGYKVHLANPSAIQQYSGLKHSDDQHDAFWLAEMLRLGILPEGYIYPKQERPMRDLLRKRGHLVRLRTSLIISLQNILSRNLGRKVNVNDVKAVKEDRVSLLLEMNEDLALAGRVSKEAIDHLTRQIHKIEWVVQKKIALKEAYRYLLTLPGVGKILSLTIMLETGPISRFATVGDYVSYCRKVPSQWTSNGKRKGSGNSKNGNKYLAWAYSEASEFARQLHPEPRAYYNRKMQKTNAAVAHSALANKLSRAGYYVMRDQVSFQPEKLFG

SEQ ID NO: 466313 - protein, 342 aa, unidentified
MNRELYIGVDVSKNWLDLAYYDGVVVDWKHGHIRVDNKESGYIQIDRWLKKLGVNRECVLFCMEHTGLYCQDFRLWLEMRGYIYGMVQPRKMHRFEPDLGENERALDRIKTDEMDSFRIAIYCEKHCRKIKASPSKLPGDAYFKLKRLMAERKQYTRQSVLYKQHLHDISIYDTEGSQERKKVGLGLLTEQIRQTDAEIRRIIESDPVLSRNYELLCSIKGVGLVVAVETIILTENFTSITNPRKYACYIGIAPAKKESGVSVRGGEHVSRKGFTQAKADLSLICLVAIRYDPGIRAYWERKKAEGKHSGIVLNAIKFKLVLRMFAVIKRQKPYVEIDAYKR

SEQ ID NO: 466314 - protein, 412 aa, unidentified
MIPAVIERGAGIDVGKTVLLVSTMVGPLDQEPLTKTCTFGTTNADLERLRCWLVETGCTHVAMESTGSYWKPVFNVLEESLTVVLANAEDVKGRRGHKTDPKDSQWLAHLLRHGLIRPSFIPPRAVRDLRDLTRLRRQLLKDATSERNRVQKILEDSNVKLASVLADPFGVSGQLMLEALLDGKASAEEIAELAKGRARRRIPELATSLAGHRMSDHHRRMIHYSLKHLGFLERQLLALDEEILREIDKAGFRPALDLIKTVPGIQQDSAVSVLAEVGPDMNTFPSAGHLSSWAGLCPGNRQSAGKDKGGRTTRGNRWLRTTMTQCAWAASAKKNCYLNGKFWRLAAEGKKRAIVAVAHNLLVLVYHVLATGQPYQERGTGIVEEQQKRRCIRHHVRALGRLGVNVGCRPIS

SEQ ID NO: 466315 - protein, 402 aa, unidentified
MKKSIAERASQQTAAALDVARGWHRYGAFIGLDVHKDSIAVAVALPGRDQPQYRGEFAHEPRKIQKWLSRLSAEFEGLLLLFCYEAGPCGYGLYRQLVAAGHDCQVVAPSLIPKKAGERVKTDRRDALKLARLLRGGDLTPVWVPDAEQEAMRDLTRARDDMKSQECKARQQLNAFVLRHGHHWPRGRTRWTKTHFNWLESIRFEQAWLQVVLQEYIDAVKAAMQRVADLTDQLMRALPNWSLAPVVEALVALRGIDKLAATVVLAELGDISRFDSPKQLMAYLGLVPSEHSSGGRRRQGAITLTGNGHARRMLVESAWSYRFPARQTMHLKRKAKDASAEAKAIAWRAQKRLCGRYRQLTQAGKNVKLVCVAIARELVGFIWDIVRHEMPRLAGQRALIAG

SEQ ID NO: 466316 - protein, 343 aa, unidentified
MEISTIGLDIAKNVFQLHGVDADGDIVLRRKLRRSEVLTFFSRLSPCLVGIEACATSHHWARELARLGHSVRLIPPSYVKPYVRRGKNDAADASAICEAVTRPAMRFVPIKTIDQQAVLVLHRSRDLLVKQRTMLINALRCHLAEFGIVAAQKRTGLAQLVAMVKDDADENLPILVRRGLKPLIHQLEQMQSEILQLEKEIEAWHRSDPVSCRLATVPGVGPIIASAIAATMLDPHHFRSGREFAAWLGLVPRQNSSGGKERLGRISRQGNRYVRRLLVIGATAILRYGRNKTSGSEWLRALLARKPARLVTVALANKMARTAWALLARRQDYRSGNESCAAV

SEQ ID NO: 466317 - protein, 456 aa, unidentified
MNIYLGIDISKGYADFALIDEQRQPIVKNFQLDDTPDGHSSLGEFIRELFKQHPDLTLLATAESTGGYENNWLDCLKKLQRCYAIKVARLNPKGVHHHHQAKLNRAITDAISARLIADYTMSHQEIIRFDQPDETYSLRKQWTLIKLLSKQKTQLLNQLDNLVYQSNTELMVYCRSYWPVWLLQLLGKFPTAKELAQSNVDQLAKIPYLGTDKARKILNQARQSVASATDPVSGEMIKTIIEEIIHKEKLIATCKKSLIENCSLPDVELLASIPGIGKFSAVGLIIEIGTWLRFASAAKMASFFGLHPMLRQSGDKTWVARMSKQGSSEVRALLFMCAMVAIRHNPVIKDLYAYSLAKGKSKMSALGICMHKLLRIVYGVLKSGKAFDPAIDQANKTRKPDQRKPKKQETRRLQPVDENAPVSARQNKKRKEQNQSQGELVTICEIKAPALSHCST

SEQ ID NO: 466318 - protein, 417 aa, unidentified
MALKIVYKICCGIDVHKTFVVACIASTNSKGVTTYESHRFSTYTKGLKDLLQWLLKHNCKDVCMESTGKYWIPIFNVLEDEINVHLTHPKYVKAIKGKKTDKKDSKWICDLFKHDLIKFSFIPPREIRELREIARYRYKLVCMRSSERNRYQNCMTVSNVGLASVVSDPFGKTASNIMKEVMKSNVIDDDKILKLVHRNCKNKDKILDSLHGYRIESDQRFKMEKSLDHMEYLDQLIDSCEVELIKRAYPFRRSFQHITQIKGISALSAILIISEIGIDMSQFGSDKQLVSWAGLSPANNESAGKKKSVRISKAGQYLKPLLVQCALSAIKDKTSYFGRKYSNIKKRRGHKKAIIAIARMMLVSIYHMILTGEEFQPCDYESFMDPKPNANPSLTVEKALNFLKQSGIDISSIPINL

SEQ ID NO: 466319 - protein, 409 aa, unidentified
MYFVGIDIAKKTHQAAIICSDGKLTGKPFKFPNTVDGFNLFLEKLTAVTTDLSQFEIGMEATGHYWLNLYTWLSDKSFRLHVINPLQSDALRNLYIRKTKTDSVDAKIIADVIRIGQYSETQLADENIIALRDLNRQRFYLVDMAADLKRKIIAMMDRIFPEYQDFFSDMFGKTSVQIMKEYTSPEQILQISTERLTQLLKKVSRGRFTETKAKELKALAANSFAALLSSEMTTLLIRQMLEQLDLLEKQIADIEHIIAAQFAQFNTKLTTIPGIGTTLGATIFSEIGDINRFDKPKQLIAYAGMDPSVKQSGNFVGTQSHMSKRGSPYLRRALWLAAVVAVSHDDLFKYLFQQKMNAGKTYAQAMGYICHKLLNTVFAILKTGEEYKPVYPPQLDLSKLTDQPIHALL

SEQ ID NO: 466320 - protein, 341 aa, unidentified
MAHFAGLDVSVKETRVCIVDDAGKIVREARVASEPEALLQVLTIYRFKRVGLEAGPLSQWLYSVLAEAGLPVICVETRHMRAALKAQINKTDRNDARGIAQMMRVGLYRPVHVKTLRSQKLRMLLIHRKLLQSKAIAIENDLRATLRNFGLKVGMIGTVKFEARIKELVANLPDLVALVEPLLIVRRVIREQLGILHRRLLAIIRDDDVCRRLMTIPGVGPVVALTYRVTVDVPARFRNSKAVGAVFGLTPSKYQSGENDRTGAISRCGDEMMRMMLYEAAQSMLRRSAKWSWLKAWAMKIAKHRGMKKAIVALARRLAVIMHRMWVDGTAFRWTREVVAA

SEQ ID NO: 466321 - protein, 401 aa, unidentified
MASMTSEIALTQPVRAVFGGIDTHKDIHVAALLDSDGGLVGSASFPTTRAGYRQLQAWMHSAGVLGRVGVEGTGSYGAGICRQLSAAGTEVVEVNRPDRAERRRRGKSDVLDAAGAAEAARTGNRITIPKSRDGQVESVRVLRLDRASAVQARTKAFQLMDQLIVTAPEQLRDQIRRLSKMRLIRSCAAWRPDPAAAADPVVATRIALKKLACRYLQLNEEVTALDKLLGGLVAEAAPQLITTFGIGVDTAGQLLITVGDNPGRVHSEAAFAMLCGVAPLPASSGKTTRHRLNRGGDRQANRAIHVIATTRKRCDPRTRIYLKNKIANGHTKREATRSLKRLIAREVYYLLHPEGLTPGPVPPSRPNRRRAGAVKVEPPTRGTTLTAPSTGTSSKMEEPAA

SEQ ID NO: 466322 - protein, 371 aa, unidentified
MEHTRFVGLDIHKERISIAVAESGRSCAVEYLGEISNDPVAIGRLCDRLERPGKTLAFCYEAGPCGYGVHRQLISLGHRCDVVAPSLIPTRPGDRVKTNRRDATMLARLHRAGELTPVWVPDADHEAMRDLIRLRSVVRQIVSRARQHLQGFLLRHGRKHGRGTAWRMAYRRWLSTLAFEHPAQQIAFQDYVDAVMDAERRLQRVEEQISGLLPEWNLRPVVDALQAMRGIALITAVVLVAEVGDFTRFANPRQLMAYFGLIPGEQSSGETTRRGGITKTGNAHARRALVEGAWAYRMKARIGRHKVDRIEALPKVVRDIAWRAQLRLCTRYRRLSARGKTANVVNVAIAREMVGFIWSIACTVQSAPKTA

SEQ ID NO: 466323 - protein, 417 aa, unidentified
MSWTGEVVRLFVGDDWAEDHHDVELMDAAGRVLAKRRLPEGVAGMARLHELVGEQLGEDADAEVVVGIETDRGPWVAALLAAGYTVFGVNPLQASRYRERHGVSGAKSDSGDAHMLTDMVRTDSHQLRAVAGDSADAEGIKVLARTHKTLIWERTRAVQRLRHQLLGYYPAALEAFEDLDAPDTLELLGKAPDPARAAKLTRAQVSAALKRAHRRNIPDKATAILAPLRSPQLGQPAAVTAAYAVTVRSLIAVITVLNEQVKALQGQVEEHFGRHPDAEIYRSQPGMGAILGARVLAEFGDDPHRYADGKARRNYAATSPITRASGKRKVVAARFIHNDRLVDALNAQAFTALRASPGARAFYDELRARGIEHNDALRRLANRLVGILHGCLKTRTLYDEATAWGHRQNLPQSSVAA

SEQ ID NO: 466324 - protein, 345 aa, unidentified
MNKISVIGLDLAKNVFQVHGIDTDDEVVVRKQLRRSEIRKYFARLEPCLIGMEACGGAHFWSRELTRLGHTVRMMAPAFVKPYLKSNKNDRNDAEAICEAVQRPSMRFVRPKLPEQQAVLHLHHGRQLLVRQRVALSNHMRGVLSEYGIVVPQGVKVLSRHLPEILEDAENALPMLARHLLAELKAEHDQLIERTDRIEKQLKAWHANNAVSQSLASIPGIGVLTATALAATVGEGQDFKNGRQLAAYLGLVPRQSSSGGKDRLLGISKRGDSYLRSLLIHGARAVIHHIRRRLKAGKPGGNPWVEQLLQRCHVNEAAVALANKMARTSWVLLARKETYCPAYPV

SEQ ID NO: 466325 - protein, 364 aa, unidentified
MYDSMTTVAVGLDVHARSIRLAAVRADELLEERTLPYDEQAVERVLRRWPGVRCCYEAGPTGFGLHRFLVSRGIDCRVVAPGLVPQRPGDRVKTDSRDARKLARLLAGGLLEPIHVPSPGLEAARDLVRAREDARLDRMRDRHRLSKFCLRQGRRLPTSSWTVMRRSWLSEQRFEFAAQQQSFDSYLHAVDLVDARIGQLERAIRETAEQEPWRALVGRLRCLRGVDTLTALALVSEIGDFERFKTAEELMAFVGLVPSERSSGEQRRQGSITKVGNSHVRRLLVESAWHARRRPKVGYELARRQRGQDAVVIERAWRCQQRLYSRWQRMAGRGKPQQKIVVACARELAGFVWAIATDQPLRSA

SEQ ID NO: 466326 - protein, 358 aa, unidentified
MQRNKISFKGQKIFVGIDVHAKNWEVAIAPEVGIVKRHSQKPSAKELFDFLKKNYPDGDYLAVYESGFSGYSTYYALTEVGIDCMVIHAADVPTTQYEEVMKTDRVDAVKLARSLKAGLLKGNYVPEKQYIDDRSVVRIRKTIQKQLSGYKSRVKHLLHCHGVEFPERFSKKQTHWSRAFITWLKNDVLLMSDTRASLDLLIKQVEVLRGTLLEATRQLRKMSQTERYKHRHDLLRTIPGIGLIVTICILTEVCDVKRFHNENEFAAYLGLIPTSHSSGEKTVHGEKTFRGNKQLGPMIIEAAWITIGRDAGLGAQYFQYKQRMEPQKAIVRIARKLSNIIFSVLKNEKEYVPYQTGN

SEQ ID NO: 466327 - protein, 352 aa, unidentified
MPDITPGAVVIGVDTHKDVHVAVAINGLGARLATASFPVTAQGYQQLAEWAASHGKVHAFGIEGTGSYGSGLSRALTARGLRVIEVGRVNRQLRRRHGKTDTVDAESAARSVLAGDVGAQPKSGDGPVEMIRHLKIARDTALKARTQAIVTLKTLLVNAPQDLRERFIGITGKMTLVRAIAALRPGIPTTTAASAEIALRALANRWLMLDAEIKEHEAVLETLVRAQAPALMEAPGVSTGIIADMLIVLGDNPQRIRSEAAFAKLCGVCPVPASSGKTSRHRLNRGGNRRANAALYRVVLVRMRHHRPTREYIERRTAEGKSPREIRRCLKRYIAREIYHHLCGRQASASLM

SEQ ID NO: 466328 - protein, 436 aa, unidentified
MRGCRCSMIMGFTKPIEHFNLKRKKVITMNTLYVGIDVSSKSNVVYLMLPNGDKHSNFSVANSHEGSTQLVKRILSALTSLSLDTVLIGLEATSVYGDNLVYFLREDASLAPFHRKIHVLNPKQVKKFHDTYNDLPKNDYVDSFVIADCLRFGRINKEVYLGDYRYKALQNLTRARFFAVQNLIKEKQRFMNVLFKKYSTMTQEKVFSDTFSTTALAVYDEFDSAEALANMDLHELTDFIIEKGKNRFPDPDAVAKAIQKAARSSYRLPKTVNDSVNQVLSISITSIKALESQIKEFDKAIKAQMELLPNVLISIPGIGPVYSAGIMAEIGDINRFDNQAALAKYAGLAWKQHQSGDFEAEVTRLIPSGNRFLKYYLCEAALSLVRCDKEYSDFYHLKYKEVNRCQHKRALALTARKFVRLVFRLLKDNRLYCPAK

SEQ ID NO: 466329 - protein, 417 aa, unidentified
MRVNEKIERITPDTLICGIDVGKTKCCARFCDYRGVEVYHKVWFDKTENLDAIGCQITAAMYKENKTEVIIAFEPTGHYWLNIDKYFKDCGQETVLMPTYTVKQAKEMHDQNPTKSDPKDALLIARLTSEGKYVKPIERDELYQNIYSGYSIYEDIQKEINRIRNKIHVWNDKYFPEVEKVYKIDSVGIKPMYENQLLPNEIKNMTLENFIELMTKDNSRANKKSIMKLKELCEKSNGISSDAFTKKEIKRLYERFIELLKELEEYEKELIELASQIDYVEKAIEITGIGYMSMVGIIAETGDLKNYEHAKQVLKMSGLSLKESSSGQKKGKKHISKRGRSKLRHNLKQIGICLVGKNNFFLQLHNYYTTKREHPLTKLISINAIIRKFMYILMAIVRNGNSFDEEKAIRESCISFS

SEQ ID NO: 466330 - protein, 347 aa, unidentified
MLADEVDYVVGVDTHRDGHVLAIVAVPVGAVVAQRAVAANARGYAQALRFADQHAAGARVWAVEGAGHYGAGLARHLSGRGETVLEAGRSPRGERRLHGKDDKLDAIRAARAALGHELASPRAGQRREALRLLLVARRSAVDVRREALVQLRSVIVTSPDCLRDELRRLPVQRLLERCSRLRRSATARPDELAVRLVLRTLARRIEAVTTEAAELEREILAHVRLLAPQLLDEPGVGPIVAAQLIVAWSHQGRVRSEAAFARLAGVAPIPASSGQTTRHRLSRGGDRQLNRALHTVVLHRRQHDAATKDYIARRIAEGKTRRDATRLLKRYLARRLYRLLQQEPLMA

SEQ ID NO: 466331 - protein, 313 aa, unidentified
MTSIPDSARPAHPDISGEVILGVDTHADEHVAALLTAVGGLVATASFAATAAGYRALLAWARGHGPVGRAGVEGTGSYGAALTRQLHRAGVQVIEVNRPDRAARRRRGKTDTVDAEAAARAVLDGRATVTPKTADGPVEVLRLLKIAKDSAVKARTQAINQLKAVLVGADPDLREALAGLGRATLIRRCAQLPDPDTTTGGEDVAATVVYTLRLLAHRIQHLTSETDDLTRRISNVLADHAPHLLQRRGVGPDSAATLLITAGDNPERLANEASFAALCGASPIQASSGKTHRHRLNRGGDRQANAAPSTASH

SEQ ID NO: 466332 - protein, 351 aa, unidentified
MPRTSTVHAVSAIGIDMGKNTLHMVGLDSRGAIVLREKVSRGRITLRLANLPPCLIGIEAGLATHYVARELAALGHDVKQVPPTYAKPFRQGHKNDFRDAHAVAEAVQRPTTRFVPPKTDEQLDLQALHRVRSRLVSERTAVINQMRGFLLERGIIVRQGLRFLRQGLPDILAKRTDVLSPRMVRIVTDLASDWRQLDERIEAVTDEIETLAKSDDNCRRVMTVPGIGPIISSAMVAAIGSGGAFARGRDFSAWIGLVPKQMSTGDRTILGRITKRGNGYLRTLFMQAARVLLLRPANWPKHSFGAWLVRAAQRLHPNVLAAALANKLARIAWTVLAQERSYEARVTKAAA

SEQ ID NO: 466333 - protein, 370 aa, unidentified
MRIIGCDLHARQQTLAMLDTETGEVVNLTLMHEGNNVREFYSKLPPPVLVGIEATGSMQWFLNLMEELGIECRVGHPAQIRAAEPRKQKHDRRDADLILKLLAQNRFPAIWLPSKELLDLRALLLHRHQWVRMRVRMQNALQAIALANGLRRGPALWSYDGQAKIAFLPLLPHAAYRRSALQAMYKNMQSEIENLTQQVAEQAGNRCGARRLMTHPGVGPVTALATEVFLGDPQRFTDSKTLASYVGIIPREYSSGEHQRLGGVTKQGSPLLRFLWGEAGAHAARRDPELKRFYRRKLVQKGLGKARVAVARKLGIRLWIMLRDEIDYQEFCRRGQIQQKTVRPVVGMPETGNGAKSHRPSDEATRLPGS

SEQ ID NO: 466334 - protein, 355 aa, unidentified
MSQEKYIGMDVHQATISVAVMDASGKLIMECLLETKAATIVEFIQGLQGTLSLTFEEGTSAAWLHDLLTPHVSRLVVCDPRKAALLKEGNKSDRIDARKLAEMLRTNQLKSVYHGEHGLRTLKELGRSYLTITQDVTRSMNRIKALYRSWAIPCAGTSVYAPRHRAEWLAKIEQPGVRIRAERLYQQLDSLQPLRLQARCELLRESHQHAAVQLLRQIPSIGPIRSALLVALLQTPHRFRTKRQLWAYSGFAVETHDSGEYRSVRGKLQRNRERITVRGLNDNHNKDLKNLFKSAAISASTRPGPLQDFYVALVAKGIRPTMARLTLARKIAAITLTMWKKGVSFDAKQLHRQAA

SEQ ID NO: 466335 - protein, 472 aa, unidentified
MEKEKKTIYIGCDVSKGYADFCILNENKELLVKDFQLDDTDRGHSKLKSIIKDVFNKTPDIEICSAVESTGGYENNWYNTLKKLSESYNLKITRLNPWGVNLNQKAGLKRNVTDAISAFNIAEYIIDHSDNVQYKQDDSFASLRCYWNLITMNKKHRKELINQLEIALYNANPTLMQYRKSKFPNWLSELLISYPTATDLANANIEELIKIPNIKINKAEKLITEAKQSVASRTDAFTKRYIIETVTQIKALDMTIKNDIDTVEQELKNTKQYEEELTVLKSFKGINTISAIGILLEIGSIERFKNAKAICCYFGVQPKFKQSGDKTSGVHMSKQGSKIMRGILFNITKGAIVYNPVIKTTYEKKLSDGMSKMSAIGVCMHKTLRIIYGMLKHMQNFDPNIDKLNTERSNKKCQDKYNQSLVYTIKARRFQTFDPSAPISKIQNKKRKELNSSQCATNTHTTGSKNSFPVSS

SEQ ID NO: 466336 - protein, 355 aa, unidentified
MTATIIGIDAHKRSHTAVVLDAHNEIRDQLRLAADRRQLARLLTWADRWPNRIWAIENVGGLGRLLGQQLVGAGETVVDVPASMTTRTRRLSGHSGRKTDGFDARAVAIIGASHTRLRQVCRDDAAAELRVLLDSRWNLVSRRQQVICRLHARLTELSEGGANKALSVKRASAALRRIRTDNPADAARRQAVKDLLAEWRWLNPRIRTTEARIRQALAVHGSTLTEIFGIGDTSAATIVAIVDDIGRFPTRGHFASFNGTAPLDASSGDQHRHRLNRGGNRQLNKVIHTAAITQIRHGGPGRDYYERKLAEGKKHLEAIRALKRQLSDVIYRRMVADARRETVRDGHQGTSPKAA

SEQ ID NO: 466337 - protein, 334 aa, unidentified
MVWIGKNVFQIHGAGPDGNVVLRKKLNRGRLLEFFASLPICMVAMEACASAHYWGREIGKFGHDVRLINPSYAKPFLKRQKNDAADAEAIAEAASRPTMRFVAVKSAEKQASSMAFKVRDLLVRQRRQTINALCGHLMEYGLIVAQGIRHMPRLKELMATYPDLPDLARGLCQDLLKHVESLSEQIAELEKGLRARARQDDVASRLMTIPGIGTICATAMEALAPSAETFSKGRDFAAWISLTPKQNSSGGKDRLGQISRMGQRDLRRLLVLGATAVVRWARRYRAPAGSWLARMVAKKPPKLIAVALANKMARIAWSLMARGGVYQAPASVAA

SEQ ID NO: 466338 - protein, 314 aa, unidentified
MWALISLKINTDVTALNVQGKTVLKPLTFSNNKAGFELLDLSFRQLNQDCLIALEDTGHYAFNLLNFLHEQGYKVYTYTPLLIKEFAKSLSLRKTKTDKKDAHGIALKLLSDPNREQFQHDNRQVELKILARHIHRLKKKQSDWKVQYTRCLDIIFPELDKIVGKYSEYTYQLLTCYPNPQKRLEAGFDKLIEIKRLTASKIQDILSVAPRSIGTTSPAREFEIIENIKHYKRLIDKAEKCVNDLMAEFNSVITTVTGIGNRLGAVILAEIQNIHAFDNPAQLQAFAGLDSSIYQSGQIDLAGRMVKRGSPHLR

SEQ ID NO: 466339 - protein, 450 aa, unidentified
MMREAQEIEDEEHEQILERVCAIDVAKASGKVCTRVPHLSRPGARRTRVWDVDATTNAILELGEHLAGEGIEKVTLESTSDYWRIWFYLLEAGGLDVQLVNARDIKNAPGRPKTDKLDSVWQAKLTERGMLRPSFVPPAEIRRLRDYTRLRTDLTRERTRYWQRLEKLLEDSLIKVSAVASSLGTLSVREMLEALIAGERDPKTLAGLARGRMKAKHAALIEALTGKFDDHHAELARMLLDQIDALNAQIGKLTTRIEELIEAIPAAQGIDADGTTGPSAGTGAGAPVLPAIDRLDEITGIGRDGAQEIIAEIGLDMSRFPTASHLVSWAKLSPRTIQSGASSRSGRTGKGNPYLKGVLGEAAAAAARTDTFLGERYRRIVKRRGKLKALAAVARSILVIIWQLLTNPAARYADLGADHHASRIDKGKKVRNHVRQLEALGYTVALTEAA

SEQ ID NO: 466340 - protein, 354 aa, unidentified
MRFYNTQHPFYCGIDLHARAMYVCILNQAGETLLHRNMKTTPDAFLKAIAPYRPQIVVAVECMFTWYWLADLCADEDIPFVLGHALYMKAIHGGKAKNDRIDSQKIAVLLRGGMLPQAYVYPAEMRATRDLLRRRMHLAHKRGELLAHVQNTNSQYNLPAIGKNLAYQANRDGVAERFADPAVQKSIEVDLALVSHYDTLLRDVELTILKTAKQHDPNTLYLLQTVPGIGKILSLVLLYEIHHIERFPRVQDFASYCRLIKCAKESNGKRSGTSGSKIGNAHLKWAFSEAAVLFLRDNPEGQKFLSRLEKKHGKGKALSILAHKLARAIYYTQNRHPNVKKRVKSNPQEANTTR

SEQ ID NO: 466341 - protein, 339 aa, unidentified
MDHVAIDLGAKKSQICVRGADGRIVEEKRWPTGDLEAYLAGRPTSRVIVETCAEAFCVADAARKLGHETRVVPATLVKTLGVGARRLKTDQRDARALSEVSCRIDLPTVHIPKAESRDRKTMCGMRDALVGARTKIVNNVRGWLRSRGRRIERGARASFRQRVEAAWQGQVPSYVERQLQVLDVLNVQIKAADAEVKSWAEADETCERLMTVPGVGPLTALRFVAALDEVKRFENAHQVESYLGLVPGEGSSSERQQRLSITKAGPRSLRWVLVQAAWALHLRCRKSEAIPLQLWAHRIEQRRGRRTAIIALARKLAGILYALWRDGSVYDGRRGAKMI

SEQ ID NO: 466342 - protein, 393 aa, unidentified
MGTTIYIGIDVSKDKFDYAAVDTQTTLIKKDSLQMNGDGFQELGKLIQSFSNVVVGFESTGTYHINILSFLLSLTEHVHLLNPALVKKFAEADSLRKTKTDAVDALVIAKFLIYRQHSIAAVTEIDSAYLTQLARLRESITRDVGKTKTHLKQMLNIAFPELLKSANVFTDTLLHILKQFPSAKAIRKTTKKGIRKTFYNLAKPRGKNPDLNPDQLFEMAKESIGTADESLEMAIQFDIEHLEFLQRHLDEVTSKLIDNVNERFGNELEILKSIKGIGDTTASHFLSEVKNIQRFSNYKQLIAYAGTDPSVKQSGNMIKRGKISKRGVSSLRRVGYLITCSVIRHDGVFQDYYLRKRNEGMAYRKAVIATWNKLLRVIFAILTKQVKFIPNHG

SEQ ID NO: 466343 - protein, 349 aa, unidentified
MRFYHGQHQHWCGIDLHARTMYVCILDAQGQVLVHKNLRAAPEAFLETIEPYREGLVVAVECIFTWYWLADVCAREGIPFVLGHALYMKAIHGGKAKNDRIDALKIATLLRGGMLPQAYAYPAGMRATRDLLRRRLHLVRKRGQLLAHIQMTSHPYNLAPLGKRIAYPANRAGVAEPFEDAAVRKSIGLDLALLERYDELLTDLEADLVRQAKQHDPQAFALLRSIPGVGKVLALTILYEIHDITRFDRVQEFASYARLVKCAKESAGKRYGTSGAKMGNVHLKWAFSEAAVLFVRHSAEGKKLLAKLEKRFGKGKALSILAHKLGRTAYFMLRRGKAFDAERFLATVS

SEQ ID NO: 466344 - protein, 369 aa, unidentified
MGDRITYVGLDVHKDGIVVAVAEGGLRGEVREYGRIANTPAALRRLAGKLGQAGVRLRFCYEAGPCGYGIQRQLSALGHECIVVAPSLIPRRMGDRVKTDRRDAASLARLHRAGELTAVWVPDPGHEAMRDLVRARLDAVRALRRARQQLSGFLLRQGCHYGRPAWTKLHRRWLAGLKFEQAVHHIVLEDYIAAVEAAEERRDRLTAQIKAMLPDWTLAPVVAALQTMRGMALVNAATLIAELGDLSRFANPRHLMAYLGLVPSEHSSGASVKRGGLTKAGNSAARRLLIEAAWCYRFPARISRELRLRQEAQPRPIREIAWKAQLRLCARYRKLARSGKPANVVTAAIARELAGFIWAIARRVPPAAG

SEQ ID NO: 466345 - protein, 343 aa, unidentified
MNEIKVLGIDLGKDVCSVVGFDGAGKVLLRRRMRRDSIVKLASGMASCVMAMEACCGAHHLGRLLRGQGHDVRLMSPEYVRPYVKAQKNDDRDAEAIAEAATRPTMRFVELKSDEQLDMQSLHRARDRLVGERTTLINQLRAILLERGIVMAKGRRKLELRLDQLLAGEVAISRRVRLLVEDMRAQWRALDERIGAFDAEFVAIAREDAATQLLSTIPGVGPLNATAFVASVGRAETFGRGRDLASWLGLVPRQMTTGGKPKLLGISKRGNGYLRRILIHGARAALPSLAKGRTLLGEWLRGLLARTHINTAVVALAAKMARIIWAVLRSGRPFQVEVMAPAG

SEQ ID NO: 466346 - protein, 348 aa, unidentified
MLIIGCDYHPGFQQIAFVDKETGECGERRLSHREEAEQFYRALLGQKVRVGMEASGHARWFERLLNELQFELWIGDAAEIRSKRVRKQKTDRQDAQLLLRLLIEDRFPRIWVPDAENRDLRQLLWHRHRLVQMRTRVMNQLHVVALNEGLRRKKALWRAAGRQELESIALAPWASRRRQDLLDLLDRLTPKIQQLTGALEEEVEKRPVTRRLATHPGVGPLTALAFELVIGTPERFHCGKQIASYVGLVPTEESSGDRRRLGHISKQGNVLLRFLLVEAAQVTVRSQPEWRSKFFHLAMRRGRKIAKVAMARKLAVHLYWMWRQGHDYGQLQKLGSHAGEPGNPDGGQ

SEQ ID NO: 466347 - protein, 370 aa, unidentified
MRKHSKKPQVKKATSRSTKPVTLQRWIGIDLGDRWSAVCFLDDAGSVVNRTRVRTTQEAFGQYFSAFAGAAAAIETGTHSGWASRTLTNCGLTVTVANAREIRKIHQSHRKNDRSDAEVLARMLRFDLQLLSPVHHRSAQMQADITILRARDVAVRGRTMVINAVRGLVKSHGGRLPSCDAGSFARHALEHLPPTLKAALLPLIESIADLTQRIRGYDRLIVDVARERYPETALLAQVGGVGPVTSLAFVLTLGDKERFHRSRDVGPYLGLVPRQYDSGSQQSQLPISKVGNSYLRRLLVQSAHYILGPFGPECRLRSYGHRLMERGAKNAKKRAVVAVARKLAILLHHLWATGAIYEPDYAGASQRLAA

SEQ ID NO: 466348 - protein, 356 aa, unidentified
METAYDGRQVVGMDLHRRRSVLVRMTEDGRRLGTARITNSPAGLRREIAKAGKSPRVVLEGTYGWYWAADTLAAAGAEVHLAHPLGVKAFTYRRVKNDERDAADLADLLRMGRLPEAWIAPAEVRELRELTRYRCRLVGLRTSCRNQVHGVLGKLGVPVTCTDIFGVAGSAWLDALGLPQPYAGKVTSLRQLAGELTTEITMLSEVIADLLAGHRGYQVIQQLPGIGPVLAAVIVAEIGEVTRFKNAAQLCSWAGLTPRHRESDTKVTRGHVTKQGSRLLRWALIEAIQHAPAGSLPGAVRQRIIARRGKQAKNIAKVAAARRLLTLVFYGMRDGQIRCLATPSGSPPAPPRAQAA

SEQ ID NO: 466349 - protein, 370 aa, unidentified
MKSIIYVGMDVHKASFTISCFSVTTQETFATVKISPDAKAIKKYLDGVSLSRSEECEFVCGYEAGCLGYTLYHQLTAMNIRCVIMAPTTILRNSKRIKTDRIDAENLARCLAYGGYKSVYIPTAQDEAVRDYLRMRDDHKLMLKKIKQQINAFCLKHNKIYPGNKSKWTQAHVKWLNALEFDGYLQDAFNEYMITYRELADKVERLESQIEQLAELEEYRDKVKKLICIKGIKTHTALSLIVETGDFSRFQSAERYASYIGLVPGEHSSSEDQNRLGITKAGNRHMRMLLIEAAQCYSRGVPAKKSKDLKSRQKGASPEVIAYADKASIRLRRKYIRMELVNKKRANVAKTAVARELACFIWGMMTDNIA

SEQ ID NO: 466350 - protein, 365 aa, unidentified
MKKVSRTAAQMEKPEITVGLDLGDRFSHYCMLNSDGDAIETGRIQSTEEALRRHFEGESMMRIALECGTHSPWISRLLEQFGHQVVVANARKIRAITASESKNDKNDAEKLARFAFCDPRLLSPIHHRSPERQQDLNLIQARATLVRARTMIVNALRGLVKSAGGRLPACSPQGFEARVEASIPPSLADAARPLLNQIVALNAGVQQMDRAIEQLSNRYPEIPVLRTVPGIGPLIAAAYVLTLDRPDAVQHSRQAGAFLGLRPRQSQSGDSDPQHRISKTGNVYLRSLLVQAAHYVLGRFGPDSELRRWGLKLAASGGKRGKKRAIVAVARKLAVILHRIWQTGNSWQAFPQSRNNTASKDVCMA

SEQ ID NO: 466351 - protein, 409 aa, unidentified
MQVVHEVCCGLDVHKKSVTACVLWAAGRRRQTREFGTFTRELLELADWLRACGVTHVALESTGVYWKPVWNLLEGQFEVLLVNAQHIKAVPGRKTDQKDSEWIADLLQHGLLRASFVPPTPTRELRDLTRYRASLAQEINRIANRIQKVLEDANIKLASVATDALGASGRAMLEAIVNGEQDSQRLAEMSRGLLRNKIPQLQQALEGRITGHHRFLLRELLDHLYFVESKMRRIEQEVEERLGPFQSEVVRLCTIPGVDRVTAWGLLAEIGLDMKQFPDAPHLASWAGLCPGSHESAGKRKSGKIRKGSLWLRRCLCQAAWAVSTKKNNYLSALYRRLAARRGVKRATIAVAHNLLVIAYYILRDQTCYQDLGPDYFDRLNPEGLRRRLTRRLEGLGFKVTLEPSAQVA

SEQ ID NO: 466352 - protein, 391 aa, unidentified
MVCVGIDVAKDKHDCCILDSDGMVRADCFTIPNNMDGFKQLLQTIRNCTKKSDKIKVGLEATGHYSYNILGFLLDNGLPTYVINPLHTNLYRKSLSLRKTKTDRVDARTIATMLLSDVDLKSYTDIAYHNEDLKSLTRYRFDKVQERAKLKQSVSRLATILFPELEQLVSSIHGTSIYALLGEYPGAKQISEVHLTKLTNLLTTASKGRYGKEKAIQIREAARASIGSVMPAKSLELKHTIKLIQELASEIDEIEDSIQKIIDELNPPILSIPGMGVNSAAVILAEIGDFSNFSSPDKILAYAGCSPSTYQSGKLTNCYAHMEKRGSRYLRHALYNATKYVCYWNPVFAEYLAKKRAEGKHYNVALSHAMKKLVRLIYALQKSGKTYLTAA

SEQ ID NO: 466353 - protein, 428 aa, unidentified
MNEDELSRLKEFRQLKKRIQGSDTHLIVGIDVAKDRHHAFLGTATGRTLVKKLIFANTSVGFTELLARVEAVRAQSGLSEVVFGLEPTSNYHKPLGRYLISEGCHVVMVGGKAVKNNRELLDERWDKHDTKDAANIADLVSRGKCFYYDMPSREIEELRDLHSLRARLKKEEHSLSLRIRNNLLAKHFPELDAFYSACERETLAIVRWCLNPQKIAVMPFEEFFKRVAPNARGIAQKLRLQKIHRLAHESIGCPVGSAVQFQARLLAEKIKEVRGQISDVDHLIAQACAPFPSYEYLLSIPGFGPYVASKVLATIADPRRFDSAKQIIRTSGYDLCADRSGKRSDQAVPVISKKGNSQLRYALYQAAMIASSRHRFFMAYFARMLQGREREQGIRTKMRVKLAAKMLVIAWTLMKKGEPFNPEHLSVQ

SEQ ID NO: 466354 - protein, 376 aa, unidentified
MVRTRCGRPYAPWSQKTVPELGRRTYPCRARTVARVNQARILQGRDKEGESIEEKMEEEKVYAGVDVAKDSMDIAIHVSGEHRSFANDEEGIDQAVAYLKELAPALVVLEATGGIELPLAAALAAVRVPVAVVNPRQVRDFAKSTGKLAKTDILDARVLAHFAAAIRPQPRPLADAQTQELGAIVSRRRQLIGMLVAEKNRFRSARGKVRQHIQEHIAWLEKDLANIDSDLKQKVQESPLWQEKDILLRSVPGIGPVLSTTLLADLPELGALNRREIAALVGVAPLNRDSGAFRGKRTVWGGRAPVRATLYMAALVSTRHNPVIKHFYQRLCAAGKAKKVALTACMRKLLTILNAMIKAHVPWNAPAAILGPVTDH

SEQ ID NO: 466355 - protein, 341 aa, unidentified
MKLKRIGVDLAKQVFQLHGVDSHEQPVLRRQLKRGQMMNFFRALEPTLVGMEACGGAHYWARESGKLGHEVKLIAPQFVKPYVKSGKNDAHDAEAICEAVSRPSMRFVEIKRAEAQAMQALHRIRARLVKSRTALVNETRGLLAEFGLTEARLGVSALRRWIPQVLEDAENGLPGLMRELLQGLSEELQAVDKRLAALNACIDRQACMDERVQRLLKIEGVGPITATAMVAGLGDGKQFRSGRDMAAALGIVPRQHSTGGKERLGSIGKRGNPYLRTLLIHGARAAVNSSLKPTKTDARSRWIQALVARRNKNIATVALANKNARIMWSMLTRAESYRITH

SEQ ID NO: 466356 - protein, 463 aa, unidentified
MSKSQRTTKRGRRTKLQAGAERPLSVLRPNAAGIDIGSEEHYVSVREDRDLQAVRRFGCYTSDLRRMAEWLRSCGVDSVAMEATGVYWVPVFELLEEYGFEVYLVDTHQTKNASGRKTDVLDCQWIRQLHSYGLLTAAFRPEQQIAAVRAYWRQRQGLVESCSRQIHLMQKALEQMNVQLHKAVSDIAGLTGLSIIRRIVAGDRDPKELAKLRQKGVKRSEAEIAEALSGNYKAEHVFALTQALESYDFFQGQMQRCDGEIERCMSNIAGKAAPPEETKQKRRRWKNEPHFNLRAELHRICGVDLTRIESIDAVTAQAVVSECGTDMSRFPSEKNFASWLSVCPNNRKTGGRIRSTRTRRIRRNRAADALRRAAQSLHHSKSALGAEYRRKRARLGAPKAITAMAHKLARVIYRLLKHGDAYVSEGLEQYEARHRERALRGLRNHAQSMGFQLVSQATGELMA

SEQ ID NO: 466357 - protein, 339 aa, unidentified
MELYAGLDLHSRNTYIGIMDNAFNRVFKKRVPNHLELILQTLDPFRDQIKGFVVESTYNWYWLVDGLMDAGYSYAHLANPSAIKQYEGLKHSDDQHDAFFLAQLLILGILPQGYIYPKKDRPVRDLARKRMFLVQHKTAHILSLQSLIARCCARKVRANDMRHLSVEELEIWLEEEHLVLSAQTNLDSINFLKQKIKQLEKAIIQKVKLNKAFKYLLTVPGIGNILAMTIMLEVGNINRFPKVGNFTSYCRCVPSRRLSDGKSKGHGNRKNGNRYLSWAFTEAVHLGRRYNEQFRRYYNRKVAQANTSLATKALGNKLARICYYIMRDQVPFREELFCH

SEQ ID NO: 466358 - protein, 461 aa, unidentified
MRRKAKRKAKAATALPPGLESINLNAAAIDIGSTEHYMAVPPGRSAEAVRTFGSYTAALHEMALWLKECAITTIALESTGSYWIAPYQILEANGFEVVLVNSRHVKNVPGRKTDVLDCQWLQKLHTHGLLSGSFRPEDKICVLRSYLRHRENLVRAAGAHIQHMQKALIEMNLSLHHVLSDITGLSALAIIRAILAGERDPWKLAALKDNRVKKSKEEIARSLEGDYRKEHLFALSQALELYEFYQTKIAQCDCEIEAQLHKFQARIDVGEHPLPEKSKKKTLKAQDNFELKNHLYAICGADLTQIDGMEVLSVQALLSEIGLDMTRWKSEKHFTSWLNLCPPSRISGGKPLSRQPRKGHNRAADILRLCAQSALKSKSALGAFGRRLRARLDAPKAIKAVAHKLARIVYRMLKYGQQYRDAGVRYYEEKYQHHLVRRLHKQAAAFGFQLTPQQRSVTTVS

SEQ ID NO: 466359 - protein, 423 aa, unidentified
MTKLISTPAGAVLVAIDMSKNRQEILIERPEGGRHRRMTVMATRQDYDGFAEQLAAIGRPIIVGFEATGNYHRTLAHRLLTAGFELRLISSVALARTREALHNGWDKNDPKDAQVILHMLRIGATQRYVDPLAAGINDLQELSKTHETISRMKTQTWHRILTHYLPLYFPEIARFAGNSRSDWFLALIERFPTPAMITALDREAFSAVAWPLIGRKVSKARLINDIYETASASTALPVPEDSAAITMFRMVIAQGRSLIHQRDEIERLAHARLADDVDYQLLRNIPGIGPINALTILAEAGDLRRFNHHRQFLKFCGLDLATCQSGAFRGRTKLSKYGNARLRRTFWMAAQVAARQRDNSFRDKLGRYTAGHAGDADRRRKAMTALTAKMARVAHAVVKTGTEYRPFLERPDARWKAPSLQVP

SEQ ID NO: 466360 - protein, 342 aa, unidentified
MKLTTIGIDLAKAVFQVHGADERGRAVLKKQLKRTQVLAYFANLTPCKIGMEACGSAHYWARKLVTMGHEVVLIPPQYVKPFVKRNKNDAADAEAICEAVTRPNMPTVPIKNIEQQAILSVHRARQGFVKARTAQANQIRGLLAEYGFAIPQGIGHITQRVPEILEDGENDLPGSFRLLIQRLVDHLKELDRQVGELEREIQLWHKENALSQKLAKIPGIGPLTATAMIASVGDARQFKNGRQLAAWLGIVPRQHSTGGKARLLGISKRGDRYLRTLLIHGARAVIRMAERKPDTETWIKRLLVRRHKNVAAVALANKNARTIWALLRHDREYEPDYVKAAA

SEQ ID NO: 466361 - protein, 330 aa, unidentified
MKKYYHVFGVDVSKKTIDITHVINQEFTHRQFSNDEAGMEQLMGWLKELKLDFDTTLFCMEATGLYCFPLTRFLAAHSIDIWIEHAAQIKKATALARGKNDKVDSQRIAVYATKNLDRLRLWKPMNATLEKIRHMASLRDRLVETKKKLVTPIQEFEDMGNHSMAKLLTKTIKSSLSAIDKDLKNIESKIIDILNEDDNLKLLYKLITSVVGIGFVTAINLLIHTNGFTMMKDARKLACYCGVAPFEYSSGSSVRGKTKVHYMANKKLKCNLHMASLVAVKLDADLKTYYERKVAEGKNKMSVLNAIKNKLLARVVAVVNKQQEYVKKSA

SEQ ID NO: 466362 - protein, 340 aa, unidentified
MRIIGCDLHASQQTIAMLDRDTGEIVEKTLKHEGETVREFFESIPKPAVVGIEATGSMGWFLRLMEELGITCRVGHPAAIRKAETRRQKHDRRDAHLLLTLLAEDRFPAIWMPATELRDLRALLLHRHQWVRMRTRVQNALHAIALGQGLRRGPTLWSHDGQAVLASLPLPSHAAHRRNELQALYRHLDAQVDRLDAQVKQVARQRPRATLLMTHPGVGHVTALATEVFLGDPSRFRDGKALASYVGMIPSEYSSGARQRLGGLSKQGNPLLRFLWGEAAMHAVRRDPQLQRFYRRKLVQKGLGKSRVAAARKLGIRLWIMMRDQIDYMEFCRRGPARQS

SEQ ID NO: 466363 - protein, 319 aa, unidentified
MDNLSHGRVIGIDVSRDWLDLYCLPDGHRGRAPNTPAGHAVVVALARDRDAIVCFESTGGQEWQLWAALEVEGVTARQVPPAQVKAFAQSCGTRAKTDRIDAELIARFFAFRPEAGRSLPAEKLRLLRALTSKRAQLVEMRKRLLAQIRAHQKLGTAAMFEDVDTELKQRIDSLIKELEDRISQAIASDERLSETAGVLRSIPGIGPVASTMLIAEMPEIGTITGEQAAALTGLAPVAHDSGTLRGKRAIAGGRRALRHVMFQAALVAAHHNPSLRSFADRLRKAGKPHKVIITAVARKLVTIANALCKNRQKWAVPTT

SEQ ID NO: 466364 - protein, 321 aa, unidentified
MNKDRKIYGIDISKSVFDVYCEATGHIQLNNDEKGFKSFLKTLPKTALVVMEATGYYHYRFAQFLHKKGVSVSVVNPLSVKRFIQMKLTKIKTDKSDAKAIYEYGIMNDLPIYSALTDVQAECLQLFRLLDTYLKKRTQTKNKLHGEDVLGIPSKYVYKSLQRDLKHLNKEVQGIELRLLELVKQDQQHQLTLLKSIPGMGVKTALFLIVITDGFKKFETASQLCSYVGITPIIRESGSSVRGRSRISKVGNKKLRNLLFLCAFSACKHNKACRDIYERIVAKGKSKKLALIAVANKLLKQAFAIAKSGLPYDENFVSKLA

SEQ ID NO: 466365 - protein, 344 aa, unidentified
MENYAGIDVSLELSSVCVVDAHGKILKEAKVASEPDAFVEFFEKLGFAVKRIGLEAGPLSQWLHARLKRAGFETVLLETRHVKAALSAMTVKTDRKDARGIAQLIRMGWFRPAHAKSIGAQEIRALLVARKQLLGRLIDVELSIRGILRGFGLKVGPVTRKNFEARIRELVAGQATLERIATSMLLARSALKAEYGRLHKAVLAIVRDDAVCRRLMTVPGVGPLVAITYKSAIDDPHRIVKSKAAGALFGLTPKKYQSGEKDVTGGITLAGDEIVRTALYEAANVLLSRITRFSKLKRWGMDVAKRRGSKRAKVALARKLAVILHRIWVDGTTYRWAEAGSIAA

SEQ ID NO: 466366 - protein, 413 aa, unidentified
METVVERCAGLDVHKDTVVACVRTAGPKGQREVELREFGTKTRDLLELRDWLVERGVSLVGMEATGVYWKPIYYVLEDALECWLLNARHLRNVPGRKTDMQDAAWIAQLVEHGLVKPSFVPPKPIRELRNLARYRKAQIEERTRESQRLDKILQDAGIKLSSVASDIRGVSGRTILAALVAGETDGQRLAELAVGQLRKKLPELEAALQGRFSRHHALIVSEILGKLDYLDELIDRLSAEVGDAIAPFAQQVQLLDTIPGVDQRMAEALVAEIGVDMSRFGSSARLASWAGLSPGQNVSAGKSRGSQTRKGSKWLRGHLTQAAKVAGRTKGTYLGAQYARLRGRRGASIATVAVAHSILVAAFHILDKLVPYQDLGDDWFIRRHSPEQHARRLVRQLAQLGYQVDLNDLEEAA

SEQ ID NO: 466367 - protein, 366 aa, unidentified
MSQHFRFDASRSLTALEQDSTIVAVIEMSQTKWLVAALVPGVERQPLKKFDAQEEMLLKLLHRWHCEAGQAGRNIKRIVVAFEAGRDGFWLARWLRARDVEAYVIHPTSIAVSREHRRAKTDRLDTELLMRVFLGWLRGEKRHCSMVAIPTIEEEDARRPNRERQNLVTEQTRIINQIKAIFARFGLRTLRPTMRKLAEGLEDLRTAEGTPLPQNTLSELRRHLARLRFVRDQIRAVEQERLRKLAVAPAAETKSPDAMVRLIARVFGAGIETADMLVNEIFSRHWRDRKAVARYAGLTGSPDDSGSRRRERGLARAGNVRVRCGMIQLAWRCQVPKEQRPGPMVRGANRRRTRQHTQDDDRGAGA

SEQ ID NO: 466368 - protein, 343 aa, unidentified
MQSVTTIGLDIAKSVFQVHGIDAKGKVVIRQQLRRSRVLGFFGKLSPCVVGIEACASSHHWSRELQALGHAVRLMPPAYVKPYVKRQKNDAADAEAICEAVQRPTMRFVPTKTADQQACLMLHRTRHLFIRQQTALINSIRAHLAEFGIVAPVGRNGVEKLLDVVADPDDERVPDIARECLRALGSQLQGLKVRILEFDRRIKVWHRSSETSRRLDDLPGVGPALATALVASVPDPKVFRSGRDFSAWIGLVPKQHSSGSREKLGNITKQGDRYLRSLFFTGALAVIRYAKIHGSKHRPWLAKLLERRPTKVAAIALANKLARMAWAMMARGQSYKEPVALAR

SEQ ID NO: 466369 - protein, 412 aa, unidentified
MLKIVYPICCGLDVHKDFVYACIATSVNGVTTYKSHRFSTFTKGIRELLSWLLEHNCKDVCMESTGKYWIPVYNILETDCKIVLAHPKYVKAIRGKKTDKKDAKWIADIFKHNLVSGSFIPPADIRQLRDLVRYHTKLTNFTTGEKNRAQNCLTVSNLKLDSVFSDVFGKASSNIIGHILANPSEKLSDVSAFRTKHMKATDDAILEAIDGEFCPEQAEKLRIIREHMSNLDLCKLNLQSLILTTAEKYISEIELVCTVPGISTFSAISVIGEIGVDMSVFPTSKQLCSWAGLTPQNDQSAGKKKTTRISRAGAYIKPLLVQCALAAIKAKNKHPEIFNRYSALKKRRDHKKAIIAIARMLLTAIYNILKKREPYNPELYRKSDVPPEHRNVSVDEAIFILQRQGYLVSSPT

SEQ ID NO: 466370 - protein, 367 aa, unidentified
MTKSITVERQQASNFAEKKYTVGLDLGDRWSWYCVLDERGEVVFEGKVSTTPKALREVFGAMPHSRVALETGTHSPWISRLMKELGHEVIVAQASKVRLIGESRKKDDRLDARTLARLARVDPELLGPIRHRSARAQADLIMIRARAGLVRARTALVNAARGLTKSYGERLRGCSPRNMDAEKSKGLSAELQMALEPLLRAIESLSQQILDYNKRIEQMAGDRYPEVARLQQVKGVGTLIALAYVLTLEDPQRFTKSREAGCYVGLQPGRRNSGSSTPQLHISKEGDPYLRTLLVQGAQHILGPFGQDSDLRRWGLKLAERGGKNGKKRAVIAVARKLAVLLHRLWVSGEAYEPLRNQRAVELRTAA

SEQ ID NO: 466371 - protein, 338 aa, unidentified
MNIVFLGIDLAKNVFQLCGLNQAGKPVYTKRTGRKELLQTLANIPACLIGIEASTGAFYWQREFEKLGHKVKVISPQYVKPFVRGQKNDGNDAQAIAVALMQPTMQFVPPKSPEQQDIQALHRARQRIVNHRTATVCQIRGLILDRGIPIGSAVSRARRAIPLILEDAENGLSSRMRRTIAELYDLFNDLERRIHFFDKEIETVFRQSEACQRIAKVKGIGPKTATAVVAAIGKGTEFKNGRHFAAWLGLVPRQHSSGDRQVLMNMTKKGDKHLRTLFIHGARAVVRVATNNNDGHMNQWVNQLKERRGFNKTTVAVANKNARIIWSMLRNETEYQVV

SEQ ID NO: 466372 - protein, 354 aa, unidentified
MADETAVVGGVDTHTDFHQAAVIDSIGRHLATHAFPTTPDGYHRLLNWLRSHGDLIAVGVEGTGAYGCELARHLRQNHVTVIEVDRPDRRARRTAGKSDPIDAFAAATAVLTGRASGTPKARDGIVEAVRSLRVVRRSAVKARTQTINQIRTLIITAPSEVREQLRALTPAELIKHLARSRPGAQTSDPACAVRVALRRLARRHQYLTTEIDDADAELKTLMTQAAPELIALPGVGIETAAQLLITAGDNPERLTSEASFAHLCAAAPVPASSGRTNRHRLNRGGDRRANHALHMIALVRMRYDKRTQEYVARRTTEGMSKKDILRCLKRFIAREVYKHLTGQHTSPKPLIETA

SEQ ID NO: 466373 - protein, 343 aa, unidentified
MYFIGLDVHKKTISYCVKDAAGRVFQEGKIGSTRGELDEWIRTMPQPRTIAMEATIFTGWIYDHLLPHAAKVKVAHPLMLRAIAAAKKKNDRIDAGKIADCLRCDFLPECHIASTEIRDRRRTLRYRSLVIKQMVQMKNRVSGLLMETGVSYNKQRRHKVGYFAELMTGNEDVHESIRPLLKLSRDMISRAQKLDYALVSSLERDPLLKERLRRLRTVPGVGPITALTWALEIGDFTRFSSIKQAISYCGLCGDEKSSADKVMRMPISKQRNKHIQRVLIEAAKLAPRESPELAVIRARELERGNPNRATLAVARKMVSYMLAVERRKQDFVPAEEFSRTAAA

SEQ ID NO: 466374 - protein, 362 aa, unidentified
MRIIGCDLHARQQTLAMLDTATGEVVNKTLTHEGEDVREFYSTLPGPVRVGIEATGSMKWFVNLMEELGIDCQVGHPATIRAAEPRRQKHDQRDAELLLKLLVENRFPSIWQPSKELLDLRGLLLHRHQWVRLRTRIQNALQAIALANGLRRGSSLWSQSGQRAIASLPLATHTAHRRSELQAMYARFEAEIEQLNQQVLEQAGQRPTAGLLMTHPGVGPITALATDVFLGDPKRFCDGKALASYVGIIPREHSSGGRQKLGGLTKQGNPLLRFLWCEAAVHAVRRDPELRRFYRRKLVQKGLGKARVAAARKLGIRLWIMLRDQIDYHEFCRRGQMQQRSGGACAGMPGMRYGAKSHRLID

SEQ ID NO: 466375 - protein, 317 aa, unidentified
MFYVGIDVGKQTLHCALTDRLVLEVANTKEGYGELVDRLTEHGYSTGETQLACESTGVYHLPICQYLTKQGWRMSVINPLLASRLSKARLRPVKTDKVDAKLIRTMAEQGHGDLFTLTNDTLELQSLVAQRHGLVEIRANLKCRLEAHTWRKKLEGGMGIPSHEALKETLAFVCGQIKALEKYLEQTQTPIQQLLRSIPGIGVGTAAALVANIGNIQRFSSPKKLVAYLGLDPRVHESGTSVHGKGYLSKRGNKRLRSLLFNAAFISKRYIPELHDYYEKKHAEGQHHFSALCATERKLVHLIHAVWTRGTPFEPRV

SEQ ID NO: 466376 - protein, 395 aa, unidentified
MFIVGIDVAKRSHEVCMITSDGQTVQRPFSIRNNCTGYNLMLEKIRKHTNIKSQIVFAMESTAHYWLALFTRLRKDGYHVILLNPLQSSAMRDMFIRKIKTDAKDSFIIAELIRFGRYAESNVAQDRLLALKELCRNRFYLVDMAGDLKRKLIALIDRVFPEYEAQFDTIFCKSSVAVLKKYPTPQKLSNAHLDKLTELLWNSSNGHFGEWKARELRELARNSFGVEDCDGAYSTLILLMLDQIQSLSGKADALEKEISRLFQSFDTTVTTIPGVGPIIGAVILSEVGDISRFSSADKLAAYIGVDPSVNQSGEFQAAHAHMSKRGSPYLRRCIWMASQVAVQRDPMFRAYYEKKAAEGLKYMTIIGHVTRKMTAVVFAILRDHKVYEPVLPTAA

SEQ ID NO: 466377 - protein, 344 aa, unidentified
MQTMHYIGLDVHKRTISYCVKDASGRVYAEGSLPATRFDLDRWMKTLPQPWTAAMEATVFTGWIYDHLQPHAAALKVAHPLMLRAIAAAKKKNDRIDASKICDCLRCDFLPECYMASTAIRERRRTLRYRNLLVRQMVQMKNKISGLLMEAGVSYNKQRLHRAGYFRELLATNSGIDEGLCSLLRLCRETVVRLQKTESAVVLSLERDSLLMDRVERLMTIPAVGPITALTWALEVGDAQRFSSIKKAISYCGLCGAEKSSANTVQRTPLSKQRNKHLQTTLIEAAKMAPRYSPNLAMLYDKEKQKGNANRATLAVARKLVAYLMAIDRGQRNFQAVETNCIAA

SEQ ID NO: 466378 - protein, 374 aa, unidentified
MSDHSEAYVAFDSSKLRNAVAIADCGRAGEVRFLGEIENSAAATATLVRKLAGKYGRLTFCYEAGPTGYGLYRQIKRLGHECLVVAPSLIPKKAGNRVKTNRRDALHLVKLLRAGELTAVWVPDERHEAMRDLTRARGAAVEDLRRKRQHVSAFLLRHELRYAGKQSWSKAYLRWLSELKLAHVEQRIAFEEMLLAVRQAEERIVRLEGAIRAAVPDWSLAEVVTALMAMRGMDLVSATAFLGEIGDLSRFQTPRELMAYLGLVPSEDSTGDTIKRGPITKAGNRRARRILVECAWSYQHPPRVGKDKQAKVAAAPPAVREIAWKAQGRLCGRYRALTRRGKLKTVAVTAVARELAGFIWAINREVTTGRAAVS

SEQ ID NO: 466379 - protein, 368 aa, unidentified
MRHSQRKRGANRIGRAYGAPRQSSTLPSISIAVRDAAGKLVIESLIETKAATILEFLQGLKGTLCVTFEEGTSAAWLYDLLKPHVANVVVCDPRKNALLKAGNKNDRVDARKLSDLLRAGLLTPVYHGESGVRTLRELARSYLTLTKDLTRVMNRLKALYRSWAIPCAGEKVYSPRHRSAWLEQLSEAGVRRRAEQLYQQLDILLQIRREARRELLRESRKHPAHELLRQIPRLGPIRVALLIALVQTPHRFRTKRQLWAYCGLALQTRSSGEYRFTAGQLQHSKKLPALRGLNINHNHDLKNLFKSAATHVSTSPDALGDFYRSLLAKGMKPAMARLTLARKMAAIVLTIWKKGARFDPGELKQTAA

SEQ ID NO: 466380 - protein, 416 aa, unidentified
MNAAGIDVSSRKSTVAVLRPFGEVVRLPFDVAHNTEGLASLAEQLKALDGETRVVLEHTGRYYEPVAKALHEAGLYVSAVNPLLIKEYGANSLRRVKTDKADAVKIARYALDNWADLRDYTPMDTIRYDLKTLNRQFQLASKQRTASANNLIALLEQSFPGIRKCFDSPVRSDGTQKWVDFIHTFWHVECVRKQSLNAFSERYRKWCKRHGYIFKQGNAVEVYSLSKNAVVLVPKSEVTKVLVQEAANQLTSISRSVETYRAEMERLASTLPEYPVVMAMYGVGKSFGPQLMAEIGDVRRFERKQSLVAFAGIDPMPNQSGDKNVRSNKSSKRGSPYLRKTLFNIMGIYLKCSPQDEPVYQFLDHKRSEGKPFYVYMTAASNKFLRRYYAQVRDYLSTLDDLPPVDMDSTGLKTSD

SEQ ID NO: 466381 - protein, 356 aa, unidentified
MKKQCVGTDISKANFSALICSKSSTDALSYSVSKKFGNDKKGFNQFTRWVAKESDKDIPLVFLMEATGVYHEALANHLHKIGKTIHVILPNTSKNYFRSLNIKTKTDDVDARILAQFGVERKHKEWQPPKKIYKEMRDLSRYRIQLQEQKTALMNIAHSKEYSHEVSSEIKKSNKRLIRILDKEIEAIKVKLEALVATDENLSERIRKICTTKGLAIQTVAGLIAETNGFEGFQNGKQLASFAGYDIVHKESGTSVRGKTRISKKGNRYIRHLMYLPAMSASKYVPELKNLRDRILKRTGIPMKAQGAVQRKLLLLTYTLWKNETEYEPEHHKKKIARAKAQATQDKLKASFPLEV

SEQ ID NO: 466382 - protein, 332 aa, unidentified
METKETIGIDVSKKTVDVHIHGKKMHRVFDNCPKGIKKMIEWVLKNTDCTEKETVFAFEHTGLYSQQLSAILSEGGLMYAAIPGLEIKRSLGLSRGKDDRVDAARIALYAYRLREELEPCQMPSEDLQSLKRLLGLRDRFVRQRAGFKASLKEEKRVLSRKGNKTLFEAQEQAIKDLSKNIKKVEKEMDGIIKEDRELKKQYGLITSIKGVGPQTALYMIAFTQGFSQFGDSRRFASYCGIAPFPNSSGTSIRGRTRVSHLANKKIKSLFDMCAKTALQHNPEIRQYYKRRVEEQGKNKMSTVNVIRNKLLARIFAVVKRGTPYVDTLKYAA

SEQ ID NO: 466383 - protein, 435 aa, unidentified
MAKKAKSCKTKEGLKLKIVNPNAAGIDVADGELQVCVPEDRDGDNNRRWGSFTCDLRVISEWLKACRIDTIAMEATGVYWVNVFFYLQSQGFEVILANPASIKNITGKKTDEADAEWIMLLHSYGLIKPSFNPDTMARKVRALSRHRSAMIKSASKEVQHMQKAMELMNIKLSTVISDILGKSGQAIIRAILDGNHDPMSLSQLADPRCKASKETIAKSLEGIWDEEQLFILKQSVELYDYYQTEITECEKKIEEIISKYAAALGNDPERIAMVKKCKGRKNPLSFNIERYAYAIYGVNVMAIPGVNDSLILNSIGELGYDFIKKFDSSRKFNKWLNIVPNNKITGGKLISSKLQKRKNIMGQAFRMSANAVKNQQNEMGRYFRRIKARDGYAQAVVATAHKIATIFYTMIKNQLEYNGNLVGCDEKTILETAIR

SEQ ID NO: 466384 - protein, 387 aa, unidentified
MPQLNDLSKSLVALEQDATLIAVIEMGQSSWLVAGIVPGVERQPLKKLTTDQDALLQLLHRWRKEANEAGHVIKRITVAYEAGRDGFWLARWLRAHEIEAYVIHPSSIPVSREHRRAKTDRLDTELLKRAFLGWLRGEPKHCSMAAVPTIADEDARRPSRERENLVREVTRLVNRMKANLARLGIRGFRPHLAQAAGQLQTLQTPEGTAVPANTLAEMRRDMDRLRFVRQQIKQIEAARVQRLESEPEERRHAMVYLLARVVGIGVESADMLVQEVFSRKLRDRRAVARYAGLTGAPDESGNKRRERGLAKAGNARVRRGMIQLAWTHLLHQKDSALAQWYRARTADARGRTRKIMIIALARKLLIALWRLVTTGEAPAGLLIRPAA

SEQ ID NO: 466385 - protein, 370 aa, unidentified
MREYNTYVGLDVHKDSISIAIADESRAGEVRYYGSTGGDLVSLDKVVKKLSSHGGELHFVYEAGPCGYGIYRHLSRQGLSCTVVAPSMIPKRPGDRIKNDRRDAESLARLHRSGELTAIYVPREDDEAMRDLTRAREDAVKAQRISRQELGAFLLRHGLRYSGKSHWTSIHKRWFAEIKMGHPGQQITLQEYINVEKENGERVDRLTEQIRQLIGSWRMEPVVKALQAMRGISLIVSATTVAEIGDMSRFANPRELMAYLGLNPSEHSSGDKIKRGRITKTGNGHVRRSLIEAAQAYAHPARISRRLVGRQESLPKSIRDIAWKAQLRLCGRFTRLIARGKNRNTAITAIARELCGFIWAMAKEVPLQSA

SEQ ID NO: 466386 - protein, 426 aa, unidentified
MNCTQNYKIDQVTEQTLVVGIDIAKRTHYACFVDDRGRVLRKSFPIFQSKEGFRQLYEAIQEAMQAFGKSEVIVAVEPTGHYWLNLAYFLEEHGIPLVMVNPAHVCRSKELDDNLPTKHDAKDALVIARLAKDGRFLVPRLLHEIEADLRVGSTLKEKLRKEQTAVKNAIIRWTDRYFPEFWMVFRDLGKTALSVLEWTPFPADMAGRTAEELIEVYRQSEGLKCPQKAKIQALINAAKDSIGVTEGTTMARFEIAALVRRYRQLEAEIAALDAELKALVQTTMEYQWLKTVDGLGDATIIDLLAEIGSFAHYRDPRQLVKLAGLTLKENSSGQRKGQKHISKRGRKRLRSVLFRAMIPLIRHNEAFRELHEYYTTRSVNPLTGKQSIVALCRKLLNVLFAICTKKQAFDAERMKQDVLSQVQRAA

SEQ ID NO: 466387 - protein, 425 aa, unidentified
MDFKQNQKINQVTEQTLVVGIDIAKRTHYACIVDDRGRVLQKSFSVPQAGNGFELFYQRVLAAMKEHEKSEVIVGIEPTGHYWLNLAYFLEERGIPLVMVNPMHVKRSKELDDNLPTKHDRKDALVIARLVKDGRFSYPRILKGMEAELRVGSTFRSKLTEELGAVKNMIIRWLDRYFPEFVQVFPSFGKMALAALECTPFPSDLYQKQPDEVLSLFRKVEGLKSPQRPKAVRLIEVAAGSIGVTEGLEMARIEIATLVRRYHQLEQDIESITGQLIELVKTSVEYEWLSTVPGLGDTTIVDLLAEIGSFSHYQDPRQLIKLAGLTLRENSSGLHKGQKRISKRGRRKLRALLFRVMMPMIRHNEAFRKLHEYYTNRQVNPLRKKQSIVVLCGKLLKVLHGISTKQKPFDAQRMMRDIPGLAEAE

SEQ ID NO: 466388 - protein, 373 aa, unidentified
MPLHAERVHGVLPKGAPQFLEGKGNDMDVYIGLDVSLASTTICVIAEKGKIVTEAQVASTPEALVAFMGKLEHEIAAIGLEAGPLSHWLHKGLTDAGFETVLMETRRVKAALKAMPIKTDRRDAEGIARLLQMGWFRPVHCKSVSSQEMRALLTSRRSVKDALTDMELSVRGVLRNFGLKLGQVSKGRWEARVRELIAGNAMLEAAAEPILRARVALRRELAGLEKLVRDLAREDPVCRLLMTMPGVGPVVALTFKSAIDDPERFRRSKDVGPWVGLTPGRDQSGERDIVGGITKCGDAGLRAALYQAATSMLNRTAGPNWLKAWTLRLAKLRGKKRATVALARRIGVVLHRMWRDGTEFRFTREEAMALLTA

SEQ ID NO: 466389 - protein, 335 aa, unidentified
MRYVGLDVHYGSSTYCILEENGREVRCETIRGHWPKLLERLRTVEGPWTICFEATCGYGYLYRELSRMAKRVVVAHPGQLRLIFRAKRKNDRVDARKLAKLLYLDEVPEAYVPGQDVQSWRELIEHRRRMVDRQTMCKNAIRSLLRSHGKIASKGLWTKKGLAWLQQEEMPTPAAALKRDLLLDELTEAKRRVRTVTEALNVIGRSHPAVILLRTIPGVGIRTAETVAAYMDNPRRFVRSSQVGAYFGLVPCQDASAGVNRLGHITRQGPSTARKYLVEAAWQGVYRSPTICAYFERVLHGRPERRKIALVATAHYLLRCMHAILVSGKPWHEAA

SEQ ID NO: 466390 - protein, 341 aa, unidentified
MSIITVGIDLAKNVFAVHGVDDNGKPALVKPKVSREHLLPLIAQLPPCLIGMEACSGAHHWARLFRQHGHTVKLMAPKFVIPYRLSGKRGKNDAADAAAICEAVTRPQMRFVPVKEEHQQIILALHRTRTGFVEERTATYNRLRGLIAEVGIVCPQKIAALRRALMDHLEDLPGYLNRCVGDLLAHADSLDVRIAEYDRIIRDAAREDARSRRLMDLPGIGPNTASALLASIGGGHDFKNGRQVAAWIGLTPGQYSSGGTTRLGRITKAGDRYLRSLLVMGAKAILSGLGEKQDRFSRWARSLVERRGYWKAVVAIAAKNARLAWAVLRFGEEFRLRQADA

SEQ ID NO: 466391 - protein, 338 aa, unidentified
MISFIPNSCEGAKPASRKAGKRSRMSDLMNVGIDVSKGTLDVCTSANEVFQCANDPEGIESLVKRLKALPIERVVLEATGGFEAAVVAGLAAAALPVIVVNPRQVRAFAKASARLAKTDRIDAAVLVAFAHAIQPEVRPLKDEQTRALEAVLTRRRQLVGMLTMERQRLPMASALVRKELRTHIAWLIKRIKDSDRDLTGMLRESSVWRERENLLGTVKGVGKQTILSLCASLPELGRLNRRQLAALVGVAPFNCDSGTLRGKRHCWGGRADLRTVLYMATLSARRYNPVIRAFYERLVAAGKPKKVALIACMRKLLTILNAMVRDNAAWAPELHRVA

SEQ ID NO: 466392 - protein, 407 aa, unidentified
MEENRKRYIGLDVHKHYLIALGVDADLNVVLPARRVELFRLEAWMKKNLTKQDEVVLEMTTNTWQLYDELVQYAGKVMVVHPPHVALITRSQVMNDKIAASILARLLAKGLLVGIWIPPQEIREARGLVAQRQKMVRLATQAKNRLHAVIQRHHLVPPAGNPFGANNKEWWQSLSLGKLEKLNLQSDLETLQFAEKQVKDMTEIMEGMAAEQEEIGRLLHLAGFGEVTAVTVWAAIGTIQRFVDPQHLVGYAGLGTRVHDSGMTSRSGKITKAGRRDLRTVLIEAANVAANHHPHWKAELARLEPRLGRNKAIVAIARKLLIAVWYVLQGKTDKYAEPEAVAQKLLRFAYAVGKANRPKGQTAAQFARVRMDALGLGGKLTSIPWGSKKPIPLPPSALKERSDVPNR

SEQ ID NO: 466393 - protein, 327 aa, unidentified
MTASPLGLDVSKLKFNACLVRQGGKLRHKVFANNAEGFAQLSDWLKQQAVTQVHACLEATGTYGDSLATDLHAQAHLVSIVNPAAIKAYAQSHLSRTKTDRVDAALIAGFCAERKPPAWHPPAPEVQELQALVRRLESLTEMHTAEENRLSSGLSVKSVRESVEVLLAHLSAQIKKTEALIRDHIESHPKLKRQRELLDSIPGIGETTAAVLLAEVADFSQYGSARQVAATAFLVPRERQSGSSVRGRPRLSKIGNARLRKALYFPAITALRCSAFFQSWAEGLRQRGKSKMSVIGAAMRKLIHLAYGVLKTGQPFDPEWTRKEKTA

SEQ ID NO: 466394 - protein, 355 aa, unidentified
MSHLNSGIAVIGIDIGKNSFHLVGQDRRGAIVLRQKWSRGQVEARLANLSPCLIGMEACVGAHHLSRKLQALGHQARLMPAKYVRPYSKGQKNDFRDAEAIAEAVQRPTMKFVATKTADQLDLQALHRVRGRLVSQRTGIINQIRAFLLERGVAVRQGVRFLRAELPSILATQTDVLSPRMSRVIEDLSADWRRLDARIEGLSSEIETFAHQDQHCERLMTVPGIGPIISSAMVAAIGTGDVFSKGRDFGAWLGLVPKQISTGDRTILGSISRRGNRYLRALFVQAAWVVLVKLGPKQWERYGLKSWIEAAKKRLHHNVLAIALANKLARIAWAVLNKGRAFTCVKTDAMASRPV

SEQ ID NO: 466395 - protein, 347 aa, unidentified
MRFYTQQHQFYCGVDLHARSLYVCILDQAGDIQVHRNLSATPEAFLPVIAPYRQDLAMAAECMFAWYWLADLCEREGIPFVLGHALYMKAIHGGKAKHDRIDAHKIAALLRGGLIPMAYVYPARMRATRDLLRRRMHLMRKRAELLTHIQNTTSQYNLPAFEKNLAYAANRAAVSEHFAHPVVRRSIEVDLALIDHYDRLLHALELYILRTARQHDPNTLYRLRTVPGIGKILSLVILYEIHDIDRFPTVQDFSSYARLVRCAKESGGKRTGTSGKQIGNAHLKWAFSEAAVLFLRQNPPAQAWLKHTAAKHGKPKALSILAHKLGRAVYYILLRDQAFDMPRFLAA

SEQ ID NO: 466396 - protein, 466 aa, unidentified
MKHKPKRERTSRKERPSLSLLERIQPDAAGIDCGQNSHFVAVPPNRDAEPVREFRTFTADLERLADWLSHCRIKTVAMESTGVYWIPLYEILEQRGFEVMLVNARDVHNVRGRKSDVLDCEWLRELHSVGLLRPSFRPAAAIAPLRSFMRQRETLVEEVSARILRMQKALTQMNVLLHVAVTDITGQTGLKIVRSILAGERDPERLAVHRDPRCHASHAEIMAALTGNYRAEHLFALKQNFAAYEFLLQQIAECDREIEALLSQLASQQPPPATPLPGPRSKRSPKHAPAFDIRSPLHRLTGGADLSQIDSIGPHAALQIVAEIGTDMGRWPTEKHFTSWLALAPNNKISGGRLLSSRTSPSANRAAAILRRCAMSLTRTSTALGAFYRRLAARTGKAKAITATARKLALLVYRALSGNLVYSDPGAAAYQQLHRSRELKSLRRRARLLGFHLVDQTTGEVLNAVS

SEQ ID NO: 466397 - protein, 351 aa, unidentified
MKTEHTASPKLFIGIDIHKRSWKIHCSTDISGGKTFSMSPSPEGLKNYVEKYFPDHEVITAYEAGCCGYHSHRSFESYGWRSLVVNPADVHRKGKEKHTKTDRIDAQLIARELKDGRLDGIHVPDMEREQLRSLFRRRNDLVKDYRRIKSLIKSQLLYFGVIVPEEYDNSHWSHGFRHWLDALEFDYSPARATLDSRMRQFRFVDQDLRDVSTQLRRFCKTYYKKDYKLLRSIPGIGGIVACGILCELGDLRRFRSLKHLSGYVGLAPGIHQSGDNLRTTGITRRAHRLIRSYFIEASWQAIRSDPVMQAYYRKHLGKNVKSIIVKVARKLLSRTLAVIKTETPYVVGVLE

SEQ ID NO: 466398 - protein, 340 aa, unidentified
MSTINILGIDIGKFTFHLVGHDLSGREVYRKKFSRPKLIQVLSTLEITTIAMEACSGCHWLARKCQEFGHKVKLIPPQYVKPYVKTNKNDFIDADAIAEAAARPTMRFVSIKTETSQVISVIQRIRSSYVKDRTACMSRIGATLLEFGMSFPKSHAKMKVLFQWLAEHGEPIPPMLLLELRDHHDYYLKLNKLILAQEKKLKEIVDNDEQAQLLKTIPGVGILTASRCLSDISSATDFKNGRNFAAWLGLVPRQYSTGGKPTLLGISKRGNKGLRELFIHGARAVLVRPEKAVAVFGNWILALLSRKHFNVVVIALANKLARIAWSVLSTKQAFEVRIQA

SEQ ID NO: 466399 - protein, 344 aa, unidentified
MLHVGLDLSRRRVDVCLLDEGGEVVAETAVPADGDGLRGLARRLAGQRVRAVIESMNGARFVHDTLEEHGWEVLIADAQKVKGLAPLACKTDKIDARVLAELSWRDLVPAIWLPDPSIRRERELARFRLHLVRHRTTLKNRIHATLVTFGHPCPVSDLFGMAGRELLDRLQIPDPWRRNVDVSLGLIDDLELQIAQLTVQLKRQGADHRYIPLLVTAPGFGWINAFTVASEIGDIERFASPAKLCGYTGLCPRVIQSGNTDRRGPISKHGPRYLRWGLFEAALNACKHPLYKERYQHTKRRLGRQRGPKVAQIDLSRKLTEAIWHMLTRNEPFAPAGARCRLAA

SEQ ID NO: 466400 - protein, 388 aa, unidentified
MFEASTSLNCPVTFDHDSTLVVAIELSAKNWVLAAHVPGQPLNKAKQTIEASADALMSAINGYRVRAAANGRAAERVITVYEAGWSGFWLARWLIGRGIEANVVQPSSVLVDRRMRRAKSDGIDADLLLRTLLAWLRGEPRVCSMVPVPEEADEDARRSVRERAELIAERISLTNSIGAILATLGTGEYNPLRRDRWQRLEELRTALDTPLPPHARSKIIRLIGRLELVLEQIVQIDQERDAILQEVTPDAAGRMIQQLTQLRGIGVQSATILVREAFVRRFANGKALGSYAGLSPTPYNSGATEREQGIGKAGNRRLRTVMIELAWVWQRYQPDASQVRWFRERAGPTGRRMRKVMVVALARKLLVALWRFVTDGVVPEGAVMKPQS

SEQ ID NO: 466401 - protein, 422 aa, unidentified
MLGVGIDWAESFHDVAVGRPGAGVIEQFRIEHGPAGVHRLIARCLELEPDPAEVRVVLETRHGLLVEALADAGFTVLPVNPDLVARRRGPAKKKDDAEDARICCLLALDAYLDLRRLIPHGQTGTELRAIARDDERAARDERRIGNRLRADLLAAFPAALDIAAGDLGSAVFLRLLERWPAADLLAAASRDEIEAFARSHRHGWAGRFADQVTAARAEPRLAVRPELARAKAGSIRLAAAQLLAIRAQRREWHKRMAELLLGAPRTGRDKTAKDPDPGKAFPGGEIYLSMPGLGDRLAARVAGEIGEHPEQYATPNALQCYAGRAPVTRRSGRSEYIVARRLAYNRYLGEAVHQWAFCSLSRSTWAREFYDTKIAAGKTHHAALRALGNRWLEVLWHCLHLGVRYNEAIHIANRNRALNKAA

SEQ ID NO: 466402 - protein, 436 aa, unidentified
MEEVTDEPLYRDRVCGIDIGKAELYATIRVPSDKDPARRASETRRFAATKRGVLALADWLRCWQVPAAVMEATGDYWKGPFYRLEAEGFECVLADAKQVKHLPGRPKRDPSDSSWLAQCFERGAVRPCFVPDPEFRIIRLHTRYRRDLTDERTREKNRTEKLLESAAIKLSSVITDLHGVTGRDIMNHLIAGERNPKVLAQLARARARRKITELEHAVEGAEFFTAEHAALLKAMLERIDGLTAEIGKLSEVIERLLAPYEEQLQQAESMPGWGRRSAQDAVAETGADMTKFPTGGHLSSWGGKTPLDHQSGKRAGRARHKKGNKYLAAVTGETAVAAGKTATREGARYRKLARSRGKAKAQVAVGNTQLKVYHKLLSNPGMRYQDLGPDYYERQAATRRKIAYHVREIEALGLDVTLTRPAPEPDPDGPASTQAA

SEQ ID NO: 466403 - protein, 341 aa, unidentified
MQVSTIGIDLAKSVFQVHGVDAAGKVVLTKKLRRSQVRTLFEKLPPCLVGMEACATAHHWARELKSLGHDVRLMPASYVKAYVKRGKNDAADAAAICEAVTRPSMRFVPIKTIEQQSALMLHRTRDLLVRQRTQLINAMRAHLAELGLVAAQGRDGLKALISIVTDETSPIPTLARKALQALLSQLRALAQQIGEIERHVHALHRSSEASQRLETIPGIGVIGATAIAATVSDPTVFKSGREFAAWIGLVPRQNSSGGKERLGSISKQGNRYLRRLLIVGATAVIRHARAHPEKHAWLMQLLARRPAKLVAVALANKMARIAWAVLARGGTYRAPVLAAPV

SEQ ID NO: 466404 - protein, 402 aa, unidentified
MNCVGIDVSKGKSMIAVMRPFGEVVVSPFEVRHTDSELSELARLLKNLDGETRVVMESTGNYHAPVAWLLHGAGLYVSVVNAMLVHDYGNNSLKRAKTDKKDAVKLANYGLDHWLTLPRYVPEENARLMLKTCYRQYQQYSKVQTMLKNNLISLLDTAFPDANRLFTSPPRADGSEKWVDFVATFWHCECVCGLSKKAFTAKYQKWCRKHGYNFSQDKALDIYASACGRFGVMPKTNTAKLLVEQAISQLQATSAALAALKQEMQSLAASLPEYPVVMEMFGVGPTLGPQLIAEIGDVRRFHSKKALVAFAGIDAPPYQSGQIDVRSRSISKRGSASLRRTLFLVMGVLLQCAPMDEPVYQFMNKKRSEGKPYRVYMMASANKFLRIYYASVKAYLESLEHD

SEQ ID NO: 466405 - protein, 346 aa, unidentified
MAISVVGVDLSKSVFQLSVADAKHHVIDRKRLSRVQFHRFLAQSTPARLVMEGCGTSNYWGRTAQLHGHEVKLLHAKYVKAYVRRTKTDAADADALVLADRDTSLHPIPIKSEELQALQGLHRIREQWKRARVARICEARALLAEFGISVSVGVRGIGKKLTLATEQAPVLIQPTLMDLIQEIDDLDQRLRRVEHALAAYAKTNPEVQVLLSIQGIGVIVATAFVARVPSIHMFKRGRSFSSWLGLTCREYSSGQTRRLSRITKQGDRYLRTMLIHGARAALMAARRKAANGKSLTRLETWAVNTQVRVGHNKATVALANKMARIMWAVWTRHETFNGDDALRFAA

SEQ ID NO: 466406 - protein, 330 aa, unidentified
MNYSHFVGLDVGKKSFDACLVSLDKELSHHTFPNTPGGIEELLHRVKQHGVEVETALFCAENMGSYVIDLCLSSYQFHFPLALECPLTIKRSIGLQRGKNDRIDARRIVRYACLHYRKHRLYELPDKDLVRLRNWMVIRDNLVKQKVSSRKLLELPRETSGLADLVTAMTFLEKQLSLVKEKISYVEQEMEKIISSNIALLTNYQLLTSIKGIGPINAIVLLCVTGNFHRFSDPRKFACYCGVAPFEHSSGTSIRGKTKTSNLANREVKVYLTRAAITAISWDPQIKAYYKRKTGEGKHKASVINAVRAKIIARCFAVIKRKTPFVTLRA

SEQ ID NO: 466407 - protein, 376 aa, unidentified
MERGSLMLNTTTFVGLDVHARSIKAVALDAMTGEVRSATFAYDAAAVAEWVRSLDPSAKCVYESGVTGFDLQKRLSSMGIDCVVGAVSKMIKPPADRKRKNDRNDAEFLARMLSVGNVVEVCVPDDECEAARDLVRALDDAREDLKRCKQRLSKFLLRHGLVFSETNAKGQRKKNWTAAHWAWIRSISFPDKADDEVLAYYIDAARQAMEDKARLERLVEAEASKPRWKKRVDSVRCLKGIDVTSAADLVFEAGEFSRFKSARSFAAWLGLTPSEHSSGESVRQGGITKAGNKHLRRVLVESAWHYLGCSPRSKDLAKGQVPDPAARRHAAKGIRRLVKRREEMLGRGVHKNKANVATARELACWCWAVGRMVENG

SEQ ID NO: 466408 - protein, 427 aa, unidentified
MRIVHQESAGIDIGAKQFFVSTNDKVVKTFYTFTSDIIELGNYLKSKKVESVAMEATGVYWYVIYEILDQEFGIDVWLVDGRQTKQVPGRKTDVKDCQWIQELHSYGLLNRCHVTTGDLKSLRTYQRLREDHIETSSMHINHMQKALTVMNIRLKEVLSQIHGKSGLSMIEAMLVGERNKEKLLSLCHISVKKNKSELILKALEGHYTEEGLFTLKQAYDGYIFYQNQIEECDKKMSEILNKINDNDPTQSTDKRKAIRHHKPDINNLGGHMLKIFGNQDATVLSGFTDYSWLRLLGEVGVDLSKWKTEKHFTSWLGLSPGQHNSGKMRRNKKKGRPKAGQIFRTIAQSLLNSKDIALGAFGRKLRAKKGSGVAIKAVARKLAAQYWRLMVKGRDFVEKGVEEYEKQVYRSKVRALGRLSKELGMVL

SEQ ID NO: 466409 - protein, 455 aa, unidentified
MSKKQQSKKQQNKQFTTLQLGIIYPGAAGIDVGSMNMMVSYPGAEGIQTVKEYGAYTEDLHAMANQLKESGITHVCMEATGVYWMAVYEILEQYGFNVTLVNARHYKNVDGQKTDVKDCQWLQQLHAHGLLRASHIAEEQYRELRTYIHERGVLQKNKSDTLNRIHKVLTQMNIKVQHIISDIEGVTGMQIVERIAAGINTPQKILEGLNIHKLKAGKEDLEKSLKGVFKPWYVKVLKQHLTAYHFYKKQMLAYELEIESTLKTLLPSPAQQITIEKKTVKARKNQYHFNLKKYLHEIAGVDLTEIDGLDENTVLTIIAVVGLNMHKWPTAEHFTSWLNLSARPKKSGGRTIGHQRRFTNNSATQAFRMAAQTMWQQKGTLGHLYRRLSHTKGTKKAIKAVARRLAVIFYNMVKKQTAYDPKIVALDEAKIKARKISRLQKEAEKLGCRIEILVA

SEQ ID NO: 466410 - protein, 337 aa, unidentified
MEAHTIGIDLAKNLFQVHGVDRHGKPTLRKQLRRTEMAAFFAKLPPVLIGMEACGGAHYWARKLAAFGHQVRLMPPEFVKPYVKSNKSDMRDAEAICEAVARPTMRFVAVKSIEQQAILSLHRAREGAVKARTAQANQIRGLLTEYGLVLPQGIVHLEKMLPSMLADMHNALPGFLIQLFQTLLDNFRHLDRLAHEIENAIRRWHLANEESRRLEQIPGIGPLTATALVATIGEAKTFHSGRQFAAWLGLVPRQHSSGGKERLLGISKRGDTYLRKLLIHGGRAVVRYADRHPGQYKGWLANILARRHKNVVAVALANKNARIAWALLAKDRAFCQA

SEQ ID NO: 466411 - protein, 407 aa, unidentified
MPLFVGIDVSSKNLEACLMDAAGETLVTRTVTNNFPGASELKDVILQHAKPGDTIQIAMEATSVYSWHPAMFFHEDPELKQRQTKVFTLNPKLVKNFKKAYAEMDKTDPKDAWVIADRLRFGRLPKSVIQSEQYLALQRLTRMRYHLVHSLTREQQVFLNHLFFKFSAFNLEVDTSAFGHAITELLLEAYSLDEIAQMPLEDLAKYLQTKGRGRFSDPEDVASSIQKAARDSYRLSKCVEDSIDLILGSSIEIIRHLKRQIKDLDKAIARVLDGLPNTLETIPGLGPVSCAGILAEIGDIERFENQAAIAKFAGLFWPRHQSGDYEADDKMLARTGNRYLRYYLVEAANLVRRHEPEYRAFYQKKYREVQKHSHKRALVLTARKLVRLIDALLRNGQIYAPKKKVTR

SEQ ID NO: 466412 - protein, 352 aa, unidentified
MRRYKQITVKGKSLFVGIDLHQLQWHVTIRTEDAEIFSGSIPGTWDALRKLLDRYPGSVLHTVYEAGYFGFWLHDHLVEYGAQCIVTPPSLLPIEYGNKVKTDRRDSRKLAQLLAKGMLKRVWVPSAEERFHRQVIRRRRQLIGDRVRTQNRIKAELRFYGIPVPETTTKWSKAYVMNLHRLKFNNHWMQESFQRLLEEYEFLSDQIKKQTTVLQTLAETPLYKERVKILRTVPGIGLIAAMELLLELQDMERFRRADQLAAYVGLTPSQYSSADKVRMGRITAIGKNELRGTLVEVAWRLIGKDRAMRRKYERIKVRSGSKRAIIAIARITLLRTRRMLLDNKPYVIGRAA

SEQ ID NO: 466413 - protein, 403 aa, unidentified
MEGPLISLDVSKGKSNYRFFENGTDRKGKKGVIRHDIQGFDSIRDEAEKMEERLRIKPSVIFESTGVYSDVVEKYFTDKGFDVYVISPLLSASMRKEGVRPAKNDSLDTLSIAKVFYSKDDLRKCSENDKKAERLREMSYELDMMNRRIRPMKCQFLRLLDKVWPCLDEVSDYSSRFMLDFIIAFGHPENIKTVKGVLSVIRKSEMGTAGRKDRIAQDLFDYCHTHLSAVSKDSSYVELLKRMAIELKAMAKKKSELIDRMAEEARNKDEFARLLTIPAVAKTTALKIMARVGDISRFRNAEALVAYCGLDPRVYQSGKMTGEHRTITKKGDCILRSTLFLAVKLMVMLYPDTKVARFVAAKAKNGLSYKQAVVAGSAKLARIIYSMLTHHENYVEFNADIVA

SEQ ID NO: 466414 - protein, 422 aa, unidentified
MLSVGIDWAEEFHVVAIGRPTEGIIEVLRVEHEAEAVSRLVARIRDLEPESDQVRVVIETRHGLLVEAMLDAGFVVVPVNPDLIARRRGPARKKDDAEDARIACLIGLDRHAHLRPLIPHGELANELRSIARDDVRAAQDQRRLLNRLRIDLINTFPAALRIVGEDLGQPTMLRLLERWPTQQELAGVAREELIEFARGCHHGWPERFASQVSQALAGDGFTARQSLVRAKAASIRLAAGQLLLIDSQRRLWERRMGEILLGGRRRGHDRRPRSDELGEKFPDGEIYLSFPGLGDRLAARVAGEIGEHPSQFGSPSSLQCYAGKAPVTRRSGKSELVVIHRQACNRHLASAVQQWSFCSLSYSSWAREFYQAKMAQGKGHNGALIALGNRWLEVLWHCLRRHLHYDEAIHVANRNRAHGRAA

SEQ ID NO: 466415 - protein, 342 aa, unidentified
MRSVKRGGRSCHFMSASICGLDVHKDSTYATILNPEGKIINQTKMSNDRVLPYLSHFNVGKVGMESSNQIAPLFRQLTAKGYNVVVSHPKKTRYIAEAKIKCDRVDSKIIAELVRLDALPLAYFPEGEIAKLREKVRRRAFLVRERVKLRVKVKSVLTYEGLKWPADHGLFTKKGLEWLYGLHLDSVECYLRVLTPLDEEIKLLSKELVGVAEKDEEVKLLMTIPGIGYYTAVLMKSEIGDINRFPFGERLCSYAGLVPSTHASGRTVRHGGITKEGSRWLRWVMVEAAQTHVHKYDTSITRAYNRIAEKRGKKIATVAAARRLLMCSYSVLKNKKPYHDQA

SEQ ID NO: 466416 - protein, 340 aa, unidentified
MGQVVTIGLDLAKAVFQVHGVDAAGQVVLRRQVRRSQLLQFFARQPACLVGMEACASSHFWARELSALGHAVKLMPAQYVKPYVKRGKNDAADAEAICEAVTRPTMRFVAIKSPEQQSAMMLHRVRLILCRQRTQLSNALRAHMAEFGMVAPVGRLGIEQLLRIIADPADRRLPAEARACLQMLAAQLGMVKAQILDNDRSITADARKTEIGRRLMGVPGVGPVLASALVAAVSDPTIFRSGRDLAAWIGLVPRQNSSGGKERLGSICKAGHRYLRQMLVVGSMAVIRHAQRSASRRPWLVQLLARRKAKVAAVALANKIARTVWAMMMTGERYREPLAA

SEQ ID NO: 466417 - protein, 354 aa, unidentified
MNYVGVDIHKRYSVLVAVDERGRELARGRISGNSVHAFAQFFEALQGPGKVVLEACWNWGRIYDVLSEIEQVEEVVLAHPLKTRLIAEAQIKTDSLDALALATLLRGNLIARAHVPSKATRARKELLRQRLYWARLRTRVRNRVHAVLDRQRELEMPQCSDLFGRKGLNALSKLRLAEPDATLLSEELDLLKLIDSQIKAQEGRIVAFNANEQATQYLQSLPGMGKILAAVAAAEIDAIERFDGAAKLCAYAGLVPTTYGSGGKVHQGHLLKSRNKWLQWAFIEAAWVAVGCSSYFGGIYRYQRARGKKANIAITIVARRMCRIAFTLLKERRNFQEQHRTFPGRSAVRLTAAA

SEQ ID NO: 466418 - protein, 321 aa, unidentified
MTYVGIDVSKATFVVAYSSAKSSETKTFKNTTKGIREFIRTISPKENHCVLEATGNYSMLLVYLLSKAGVTVSMENPLKIKNFARVMLSVVKTDVIDARLIALYGERMQPAPFKLRSDSLLLLKQKRTVLRQLKKQLTANRNLEGSLKVLPFIDSKCKKVLEKTIKFLEKQIEEMEEELTSMAEIEYEKQMDLLTSIKGIGATLAAALIIATGGFTYFDNAKQLTRYLGLSPTYQQSGTSVNVKGHINRNGDAYLRSQLYIGAMASLRCNTECKACFDRLRSNGKPGKVAIVAVANKLIRQAFAVVTHEKKYIDGYKSVKP

SEQ ID NO: 466419 - protein, 346 aa, unidentified
MEKAFPTRVQVFAGIDVSARELSVAMQCGVEAGIAVTTFSNKAAGHKALLLYLLRGNARARVCLEASGNYSLDLALTLQAHPQVEISVVNPRRARRFAESLGERSKTDPVDARVLCEYAVRMRWVPWVPPNLAALRLRAITRAIEDLVTMQTQEKNRRHSLQASRALPALVTRELEQHLRYLKTRIARLRREALRLIGRHPELNRRFHLMLTTPGLGETSTLQILGELPVLPETLDARQWAAFSGLDPAQFSSGTSIEKKSRISRGGSRHLRRALYMPALVAIRREPFVRGFYQRLLRRGKAPLQAVVAVMRKLLHALFAMFRLDQPYDGSKLCPGEFARDTAVCA

SEQ ID NO: 466420 - protein, 387 aa, unidentified
MPAATSVSERPAVIRVDLGAIFVSMELSRSKWLITSLSPGGGEKMSKHVIAGGDLAGLLDLFAALQAKAQARTGHSYRTIVIQEAGLDGFWIHRALEKEGIESHVVDPASITTSRRKKRAKTDRIDGEALVRALLAYKRGEPRVCSMVRPPSPEEEDRRRLVRERKALITERVRHSNRIKGLLFAQGISKYEPLRRDRRARLAALRTGDGRELPVHLKAQISRELDRFELLLEQLKAVEAERDALLAQEQVDAKAPAGLLLKLKGIGPEFAAILWSEGLFRHYDNRRQVAAYAGLAPTPWQSGQIDREQGVSKAGNPRLRVALIQLSWLWLRHQSQSALARWFEARVARNGGRLRKSTIVALARKLLVALWKYVNAGVEIEGAVFAS

SEQ ID NO: 466421 - protein, 382 aa, unidentified
MNDLSRSLTPLDPDHTLIAVIEMSQSSWLVAGIVPGIERHPLKKLQPNEAELLRLLMRWRAEATKMGRTITRIAVAFEAGRDGFWLARWLRARDIEAHVIHPTSVAVSREHRRAKTDRLDTGLLKRVFIGWLRGEPDHCHMAAIPTLADEDAKRPNREREGLVRERTRIVNRMKSCLARFGVRNFKPTLRKAPECLATLVTPEGVPLPPNTLLELRRDMARLRFVMDQIKEVEETRAQRLEQAPQEKSHAMVRLLARVIGVGIETADMLVHEILSRSLRDRRAIARYAGLTGAPDESGRKRREKGLAKAGNARVRRGMIQLAWRFLLFQKDSALAQWYRARTDSAGKKRKTMIVALARKLLIALWRLVTIGEVPAGVVLRAA

SEQ ID NO: 466422 - protein, 310 aa, unidentified
MEATVVGIDVSKDRLDVHVHPVGDCFAVSRNAEGLDALIARIVPLGVQAVAVEATGGFETVVAASLGAAGLPVIVVNPAQVRAFAQALGKRAKTDAIDAAVIARFVEATRPEIRPLPDADTRLLADLVARRRQIIQMIVAERQRERQLPTRYLKSSAARLIRALEKELNVLDEGINDSVRGSPVWCEKEDLLKSVPGVGNVVARTLLAEMPELGTISRREIASLAGLAPWTRQSGKWKGKSFTGGGRTTARNTLFMAALVATRHNPLLKAFYQRLTAAGKPKMVAIVAVARKLLTILNAILRDKTPWQTA

SEQ ID NO: 466423 - protein, 313 aa, unidentified
MSPNNPIIHCGLDVSKSSLDLFCQGRNSNFSNSSSGIQRLIAHLASLQKSLHLVLEATGGYEQLLVRACHNASITVCVVEPGRVRHFARSQGILAKTDALDAAVLARYGECVQPRATTPLTAQQDQLRQLVRERARLIELHSVLKNQSRASTLPELVRLHKKHLKLLDKQIAQINLLIQQTIQEDSTLKEKNDLLMAVPSIGPVVASTVLAELPELGSLNRNQIAAMAGLCPYNRDSGKWKGRRWIQGGRPLLRKALYMAAVVGMRYNPVLKPLYKNLKLRGKPSKVALVALARHLLIHLNSILKKSHFPLAS

SEQ ID NO: 466424 - protein, 423 aa, unidentified
MMRIVYPICCGLDVHKNLIVATIVTTGKDGISEYQQKSFSTINSDLQKFHDWLIENNCKHVCMESTGKYWIPVFNYLENDIDVSLTHPKYVKAIKGKKTDKKDSKWIADLYKFDLVRCSFIPPKDFRQLRELARYRFKLVCMKSSEKNRIQNCMTVSNIAIASILSDPFGKTATELMSYLLQNTADTIDDKAVRKLIKKGARAKSDEIFEAIKGYHIGSDQHKKLDLARAHLNYLDDMIRQTEIELYVRIKPYYEFVEHIATLPGITQLSATIILAEIGVDMNVFDDAKQLCSWSGLAPSNNESAGKKKSVRIAKAGAYLKPLMVQCALAAIRSKKQPYFAIKYGRIKKRRGHKKAIIAIARMMLVCIYHMVIKKESFNPTDYSELMDPHFNQHKVILNDKNVFAYLESQGYDTSSLVKCNDN

SEQ ID NO: 466425 - protein, 317 aa, unidentified
MTDECFAGIDVSKHKLDTCLMPGRQRHSCSLDKIEGLIAWLKKHAPKIVVLEATGGYERETAAALVAEGLQVAIVNPYQVRAFAQASGRLAKTDKLDAEAIAAFAAALRPEPRPLADQDLAVLQALMARRRQLIAMRKAEANRLETTKQANLRQGIQSHIAWLQTEIAKLDEESSGKIENSSVWRAKDELLQSVPGVGDVLSRTLIADLPELGSLSRRQIAALVGVAPFNRDSGKLRGTRSIFGGRGAIRHVLYMAALSAVRHNPVLAAAYARLRQAGKPPKLALTACMRRLIVILNTIVKTNTPWTLTPLPHNTVA

SEQ ID NO: 466426 - protein, 405 aa, unidentified
MKTIIGIDWSEKKHCVHAYNESGAKLLRLEVAATVTGFRKLTRQVNKLNPEPANCLVAIETAHNLLVDYLHDLGYTLYILAPSLFSSNRGRQGSSGAKDDDRDALLLAEILRTDLGRLIPWQPDGPLVRQMRILLTAVDQLTKSIVRQRNRLRALLLRFYPQALDAFGSLKTQFSLRFLTAFPGPASLETLRYEQFTAFCHQQGYYEYGRYPELWHSLCNSAPEFNQQENPAFCQQVAWQAERLFSMVLQKKNLIAQVQSLFQQHPDAFIFHSLPGTGALLAPKLLVMFGDHRQRYPTRAWLPAIAGTAPVTVASGKSRYVKFRRACNHNYRNTAQQFANSSIRKSTWAATYFYQARDRGKSKSHAYRCLANRWLHIIWSLWQRREAYDEAYHLSQVSKHRRAPS

SEQ ID NO: 466427 - protein, 357 aa, unidentified
MQYHAALDTSATTTAICVVKAKDGEIALETSVTTDPEAIWQALEPYANRLLLVGHEATSWSAWLHRELEKHGIPMVLLETHHAARMLDAQRNKTDKNDARGLAQLVRSGWFKQVHAKSERANRMKLLLAHRRTLKRKLLDIENEVRQSLKMFGLMVGPRVQRSTFCNRVRELVAGDPLLQVLSESMLTCWQVLWDQYRELHKMLVQLVGQEELCRRWCEIPGVGPVTAMTFMAAVDDPHRFAKSKTLGAHFGLTPKREQSGTSVDRDGHISRRGDGEVRTALYEAASGMLTRSKQHSTLKAWGMKIATKRGHKRAVVAVARKLAVIMHRMWIDGSRFRFSAANDHPESGGKAVAVPA

SEQ ID NO: 466428 - protein, 322 aa, unidentified
MKCIGIDVSKLNFTVAYPTENAYRLATFTNDSKGIKKFINSIDDCDYHCVMEATGTYSSLLVYLIQEAQVPVSVVNPKQINHFAKMMLCVTKTDNLDAKLIAMYGEKMKPAIYKMSSSTIQFLRQKRTLLRQFKKQLRMLLNVQESFQALPKIDTKADKALKKSITFLEKQIHELHLDMVAVTRAEFSTQLDHLTSIKGIGNGVATALIMATGGFTYFDSAKKFAKYIGVCPSYQQSGTSIKTKGIITRHGDPELRSLLYISSWSAIRFNSSCKELYERLKAKGKPGKLALMAVINKLLRQAFAVIISKSNYVDNYVIGEIK

SEQ ID NO: 466429 - protein, 310 aa, unidentified
MFNQYVGIDVAKATLDVAIGSDGELVQVENSEAGIARLLERLGEVAPELVVLEATGGYESVVAGAIVGRGIAVAVVNPRQVRDFAKATGVLAKTDRIDARVLARFAEAVRPEPRPLPTAEAKELEEYLSRRRQLVDMLTMEKNRQSIAATERMKKSLKKHVEWLEEALRRANDDIDKAIRNSPAWREQEDLLRSMPGIGPVSARTMLAELPELGRLNRKKIAALVGVAPLNRDSGTLQGSRTCWGGRASVRQVLYMAAVTAVRCNPVIRRTYAALRARGKKHKVALVACMRKLLTILTAMVRDQRRWSPS

SEQ ID NO: 466430 - protein, 357 aa, unidentified
MVQSKTLDFSGTTIFCGIDVHKKNWRINIQDSEFELEDFSQNPDAVLLHSHLKRKYPGAKYKVCYEAGFSGFSAQRWLSQNGVDCLVLNAADVATNHKEKRQKNDKIDARKLCEYLQTKKVRSVFIPEVHWEHSRSLVRLRERIVSNQTRCKNRVWQLLHFSGLSLPKGYEAGQYWSKNFINELECLDCGSDVLKTTLKLYIRDFQQTRALLLEATKNIRELCKSPLYEKDIILIKSIPGIGAINAAIILFELQDVTRFKHFDHLCSYVGLVPDTSDSGDKKIAKGITSRSNHNLRTALVESSWTVIRKDPALLMKYKEYCKRMDKNKAIIRVAKHLLSRINYVLKNKKEYVSGVVA

SEQ ID NO: 466431 - protein, 346 aa, unidentified
MLYAGLDLSRKRLDVHVLREDGTTALVTAISPDGDAMRSLVRRVAAEGEPVRATIESMNGARFIHDRLEFLGWEVLIADAQRVRGLAPLAAKTDKIDARVLAELTRRALVPEIWLPTPEVRAERERARFRLHLVRHRTALKNRIHAILIAFGRACPMSDLFGVAGRELLDSLALPEPWQTNLVESLALVDDLTARIDALELELRRLGAEHPSMRLLMTVPGVGWVLAYTIASEIGDIDRFASPKKLAGYTGLCPLVRQSGGKDRRGPLAKNGPTYLRWALIEAATHAARDPRYRERYERTKQRLGRQRGAKVARVDLARQLAEAIWHVLTKNEPFHPAGPAMGLVA

SEQ ID NO: 466432 - protein, 393 aa, unidentified
MICVGIDVAKDKYDCFILSPEGEVLADVFTIPNNAEGFDTLLQTIRRCARPEDKIKVGLEATGHYSYNILGFLLNEGLDTYVINPLHTNLYRKSLSLRKTKTDRVDARTIAAMLMSDVDLKSYTDTAYHNEELKSLTRYRFDKVRERAKLKQSVSRLVTILFPELENLVPTLHMASVYALLSEFPGAKQVSEAHLTHLKAVLYDASKGRYGSDMATTLRDAARCSVGSVMPAKSLELRHTIRLIHELDAQIEDIEAAIQSMMGEIQSPITTIPGMGVRMGAMILAEIGDFSRFDSPDKILAYAGMSPSTYQSGQLSLSGTYSHMEKRGSRYLRYALYNATKYVCLWNPTFAAYLAKKRAEGKHYNVALSHATKKLVRLIYALEKSKWPYSTAA

SEQ ID NO: 466433 - protein, 346 aa, unidentified
MIAIGSDVHKGRCVLAMMEEEGKVKMLEPIECTREAWLKRLGELPPEAEIALEVSTSGYFVMSVLEEAGWLKRAHWVHTAGIDSLRKQKSDRLDARRLARKLAANTADPLPEAWFPPAPIRQLRMLARQRCRIARLRVLTKNRINSLLQMHGLRPEKSPISAAGRDWIRQQALPAPVEQCFEQLFRLYDFLHSERETSEQNLAAHAALFPEVKLLRTIPGIGHILAAIIWGEIGTLERFPCAAALVNTTGMVSSLYESGEVSIQGHITRQGSAWLRWALITAANCVTRSKSPLGQRYWSLRRAHKKPNVAKTAVACSVARCVYGVLKHGEPFQAERWGRRSGKLEP

SEQ ID NO: 466434 - protein, 347 aa, unidentified
MNFYHSTHRHYCGIDLHARSLYVCIIDQQGEVLLHKEIKARPEPLLALLEPFRDDLVVGVECMHCWYWISDLCEEHGINFILGHALYMKAIHGGKTKNDRIDSFKIAMLMRGGNFPLAYVYPKEMRATRDLLRRRTRIVQHGAMLKAHAVNTLGQYNLPPSKANLNNPGGRSQLTAAFSDPDVQRNIDLDLAIVDCYQHELKKLEWHLEQQAKQHDPASLNVLKTIPGVGRILALTILYEVGDVQRFESVQKFASYARLVKCKAESAGKVYGTQGNKIGNAHLKWAFSEAAVLFIRNNDKAKRYVEKLQKRMNKPKALSALAHKLGRAVYFMLKDKRVFDEQRFLRG

SEQ ID NO: 466435 - protein, 318 aa, unidentified
MDKDVYVGIDVSKTELVVAVRPSSESFTLAYHRAGLKQLVGRLGELKPKLVVVEATGGLQRQVVAALWTGGIAVAAVNPSWVRSYARGGGLLAKTDRIDARLLALFAQREQPVPRPPLDAETQALQELATRRDQLLEMRVAEQQRLKRSSAQVRKELRQHIAYLEGRITQIDDDIDKTVRRSEAWRRKSEVLRSFPGVGKVFCTTVLAKLPELGTLSGKAAAALVGIAPFPDDSGGRRGRRVIRGGRYPVRSKLYMCALSAIRCNPVLKQFYERLRARGKLEKVALVAVMRRIIVILNAMLKTNTIWRQASAAALEEN

SEQ ID NO: 466436 - protein, 363 aa, unidentified
MNESTTVTVGLDVHARSIRLAAIRGDELLTERTLPYDEEAVERVLRQWPHVRCCYEAGPTGFGLYRYLVERGLDCEVVAPGLVPQRPGDRVKTDPRDARKLARLLAGGLLQPIHVPTRELEAARDLVRAREAARLDRMRDRHRLSKFCLRHGRLLPGSSWTVSRRRWLSEQRFAFAAEQLTFDTYLHAVDLVDLRIAALERSLREAAEEDSWRQLVARLRCLRGIDTLSALGLVTEIGDFSRFRTAEEFMAFVGLVPSEHSSGERRRQGSITKVGNAHVRRLLVEAAWHARRRPRVGYELHRRQRGQDAVVVERAWRCQQRLYSRWQRMAGRGKPSQKIVVACARELAGFIWAIATEQPLRSA

SEQ ID NO: 466437 - protein, 366 aa, unidentified
MKQLFIRLGCGIDVSSKKLDVCFGGYLADGTFKIIASKATFKNTAGDIKRLIIWINKYLSKYQGDEPIDFQVVMETTGSYHENILAALYSAQLPVCLERADRIKKFLLSLGQFSKNDQLDAKGICRLACERKLRLWKPFTEQTMELRGVLRQRNTLVKSRTRFKNQLHAAEAGHYANRLVKKAIKHMIKQLDKQIEMLEREAIKLYRKDEKLQKYVSPILRSFKGVGVLTLLTTFAETNGFEQIMSRRALSRYAGLNVVENQSGFVNRRTKISKRGNSRIRAILYMCAMSIIKTKEGPMYSKYIRVVERNPKAKKVAVVALMRDVLEMIFTLFKTGQPYNPRHIWRQSQPKANSQSTAKKVPLELV

SEQ ID NO: 466438 - protein, 470 aa, unidentified
MNHRRLVGIDLGIATAHTVRVLDGEGTIVAKRKAWPTVESLAAVERAALAGCLEGTRLEVVIEPTGPAWLPIAVFFTARGHQVFRVSSQKAADLRRFLSRHAKSNGIDADTLARLPLFDPAGLRPLVLPGAGRAALDRRVRATDRLTRQAAEHKTRIKDLARQLLPLSPLTGDLGAADLAILERCADPRALLRLGAPRLAALIAKASRGHQGTERARQWLDAARASLDLYRGHPAVDLTGLAAEVATEIRLLKVLQAELAAHAAERETRYQQVDPAALARSLPGLADVGGPALTACMGDPARFATGKRFRSFTGLTPKASETGETDRKGQPMSKAGSSLLRTTLVRAADTARKQDPQLAATYYRQMTERGKDHLGALCVVAANLAERAWTTMRRGTPYVIRNTDGQPVTPDQAKTIIAERWTVPPEVRARRRSKKAGKAPQKVLEGQYARGSLPRPTTPPPRRRSVKPVP

SEQ ID NO: 466439 - protein, 430 aa, unidentified
MGLIVPSAMHPEQADQPLPYEWFVGIDWGSQQHQVCVLDRDRRLVGERAVDHDGASLAQLAAWLWTLSAGQPQRVAVAIEVPRGAIVEGLVERGFHVFAINPKQLDRFRDRHSVAGAKDDRRDAFVLADSVRTDRPSFRRLHLDEPHLLLLRELSRVEETLLEEFRRSANRLREQLHRFYPQMLQLCSAADEPWLWDLLHLAPTPAHAMLLSEEQVQRVLKVHRIRRLKAPAVLACLQTPALPVAPGTPEAAQAHCGFLLPCLRVLAEQLQACSQQVSALLRTMAGEPGEGKSPSDVAIVQSLPGVGRKITAWLFAEAAQPLAERDYQVLRTHGGVAPVTKQSGKRRQVVMRHGCNPRLRHALYHMARVAMQRDAHFSSVYAALRAKGQRHGQALRNIGDRLLRILMAMLRHRTCYDASRIRCEPVVQKG

SEQ ID NO: 466440 - protein, 456 aa, unidentified
MATAKTKRRSKSNKPLVPIHTRAAGLDVGATFHVAAVASDLDEEPVRTFKSFTGDLHSLADWLGSVGITTIAMESTGVYWVPVFEILEARGFEVLLVNARDVKNVPGRKTDMKDAQWLQQLHEHGLLRGSFRPRDGVARLRALLRHRERLVEYGASHIQHMQKALMLMNVQLHHVVADITGMTGMNILRSIVDGVRDPKILAQHRDRRCKASIETVQKALNGNYRIEHVFALRQSLALYEFHCAKALECDVEIEQAMAELNSDRGTPATPMPEARHVHQRNEPKFDIRTALFNLLGADLSQIHGFGPATVLRLVGECGDDMRKWPSVKHFTSWLSLAPGNKISGGRVLSSRTRRSSNRAAAVLRMAAMSVGKTHTALGAFYRRLGARVGKAKAITATARKLAVLFYNAVRFGMAYVDPGEDHYEERYKQRVLQQLQRRATQMGFTLVRENATVGVS

SEQ ID NO: 466441 - protein, 421 aa, unidentified
MEDDWTVFVGIDWADEEHDVVVVDQEGQELGAFQVTHSGLGLRALAQRLAELGAGNPGTVAVAIETSHGTIVDTLLERGFGVFSVNPKQLDRFRDRFSIAGAKDDRLDALVMASCLRTDRKLFRQLEPDPPEIVELRELSRMTKELVSERQRLTNQLREQLHRYYPQMLELDVELYRDWFQDLWALVPTPAKAQKVRKAKVARLLTKHRVRRFDAEGLLEVLRQPELPLAPGAVEAAEAHTTLLLERLALVCRQHKRAEKTLTQMLSDYAKEQEIEEQHDVEILRSLPGTGLIVLTTLLAEAQGPLSRRDYHALRALSGVAPVTRRTGKKGKQKKWTVVMRRACNSRLRDAMHHWCRTAIQNDPWARAFYDELRGRGHKHGRALRGLGDRLLKVACAMLRDGTMYDPDRKLCAMAATERAA

SEQ ID NO: 466442 - protein, 482 aa, unidentified
MKSKPQEKNKRATNHPTQHHWDEMNRKQRREMTRKIHSEDLRLEVMHPDAAGIDIGNESHYASVPPSRDSQPVREFGCTTAELKAMAAWLKQCRIRTVAMQSTGVYWVAVYDILEQAALEVYLVNARDTKNLPGRKSDVQESQWLMKLHTYGLLRNSFRPTQEIRVMRTYWRQRNDLVQSASRHILRMQKALTQMNLQLANVLTDISGVTGQAIIKAILAGERNPHKLAEFRDPRVKASEEQIAQSLEGNWQEDLLFVLKQEHEGYEFCQKQMAECDRQLQHYLQQREDRSQGAPLPEEKRKGRLKKRANKPQFDLRGGLFRMTGTDLTRIDGIDVLTATTVISEAGYDMSKWKTENHFVSWLRLCPDNRISGNRVIGKGRLPTNNPISIALKMAASTLKESKTYLGAQFRRLRTRQGAPIAIKAMAAKLARLVYRMLRYGMKYVDQGAAFYELRHRELQIKRLKAKAEKLGYRVAPIPVAA

SEQ ID NO: 466443 - protein, 382 aa, unidentified
MQIVHSRCCGLDVHKKSVMACVLIITAVGEVVTETRSFGTTTAELLALGDWLASNGATHVAMESTGVYWKPVFNLLEDRFDVILVNAHHIKQVPGRKTDVKDAQWIAELLQHGLLTPSFVPPPPIRELRDLTRQRTLLIRERATLSNRVQKVLEDANLKLASVASDTLGASGRAMIEAVINGQDDPERLADLAQRRLRAKIPELKRAMQGRVTDHHRFQLRMLLTQRDQQEALIAQYDARIETWTRPFEETVARLETIPGVGRKSAEVIMAEIGTDMTRFATPGHLASWAGMCPGNNQSGGKRRSGRTTKGDQWLRTTLVQVAWAAVHSKETIFRACYGRWSKRMGKKKALVAVGHKILVLVHVLLSGKVDYRETYQAPAAS

SEQ ID NO: 466444 - protein, 422 aa, unidentified
MKKIQTKKLKFVNDKTLIATVDIGKGLNMGYARCPDHSVVKPFEFANNRAGFDKFWDCLEKARDSKNLDSIIVGFESTGAYGEPLQHFLKNKPVRLVQVNPMHTKRVKELQGNSPNKTDRKDPKVIADIIELGHSLTVVIPEGAAAELRRLTLARERANKRCTALYNQLQDLIFISFPEFSQVIKDVKTKTARYLLQTYPDPQDIIDLGLESLGAVIKRVSRGKMKPAKAKDLFEAARTSAGITEGRFSVALEIQATLEAIASSDDFVVRLEEEMSRHLEDIPYSHLLLSMKGIGRVTVAGLIGEIGDFNSFDTQRELLKHAGFDLFEISSGKLRGSRRISKRGRPLLRKLLFFAALNTVRKGGVMHAHYQRHLKKGMKKIKALVAIARKLLGIIFALVRTKHEYQEDYQKIQAAATMPMAA

SEQ ID NO: 466445 - protein, 425 aa, unidentified
MDRVIIGVDPHKRSVTFEARDTREVLRVVGTLPTTKDGYRALRQVARQWQDRVWAIEGANGTGRPLAQRLLADGERVLDVPAKLAARARVFDTGQGRKTDATDAHAVVMVALRDTGLRELTMDDELVVLRMLCDRRDELSKARAQGLNRMHRLLTELVPGGVPTKKSVAQYRAMLAGVRPRDQLGRTRRRLAADLLAELAQIEARLKQLKAELKQAVLARGSGLMNIYGIGPAGAARILADVGDIARFPDRNHFASWTGTAPIDASSGEQIRHRLSRAGNRRLNHVLYMAAFVQLRHDTDGRAYYRRKIAAGKTPMEAMRCLKRRLSDVVYRQLLTDAARREQEAQAGPGGHRGAPLTSSAADLTPHVGTSDQPQPGPAPATLPLAPAASGAASIAAPKRRRARGVNVQRPTGRTTLTPTSAGAP

SEQ ID NO: 466446 - protein, 423 aa, unidentified
MNDSTLAVGADVHLKDIVLRAVDQGDGHEVIEPLSVTNNLPGARSAAATIAQTATRLGYRRIQIGYEATGMLWIPFHRFLSTSPLLEPFDLALVCFNPKLVADFKDALVLRRPKNDERDTFDIAARVRFGEWPDSYVPGPFWQGLRRLTRYRFKLAQNLSREKMRFQSYAFLKWSDWKRVKPFSNLFGATSAALLTEFTAAELRQMTHDQLADLIAERGRGHFYDPHAKARAVQRSLCSSYPIDSEADEMLTATLATQLDHIRFIYRSQKRLDQHIAHAIDPVPNPIISVPGLGPVITGGLLAEIVDVSRFPEDGHLAQHFGITWERRSTGNFVSQNTRLTKVGNPYGRYYFIQGADKVRQYAMEYKAYYWRKYNEVSKYRHKRALVLTARKLVRLVHALLTKNEPYVRPQTPVNAQEDRARL

SEQ ID NO: 466447 - protein, 346 aa, unidentified
MKINRIGVDLAKNVFQLHGADHKGRAVWKRKLSRDKWLRVLFETAEPGTVIGMEACGGAHHWSRVLIEKGYKVKIIPPQFVKPFVKSNKNDANDAAAICEAMVRPDMHPVKVKTIEQQDLQAVHRIRHEIKCHRIAKANQIRGLVTEYGLVAPKELLSLRKAIPEWLEDADNGLTMFFRQLLHGLWGDLRSLDQRMSELDKQVAVIAQENPVAKRLQQLRGIGPLIATALVATMGDAKQYRKGRDMAAAIGLTPRQHSSGGKDRLLGISKRGDAYLRCLLVHGARSAMRTAKDKDDRLSRWITSLQDRRHANVAACAMANKMARMAWVIMSKGVDYDPDFSPTMTS

SEQ ID NO: 466448 - protein, 317 aa, unidentified
MTESVKVNVGIDVSKDFLDVHVGDVALRRVPNRSSGLSVLKRILSRYTVSLVLLESSGGYENLAVTYFQSLGYDVCVINPRQARDFARSMGRLAKTDKIDAQMLCRLADVVDASPERARFVKPLTDERRQRLVSMVRRRRQLCDLMIAERNRRAKTDAYGSESISTVLDFLTDEVARIDRDIAAHVGSCFSDISSLLQSFTGIGPVTASTLLGELPELGKLNRRQITALVGVAPFNRDSGYMRGRRRISGGRSGVRNVLFMAALSAVRFNPVLKAFFARLVSAGKPKKVALVACMRRMVCILNAMLRDGSRFEVAVR

SEQ ID NO: 466449 - protein, 371 aa, unidentified
MRDATDSTLYVGIDAHQDSLSIAVLPETAERPERAQKIVNEPRAVHRHFSKLLGRGAVRATYEAGCTGFVLWRQLTPLGIDCLVAAPSRIPVLPGEHRKTDRLDAERLALFLRGGQLTRVTPPSPETEALRTLTRTRDKARRDVVSAKHYVTKLLLNRGVIYRGPRRLWSREHRAWLRGIEMPCPADQDMLDFKRDCLAQRESELERLDERIEERAERADVELPVRCLRAYRGVATLIALNLVAELGDVRRFPNKSAVAAYVGLVPSEQSSGGKVKRGGITRVGSQHLRRLLIQSVQHYLRPRAESKTLRARRAAAPSKVAEHARKTERRLVRRYRRLAAMKHTNVAKTAIARELVGHMWASIHPDFGLKS

SEQ ID NO: 466450 - protein, 366 aa, unidentified
MNTIYIGVDFHARQQTICYLKTETGELVTCELKHQDKQVVRAFYAQFRGQVIVGLEASGYSPWFERMLEELGCEVWLGHATEIRRRARWRQKNDRRDAELILHLMLHNEFPRLHRPAVQSREVLRMLRYRQKLIKMRTMSKNSLQAIALQAGLAKGSRLFTKAGQQELGTAEMSPVLHWQREHWLQLMEPLNQQLLETMVWFKAQSKDDVCITRLRTHPGIGLLTSLCIVHTLQPVSRFRNTRKVAAYAGFDPIERSSGERKCFLGISKAGSRLLRYLLVEAAQTAVRKDEDLKRFYKRLAERRGRPKAKVAAARKLLIRAYIMLRDEIDYAEFRHRAVAARLARRGQGPSNVPEVLIGQPASPEQ

SEQ ID NO: 466451 - protein, 344 aa, unidentified
MGEVITIGLDIAKSVFQAHGVDEAGAVVIRKRVSRAKLLEFFASLQPCLVGIEACPAAHHWGRELQALGHTVKLMPPSYVKAYLKRSKNDANDAAAICEAVTRPSMRFVPIKTKEQQAALMLHRARQLLVRQRTMLSNAIRGHLSELGIVSAKGRKGTGALLEIIADAEDGRVPPAARGILDVLARQYSAIGAEIGSIDRSIVAWHRSCEASRRLEEIPGVGPIVATALVAEIGDWKAFGSGRNLAAWIGLVPRQQSTGGKDKLGSITKQGNRYLRWLLVAGAMAVIRYAQKHGTLKRPWLGRLMERRPTKLAAVALANKMARIAWAIIVHGDRYRETKPLLAA

SEQ ID NO: 466452 - protein, 457 aa, unidentified
MDKKGYLGIDVSKGYADFLLLNNESQVMEEGFQLQDNKEGRQKLKALIVDWQKQGLEELYCGVESTGGYENNWHGYLRSISKESKVYVSRINPRGVKAVSDASLKRTITDGVSADNIASYLFKFSEKVDYGNNAIACNEAFKEGRQHSTYIKMLIKQKVQLNNQFEKLLYQHFSEIMVYCRHGVPVWLLTMLTKYPTAKTVLKAGIARVSAIKNIGDGKATAIIAKAKESTQDISTHIGHIIMATAKEILHKVVLIREEKEYLADLHKNATEVVLISSIPGVGIDSAVAIALEIENIERFETAKKMASFFGVHPTYKQSGDGLWGNYMSKKGRSEIRGVLYMAALASIRYNPLLKQVYARFRAKGMKHYQAMGVVMHKLLRIIYGILTNKTAFSPETDEKNKERSTEKQRENEQKLKEDSKINKQKKHRFQETTTEAPISRRAEQKIKQQIASQTSE

SEQ ID NO: 466453 - protein, 364 aa, unidentified
MFTERTSVGLDVHARSVYAAAIDSDTGELLQSRLTPSHEHILTWLRDLPGPVAVVYEAGPTGFGLYRRLLDAGIRCEVLAPSKLQRPAGDRVKTDAKDAVHLARLLHLDEYVAVAVPSADQEAARDLVRAREDCRGDLMRAWHRLSKLLLLRHGILDSGGNAWTAAHHSWLVREAQTQLAHSSTRMAFDSDYEAVLAMEARRGRLDEAITVMATSPQYAPLIHRLGCLRGVSTLTGFGLAVEIGDWHRFTGNSIGAYVGLVPSEHSSGQSRSQGPITKAGNTHARRLLVEAAWHHRARYTIGKTMRDRWELAPAAARARGDAGNRRLHDRWARFIARRKRSTVANVAVARELAGWCWSLAVMQD

SEQ ID NO: 466454 - protein, 414 aa, unidentified
MVEETIAWFGSVDWGSEKHHACLLDTQGAIVGEREFPHSGKGLSELADWILSMTGISSAVAIAVEVPHGPVVDVLLDRGFIVHAINPKQLDRLRDRFSVAGAKDDRRDAYVSADGLRTDRHLFRRLHIADPRLIELRAWSRLAEELQEERVRLSNRLHQQLWRYYPQMLKLTDDLTATWFLELWFRAPTPAKAARLAPSAIERLLKQHRIRRVSAESVLRTLREPAIKVPEGIAEAASVHIRSLIVRLQVVNRELRDAEHKLDEICSAIGKTEAPSEERADHRDVAILRSLPGIGRINLATLLSEASGPLSRRDYQALRTLSGVAPVTKRSGKSHVVVMRYASHVRLRNTVYHWARVATQHDDKSRSRYAALRRRGHSHGRAIRGVADRLLAVACVLLQRQTMFDTHFGQATGS

SEQ ID NO: 466455 - protein, 398 aa, unidentified
MGRICAGIDCGKGHHHGLALDSEGKTLLSRRVANDEPELLQLIGDVLAAADGREVVWAIDMTGGEPALLLSLLISHGQEVLYLPGRLVNRASDGYRGEGKTDARDAFVIADQARMRRDLRPIRPGDEAAIELKLLTGRRADLVEDRTRAVNRLRGTLLSMFPALERALDVTNVGPLKLLTEYQTPAAIRRAGVTRLTKWLANRKVRNARALAEAAVEAAQRQHTVIPGEKTIARLVHTLAEGVMALNEQIAEMDKLIEGRFREHKLAEIVESVPGIGTVLGAEFLAAVGGNLDDFATPDALAAFAGVAPAPKDSGKVHGNLHRPVAYHRRLQRVFYTSALVSIRCDPNSRAFYDRKRAEGKKHVQAVLALARRRVNVLWALIRDRRCYHVTPPVTETA

SEQ ID NO: 466456 - protein, 457 aa, unidentified
MAKRRRKAMSRKFKITKLPAELQHINLNAAGIDVGSERHLVAVPEGRDVVSVRAFGTFTSDLEALATWLKKCGVTTVAMESTGVYWIPLFEVLERRGFEVKLVDARHVKNVSGRKSDVLDCQWIQQLHTYGLLAGAFRPPDEICVLRSYLRQKEMLTQASSMHIQHMQKALQQMNLLLHNVVSDNTGATEMKIIKAILAGERDPQVLSRNRDERCKHSATTIAKSLVGNYREEHLFALRQAVDLYETYQTKIADCEQAIIKELEKQPNVSDDEPPPADKETQARDRIRAGVDVRDMLYQKSGVDLFAIPGLAADTLLILASEVGFDMRPWKTEKHFSSWLSLCPGTRRSGGKVLDSKTKRNPNRAAQAFRMAASSLSRSTTALGAFYRRIKMRTSGQQAVTATAHKIARIYYAMLTKGASYIELGQQAYEQRYKQRRLDQLKNQAKSLGYQLIPCAS

SEQ ID NO: 466457 - protein, 452 aa, unidentified
MSHRTSPEPDAMPHIVHPHAAAVDVHSDNHVACVGPDRVRTFGAYSADLNALADWFASRGVTSVVLESTGVYWIPLFELLEGRGFEVFLIEPSQASHCGARPKTDRLDCQWLQRLHTYGLLRPSFRPPDAILALRGYWRQRQMLVRYASHHVQHMQKALEQMNVKLTEVVSSITGVTGTAIIAAIVAGQRDPKQLAALRNERCARSEAEIALALEGTCRPEHLFALKQAFDLYGYLHRQIEDCDRQIAAELDRLPDRSQGGPIAPKPRRRGRKPNDFRFDAATKLSSALGVDLTAIEGIDASTALVILAEIGPDVERFPTEKHFASWLGLCPRTDRSNKTERRRTPRKGKNRVAQALRMAAQSVGRTQTALGAFYRRIKSRTGGRSAITATAHKLSRLVYRMLRYGTEYVTRSLLEYEAQVRGKLERNLRRRAASLGYELVPRVAVPPPSPS

SEQ ID NO: 466458 - protein, 322 aa, unidentified
MEVLHPHCAGLDIHKDTVVACVRHMVDGAVKREVRTFKTTTKDLMALSEWLSAEGCTDVAMEATGIYWKPVWHILADGDFKLMLANAAHVKNVPGRKTDVNDATWLADLMAHGLIRGSFVPDEPTQEMRNFLRTRKQFVRERTSHVQRIQKTLEDANIKLDSVITDIMGLSGRRMIEALIAGETDPFALAALAHRRIKASQAELEAALRGRVSDHHRFMLRLLLQHIDAIDAAIGQIDQEVDAHVEPFRTAIQILSSIPGISDLSAEVIVSEIGIDMNRFPTEGHLISWAGLCPKNDESAGKRRSTRMRKSLPPRRRGAPPG

SEQ ID NO: 466459 - protein, 423 aa, unidentified
MENTAARKRKQVPEGYLIIGIDPHKKRHAAVAITQDFTTRDKFKFDNTREGLETMLRRAKTEMVKSGCRGVMFAIETGGHYWRNVAYFLDEQGIPFRFINQFTLKRRREGKDLNRRKNDYRDSEVAAQLLCTGEFTESKVPQGVYAELRTAYSAYRRLVKERTRITNLVKGLLDALFPEFTLVFKDPCALTALSVLSTCPIPKVIAGMTEDEFVATIEAQHKGRLMRKKLRVLHYSARTSIGIDAGARSVSSEISFLVEKLELIRRHIRIIEGTLIRLVDETEEGNYLLSIKGLNYIAVGGLLAELGCFKSYRSAKQMIKMAGSNPTESESAGKRGTHTPMSKQGRPVLRYCAWTSVIPMLRFNPDFRAWAKQRRERPAHANPLNGREVVGAALNRLLRLAFAMVKNQTYYQVSKPELTLVAV

SEQ ID NO: 466460 - protein, 355 aa, unidentified
MRITSRRFAPESLFFFETHFFCSIMSKIPLSSPVVPVVGIDVSKATLDVCVLLSDQRPLRRRVSNDQEGHAELLAFLSQIGAHKALVALEATGPYSLAVATAAFTAGHPVTIFNPRRVLDFARAKGRRNKTDRVDAALIAEFALSDPPALWQPLPEAQNTLREFTRRRDDLENLLHSELRRLETAPAVLKLKASLQRSVRFLKAELQRLEVALKVHLKSQVSLQDDIRRLEAIPGIGSKTAILLTAEIPRHFKNARSVAAWLGVIPQQWTSGTSVRHGAHISHAAPSLRAKLHSAAIPAMRWDPRSKAFATRLLAAGKSKMSVIFAVLHKLIRTAFALLKTGVEYQPNHALQPVP

SEQ ID NO: 466461 - protein, 403 aa, unidentified
MNAVGIDVSKGKSMVAALRPFGEIVAKPFEVPHTSSGFHQLVDQLNSLDGSTRIIMEHTGRYYEPMARWLSDSGFFVSTVNPKLIKDYGNNTLRKVKTDKADSVKIARYALDNWQDLRQYTSMDIIRNQLKTMNHQFSFYMKQKTSYKNNLISLLDQTYPGINDFFDSPARSDGSQKWVDFVSSFWHVDCVRSLGLATFTERYQKWCKRHGYNFQPEKPEQIYSFSKELISVFTKDPVTKFLVKQAVEQLNTVSFTVEQLRLEMNRLAAQLPEYQVVMAMKGVGPSLGPQLMAEIGDLSRFSHREALTAFAGVDPGVNQSGTYEARSVRTSKRGSPQLRKTLFQIMDVLIKSAPSDDAVYRFLDKKRSEGKPYYVYMTAGANKFLRIYYGRVKEYLATLPKPE

SEQ ID NO: 466462 - protein, 314 aa, unidentified
MGEVSTIGLDIAKSVFQVHGVDVAGAVVIRKRVSRAKVLEYFGELPQCLVGIEACPSAHHWGRELQALGHTVRLIPPSYVKAYLKRSKNDANDAAAICEAVTRPSMRFVPIKTKEQQTALMLHRTRQLLVRQRTMLSNALRGHLAELGIVSAKGRNGTAELLRIITDGADSRVSPVVCGILDVLARQYSAIGTEIGSIDKNIMALHRACEASRRLAEIPGIGPIGATALVAEIGDWKTFSTGRSLAAWIGLVPKQHTTGGKDKLGSITKQGNRYLRWLLVVGAMAVIRYARKHGTQKRPWLGRLMERRPTKVGP

SEQ ID NO: 466463 - protein, 407 aa, unidentified
MELVALYKRVIGLDIHQAQITACALIEEPDGSARIEQRQFGAFKRDRRELADWVSSLRPDEVVMESTGIYWKSPYAALEAIGIRAKVVNARHVKNVPGRKTDVGDAHWLATLARAGLLRGSFVPSAKLRELRLIARQRQKIVGQLASEKNRLHKVLTDSGVRLGVVVSDLHGQSARAIVKAIIAGQSPQEVLKLASRRLKASREEIFDALQGDLTASHRFVLDELMRHIEEIEARIARFDTRLLAELESERDALALLQTIPGVDLIGAAMLLVEIGTDMESFGSADRLASWVGICPGNNESAGKRKSGHLRKGNLYVRRLLCEFAHAASRTTSVFKSKFQSLVVRRGHKRAIIAIGHKILRTIFFMLKRREHYRDSATDYEALSVQRNAPRWIKSLTKFGFINPANA

SEQ ID NO: 466464 - protein, 317 aa, unidentified
MNNNNNQNEINIGVDTGKTQLDIYIRPLDIYFTVSNDEKGINKAVKEIKKYNPTRIIIEATGRLEQAFCIACATEKLPFVIANPAHIKKFAGAIGRHAKTDKLDAQLIAHYGEAIKPKLSALKPETMQLMSDLLSRRRQLMTMQTMEKNRLQIMPKNISSIIKPILTAIKNQLDKIDQKLLKLMDRCAEYKAKNDIIQSIPGIGNVVAFNLLSDMPELGYLTNKQASSLIGVAPFNRESGIYQGQRNIRGGRHKIRTVMYMAMMSAIQCNPVFKDTYQRLLAAGKPKKTAIIACVRKMIVILNSMVRDGVMWDPKMS

SEQ ID NO: 466465 - protein, 342 aa, unidentified
MLIIGCDYHPGMQQIAWFDEESGECGEQRLEHGTGEGERFYRELKRRGVPVRVGIEASGHTRWFERLLTELEMELWIGNPAKIAAQRVRKQKTDREDARLLLRLLREGRFPKLWVPSPENRDLRQLLWHRHRLVQMRTRIKNQLHAIALNEGVQRKSRLWSKAGRGQLESFALAPWAARRRHDLLQLLDQLTPQIAELSQAVEQEAERRPEVQRLMTHPGVGPITALAFVLVLGTPQRFRCGKQVGSYLGLIPCEDSSAGKQRLGHLSKQGNTLLRYLLVEAAQAAVRCDAGWRRRFVHLAMRRQRNIAIAAMARKLAVSLYWLWRKAEDPPAAPQSGSYVG

SEQ ID NO: 466466 - protein, 341 aa, unidentified
MTVFAGFDVHRSQITFDALDSDTGEITRGRIDSTPAAVERWVARFPGREIQVAVEACTGWLFVCQALERGGAVPHLAEPVETSALRGRKRRAKTDREDARWLRELLCDGRLPESWIPPEHVRQWRSRARTRKLLVDERTAWQQRIRATLYHHGVSGSPKRLRTLEGREFLAAQLLPLDAVQRITIALEMIDLLEIQLATLESELRRLARRQTGCKALMELYGMGELTSLITLTELGDVSRMHASRQAVRAAGIDIGVHRSDRTSRVGKLTRQGSGDLRWALFEAGQAAYRPTSPDRKDYEALKARGLSHTRASLTIARKLARRSYHVLRELGPAALEPLDC

SEQ ID NO: 466467 - protein, 348 aa, unidentified
MAILAELVDLVIGVDTHKHTHTAAVVAAATGATIHQATVPATPAGYQQLLQLADQQPGQRVWAIESTGGYGAGLTRFLHANAEQVVELDRPKRAARRHGAKSDPIDATRAAREALGRDQLAQPRAAGQRAALSVRLAARRSAVQATTDAQRQLHALVVAAPDVLRGRLRGLTTHQLVTACGRLRQRSGWDSETTATAASLRTLARRIQLLDREIAEHTRALTTLVRAWRPDLLHQHGVGPIVAANVLCAWSHPGRCRSDAAFAMLGGAAPIPASSGQTVRHRLNRSGDRHLNQALHLIVLTRLAHDPATRAYAAHRRAQGKTNREIKRCPVRYVARQLYRLLETDPTH

SEQ ID NO: 466468 - protein, 401 aa, unidentified
MAAVRDNAWVGIDVGKTHHWVCAVDADGKTLLSVKVANDEAGILSLIAAVTALTQQLTWAVDIIGAPSALLLALLAQAGQPVRYASGRVVAAMSAAYVGEGKTDAKDARVIAETARLRRDLAIIDTDTDLVRNLAVLTGHRADLIADRVRMINRLRDLMTSVFPSLERAFDYSSHKGALVLLTGYASPDRIRRIGQTRLAAWLRTRHVRGFADVAARAIAAAKAQSVVLPGQDLTASIIAELAGNVLRLDERLKSLDDQIEELFQQHPQAAIIQSMPGFGPFLGASLLVGAGDLRAFPNAGHLAAAAGLVPVPNDSGRRTGNLHRPLRYSRPLRHVCYLSAQTSMMRAGPNRDYYLKKRANGRTHSQAVIALARRRIDVLWALLRENRTWTATPPQLAQAA

SEQ ID NO: 466469 - protein, 342 aa, unidentified
MTIVVGLDVHREQITFDALDTQTGEVRRGRIRPADRESLRRFLGRFDGQPVEAALEATTGWRFIVEELQAAGATAHLAEPAETRSLRGRKRRAKTDRLDARHLRDLLLEGRLPESWIPPAHILELRSKVRLRKTLVDERSAWLQRIQAQLFHHGVRKASGLLTPARRERLEELELPDSARTVIRTGLALIDGINEQLEPLERELRGFARRQPGCLALQGHFGIGELTSVAILAELGDARRFSSSRHAVRFAGLDITVSGSDQRRAAGKLSHQGPPVLRWAAFEAAQCACRERSPDHRYYLDTRERLDGKQATLTIARKLIRRAHHTLRDLGDEALRPVPAVP

SEQ ID NO: 466470 - protein, 361 aa, unidentified
MNNNSTGMYLGMDVSEKSIELFALSADNKTESKGKLVNNPAKVKAFLDGLKNTSKLTVALETGTHSPWLSKMMEEHGCKVLVGHARKLRAIWGDDHKCDQRDAEMLARIARMDPKLLHPIKHVPQEVRAEQAVIKARDVLVKTSTMLINHLRGTLRSFGISTSEIPTTSMHSKLMPLVPKELRPALKGIVKQLKEVRTEIKEYDKKLIELCKKHKETKILQQLNGVGPVTAITFALIIADPRRFSSAGRVGSYLGLTPKRDQSGEVDKQLGITKSGNGMLRKHLVKSANYIMGPFGIDCELRRYGERIAAKGGKIARRKAKVAVARKLAVTMWRLWIDEAEYDPFFKEHQRQKKKAARVAA

SEQ ID NO: 466471 - protein, 397 aa, unidentified
MYIVGIDIAKRKHEAAVIDGDGAVIIKPFSFTNNCSGYNRLLAMLTKAKLPLDEVSFAMEATGHYWLALFTRLQKEGFRVQVINPVQTNSIRSFYIRQAKTDPRDALLIAEVIRFGHFSESTLHPENIYELRELCRGRHAIVSMQADVKRKVVALLDQVFPEYETAFTNMFGDTSMAILQTCPTPKELSEMPFEELCHLIEVSSHKRFRMAKAQELQALARNSFGFAMAGDVFSTMIRLYAKHLDFLKQQVREMDRKIAEIMETLDTPITTITGIGLTLGAYILSEIGDISRFSSAAKLAAYAGIDPTMRQSGEYNGVRNRMSKRGSPYLRHAIWLAASSAVLHDPALKLYFQKKRDEGKPYMASVGHACRKMVSIIYAVMRDNKAYTPCIPNEISV

SEQ ID NO: 466472 - protein, 409 aa, unidentified
MELLYARCAGLDVHATNVVACVRIGASGAVTYEYRTMSTTTRGLLELVDWLTTHACTHVVLESTGVYWKPVWHILEGHFSVTLANAMHVRNVPGRKSDKNDATWLADLLAMGLIRGSFVPPAPVQALRDLTRTRKQFVRELARHTQRIQKTLEDANVKLTEAISDVLGVSGRAMLRAFIAGETDPERLADLANGRLKASRTQLVDVLHGRVTPHHRFMLNLHLMQIEALETALTKLEAHIHDALEPFRAAVSLLTTMPGLSDTAAAVIIAEIGTDMATFPSAGHLVSWAGLCPRLDESAGKRRSTRTRPSAPWLKTTLVQTAWAATRKKDSYFHAQFLRLKTRRGPKKAILAVAASMLTDVYFLLRDGVEFRDAGDQYFVQQEKDHVTKRLLRRLKDLGVEVEVKTHAA

SEQ ID NO: 466473 - protein, 343 aa, unidentified
MNITTVGLDLAKSVFHVVCFNEAFNEVKKRMLRRNQMLHFFTQLPPCRVAMEACASSHYWGRQLLAMGHDVKLIPPQHVKPLLRGNKNDYNDARAIAEATTRPGMRFVAIKTAEEQDMQALHRMRSQCVKDRTALSNSTRGLLGEYGIVLHKGLATLRKSIPELLEDAENKLSDRFRNMLARRYEQLAELDKHIAFYTNELEFLGLQDDACQRLQTVPGFGPIVSSAFRSAIGDGRAYAHGRDAAASLGLVPRQHSTGGKTVLIGISKRGDRYLRSQLVHGARAVVIQAARKNDPLSRWINRIREERGWNKAVVAMANKMARIGWAILRYNTSYQPKLAQSVR

SEQ ID NO: 466474 - protein, 387 aa, unidentified
MMYCGIDVAKLKHAVSLMDDKGQTLKAAFTITNTRSGFDQLLAELHNLTGEVTVGLEATGHYWLALYDELTHKNYPVIVLNPMQVAAYRKSGIRKIKSDVTDAVWIADYIRIANLPASELNLPVFLQLRELSRFRFRLTEQVGNLKRKLLTILDRVFPEYERLFSNVFLQASRSVLQEAVSAQEFADFNLQELTDILAEASRGRFGQEKAEKIQEQARKSVGVGFLTNAVHLEMRCLLAQLELLDDQRDQIDLAIADLMNQIPQHITSIPGIGPVTGAAILAEIGDIQRFETVDKLVAYAGIDPSVYQTGQFEASETHMSKRGSPYLRHALWLAATAALLHDPSLKEYYQKKRNEGKHHGTALGAVCHKLLARIFVVLKEQRAYIIR

SEQ ID NO: 466475 - protein, 387 aa, unidentified
MYFVGIDISKFKHDCAIIDELGDVITPSWSFRNDREGFSLLGELLDALDGEKKIGLESTGHYGQSLKLFLENNGFSFMEFNPLLINRFVRSKSLRKTKTDSIDALMIAQYLVTVEYKPYPPSFYTLEKLKSLTRFRDSLIRQRSKQLVELTNILDKVFPEFKPFFKGKFSVTALYILSHYTSPEKISNMNSKSYESLRRLSRGKFSMVDFVELKTLARNTVGSTSDYLLQEMEIIIDIYNQLQSKVGEVEQQINDCVIVLDPPMLTIPGIGVSSAAVILSEFRDLSKFDSPSKLLSFAGLEPGYFQSGISESMGKMVKHGSSHLRYAIMNCAQTVINNEPTFAAYYAKKRAEGKEHRVALTHVAKKLLRVIYTLQTKELPYNPDLIR

SEQ ID NO: 466476 - protein, 388 aa, unidentified
MIYVGIDIAKDKHDCYIVTSDGVLISDNLRITNTLEGFNTLYSIISSNCQVASEVRIGLESTGHYGINLENFLRTKGYQLTVFNPLAVASFRKSQTLRKTKTDKVDAKFITTLLFNSDQTPTALVSDEIRELKSLTRHRYRLVGQCAKLKVSVSRLLTILFPELGTLIWSIHQKSSYAMLLEFPSTHDISNCHLTKLTNLLSKTSKGKYGKDKAIALKNLASKSIGINSGGTSFELQQTIRIINYYLDEISILDKKIKELLIQMKTPLISIPGISYTLASIILSEIGDITRFQTPAKLLAFAGLEPSVYQSGKFQATGTSMVKRGSTYLRWAIIQAARLVAMRDPTFKLYQEKKKSEGKHHYVAISHTSKKLLRVIFHLLKNNIDFIA

SEQ ID NO: 466477 - protein, 346 aa, unidentified
MAYYVGLDVSVKETSICIMDDKGVVIARTDISTDPDLIARFIFKHAPDVERVVHESGILAIWLTRELKKRGVPIICIDARLAHKALSGRINKSDQGDAEGLAQLARTGWFSQVHIRSEASERVRVLIGARERLIRMRKDLEGHVRGVLKVFGVCMKSVGTGKLRRDFRDQLAAAADRDPAIAMLSETFIPLHKTLCIARDALDDEVRMMARDSELACRLMTVPGVGPIVALAYIATLDDEKRFRKSIDVGAFLGLTPKRHQSGEVDWSGKISKCGDCDMRRLLYSAASTLISCTRKPSRLKEWATKLAERKGHKKAAVAASRKIAVILHSLWRNETVFEPGMEGAN

SEQ ID NO: 466478 - protein, 435 aa, unidentified
MKFNSQEIRVCLDIGSVKHYVVIGFSTGEILEEFPMEHNPEGIKKFFDRVDKLSKKYQLPASIAMEAYNGYARPIDQMVLDRNYRLFNVNNYKLARYKEIFPGPSKSDPVDARAILELFNMKEDSRISKNALQEIFKAPKINEQLKRFTRTRRQLINDKVRLTNRMQADLQAVAPGLLEITGNVANRWFLTFLTSRNKIQKLKSLHLKSLLKIKSVGKGYAAKIQEWQKSALFSSDVEDIGEFIIKDAVRLIRLVEEIEDLEKRIGRMCGKSKAASHLQSIPGFGPICSGEIAGEIGTESRFKSEASLALYLGVAVVDKKSGKFDGSRTPYQVNKRAKSAMITAMARHIDQCPEAKRYYDKKRSEGKKHNQALRCLARHMVRVIWSMLRDGRDYKIREDESPKKAVIEQSQNQKTTFVEPTKPTSNRVLEGQIVA

SEQ ID NO: 466479 - protein, 438 aa, unidentified
MRRKKNKTTKKVHFESLPLIHPNAAGIDVGSKEHLVAVPPDRDPQPVRTFEAFTPELHELAAWLKRCGIETVALESTGIYWLSLYEVLEQYGFEIRVVNARHVKNVPGRSKSDVLDCQWIRKLHSFGLLNGSFRPEAQVRKLRTYMRLKDNLVVEGTQAIHHMQKALFEMNVQLSNVISDITGESGLRIIEAILAGERDPEQLAAFCSTRIKAPRQTVAKSLHGNWDEALLFCLKTALDTYRFSQNKIQDCDQCIERQLATFEIKTPLPDSKQTLQTQLHQVCGVDLTKIPGIKEQTAQIIISEVGLDMSRWNTEKQFSSFLGLCPNNLITGGKIIRRSTRKVYNRAADALRLCAQSLTHSKSALGAKYRRLRARLGAPKAIVAMAHHLARLVYRMLRYGQNYVEKGIHQYELKFRLQRIKWLKKEARSLNMQLVAAQ

SEQ ID NO: 466480 - protein, 345 aa, unidentified
MIIGCDFHPSWQQVSWLDTETGEVGEQKLGHGSGDAQRFYQQLPAPVLIGMEATGNSQWFIELVEDLGHALWIGDAAQIRASYVRKQKTDKRDAAHILKLMVEGRFPRLWMPDREQRDLRQLVLHRHKLVMIRSRVKNELQHLSLNKGMQKKRTLWSQAGQKLLRELALKPWAACRREDLLGLLGMLHQQIGKLDGAVQHAAEESPQAKLLMTQPGVGPNTALAFVLTIGDASRFQRGKQVASYLGLIPREESSGGRQKLDAITKQGNRMLRSLLVEAAQVAVQHDPGLRKQYRHRCHQKPKAVAKVAVARKLAVRLYWMLRRQVGYPEIVRIESSSGLALVGAS

SEQ ID NO: 466481 - protein, 313 aa, unidentified
MIIPLRCVGIDVSKHHLDVFDETIGASERIANVPHAITELVARWRCDAFVVFEATGVYDRELREALHQAGVRFSRINPARARDFARASGQLAKTDPIDACMLAAFARAMRPATEQVSTAARNALARLAKRRDQLVLMRAQEKNRRSETDDCAMAERISRLIEVLDHEIAGIEAEISVLIKAEPELSEDAQLMRSLPGVGPVTCTQLITQMPELGHVGPKQAAALAGLAPFNVDSGAHRGKRKISGGRKRVRDALYMAALNAVRRAHPFKAFYAKLRQAGKPAKLALIAVARKLLTILNAMLRDRKAYTITQAT

SEQ ID NO: 466482 - protein, 349 aa, unidentified
MKYVGIDVGKQKCAVAVMDAEGRISDEFSFLNNNEGIGNLISRLSMDDEVVMESTGSVWTNLYDRLEQVHMKVVLANPLKTKAIASARIKTDTIDARILAHLLRADLIPSCYVPPYEIREMRYLLRHRASIVKIRTMVKNKIHSMLDRNGIAAAGFSDLFGKRGMEWLKSVKLPSLDRLMLDNHMEHLESLRRQVEAVDREITVRASKDEYVKLLLSMTGVDVYSALLIRSEIGDISRFSSYKKLISWAGLAPSLHQSGSVEYHGSITKQGSRMLRWIMVEAARTAVNSDSRLSEFYERLKQRRGGQKAIVAVACKMLKIIWTMLTRNEPYESRNQRRYDKKLNFVAKQ

SEQ ID NO: 466483 - protein, 427 aa, unidentified
MSEERSVELRVSVDVGYRRHSVAMGLSSGEVLEEFEIDHRPEGFQEFFSRIEKHQKAKSCTVAVAMEGYNGHARPLDSLVRQRGYRLYNLNNLKFARFKEIFPGAAKSDRIDARRGLELFQLSDHLPLAKEVLQEVRGTPKENEVLKRLTRRRRRLVNERVRVVNNLQADLQAVCPGLLEITSEASNQWFLNFLVSADSLSQLARLRKSSLLKIPAVGRKYAGLIQDWQKRAHFSEEAGWVSEMIQEDAKRCLELEEKIKTLETKIEQVAKDSKIAKILLSIPGFGPVCTSELAGEFGTVERFNKEGSLALYLGMSTLDNSSGNYQGTKAPKHVNTRAKAAMMIALDRHRKYVPESQRYYEKKRIQGKGHNQAIRALGRHLCRIIYKMLKEQREYQLRSKEGDTQARVRSRSCVKTKIRRSKVSRRG

SEQ ID NO: 466484 - protein, 293 aa, unidentified
MVAVMIGVDPHKGSHTAVAIGAAEQPLGELRVRASTAQAGELVAWAAAWPERTWAVEGARGLGRLLAQQLVAAGERVLDVQPKLASRVRLLQAGDTNKNDPDDALSVAVAALRSKARREVSADDYPAVLKVWSKRHRDLGRTRNQVACRLHAVLCDLVPGGHAKEISAAQAARMLEQVTPSGVAELARAELAAEFLADLRHVDAQLSQASKKLAAAVKGSGTTLTEIFGVGPVNAGTVIGDAAEVSRFPGRDHFASCNGTAPAGVSSGNRKIHRLSLRGNRRINHAIHMAAIT

SEQ ID NO: 466485 - protein, 416 aa, unidentified
MNAAGIDISSRKSTVAVLRPFGEVVRLPFDVAHNTEGLASLAEQLKALDGETRVVLEHTGRYYEPVAKALHEAGLYVSAVNPLLIKEYGANSLRRVKTDKADAVKIARYALDNWADLRDYTPMDTIRYDLKTLNRQFQLASKQRTASANNLIALLEQSFPGIRKCFDSPVRSDGTQKWVDFIHTFWHVECVRKQSLNAFSERYRKWCKRHGYIFKQGNAVEVYSLAKNAVVLVPKSEVTKVLVQEAANQLTSISRSVETYRAEMERLASTLPEYPVVMAMYGVGKSFGPQLMAEIGDVRRFERKQSLVAFAGIDPMPNQSGDKNVRSNKSSKRGSPYLRKTLFNIMGIYLKCSPQDEPVYKFLDHKRSEGKPFYVYMTAASNKFLRRYYAQVRDYLSTLDDLPPVDMDSTGLKPSD

SEQ ID NO: 466486 - protein, 345 aa, unidentified
MKIVGCDLHTRYQQIAMLEEETGELVERRLEHESGEARAFYAALSAPVRVGIEATGHTRWFERMLGELGHELWIGDAAQIRASMVRKQKTDARDAAHLLDLLLSDRFPRIWRPTLEERDLRQLVWHRQKLVWMRNAIGNQLHALAMGEGVCRKKKLFTKQGRQELESLVLGRWASHRRQELLEMLDRLDESLHELDQAVEQQAEQNADAVRLMTHPGVGPVTSLAFVLTIGPVGRFERSKQVVSYLGLNPREHSSGGRQRLGAISKQGNPMMRSLLVEAGHTAARLDAELRQDYQRLKLRRGSGVAKVAMARKLAVRMYWMLRSQAGYAQLVRMQGSPWATLVKE

SEQ ID NO: 466487 - protein, 388 aa, unidentified
MIQVDDLSRSLIAFEQISTLVIVVELSQSSWLAAGVVPGIERRPLKKLDPDPTALLHLVEGWRDRATKAGRAITRTVLAFESGRDGFWLARWLRVRGVETFVMHSASVAVSREPRRAKTDRLDTEMLIRVFLGWLRGEPRHCKMVAIPTLEEEDARRPSREREILVGERTRIINRMKAALVRLGIRGFKPGLLTAPQKLDALRTPEETPIPPNMLDEMRRDMARLAWVREQINAIEQARLERLERAPATGRHAMVRMLARVIGVGVETADMLVQEVLSRNLRDRRAVARYAGLTGSPDESGSKRREQGLSKSGNARVRRGLIQLAWRFLRFQKESALAQWYRGRTEDAAGKRKRTMIVALARKLLIALWRLVTIGEIPVGVALRPAVA

SEQ ID NO: 466488 - protein, 346 aa, unidentified
MTIVEDACIVTGGVDTHADMHVAAALDPVGGLLGVREFPATAAGYADLLGWLSGFGIVALAGVEGTGSYGAGLARYLAAAGIRVVEVDRADRQDRHRQGKSDPLDAVSAARAALSGRAAGAPKGRDGAVEAIRALMVAKRSARAERTQAINQARALIVTGPEDLRARFARHSAAGLAEAIAALRPRPGDAAEYAVRVALRELGRRVEFLDAQLERLDDLIVPLVTARAPGLLSLYGVGPDTAALLLVAAGDHPGRLRSEAAWAHLCGVAPIPASSGKVRRHRLNRGGNREANHALWRIVITRMSWHPETRAYVERRTKEGLTKKEIIRCLKRYVAREVYHHLRGGG

SEQ ID NO: 466489 - protein, 355 aa, unidentified
MNYVGTDIHKRYSVCTAQDEQGRKLAVTRIDGNAASGFAQFFQGLGGESKAVIEACWSWGKIHDLLEELPEVVEVVLAHPLKTRLIASAQIKTDKVDSNALATLLRGNFIARAHIPTKAVRQRKDALRQRLYWARLRTRIRNRVHALLDRQPQLSLPQCSDLFGVRGMCHLRKLRLAEPDHALLQEDLALLELLNLQIRDQEKRIAAQSQPDEATGLIQSIPGFGPIFASIIAAEIDGIERFSDSAHLCACAGLVPTTYASGGHVSHGGLLPACNHWLRWAFIEGAWTAIGSSPYLASIYQRQRARGKQARAAIIIVAHRMCQIVYCLLKERRPYHDHPKQNHPKQFSPVAPASA

SEQ ID NO: 466490 - protein, 375 aa, unidentified
MDGSYDGRQIVGMDLRRRRSVLVRMTGDGRRLDTARIENSPAGLRAEMAKAGRCPKVVLEATYGWYWAADALAEAGAEVHLAHPLGVKAFSYRRVKNDEKDAGDLADLLRMGRLPEAWIAPAEIRELRELTRYRVKLVRLRTSCKEQVHAVLAKLGIPVTCTDIFGVWGNTWLDGLCLPQPYAGKTASLRSLTGQLTAEITLLDTVIGDLLESHDGYKAIRALPGIGPVLAAVIVAEIGDITRFRHPARLCSWAGLTPRHRESDVKVTRGHITKQGSPVLRWALIEAIQHQPAGNPIRDIKDRIIARRGKEARNIAKVAAARQLLTCVFYAMRRPRQVPRRPRQRAGRRVSRPGAGQRVIAPRSGPRPRAARPPV

SEQ ID NO: 466491 - protein, 441 aa, unidentified
MTRRCFGLDVHRDFVQVAIWQDGLVGQAGQIATTPEALRMFADSLAPSDEVALEATGNTHAIVRLLEGRVARVVVSNPQKTRAIAEAKVKTDKVDAENLAQLLAADYLPAVWVADADTQALRRQVARRAHIVRQRTRLKNQVQSILHRNLVSRCPAADLFGIKGRRWLAEQTLPADERQAVLALLRQLDFHAQELALIDAQLARIALGCDDTRRLMTIPGIDVTVALSITAAVGDFGRFSSPHKLVRYLGLNPRVKQSGGQPASHGRIAKQGRAHARGMLVEAAWVAVKTPGPLRAFFERIRARRGMQIAVVATSRKLAVLCWHMITKGQDYAFARPSLTAKKLRALELKAGRPSRRGQKGTASGYSLKQVRAREKRMAEQAERAYRQLVADWQAKAPKTGVAAANGARLSRPSDGATAARQDSAPDPALRSGVDHAHPAR

SEQ ID NO: 466492 - protein, 341 aa, unidentified
MNVTRIGLDIAKQVFQVHGVDEHDKVVLRKTLKRVQVLTFFANLPPCRIGLEAGGGSHYWARELTRLGHEVKLIAPQFVAPYRKSGKTGKNDRNDAEAICEAVGRPNLRFVPIKSEEQQAVLTIHRARELAVSERTALVNQIRGLLGEFGIVVAPGRERFEKELPIVLADLENGLPVLARETLTNLAARLRAVNEHVTGYDQRLQQLARDSEPARRVMAVEGIGSVTATAVVATVGDGHEFHSGREFAAWLGLTPRQSSSGGKSRLGGITKRGNEYLRRLFIHGARSVLRLTGSRTDRKSRWAEGVKGRRGENIAAIALAAKHARILWALLTRGEAYQVAA

SEQ ID NO: 466493 - protein, 360 aa, unidentified
MRYSTIVGIDTHSKKNAVCAIVPATGEMRETILSEDPKQLLAWIVEQDFPKPVGCVYESGPTGFGLARSLVAGGVACTVAATSKLSYRVDRQKNDRADARWLAQQMLAGGVRAVRVPTPEEESLCHLSRLRGEVASDLRRAKQRVSSFLLLTNTEYNLTKKKWSKTFYRWAESHEFDQPADTFAFRCKVSAVLRLEERLAEVEAEIMRVVAASPKLSERMSRFTCIHGIGKVSAFSLVCEVHDFDRFKNGASFASYLGLVPSEGSSGKKVSRGAIAKQGNSHLRRVLVEAASCYSKQFKAVKSEDAAVPEAVRAKADRCAVRLRKRRAALKERNVSANKAKVAVARELAEWIYYIAVMPA

SEQ ID NO: 466494 - protein, 326 aa, unidentified
MSNILGIDVSKDKLDLVLINAEDKFHKVISNDPVGFKTLDKWLVSHHVDRVHACLEATGQYGDEVSEYLYTQGHEVSVVNPARIKRYGESKLHRNKTDKADADLIAEFCMKEKPALWEPLSPDLKHLRALVRRLNDLQVNYRQESNRLLSGEKDAWVIHDLSVHVEYLKARIMATEEEIQNFINQTPGLKAKQDLLVSIPGIGKKSSARLLAELGEISSFENAPQLAAFAGLNPKGCSSGSSVHKKTRISKQGRSEIRSCLYMPAIVAMTHNSVIRALKERLYERKLPTMAIVAAAMRKLLHIVYGVLKNQKPFDPEYDRQFNYSA

SEQ ID NO: 466495 - protein, 354 aa, unidentified
MKKYIGMDVHLATTVVAVVDSEGRLLMETILATQGASIVAFLQSLSGPLWVTFEEGSQAHWLYGLVEPHVERAVVCDPRKNASLKKGNKSDRIDARKLAELLRAGLLTPVYHRLSRWGELKEAGRSYLTLTQDTTRAMNRLKALYRGRGIACRGQRVYSPRYRAGWLEQLPDGATRRRAERLYDQLDTGQALRHEAKRDLLAQARRHPAHPWLRSIPRLGPLRAALLIALVQTPHRFRTKRQLWAYAGLALVTRTSAEYLLVNGRVVRSTKPVALRGLNPNHHHELKNLFKGAATTARRLPGPWQEFYQLRLDQGMKPELARLTVARKIAAVALHLWKKGETYDADFKLKAQAA

SEQ ID NO: 466496 - protein, 401 aa, unidentified
MSKGGLPIGRRLEDTTMAPPRRPETVIGLDVGKSSHWACVASRDGEVLLSAPVANRERELDSLFARFPGALVVVDQSRNIGALALSRAKAAGMPSAYLPGLAAHEASKLFGGDAKTDERDAMVIAKTALGIPDALLPVVDREPEIRAARSLAAHRDFLTCENTRCKNRLRSILLESCPEFEALVDLSDASALRLMAELGGPWSVAAAGRRRAAALTRGASRGKVDALIESVESSTKPDAAAIAAEDRAVRFLARRIAENASELDAATAAISALLERDETYRCLLTIPGVGPKTASELAISINIEDFPSHDRLASYCGLAPRNRQSGTSISSVSASRQGNKRLKNLLIFSCNCLARTDGRWGEYYARCRERGMPHGKALKAVARKRLKVIYAVMRDKVPYVA

SEQ ID NO: 466497 - protein, 419 aa, unidentified
MAFKILRKNCCGLDVHKTWIYACIGITDADGRTEYKQARFSSFSNGLRELADWLAKYSCADVCMESTGKYWIPVFNSLESTCWFTLAHPKYTKPQKGNKTDRKDAKWICNLYMCGMVKPSFIPPADIRQLRDLMRYRTKLTNMLTSEKNRAQNCLTVSNLKLDDVFSDVFGKSSRSIIQYILEHPGEQFDVAPFLDWRCKHSVEEVQAAVDGAVSREQAAKLRECLQHIDQLNGRRKNIEAEILRLAEPYPYQLELLRTVPGFSSAPLTAVALVSETGVDMSVFPSSKHLVSWAGCCPRNDQSSKTVKSTRISRAGCYLKPLLVQIANAVIKSDKYPECRERYRRIKARRGHKKAIIAVCRMLLTAIWNVLSKLVPYSAEGYLTDKLTEHSVVISKAQGLELLRKRGYIFKDDLPADSA

SEQ ID NO: 466498 - protein, 416 aa, unidentified
MNAVGIDVSSRKSTVAVLRPLGEVVCLPFDVTHDIAGLASLVEKLKALDGETRVVMEHTGRYYEAVEKALHEAGIFVCAVNPLLIKEYGANSLRRVKTDKADAVKIARYALDNWADLRDFTPMDAIRYDLKTLNRQFQLASKQRTASANNLIALLEQSFPGIRKCFDSPVRSDGTQKWVDFAHSFWHVDCVRKQPFPAFCERYRKWCKLHAYFFKLRNAEKVYALAKSAVVLTPKSKVVKVLVQEAANQLISISRSVEVYRAEMDRLAAMLPEYPVVMAMYGVGKSYGPQLMAEIGDVRRFERKQALVAFAGIDPMPNQSGDKNVRSNKSSKRGSPYLRKTLFNVIRTYLQCAPQDEPVFQFLNRKRAEGKPFYVYMLAAANKFLRRYYAKLRDYFASLDTLQPVDPIPTILKATL

SEQ ID NO: 466499 - protein, 337 aa, unidentified
MLFCGIDLHSNNSVVVISDESDKVLYSRRLANDLETICAAMAPYQSQLAGVVVESTFNWYWLVDGLQEHGYQVHLANTTAIKQYDGLKHRGDESDARHLAHVFRLGLLPTGYIMPKELRGARDLARKRMQLVQQRSVQILSIETQMDQQHGAHMAANLIKKLTCDEVDMMGFGEMETMALKANLSVMHALNAQIVQIEKTLAKVCAAHPGLSLLKSVAGIGDTLATVILLETGSIERFKDVGNYVSYCRCVGSVHTSNGKKKGEGNTKNGNRFLAWAYVEAANFAIRYSEAAKKFYQRKKAKRNGIIAIKAVAHKLARACFHMLKTGESFSVERCFT

SEQ ID NO: 466500 - protein, 386 aa, unidentified
MLYVGVDISSESFDVCFYLPEKKKMKSMKYKQDREGFREFLKKLNTYKDEKQVGMEATGSYHSNLYGFLRSKGIDVQLLDPYTLSKFMKAMSRSKTDKKDAKSIAVAMYRIFDLLSVSQVPEEEMSAFRDLVRMRSTVVANCSDLQRKLKSKLKIHMPELLKTFRSVSSPVLLHLLSVYPSREEILANEEDAVKLLSSHRNWSEKKAREVIDSLKDSIGKPDTFGTYSTITSTFIAEIKLLKDHVEALNEEIKRFLRKFPDNPLRTIPGIAEVTEAEIVSEVGDIDRFSSGKAFVSYIGLDPVIKQSGNMTRGLSISKKGNKHLRKTFYQLAKNLITNTEKYRNKYEKMKERGVKKKVALTATARAAAEMVYQLLKNNVPFDLSLS

SEQ ID NO: 466501 - protein, 310 aa, unidentified
MDFIAVGIDVSKDHLDVAVRPSGEMFTVERNAAGVPLLAERLQALAPHVVALEATGGFETVAAAALAAAGLPVVIVNPAQVRAFAKAIGQRAKTDPIDAGVIAHFAEATRPQVRPLPDEATRLLADLVCRRRQIVEMIGAERQREKRVTVPHLRKSIVRLVKALEKELASVNTDIDDAVRGSPVWREKEDLLRSVPGVGPTIANTLIAELPELGSCDRKQIAALAGLAPFTRQSGQWRGKSFIGGGRQAVRTALFMGAMVAKRRNPVLKAFFDRFVAAGKPKMIALIAVARKLLTILNAILRDRRPWQIA

SEQ ID NO: 466502 - protein, 462 aa, unidentified
MTGKHEIEGSEGNRRQLQGLPVIRRNVAGIDLGSERHWVCAPTAEGSAREIASFGATTAELIRMAEWLKARQVESVALESTGVYWIAPHEVLEGQGLQVLLVDTRQLARVPGRDKKTDPTDCEWIQRLHSCGLLQGSFRPEEAVCMLRTLVRDKANLVAESGDWLRRMQKSLDQMNVRVHRAVSDIDGVTGMAILRAIVGGERDAQKLAKLRDQRCSKTEQEIAEQLSGHWREDHLFSLQQALKMYDAVQERIAAYEKEILQRLGEMERDEQRGQTAPPLQNTTKAKTIKKRGQEPMRQALYRMSGVDATHIDAIGVETLEVVLSEYGPDLSRFPTEKQFVSHATLSPHVPTSGGKRVRKRKRNSASTRVAAALRMGALSLRHSQTALGAYYRRMAQRLGGDIAVFATARKLATLIYRLLRWGQPYVDEGAKAYETRYRQQRIGRLAATAKELGYQLAPISA

SEQ ID NO: 466503 - protein, 361 aa, unidentified
MNEETAMTNDRTVVGGVDTPKDLQVAAGVDAHDRVLGSECFATTRHGYKQMLAWMRSLGELARVGVECTGTYGAGLLRDRQPAGVTVLEVTTPDKSDRRKRGKDDTLDAYNAAHAAFAGVRPVTPKTRDGMIESLRTLKACRKTAIKARRVALPWIQSTIVGAPDELRESLRKMTRMPLIRTLAALRPDLTGYRDLVTAYRIAFKSLARRYLERHDEIADLDVMIAAMVDELAPDLVARKAIGYESASPLLLTAGDNRDRFRSEASFAARCGASPGPASSGQTPRHRLNRGGDRAAHSAWHIIAIGRLRTDPRTQAYVEKKVREGPSKLEAIRCLKRYLAREVYAILRNRNRKIAPSPIAA

SEQ ID NO: 466504 - protein, 460 aa, unidentified
MSQTKRSRKSRGLFPVHPAAAAIDVGAALHVAAVGPDRDKEPVRTFRTFTDDLHRLADWFAQCGIRTIVMESTGVYWIPVFEILEQRGFEVMVVNARDAKHVPGRKTDVSDAQWLQRLHEYGLLRASFRPEAEIAGLRTYLRQRERLLDYAAAHIQHMQKALMQMNLQLHHVVSDITGVTGMTIIRAIVAGERDPNVLASHRDRRCHASVEMVCQALVGNYREEHVFALTQALELYEVYQTKVTACDEQIEAILKRLKKNAPPPASKLLPVRQRTHQPNAPAFDARGALHAILGVDLTQINGLGPYLALKLVGECGTNLAAWPTAKHFTSWLGLAPHNKISGGKVLSSKTRRTSNRAASLLRLAAGTVGRTDTALGAFYRRLSARVGKAKAITATARKIAVLFYNTLRHGMAYADPGATYYEDRHRQRVLNNLQRRAKSLGFVLREAGLDTARADVSQRQ

SEQ ID NO: 466505 - protein, 392 aa, unidentified
MFYLGIDIGKRNHVATMLDDGKKAVFRAFSFSNSTEGGEALLAQIVKHAPDATQVSIGLEATGHYWLALYSFLTERGYMIHVINPIQTDGWRKGIEIRKRKTDKIDSELIAELIHYGDFSSTQLADETIQSLRTLTRFRSYLVDSIADLKRKVICVLDQVFPEYETLFSDVFGATARELLLKYPSPAELEQLSVEKLTQVLEQLSRKKCSTAKAEKVLKAAKHSFGVTHCRDTFIFQLRALLNQMNFIEQQVTDTEAEIDVLMEQLQSPITTIPGIGPVLGAVILGEIGDIHRFESPSKLVAYAGIDASVSQSGDFEGTQMHMSKRGSPYLRRALFMAARIAVNSDAQLGAFFEKKHSEGKHYSACIGAVSRKLCFIIHAILSQNRPFSPMP

SEQ ID NO: 466506 - protein, 394 aa, unidentified
MKLIGIDIGKNKHFFCIMDQQTGEIIFQPVSFSNDKEGFDFLIQKINSYPKDSVLIGMEDTGHYHFALLKYLLNLQYTVALINPKTTDFNRKMQGGITKNDKLDTINICDVLDTPERKKQYRISKVNSFDLYEQKQLTRHHHNLKEEENVYKNRLQKCIDIVFPEFNKLFNSKYGTVYMNILKTFGSAENIANTDIRTIRKCFEIEGRGNRISLTPERLKECARSSIGISSSAEVIQIKHLTAQIELIEEQLTEIDKKIEEFSIQNNSPILSIPGISHFSGTSILAELGDVSNYSKPSQIIKFAGVAPLHYESSQFNAQHTSITKKGSKYLRKTLYQIILPVIRHNPVFNKYYQLKISQGKGHRCAQGHCVRKLLRIIYHLLKTNQQFDHQLLR

SEQ ID NO: 466507 - protein, 342 aa, unidentified
MQISTIGIDIGKNSFHFVGFDARGAIVVRRQCSRTQLIRALANLPPCLVGMEACCGAHHLGRMLAAQGHDVRLIPPQYVKPFVKSHKNDLLDAEAIGEAVQRPTMRFVPLKTMAQLDLQAIHRLRTRLVARRTAVINQLRGFLLERGVTCPIGREALFKRFPEVLDNPGLGLSVRFCRLLQQLRDEWRLLDDDIEDVDQEILSLARDDEACDRLMHVPGIGPLTATALVAAVGNGAAFAKGRDLAAWLGLVPRQHSTGGKTVLRGISKRGNAYLRRLFIHGARSVCRHHHQKPHRLGRWLTSLKARAHPNVVAVALANKLVRTAWAVLQRNAPYDGRLLANA

SEQ ID NO: 466508 - protein, 382 aa, unidentified
MSKFIMVGCDLHDKTMLLKVACDRGPAQTMSVLNTRAGRTRMIADLQAKAKASGGASILFAYEASGQGFGLYDELTAAGIACHVLAPTKISRSTQQQRVKTDEKDAEQLLQLLRAHVLAGNPLPTVWVPDAQTRDDREVVRCRLDAAEKLTALKAQVKGLLKRNQLAKPEAVGKSWTKAYWGWLRGLIRDPAQGVGLRTSLASLLRQLDYLDDELERLDQALLELSQSARYAAAVMRLVQLSGVGVLTALVFLTEVGNLTRFANRRQISAYLGLVPKCYESGSANDRKGHITRQGPSRVRRVLCQAAWARVRREGTDQGAYERIVAKNPKHKKIATVAVMRRLAVRMWHIAREATSEPSGPQPGRLSSSLAGACASPPRPLA

SEQ ID NO: 466509 - protein, 363 aa, unidentified
MFTERTSVGLDVHARSIVAAAVDGQTSELHQARLTPSFEHVRSWLATLPGPVAVAYEAGPTGFGLYRDLTAAGIRCEVVAPSKLQRPVGDRVKTDVRDAIHLARLLRLGETTSVSIPTVEQEAARDLVRAREDCRGDLMRARHRLSKLLLRHGMVYDGGAAWTGAHDRWLRTVAAPALTGVATQMAFDADYEHVLTMKARRDRLDVAIAEMAGDSEFTPIVRRMSCLRGVSTLTAFALSVEIGDWDRFTGNSIGSFVGLVPSEYSSGTSRVQGAITKTGNTHARRLLVEAAWHHRARYLVGAVMRERWEQAPAAARVRGDEGNRRLHQRWVNFLDRRKRPVIANVAIARELAGWCWSLAVMDC

SEQ ID NO: 466510 - protein, 257 aa, unidentified
MHPTTIGLDLAKHVFQVHGVDAAGKVIIRKKLRRSELKAFFEKLPPCLVGMEACGTAHYWGRELSSLGHHVRLMPAAYVKPYVKRGKNDEVDAEAICEAVTRPTMRFVPVKSAEQQSILMLHRTRDLFVRQRTMLVNSLRGQLAEFGLIAPQGIWRRRHFAAWIGLVPQQNGTGGKVHLGRISKKGEPYLRRLLVLGATAVVRYARDKPEFAGWVNALLARRPARVVTVAVANKLARIVWAIMRRGGSFRQRPLGIA

SEQ ID NO: 466511 - protein, 375 aa, unidentified
MKEKLRFLGLDVHAETIAVAVAEPDGEVRSLGTIPNRVESIRKMIKKLGPAEKLRACYEAGPTGYVVYWQLAELDIRCEVVAPTLVPVKVGDRVKTDRRDAEKLARCYRSGDLTAIWVPDEGSEALRDLVRAREAAKQDQMRARHRLSKFLLRSGQRPPTGVRSWTRPYLIWVAQLRFTQIAQEATRQDYLHEVEHMRERVARLEQAIMEAVKAASPALQQVINDLQALRGIADISAVTIAAELGQVSRFGSARQLMGYCGAVPSEDSSGNRVRRGGITKTGNAHLRRIVGEAAWSYRRPPGIWYGLRRRQESISEETKEIAWKAQHRLHKRYMKLGAAGKAQGKIITAVARELLGFIWAIGTRAETTVSQRTAA

SEQ ID NO: 466512 - protein, 316 aa, unidentified
MRIKRENFIGIDVSKDHLDVAIYPDGEILTVRNTEQEIIYLGKQLKMLHPALVVMEATAGMEILSASLLTREGLGVAVVNPRHVRYFARSKGVLAKTDKIDACILAQYAQAIRPQKRFVLDENTRQLRALVNRRHQILEMLVSERNRMRFCDASIRNLIKVHIEWLKQEKKQIEAGLSKAIQDRSVWKVKDELIRSAPGVGQILSSTLLAALPELGSLNRKQIAALVGVAPFNRDSGAMRGKRCVWGGRSQVRAVLFMATLSAVRYNPVISEFYDRLINYGKPYKVAMTACCRKLLVILNSMVASEKYWCLNPSIS

SEQ ID NO: 466513 - protein, 401 aa, unidentified
MQEPLPHNSIDVFVGVDVGKGQHHAVALDRSGKRLYNKALPNDEAKLRALINELKAHGQLLFVVDQPATIGALPVAAARDEGVLVAYLPGLAMRRIADLHAGEAKTDARDAAIIAEAARSMPHTLRSLRLADEPLAELTMLCGFDDDLAAQVTQTSNRIRGLLTQIHPALERVLGPRLDHPAVLDLLERYPSPAALAATSEKTLANRLTKLAPRMGKRLAAEIVQALSEQTVVVPGTQAATVVMPRLAKQLAGLLQQRDEVASEAERLVHAHPLYPVLTSMPGVGVRTAARLLTEVAHKAFASAAHLAAYAGLAPVTRRSGSSIRGEHPSRRGNKVLKRTLFLSAFAALRDPISRAYYTRKIQQGKRHNQALIALARRRCDVLFAMLRDGTFYQPKTAPNA

SEQ ID NO: 466514 - protein, 406 aa, unidentified
MFYLGIDVALNIHRLVILDDTGERVSNGISFQNNTVDFEKVLSKLKELSINPDNSISGLEATGNNWENLYCFLTSNEFKTIVLNPHQTNKFREALRKKAKTDDIDAFVIAGLLRSNEFASSYVPEDKIQTLRELTKLRYEFIKDHKNYQRQVLALLNIIFPEYRKTALKNPFAISSTAILKSFATAKHLSIAKPKHIEKIVRSIKGNNFNINEIENLISIAKTSVYSGRCQESRALTLNILLTQIENFSKAIQQLDEQTNQILSPESNNDINSFPGSNLLTIPGVGPKTLAAILSCVGESGQAFSTGVKLIGHIGFFPQIYESGETKRANRMSNKGPAYLRQALYMASVACLKHNLQLRNLYHTKISQGKKPKQALICVAKKLAHLCLSMLHSGQNYNPARVFSYV

SEQ ID NO: 466515 - protein, 343 aa, unidentified
MDHFAGLDVSVKETSLCIVDDTGKIVREVKVASEPEALLHVLMNPAYHFKRIGLEAGPLSQWLFGALAEAGLPVICVETRHMRAVLKAQINKTDRNDARGMAQMMRVGLYRPVHVKTLRSQKLRMLLTHRKLLQSKAIAIDNDLRATLRNFGLKVGVVGTVKFEARIKELVEDLPDLVVLVEPLLIVRRVLREQVGILHRRLLAIVRDDDVCRRLMTVPGVGPVVALTYRATVDVPARFRNSKAVGAVFGLTPCKHQSGEVDRTGAISRCGDEMMRMMLYEAAQIVLVRSTKWSWVKAWAMKIARHRGMKKAIVALARRLAVIMHRIWVDGTEFRWTKDVAAA

SEQ ID NO: 466516 - protein, 329 aa, unidentified
MQPMYYIGLDVHKRKISYCVKDGSGRIHAEGSISATRLELDHWMRSLPQPWSAAMEATMFTGWIYDHLKPHAATLKVAHPLMLQAIAAAKKKNDRIDASKICDCLRCDFLPECHMASTAIRERRRTLRYRNLLVRQMVQMKIKISALLMEAGVSYNKQRLHKAGYFRELLTTNPDIDGGLRSLLRLCRETMVRLGKSETALVRSLERDSLLVERVERLMSIPAVGPITALTWALEVGDVKRFSSIKKAVSYCGLCGAEKSSGNTVQRTPLSKQRNKHLQTTLIEAAKMAPRNSPELAMLYDKEKQKGNANRATLAVARKLVAYLMAVDR

SEQ ID NO: 466517 - protein, 341 aa, unidentified
MEKKLSVLGIDIAKQVFHLVGMNEHGTILLRKRLYRAQVMTFIAQLAPTLIGMEACGGAHYWARRLREHGHEVRLMAPQFVTPYRKANKNDMRDAEAIAEAVTRPTMRFVPVKSVDQQDLQALHRVRERLMKARTALINETRGLLHEYGTIVPQGASTFRKHVLEKLASEETKLTPASLELFQQLLEELAALDARVATYDAQLAQVAQTHPVCQRLMTIPGLGELTATALVAAVSDASQFKNGRQFAAWLGLVPRQHSTGGKARLLGISKHGDIYLRKLLVHGARSCLRWVGRKRDRRSQWVQSLMERRGWNRAAVALANKNARVAWALMSSEQVYQTAAA

SEQ ID NO: 466518 - protein, 340 aa, unidentified
MTVIIGIDPHKASHTAVAIGQDEQPLAEIKVRATCQQTERLLAWAEPLGERTWAVESAGGMGYLLSQQLVGAGEQVLDVPATLASRVRVLGTGRSNKNDPNDALSVAIAALRSPGLRSVEPADHREVLRLLAKRNHEIGRLRNIVVSRLHAALVNLSPGGISKELNASDAMRLLNDFEPITAVEQTRYDLAHELLDDVERLDVQLKESHRRIKTAVKASGTSLTELYGVGPILACELIGYTGDVRRFTTRDQYASYAGVAPVERSSGGRIFFRLSRRGNRQLNHAIHMVAICQIRQTNSEGRIYFEKKVAEGKTKREAIRSLKRQVSNAVYRQLLIDAQK

SEQ ID NO: 466519 - protein, 330 aa, unidentified
MIYVGIDVAKETHYAAVMDDNNNVLVKPFDFTNDAVGFAKLISKLTSFPKEKLLFGLESTGIYSENLIAFLYDSGFSIAVINPIQTATLRKTGIRKTKTDKTDTLLIIKSLMVNPYHLYTRQDAVTIKLKSSCRYRQNLKKSKARLKIQLSAYVNMVFPELQNFFKSGIHIATCYELLKMCPSPAEIAALRIDKLSKLLSKASHGRFGKSSSEVLKSLAKTSVGVKNPYISIQITQTIASIELLEQQIEEIETLIEEMMKELDSVIMTIPGIGAMDGAMILGEIGDISRFASASKLLAYAGLDPTVCQSGNFRARSTRMSKRGSKTLRAY

SEQ ID NO: 466520 - protein, 422 aa, unidentified
MKPYAITDFAAFVGIDWADKKHDICLQARGTTKRTTTIVPHRPESLEQWALSLLKQFDGQPIAVCCELRKGPLVYALAKYPHLVLFPVNPQTVAKLRKAFTTSGAKDDPTDAELQCDILQKHFDRLAPLRPQTATIRALQQLVEYRRRAVADKVRITNRLTSALKNYYPQALTWFPDRDTTIFCDFLDRWPSLKVAQKARRDSLLSFFRAHNARYDNVNQQRIKDIKQSQALTNDPGVIVPNQLCVTTLVAQLRATLAAVKLFDKEIAGLFKQHDDRALFDCLPGAGPVFAPRLLAAFGDDRTRYPTAEDVQQYSGIAPVLERSGNKSWVHWRYCCPKFLRQTFVEWAGETVKLSFWANAFYEQQKAKGKSHQTIIRALAYKWIRILHRCWLDRKPYDEAKYLLVLKKKQSPLLQFATARLP

SEQ ID NO: 466521 - protein, 332 aa, unidentified
MTKSILGIDIAKHKFDCCFLLEDGSKNCCSFSNDALGFALLQKKIEQLKITQLHAALEATGRYGDALARFLHAQEHGVSIINPVCTKNYAKAKLLRNKNDRVDSALIAQFVKETNPPLWTPPSHSQSHLQELTRHLLSRKRELTKERNRLGNPGENKAVCKDIKSSIKHLEKSIQSLEKAITELIEADPALLVNMKLLCSIDGIGPTTAAIILAELPPVDQFKSCSQAVAYAGLSPRQFCSGSSIQAKTRLCKTGNRYLRQALYFPAVVGLTHNPVLRAKAQRMEAAGKSKMCIVGALMHKLLRIAFGVLKHQSPFAPEWKAQNVKENIPTP

SEQ ID NO: 466522 - protein, 340 aa, unidentified
MNATTYGLDVAKRIFQMYWVDAQTGEISNRRFRRDELIVFLAQRPAGRVALEACGSAHWWARKINALGHEVVLLHAKFIRPVVQTNKTDAADARAIWTAVHQPGMRTVAAKTEDQQTMLGLHRMRSLLIKFRTMQVNQLRGLLYEFGVSCRTGRVAGLNEIRARMEELEEALPGIMTCSLQDQLRCIDAIERDIDQLEKQISGWLKREAACRAIAEIPGIGKLTATALVATMGDAKAFKSGREFASFLGLVTRQSGTGGKIRLGSISKRGDPYMRTLLIHGARSVMRHGKTPTSWQKGILERRPANVVTVAMANKMTRMAWVILAHDSRYEKNHVSVRPT

SEQ ID NO: 466523 - protein, 385 aa, unidentified
MTLQLREGGFLPYRYEIFAGLDVDKNSMSVTFADHRRLLNSLRMPYSSEHLLNYVRKNFPERRIAFAYEAGPTGFGLYDDLVGSGYPCLVVAPAMVPTAPGQRVKTNRLDSKKLSESLRGGQLQSIHVPSVTYRELRHLVQLRDTHARQLTATKCRIKSLLLYQGIAFPSENGKWSQQVLRNLAALPCSEVVRFKLDQLIEALRFHYNSAALAQKQIRRFCQNDPEIRQSITLLCSIPGIGSIVASHLVARLGDWREISNVRQIAAFLGLVSSEHSTGDKENRGPITRAGDSRLRNKLIQSAWTTIRKDPELRAFYRRVYQRHPKKVAARKAIVAVARKLTTRIYAVLKQQRPFVFRPDSSASPLTAEETAGSRERLDAAQNDQP

SEQ ID NO: 466524 - protein, 429 aa, unidentified
MKKIISSVIGKKQESTEGKKSAVKMKIANNSEDAPKKKRKAAKQDVSRIDKKRQRQGVRILLQKLESALEAPKLKQALYDETVAYYIGIDIGDKKSHYCILDKGPDIAADGSFATTPSEIESYFKAIPRSRIALEVGTHSAWISALLEKLGHVVIVANPRKIGGGKKRRKNDKLDAEYLARKVKSDPKELWPIQHRGEEARNALVLLRVRHAVVGARTKLICAARGFVKSSGHRLPRCSAESFHKIDRAHVPEALRNVLEPLFAQIEALSEQIKKYDADVKRMCRKEYKETDQMQQVNGVGPLVSLAYRLTIDNPDRFAKSRDVGPYLGIIPGQYESGESRPQMRITKTGDRFMRQLLVQSANYIIGPFGKDSDLRRHGLKIAARGGKSGKKRAAVAVARKLAVLLHRLWVTGEVYEPLRNSEPQEKAA

SEQ ID NO: 466525 - protein, 342 aa, unidentified
MEIKTIGIDVGKSWFHLVGCNRAGKPVSRHKLNRGQLAQFIANLPQCLIGMEACPGSQHLARAFQRSGHEVRLIAPKFIKPYVKGQKNDFNDAEAIAEAVSRPTMRFVTVKSNEQLDLQAVHRIRERLVSERTAVINQIRGFLIEYGLPVKEGRASLRRDLPGILEDAENGLSPRMRQLVIALREHWHALEVQIAQHTHDIELVAKRNDDCRRLITVPGIGPLGATALIAAVGNGAMFNKGRELAAWLGLVPRQQSTGGKPTLLGISKRGNRYLRMLIIHGARSCLRHLNRDNHELGLWMTQLERRSHKNVVAVALANKIACIAWAVLARQEVYRSSAVVAG

SEQ ID NO: 466526 - protein, 413 aa, unidentified
MEQGLITAVGVDVSKGKSMVAVRRPGGQIVMPPIQVNHTAEELAGLAERLQGPGGDIRIIMEHTGMYWRPIAHSLKEAGFFVSVVNAILIHNFSDNSLRKVKTDKADALKIANYGLTFWTELRNFSDEDETRQMLKMQCRLYERTQKISVELRNGLISLLDQTFPRINEILPAHYCTKRGHYKWVDVSKRFWHKDCVKKLSESAFTNTYQKWCKKEGYRFSRIEAEKIYCAAQNTVATFPQNESTKTLIVQSVDCLNAVYESMAVLRTEMKRLASLLPEYDVVMAMQGAGDVTGPKLMAEIGDVRRFTNKNALVAFAGVDAPPFQSGSFEAKSRHVSKRGSPHLRRTLFQVMSVVLQRSSTDNPIYSFMDKKRAEGKHFYVYTVAGAAKFLRVYYARVKEYLLALETKQETAA

SEQ ID NO: 466527 - protein, 382 aa, unidentified
MACKGRGRVFGRLTRSMKKYTVFHSVSAAPAAVKSKVKRSDSLLKIGLDIHREKFVMVAQHEHATPRPPHRFGPAEFMLWVEARLREGCEVHVVSEACGFGYGLYRSLLKLGAHCYVIAPQKLDERNRRVKTDGRDARLLCLRLDRYLAGSKDSLAVIRVPTEAEERARHWGRQREQLVHHRQKLEAQGRDLLVNHELFVPARWWRRQSWNRLGKLVPTWTLAHLELYRPVLLSLDQQIRALTIELEKAAPAELPKGMGALSSVVISREICNWERFTNRRQISSYTGLCPGEYSSGSKRIPGSITRHGNGRLRAALVELAWRMVRYQPQYHAVQKRLAMLARGAQATRAQRKKAIVAVARQLAVDLWRLHTGRCTATILGFK

SEQ ID NO: 466528 - protein, 349 aa, unidentified
MKFYTKQHRFYCGVDLHADAMYICILDATGEVVVHKNIPTRPKSFLKLIKPYRDGLVVGCECMFTWYWLADLCADEEIAFALGHALYMRAIHGGKAKNDRIDSHKIAVLLRGGNFPLAYTYPKPMRATRDLLRRRNHLARKRGELFSHIQNTATQYNLPDPLGRIAKPSEREDLSAKFSDPVVRRMVEVDLETIEHYEKLLGSLERELDKIATQHDPVNLALLRSIPGVGRILGLVMLYEIEDIARFPREQDFASYCRLVKPAKESNGKSYGHSGKKIGNAHLRWAFGEAVVLMLKGNKPAQAVRQRLASKHGKGKALAILSHRLGRAVYYMLKNQVPFDQKLFLRQSA

SEQ ID NO: 466529 - protein, 428 aa, unidentified
MDVEEINRIKEFRQLKKEIRGSTEHLIIGVDVAKNKHRAFFGTATGKTIFKRLVFDNDLAGFERLHMQMEALKVQNCLDKVVFGVEPTANYHKPLAEYLIKCGHTVVLVSGVAVAKNRELLDGRWDKNDTKDAANIADLISQGKFLYYDYPPLALRDLRDLLSLKRRLKKQEHGSRVRIRNHLLAQYFPEFDKYFKAERSEVFSIVKWCLNPSKIAAMEYDEFVHLVMPRGTTIGQEKRLKEIWDLALESIGCSAGEALGFEAKLMVEDLQQIKDSIRAIDDQIKDICLGFPEYGYLLTIPGFGPDVSSTVLGAIGNPFRFDTGKQVIKLAGYDLGAYRSGNTSDSAVPIISKRGNAYLRYALYQAAFIASTRNRYFIVYYTNKLRGREREKGIKTKMRVKLAAKMLIIAWTLMKKKEPFDPEYLDLE

SEQ ID NO: 466530 - protein, 376 aa, unidentified
MTVISAVYYNIDVSKHIYEPLRKELAMPYETEVGMDIHKMYSMFGVVKCDGNVVSYDKVSNDTRLFDRFFSRFAEGTFRVTLEATRGISWVIDYFDRKNIPYIVSNPFLNRAIANVHCKNDKYDARTLADLARSNYIARCYVPTKPIRELRDLIAHRAKLVVITTKLKNKVHDVLAKYNYVQPISDIFGVSGIQWVRSQKLSDMHKQILEETLALIGAFLPRTMALEKTIKEKVHEHRYFRLLQTVPGIGPINAATIIARVEDITRFPNVTKFIRYAGLSVNTRESAEKMYLGKLNKKSDKFLRTAFVDAEIAAVQKDPGLSMFYQYLLARKGKGIARVAVARKLARSVYFMLRKSQPYHYRQLQNIWSNTTADKG

SEQ ID NO: 466531 - protein, 392 aa, unidentified
MFYIGIDVSKDKHDCFCCNDNLQPVFQFQFNNDSIGFNQLFEAIKSLDSPFDNIKIALEATGHYSYNITSFILDNSLPLAIINPLHSNLFRKSLSLRKTKTDKVDACVLARMLIAYPDLKFSTSLDDNDIILSELKSLTRFRLSLVKDLSKLKTSLSRIINIVFPEIEKAFSSTNSLYELLYNFPSAKEIANAHLTKLTNVLIKASKGHFSKEKAVQIKELAQNTAGNSSYALTLELKHTIKLINEYNSSIDKIDKEITTIMDKIASPITSIPGIGITLASIIIAEIGNFDNFDSPDKILAFAGMSPTIYQSGKYVASSAKMEKRGSKALRYALYNAARLTSIYCPVFKEHLARKRSQGKHFNVAMSHVVKKLVRVIYHLQTKNELFKNVIN

SEQ ID NO: 466532 - protein, 447 aa, unidentified
MKQKKPSRKRSPKLPKHLQHLNQNAAGIDVGSRSHFVAVAEGTDEQPVREFSTFTDDLERLAKWLASCGVTAVAMESTGVYWIPVFELLERHGFEVRLVNARHVKNVPGRKSDVLDCQWLQQLHTYGLLQGAFRPADQICTLRAYVRQRATLVRSSSSHIQRMQKALAQMNLQLHNVVTDITGVTGMGIIKAIIAGERDPQILAGLRDKRCKNTKETIARSLHGNYRPEHLFSLQQAVELYEFYQQKIADCDQQILAQLKSFDSSDGSDPDSKPPRSIEEALHQMSGVDLSSINGINTNTALKIIAEIGTDMNRWMTVKHFTSWLGLCPGSKISGGKVLSSATKPVANRAATALRMAALTLFNSKSALGAYLRRQRSRMGAPKAITATAHKLARLVYSMLKHGTAFVDAGQEQYEERYRSRVVQNLKRKAQEMGYKLVSIQEEPQTT

SEQ ID NO: 466533 - protein, 410 aa, unidentified
MDSAYNVTGIDVHKKMVAVVVADAHARELTFTCRRFGTTVGELRQLRAWLQEQGVQEATMESTAQYWKPVWMALEGACRLHLAQARSNRGPRGRKTDSRDAKRLVSRLLSGDLVLSFVPDAEQRGWRTLTRTKHQLTRDRVRLQSQLESLLEECQIKLSSLVSDLLGVSGRRILRALADGETDPARLAALGDRRLHASPAALQDALSGSMPPLHRQLLTLALARLELIETQMDTMDQLIATALTAHQAAITRLAELPGIGVEAAQQIIAEIGPTAAAFPSASQLASWVGVCPGRQESAGESHSNRSAKGNRTLRRLLTQLARAAVRKEGTHLQRVFRRLSARMNHNKAIWAIAHRLCRLIWKVLHEEVRYVEHGAAPTPLLLKRRRQRLVSQLRHLGYQVTLTPLASSVA

SEQ ID NO: 466534 - protein, 434 aa, unidentified
MEEITDEPLYRDRVCGIDIGKAGLVATIRVPSDANPARRAAETRSFGTTRREVLALADWLRCWQVPAVVMESTGDYWKGPFYRLEAEGLECVLADAKQVKHLPGRPKRDPSDSRWLAACFERGAVTACFVATEEFRVIRLHTRYRRDLTEERTREKQRAEKLLESAAIKLSSVVTDLHGVTGRDIMDHLIAGETSPKVLAQLARARARRKIAELEAALEGAEFFTPAHAALLATMLDRIDHLHAEIARLTEMIEHLLAPHEEQLAQAESMPGWGRRSAQDALAETGTDMSRFPTPSHLASWAGRTPLDNSSGKRKGKAKSKKGNRYLAAVTGQTAVAAGKTQTREGARYRRLARRRGKAKAQVALGNTQLKVYHALLSHPGTRYQDLGPDYYERQAGTRRQIAHHVGKLAALGFEVTLARLPEPDPTGPDNQAA

SEQ ID NO: 466535 - protein, 312 aa, unidentified
MIPELLFVGIDVSKARFDVFVYPAGKRWSTGSSPTQIGALASRLLGLGPVVVGLEASGGYERRLADSLHAAGLKVHILPPARVRNFAKAMGQLAKTDMIDAAVIARYLATVHAHLTPYEPNPVRSRLSALAAHRRRLVAEKSGLTSQLDTIEEPLVRDMLEVRLRIIDTDIATLDRAMRDLLKATPGLRKRHDRMCKVTGVGPVLATALIADLPELGTVSSKVIAALVGVAPHARQSGSSNRQGKCSGGRKHLRDIAYMAALSAIKVKDPVLGAFYQRLRSKGKPFKLAIVATIRKLVTILNAIARTDPAFA

SEQ ID NO: 466536 - protein, 336 aa, unidentified
MEKIVIGIDVSKEKLDFCLQQGEKVLQEIVVENTTSAIIRSLRSILKEFQLEVSNLLLCAEYTGQYTYPLACACDELLVDLWLENPTQIKHSSGIQRGKNDRLDARKIAAYAIRFQDRKKIFSLPEKNIVSLKQLISERDMYVCDKAKYQGQLTDQKRFMSQEDYQRKSKRLKNLVKELDESIAQIDREITRLIDEDETLRRQHELLCSVDGIGERIAVKMIVETNAFRDFDNGRQFCCHAGVAPFKYDSGNTIRSRNRVSNRADKTIKALLHMAALAVATRKKEGELQVYYARKVAEGKNKMSVLNAVRAKLVLRMFAVIKNNQQYKQNYDFALA

SEQ ID NO: 466537 - protein, 330 aa, unidentified
MVPKFFVGVDISKLTLDIALLAGKKQPLSFKIANSEKSILEFLKAIKVEYRIKNRDVIFCAEHMGIYSTFLLNVLVKKNISVYLESPLQIKRSLGLQRGKNDKVDAIRIAQYAEKHFNILRLWQPPRACVEELRILFATRRKLIKVKKMLINPEKINSYYLTPAKKKLNESYYLESQNSVMRDIDRIEKAMIKIIKSDDRLNALMEIVTSVPRIGQIIGIQFITYTNEFLDITTAKKFASFCGVAPFEYRSGTSVSGRTKVSHLGNKEVKAMLHMASMGFPNMPNSFLGKYYIRKVAEGKNKMSVLNAIRNKLIHRVYACVKSGVPYQEF

SEQ ID NO: 466538 - protein, 342 aa, unidentified
MSVVGGIDIHRSQLTFDYVDLDSGEVFRGRIAPGDRVTLRRWLQRFTDRRGVAFALEGCTGWRYVVEELQRAGIESHVAEPAETATRRGPKRRAKTDRTDAQLLRDLLLEGRIPESWIPPEPVLEARALVRLYKDLLDERTGWLQRVQASLYHMGAVDLDVKTMSAAGRDRIAAAALSPATRTAVDTGMRQVDRLTEELGTVRQQINWVARRQPACKALQAAHYGVGPLTSVVIWAEMGDTRRFHSSDDAVRHAGLDVTVYSSAGRRTAGHLARQGPVLLRWALYESAVYAGRPSSPDHAYFQQVKTRLDGQLALLSVARKLARRCHHTLRNLGDQVLAPAA

SEQ ID NO: 466539 - protein, 402 aa, unidentified
MEYYTTIGIDVSDRTSKICLMAKSGAKRHILEEATVPTTRAGFTEYLKDKDPGSVLVTFETGTHSRWMNSLIGDGLGFKVHVANPAKLPTVTKSAAKNDRNDARELARLALADPELLHPVRLRREVCQAMLRVEYVRQDLIACRTKLTNTLRGFAKAMGGRIESCSPEKIVSLNRADWPEELRKLISLVEETLESINADVKKSDDEIKRRTCLSPFKEHMPRAQEVYGVGLHTAATFLAVIDCDVSRFKKARDVGPVVGFTPRQDQSGEMEKQLHATKAGNPLLRKLLVEAANVTMRTLSPDTDLKLKGERICAHGGKIAKGKARIAVARGIAVTMLALLKHPEREYVPLTENGAEELARLREQVARQGLARANHARKAEAAERPEPRPDRQGAKRKDFSNH

SEQ ID NO: 466540 - protein, 483 aa, unidentified
MKSKRVEKYKKASCRPTPNNWHQMNRKQRREMTRKIQSEDLSLEIVHPDAAGIDIGNESHYVAVPATRDSQPVRHFGCTTAELKAMADWLKQCAIRTIALQSTGVYWIAIYDILEEAGFEVYLVNANQTKNLPGRKSDVQESQWLMKLHTYGLLRNSFRPSQEIRTMRTYWRQRNDLVRAAGRHIQRMQKALTQMNIQLANVLSDVSGMTGQAIVKAILAGERDPYQLAALRNWRVKASEEEIARSLEGNWQNDLLFVLQQEQDGYEFCQKQMAECDQRLQQYLQQQEDQSHGASLPEEKRKERLRKKKKGNAPEFNLRAELFRMTGTDLTQIDGIDVTTTMTILSEAGWDMSKWQTEHHFVSWLRLCPDNRISGDKIIGKGRLPTNNRVTNALRMAASTLRLSNTYLGAQFRRLRSKLGAPVAIKAMAAKLARLVYRMLRYGMQFVDRGAEFYDAQHRKLQINYLKRKAANLGFQIIEAPAA

SEQ ID NO: 466541 - protein, 374 aa, unidentified
MGKVHRIQHTVEGFRFLKSKVEELAMKTKEEVVVVYEATGVYTTPLQRFLEKSEIKQYQISPLQSAKQRKTEIHNKKTDKKDPESIAEVYYAKELRKYEREADIYHQLRTANRVYEDCLEHLRKYKVTFQSHLSIVFPGYMKLFQDGYSPISLQLLEMYPHPDRLKNKQPETVEKKLNKHTDHSFEVCLKNAKRVIEFANKTYPGCDKEDPWVAVLVEDIHQLQAMIEQAEAKLDKIIKLAKTTPYYFIILSIDGIGPNLASRIIAEFGDISKFKTRGAMAAYVGNDPNRAESGDIDGYHLSISKKGNKRLRCILYLAVTCSIRSKKENPINAFYQKKRQQSTPLKSKAAKVACITKLIRTIHGMCKNGTEFTS

SEQ ID NO: 466542 - protein, 324 aa, unidentified
MTAVVGIDIAKQTFDIATLQSNGKYRTKAKLPNDLKGFETLQQWLLKHAEPQAWIVMEATGIYHEALAEWLFKQGYRVCVLNPAQPAFYARSQLQRVKTDKVDAKLLADYGSRHLAELRSWQPEAPEIRRLRALVHRLKDIQELEQIERNRLESTQESKVRDSIQSVLDHLKKQTDETLKAIKQLFDDNDDLRGKRDLLTSIDGIADRTAALLLAELGDIQRFNSSKAVTAFSGLNPRLQESGKHKGHVRISRMGPARLRAGLYMPAVSSLTHNQAIREMGERMKAKGKAGKQIACAAMRKLLCIAYGVLKSGRPFDPALAIAR

SEQ ID NO: 466543 - protein, 360 aa, unidentified
MTIAEEGAARRIIGGVDTHKDLHVAAVVDEQDRVLATRCFATTRQGYRQMLTWMRSFGELQRVGIESTGSYGAGLLRFLQQAGVEVLEVTPPDKHDRRRRGKSDDLDAQNAAHAAFAGKRTVTPKSRDGMIESLRVLSACRKTAVAARRIALQMIQNTVVCAPDGLREMLRSMTRMQLVRTLAAWRPDLTGYRNVEAAYRISLKSLARRYLELHDEIADLDAMVGAIVEELSPTLVARNSIGYAGAAQLLLTAGDNPERLRSEASFAALCGVSPVPASSGKTVRYRLNRGGDRAANSALHIIAIGRLRTDARTKAYVAKRIAEGHSKLEAIRCLKRYIAREVFTLIAQRQREINQTRIAA

SEQ ID NO: 466544 - protein, 365 aa, unidentified
MQKAELSDEADSENYLGGSSETMYYIGLDVHKRTISYCVKDAAGRVHQEGKIGSTRRELDGWIKTLPQPRTIAMEATIFTGWIYDHLLPHAEKVKVAHPLMLRAIAAAKRKNDRIDAGKIADCLRCDFLPECHMASTEIRDRRRTLRYRGLLVKQMVQMKNRISGLLLEKGVTHTKRRLHKVGYFAELMAGNEEIDQSIRPLLKLSREHIVRAQKLDYALVSSLERDPLLVERLKRLRTVPGVGPITALTWALEIGDVARFRSIKQAISYCGLCGAEKSSADKMLRTPISKQRNKHIQHVLVEAAKLAPRQCHELALIYGKEMQRGNRNRATLAVARKIVAYLLAVERRQQDFVPTEEFGGTAAA

SEQ ID NO: 466545 - protein, 340 aa, unidentified
MEQIIGIDLAKRVFQVHIVSAQGEKKANKMITREKLMAFIAQQPLSRIVMEACGSANYWSRQFKTFGHDVRQISPQYVSPFRMGNKNDKNDATAIVEADSRPGMRYVPEKSLEQQDIQCIHRVRQRLMKNRTALINQIRGLGLEYGIAIPEGAHKIMTCLPDYLEDAENELTALSRQLFHEIWLELQDCQQRIKTLDVRLEQISTQNEDTARLVNIPGIGPLGHSALTIALGDSRSFNNGRHFASYLGLVPGEHSSGGKPRLLGITKRGDGYLRGLLIHGARSVVYRTVNLPDERCSALQRWLKGIIVRGGVNKAVVALANKNARVAWALVNQRTEYRIQ

SEQ ID NO: 466546 - protein, 401 aa, unidentified
MESPIVSIDVSNGNSHYMCFIKNNKRFGKVKKIDHDIEGFKRLLEDIQKLEAETNEKVCAVFEATGVYTKPLERFLSKNSIKIYIINPLESARKRKEEIHNKKTDKLDPISISKVYYDKEEMMELKKKDETYNWLRKKNRLYEDQLNHLRKYKVTFQNQLSICFPGYLDLFKDGYSDIPMTILKKYPHPDLLKNKKAETVARYLEKNTCHTHKVSLEYALKIIEFAKKTYPGCEKDDVEVEIFKILLDKVIETQRECEKTLNEMITVASTLEEYRYISSIDGIGPNLAARIIAEIGDIEEFKSREALVAYAGLDPHIYQSGDQDGKHLKISKKGNKYLRCLLFLAVGCSIRGAKDNPVNRFYQKKKQQSNPLNSKAAKTACTAKLLKIIYGICKNKTTYER

SEQ ID NO: 466547 - protein, 413 aa, unidentified
MEQMIDCCGGLDVHRDTVVATVRAPGSQQRERRIATRTFTTTTGGLSELGDWLVAEHVELVGMESTGVYWKPVFFALEERIDQVWLLNAEHLRNVPGRKTDVADSVWIAELVEHGLVRPSFVPPADIRALRDLTRYRRTLVEERTRAIQRLEKVMQDAGIKLTSVASTLLGKSGRAIIDALLAGVSDPVMLAELAKGRLRSKIPALREALTGAFRVEHHGLLVRQMLAHIDFLDESVAAIDAKIESAITVHEPVIERLVTIPGVARKTAIGLIAEVGVDMSVFPTPADLASWAGICPGNNASGGKRRSGRTRHGSVWLRTVLTEAAQAAARTKGTYLAAHHATVRGRRGRFKAIGATRHDLLIAYWHVVHDEVDYRELGADWAVRRFSPEHQLKRLIRQIERLGKTVTVTDAA

SEQ ID NO: 466548 - protein, 416 aa, unidentified
MNNESPVVAGMDVHKKMLAVVVAKVDGNRIEYLSERFGTTRQDLDQLAHWLHQQQVTEVAMESTAQYWMPVWLALEEQFTLYLAQPRSTAAPKGRKSDWADAQRIVRRLLAQDLTLSYVPGREQREWRTMTRTRVEMSAQQVRLRNQREGLLEQAQIKLSSVLSDLLGVSGRRILREMVKGETNPACLASLADKAVKASEKTLQEALGGKLTATHRLLLKMYLEQWDLLASQIDQLNTRMAQALSQHQAAVHRLVEIPGVSLTAAQQIIAEVGPEARAFAAPQKLASWVGVCPGQHQSAGTEYSHRSPKGNRMMRRVLVQCAWASVKVKGSIFHQKFRVLVPRLGPRQAIWAIAHRLLRIIWKLLHDQVNYVERGLDTNPAAVQLRIKRHLKELQRLGYAVNLSALAAIRPQEASV

SEQ ID NO: 466549 - protein, 411 aa, unidentified
MDKIYDNCCGIDVHKKLIVACLRKGNRQEVREFGATTRELLELADWLKTSDCKMVAMESTASYWKPLYNILESSDLNAMVVNARHMKAVPGRKTDVKDAEWIADLLQHGLLQPSYIPDKDQRELRELVRYRKSLVGERTRELNRLQKMLEGANIKLSGTVSDINGKSARSILEYLLTGECIDGAKYDEMYEQKVIAHNLKATKEQIIDDLNGVMTPLQRRMMKELLSHLDELNTHIKNLDDEIDNFMKPEEKQASQAIQDVTGIGNTSAQAIISVIGTDMERFSTDRHISSWAGLCPGDNESAKKRKSGKTRKGNSLLRTTLITCAHAAVKNKKSYFYAQFMRISAHRGKKRAYVAVAHSMLIAIYHILKDGVIFKDLGADYYNQFNKERKINAYLKKLKALGWEAPVVAA

SEQ ID NO: 466550 - protein, 319 aa, unidentified
MSPANVYVGIDVAKDWLDVAQRPGGEAWRVSSDETGVAALVERLKDVRPMLVVLEATGGLQIPAVAALAAAGLRTVVVNPRQLRQFAGATGRLAKTDAIDAQVLAQFGEAVRPEVRPLPDAATRELSALVARRRQLIEMLTAEKNRLRVATKKVRANIEAHIRWLEGELLDLEGGLGDVIRSSPVWRERDNLLRSVPGVGPVLSSVLLADLPELGRLNRKEIAALAGVAPLNRDSGQLRGRRTVWGGRSHVRTTLYMATLVASRYNPVIKSFYQRLLSVGKPKKVALTACMRKLLTILNAMMRHEAPWEISRLDTQDSC

SEQ ID NO: 466551 - protein, 317 aa, unidentified
MTFAGIDVSKTHLDLALVSNSPKPTRLRFPNSPEGRQALLAALAHHNPAWVALEPTGAYHLPLLKLLAENRLQVALVNPYHLAAFRKAKGERQKTDRQDALLLARYAQVYHEDLRAYTLPPETLRELKALVGYREDLAGRERTILNQMEAAEWAGSKEVLALLQKELACVKGLLGEVEARIQALLATLPEAEVLMALPGVGPQVAAAVLALLPPELWGRAKRAASYAGLIPEREESGKSVERSRLSKKGPPLLRRKLYMGALVAVRHDPEMRAFYHRLLSRGKRKKQALVAVAHKLLRRMMGRLREYYATQLDQGVA

SEQ ID NO: 466552 - protein, 391 aa, unidentified
MFYIGVDIAKNNHEASIIDSDGKLVSESFSFSNSIRGLEKFQKFISSFSIDSNNCIIGMEATGHYWLSLYSFLIDLGFSCIVINPIQSDAFRKMYIRQTKNDSVDSFVIAQILRFGEFSVSHFSDEDTFALRNLSRFRFALVDEASDWKRKLVAILDQVFPEYSSLFSNIYGVASKELLSKYTLPEDMISISADELAKMLSKCSKGHFGIDKAKEIQEKASNTFGVKFALKSFSFQIKQIIAQISFLEDQIADIEDEISSMINSLCPVITSITGIGDVLGAAIFSEIGDISRFERANQLVAYAGLDVAVKQSGNFNATDTKISKRGSPYLRRAIWLAASVAAFKDPALSVYYQKLRQRGKAHGTAIGAVARKLTNIIFAVLRDNKAYIPNI

SEQ ID NO: 466553 - protein, 315 aa, unidentified
MAMLVAQTKPVVGVDVAKNELVIYQDQSDRLEAIPNTKASISKWLRTLAGTASIAVEATNTYHVLFADMAYEAGCTIYMIDGYQLSHYRKGVNVRAKTDALDARLLARYLKKEADELHPWVPPCPLYRQLLSLFRRRAALVQARTGLVQSWSNEPLLKTAFAAQINSMKRLEALVEKKIKDVLQRAELMGQVSRCMKVEGIGFLTAARLVTTFQRGEFSNANAFFAFLGLDLRVSKSGQSDGPRRLTKRGDPEARRLLHNAAMSGSRTAAWKPFYEEQRKRGFSTTQALVMLARKMARVVFALLKTQSEYQSKAA

SEQ ID NO: 466554 - protein, 344 aa, unidentified
MNDINRIAIDLAKNVFQVCALNSHNKVLFNKKLSRKKFIEFMAQLPHSRVFIEACYSSHYWGRTLTEMGHTVHLIPAQHVTPFVRGNKSDNNDALAIAEAANRPNVRFVPIKTIQQQEIMAMHRLRERWVKSRTQVSNQARGLLSDFGIIFPQGYKGFREAMLNVQDNESLSTSFRQTMLDLYAEFNQISERIHSLEERLKAYIKQNNNCTIVSSVPGIGVVNASALVASIDEGQAFKNPREFGVWLGLPPKQYGSGDTFRSAGISKRGDRYLRTQLIHAARATKKWSRKRDDQLSLWIKQLEARVGKHKATVAIAHKLARIIWVLLKKQQCFVPQYPQKIMSS

SEQ ID NO: 466555 - protein, 338 aa, unidentified
MNYMGIDHHKQYSHITLMDEKGKKLKSGRVANYRSEVERFLDGSGEAKAVIEAGRSSYTMVDVMDELGIEVTIAHPLQVKAIAKAKIKTDKRDSFMLAHLLRTDLIPEVYKRSGENRGYQRVLRQRAFYVGSITRTKNKIHALLAQQREEVRDKVSQKKNIFSKDGVKFLKTLSLPDTDKDLLSALLKTFTHLEKSRNETNGLVERLYQQIPEARIIRSVPGYGVFLSLLVAVEIADIERFSKVSKFLSYAGVIPSTHSSGERSYHGKIVKQGNRWLRWAAVEAVYPGMKADFDIKSFYHRLKKRKGPNPAKVATARRMLTIIYRVLKENRLYIPYKR

SEQ ID NO: 466556 - protein, 400 aa, unidentified
MLLFFEVITMIFVGIDVAKDTHYAAVSDDSGAVLVKPFAFQNNAEGFCLLLKKLSEFDRSKLLIGLESTGIYSENLICFLYESGFRLAVINPIQTATLRKTAIRKTKTDKVDTMLIIKSLMVNSYRLYSQRDADSLKLRTLCRFRQNLKKSKARLKIQLAGYVNLVFPEFGKFFKSGIHIAASYALLKKYSSPKEIAALRTSTLCILLSKASHGRFGKDTAEALKSLALSSVGVKNPYISIQIAQTIAQIELLEQQIKDLNSAIEEAMESINSVLMTVPGIGAVNAACILGEIGDIKRFSKPCKLLAYAGLDPTVRQSGQFTAKSTRMSKRGSALLRYALINSAWQLTLNDTTFKAYYDLKRSQGLNHYGALGHVAHKLTRVIFKLLTSDTPFNPAKLVA

SEQ ID NO: 466557 - protein, 436 aa, unidentified
MTVSNDTPQRVTLVAVDIAKNSHDVLIESPTHGRRRRLRLANNLEDFEQLAGYLRSLKSPVLIGFEATGNYHRPLVYFLHRQGFELRLIPTLALARTREAMHNSWDKNDPKDAQVILHLLKTGLAQIKTGLAQTWHDPMVKGINDLQELSKTYFQVTLARVRVWHTLRNHYFALYFPEIDRFIRSDHSVWLVQLLASFPTPASITALSEEEFQTRAWNLVGRKVSKRALLAEIYAAAGRSIGVPVPLDSAAVAMFRLVLGEYLDLHRLREQIAERAAIMLGDNPDSRRLMTVPGIGPANALTILAEAGDLRRFRHHRQFLNFCGLNLSTLQSGKSRSQSHISKYGNARLRTALWMAAQTAVRMRENSFRRKFDNYVRGNPLDADLRRKAYTAIAAKLARVIFGLIKSGADYRPFFEHKFQVEEPSRASAVGAISTP

SEQ ID NO: 466558 - protein, 456 aa, unidentified
MARDQKKSSEFDALEQINLHAAGIDVGADEIYVAVPKGCSAETVRSFATFTVDLETCAQWLKQCQVTTVALESTGVYWIPLFEILEHHGLEVCLVNARHLKNVPGRKTDVLDCQWLQQLHTYGLLRASFRPPEELCALRALVRQRAMLVRYRAAHIQHMQKALQLMNIQLTQVLSDLTGVTGMRIIRAILSGERNPHTLASYRNGNCDHSEDDIVKALQGNYRREHLFALRQAVELYDTYGQQIQQCDAELEAMYRDFEPPHLPEPPSTQPPVQRRTKRRKNQASFDLAAQLYRLAGVDLTRIDGIDALTAQVVLSEIGLDMTKWPTVKHFASWLGLCPQNEITGGKVKRRGTAKTTNRANTALRVAAQTLWRSNSALGTFYRRLRAKCGAPVATTATAHKLARMVYFMLKHRADYVDPGTQAYETQQRERTIRNLRRQAEKLGFSLSPSDSPAVS

SEQ ID NO: 466559 - protein, 420 aa, unidentified
MSPDEKAAFARTFLVHVGVDTGKRFHVLVARGPDGLRRKPLKVLVSREGFERADAELQALFPDTERSRMLIGLEFAGHHGFTFAHFLASRGYPIVNVLPAHTKRTKELEDNSPLKTDAKDAAVICKLVADGTFVRFPFLESPYAELRVLVSYRHRLAVEATRFKNRLQGLLDLAWPEFVAQVSTLAKHTPIGLLERWPLPQDLLSAHKATVRAYARKISKGKFVTERFERLYTSAQQTIALLQAMAERRMEIQATLARWRLVRKQMVEAEARISELMARLSSAQALLTVPEVSAVCAATILAELGTPHDYAHPRQVLKLAGMNLIEKSSGSSQGRRRQSKRGRPMLRRQLFLLAGRWCQRRGLYRSYYEALLARNGGLKTKAVCAIARKLVPLVLAVLQRGDPFDKARWQAARHQPALTH

SEQ ID NO: 466560 - protein, 356 aa, unidentified
MLNKFNKIPDYSGHNIYVGLEVHKTSWSVNIMADEIEHRQFTQPPSPLILYKYLSENFPGANYFSAYECGFSGYHHHRELLNLGIQNIVFNPADLPVTNKEKVNKRDPVDSRRISRALQRNQLKGVYVFNPDHEQFRSLFRMRWKAAMENRRVKNRIRSFLQYYGIIPPASLKPDFWSAAFLDWLKQLSLPEKSGTLALEYLLIAYENTRAQLLQVTRHLRHQVKLRYQSIYLRLLTIPGIGPINAMCLIAEIGDIFRFRSCRHLASFVGLIPRSHQSGNKDPQGSLTYRSNKYIRAALIESSWTALRFDPALLKYYKDRIVKHKSQVVISKIAHKLLNRVRFVWMTDCNYQVGIS

SEQ ID NO: 466561 - protein, 389 aa, unidentified
MKIYVGIDIAKLNHFAAAISSDGEILIEPFKFTNDADGFQLLVSKLESFDKNSIIIGLESTAHYGDNLVRYLVAEFYQVCVLNPIKTCQMRKNNVRKTKTDKVDTFVIAKTLMMQDDLRFITFFDLDMMDLKALGRFRQKTIKQRTRLKIQLTTYVDQVFPEIQYFFKSGLHQHAVYALLKEAPSPKEIASMHMTHLANLLKVNSHGHFTKELAKELRVLAQKSVGANDSAISIQITQTIQQIELLDSQLEKIEAEMTDIMKFNDSVIMTIPGIGYINGGMILGEIGDIHRFSNPNKLLAFAGLDPSVYQSGNFQAKTTRMSKRGSRVLRYALVNAAWNVVRNNATFKAYYDAKRAEGRSHYNALGHCAGKLVRVIWKMLTDEVEFNLE

SEQ ID NO: 466562 - protein, 370 aa, unidentified
MSPSRTLFIGMDVHKDTMAVAYVAQDHGAEVTAIGTIGTRQCDIDQRIRTMPSKATHLICVYEAGPCGSWRYRSLRNKDDDCWVVAPSLIPKKAGDRVKTDRRDAIQLARLARSGDLTVVYVPQVQDEAIRDLTRAREDAISDCKDAKFRLKAFLLRHDIRYTGRANWSPAHLRWLSEVVCPTPTQQMVFQEYVRAVQEHTERLQRLEQALHEHVQAWRLYPVVEALQALRGVQCTVAVTLIAAMGDLTRFDTPRELMQFLGLTPSEYSSGAHRRQGAMTKAGNTHARRVLVEGAWAYRYPAKVSRHVQLRLETQPKIIQDISWKAQVRLCNRYRRLVARGKHANIVTVAIARELAGFMWAIAREVPIIP

SEQ ID NO: 466563 - protein, 391 aa, unidentified
MIFVGIDVAKDKHDCFILNSEGTVLADVFTIANNRIGFETLLSRIQSCSQGESKIKVGLEATGHYSYNLLGFLLDSGLATYVINPLHTNLYRKSLSLRRTKTDRIDARTIAMMLMSDVDLKSYSNTVYHNEELKSLTRYRFDKVKERAKLKSSVARLVNILFPELEKLVSSLHIAVVYALLSNYPGASYIANANTEELAETLCTASKGRYTKSKTAEIQVAAGVSIGSKMPAKSMELKHTIALIRELDKEISEVESAIDKITSQMDSPIFTIPGIGRHMGAMILAEVGDFSNFASADKLLAYAGLSPSTYQSGQLQNCYAHMEKRGSRYLRYALFNAAKYVCLWCPTFSAYLEKKRSEGKHYNVAISHAAKKLVRLIFAMQRSGKAFLADY

SEQ ID NO: 466564 - protein, 386 aa, unidentified
MAQVNDLSRCLAALDQDSTVIAVIELSLKSWLVAGIVPGVERQPLKKLDADADGVLRLLYRWRDEAVKAGRCVTRLAVAFEAGRDGFWLARWLRARGIEAYVIHAASVAVSREHRRAKTDRLDTELLKRSFVGWLRGEAEHCQMAAIPTLAQEDARCPGRERESLVKERTRIVNRMKSTLIRFGVRGFKPALRQAAARLDAVRMPEGEALPANTLAALRREMARLALVREQIKAIEATRVERLAQAPQTGPNAMIRLLAQVRGIGLETAEMLVSEVLSRPLRDRRAVARYGGITGSPDESGSKRREKGLARAGNARVRRGMIQLAWRFLMFQKNSALARWYQERTATAPGLRNKLIVALARKLLIALWRYATIGVVPEGIVLRAAL

SEQ ID NO: 466565 - protein, 368 aa, unidentified
MTSIIYVGMDVHTTNYTLSCYTVEDDNIFAVVQMEPDYKKVLAYLDRIQKNRGEKCKFICGYEAGCLGYTLYHQLTHAGIECKIIAPTTIPTAPNEPKNDRRDSKKISKCLAYNTASYVYIPTEEDQAVKEYMRMRDDEKLTLKRIKQQILALCTRHGKQFDGKSYWTLKHINWLKKLTFDHPVLQEAFQEYLVLYHQAVDKVTLFDKRIEELSREERYAENVKKLSCFIGVSTHTALAAIVETGDFKRFPTADKYAAFLGLVPGEDSSGDKIRRGGITKAGNTHMRRLLIESAQCYGRGTIGQKSKTLASRQEGNIPRVIVYADKANERLRRKFYKIMFHSKHNIAVAAVARELACFIWGMMTDNIT

SEQ ID NO: 466566 - protein, 410 aa, unidentified
MEVLYAHCAGLDIHKETVVACVRHMSGGKVKTEVRTFATTTGALLDLSAWLATEQITHIAMEATGVYWKPVWHILSDGEFELVLANAAHVKNVPGRKTDVKDAEWLADLMAHGLIRASFVPDESTQQMRDLLRTRKQLVRERSSHTQRIQKTLEDANIKLDCVVTDILGLSGRRILEALVKGETVPQALATLAHRRIHASTEELEAALRGRVTSHHRFLVKLHLDQIDAIDAAIQSIDREVDGNIEPFRAAAELLTEIPGISQLAARVVLSEIGLDMSRFETGGHLVSWAGLCPRNDESAGKRRSTRMKKGAPWLKTILVQCAWAAARTKGSYFQTQYHRLRSRRGSKKAICAVAASLLTTVYYMLKNGTCYQDLGADHFDQQDKARHIKRLVGRLENLGFEVKILPKAA

SEQ ID NO: 466567 - protein, 335 aa, unidentified
MSNESTTNTRHETPLSRTGYQRVIGVDVAKNNLDLCDSQNKLTGRIDNDVKSIQAKLLDRIDPDSATLILCESTASYHLLMTDMAHDSSIDVAIVNPRQVRDFAKGHGWLEKTDTIDAAMICRFGQDVPVHLAVRRSEQQKHHTAMVHRRVSLLKMQAQERSRLLHTTDKETRKLLKQMLRNIENQLNRVDKRLSEILKELAKQEPKVQILKSHPGVGEVTINVLLTSLPELGQLNRKEIAKLVGVSPMAKQSGTKDGKRMVRGGRQSVRCALYMAALSARQYDERLKAFYTRLRKQGKPYKLAMIACVRKLLSTLNQMVRNQETFDASKFAAMV

SEQ ID NO: 466568 - protein, 484 aa, unidentified
MPEGIVQREGEEMARAARRQGGSQSRKGRSKGVRSAQLEQLNLNAAGIDVGATEHWVAVPAERDAQPVQRFGAFPADLYAVAAWLRQCQIDTVVMESTGVYGMALFEVLEERGVDVKLVDAHQARQVPGRKTDVGDCQWLQELPTYGLLRGAFRPEDEVCVLRSSLRQRSMLVAMAARTVQHMQKALEQMNLKLTEVVSDITGKTGMTIIRAILTGERDPQQLATYRDKRCKHDHATIAKALTGHWRAEHLFALQQAVDQYDFLAQQLRACDGHIEGCLQAFVPDVETDAPPSPPARTWRSSRSNPLSFEVQAYLEAMTGVDLTQIDGIESLTALQVISEIGLDMTRWPTSQHFAAWLGLCPGNKLSGGKRYRMRSKPSANRAATALRLAAQGVANSHSALGASYRRMRARLGAPKAITATAHKLARLVYSMLRYGTAYVDAGQQAYEHKYRNRVLTNLQRKAKAFGYQLVHVEDIDGGLASTL

SEQ ID NO: 466569 - protein, 380 aa, unidentified
MDELITGFVGLDAHAESTAIAWAQAGRAAPRFVGTVGAKFVELKKALGKLGEAGSLLIVYEAGPCGFGLARELLTHGYHCEVVAPSRIPRSPGERIKTDRRDALKLASLARAGELVSVRIPDARDEAIRDLSRARVDAVRARLKARQQLKALMLRQGRRYSGKTSWSAAHERYLSTVSFEHAAQDIAFTEYRQAVSEGQARVQRLSEALAHEVEHWRHQPLVGAVMSLRGLDLVAASTVVAELGDLRRFAHPRELMGYLGLVPSEHTSGSKRRLGAITKTGNGHVRRVLIEAAWNYRFPPRISLPLQKRQESQPPAIREISWRAQLRLTHRYRRLKARGLQQNKICVALARELAAFIWDIGRHVDASGLSRSATAEGPSP

SEQ ID NO: 466570 - protein, 329 aa, unidentified
MKKTNIIGADLSKKTIDLHCHDTKTHFVISNNLIGFKSMVKWIVQRSILLNDVVIVMEHTGLYSYCFEEFLHANDVKFTKVTALEIKLSMGVVRGKSDKIDAKKIAHFGNEKITKLKLSQPVEKDVKRLQMLMSSKNLLVKQRAALLCSTKEYQNIGLSDKDLILKAQLVVIKELTKQIDLLEAEIDLIIKTNLSLNNSYQLLTSIKGVGPVIAITTIIKTHNFQRFENARKFACFCGTAPFPNESGSSIKKRTKISHLADKQMKALLDQGAKSALLYDKELKNYYESRLAKGKSKMSTINIIRNKIIARMFAVIKRQKPFVENYLAAA

SEQ ID NO: 466571 - protein, 411 aa, unidentified
MHNRQNYLYVGVDLHKEHHTAVMINCWQEKLGEIQFDNKPSAFSKFLLEVETYVSAGITVVFGLEDVGGYGRALAKYLVDHEQVVKEGNPALSFLERKSHVTTQKSDSWDAECVARILINKLNQLPDAKPNDLFWSIQQLVSTRNALVKAQSALKNQLHIQLNHHYPSYKKFFSELDGKTALAFWQQYPSPFCLEGANIKQLTAFLLDVSNNTCSVKKTSDILKLVKEDGQTMKEYQETRDFLVRSIVRDIEFKKKEMKYIERELKRLVNLLDYQLETMPGIELVTASALIAEIGDVRRFPNANKLARFAGIAPVYFGSGGKGKIHKSKQGNRALHALFYNLAVQQVQVAKGSKLPRNPVFHAYYQKKLKEGKTKGQALVCIMRRLVNIVYGMMKYKTAYELPVVEEKEVV

SEQ ID NO: 466572 - protein, 373 aa, unidentified
MEYSTVYVEMDVHKDSFSLCCYTNEKEKAEYPQRVDAHYSKVINYIEAMRFHYGDDALFICGYEAGCLGYTLFHQLMDHKIKCVILAPTTMLQQRGKKKVKTDKRDAALIARCLAHHDYSAVHVPTDQDEQTKEYLRMRDDHKLALKKVKQQILAFCLRHNFRFEGMSKHWTQAHLKWLRELKPEGLYKEILEEYLLTFDTLTDKLERLDKRIEELASHEAYQENVHKLSCFIGVKTITALAVLTEVGDFKRFSSAQHFASFLGLTPGEDSSGDDQNRLSITKAGNRHLRMLLVEAAQCYTHGQPGYKSKALKERQAGNAPKVIAYADKANERLRRRYYKLVLSKGKKANVAKTAIARELACFMWGMLTEETA

SEQ ID NO: 466573 - protein, 323 aa, unidentified
MNKSTKFYGIDISKDVFDVTDQKEVHYQFTNDIKGFKKFKKILDENSHCVMEATGYYHYKLAYFLQENEVLVSVENPLSVKRFIQMKLSKIKTDKSDSKMICKYAESVDLRIWEGESKDQQECLQMTRSLSIYKKQSTMLKNKIHGEEVLGVPSNFVLRSLKRSLKHLQKEMKLIEEKLLELVKKENQELLTLLESIPGIGRKTSVMLLVLTDGFNRFQSASELCSYAGLTPMIRSSGSSVNGRPRISKIGNQKLRNLLFLCSFNACKYNQACKSLYDRIVAKGKSKKLALIAVCNKLLKQAFAIAKSRLPYDPTYRSTLSVN

SEQ ID NO: 466574 - protein, 433 aa, unidentified
MKVMYERVAGIDVHKDMIKVAIRSPGDKPWTRKTEILEYRTFYGVLQEMARELRRRGVTHVVMEASGVYTEPVYYALCEQDFTEVAVINPVHAKALKGHKTDAKDCARLAELFECGLLRGSYIPSAEQKEVRDLTRYRIKTVQACTSEIQRLGKALESAGIKLASVASEITGKASTAMIEALIDGERRGGVLADLAIGRMRSAGKLADLSMALTGRFTGHHATLCRLHLDRIAVFDDAVDGLDDRIAAGAARWQREAGLLTSVPGFGDVVTCAWLAEIGPAPHKWFSRHEKLASWVTLCPGNNISARKRKHDRTGDAGTYIKPMLIQAAWSAIRVRGRLQARYNRLVRRFGGEKNPGAKKKAITAIAHTLLKIAYQVLKSGTPYQDLGADFYTRRNSPEEQQKYLERQLQRLHPGCTITITISPPEAALPPGE

SEQ ID NO: 466575 - protein, 327 aa, unidentified
MNCIIGIDVSKDKIDVAWLRDIHTLKVKTKVFKNTPSGYAQLCLWLSDNTKQPLNQCHCTLEATGIYHEPLSHWLFEQGISVSVCNPAQVKSFAKSLGSQHKTDKIDSIILARYGALMKPQLWQPEPKAVRELKALIARLEAIESDLLREQNRMEKAEFSAASELVIESLNTMIQHLESERKKLDQEIDDHIDRHPDLKRDQELLQSIPSVGRVVSRLMLSVIRGKDFKTAGDCAAFIGLIPKIQESGVFKGRASLSKKGNSRIRAKLYLPAVTAMRYNPSIEQHTKRLLEKGKNKMQAVGAAMRKLVHICFGVLKNQMPYEFRTAA

SEQ ID NO: 466576 - protein, 459 aa, unidentified
MNRRERREMIRKMQSEDLSLEVVHPHAAGIDIGNESHYVAVPPTRDPQPVRRFGCTTAELKTMAEWLKQCAIRTVAMQSTGVYWIAVFDILEEAGLEVYLVNARETKNLPGRKSDVQESQWLMKLHTYGLLRNSFRPSRQIRMLRTYWRQRQDLVRSGGRHIQRMQKVLTQMNIQLANVISDISGTTGQTIIKAILAGERDPHELAAYRNARIEASEEEIAQSLEGNWQDDLLFVLGQEQSAYEFCQKQMMECDRQLSHCLAQLEDRSQGATMPQETRKNRLRSKKGNKPQFDLRAELFRRSGTDLTQIDGVDVMTAMTIVSEVGWDMTKWKTENNFVSWLKLCPDNKISGDKVIGKGRMPTNNRATSALRMAASNLRLSGTYLGAQFRRLRSRLGAPVATKAMAAKLARLIYRMLHYGMRYVDQGAEFYEAQYRKQQVSYLKRKALKVGLQVIEVVAA

SEQ ID NO: 466577 - protein, 351 aa, unidentified
MNFIGIDLHKKTISACVMNQNRKVLKRQTLPCREPKQIVAFFQQWGEFQAVVEATASYEWLWQLLEPLAQRLVLAHPKKLRVIAESKNKSDKLDAQVLADFLALNMIPEAYRPTLRQRQHRALVRQRCFVKKNLTRVRNKIRRLVGDYNADRRNLFTQEGLKYLREAKKKFSAVDRFVLHQLMRQWKYHQQQLQVVNRRLKTFAGKAPPKEKEIRAVLGSMPSVGPTTIEIVLSEIGDIERFRSNKRVVAYAGLAPGHRESAGHKKDLGITKEGSGLLRWALVQTAWRMLRCSVRWRCVFENLKKRRGSKRAIVAVARRLLTVMTALWRTGQRYRLEGGDKSGILALVPAR

SEQ ID NO: 466578 - protein, 312 aa, unidentified
MADMVRLAGIDVSKEKLDVHVTPSGESRMVGYDRRGLAGLRRWLVSLGVALVAVEASGGYEREVSEALEEAGLVVHRLNPLRVRRFAQLKGRLAKTDRLDARTIAEFARAHPQERQSRCDPRRERLAEHLLVRRHTQQAILDCINQLEHLRDSRLRRLVTARKASMERTLAKLDCCLVELIAEHADLAELSERLRTVPAVGPVLATTLIALLPELGSLTRRQVASLVGVAPFDRSSGRQIGAKSIQAGRRLVRNALYMAAMVASRHNPVIAAFARRLAGKPGKVRLVACMRKLIVTLNAVVRDGTQWQPRII

SEQ ID NO: 466579 - protein, 321 aa, unidentified
METWVGIDISKDTFDAAWIMDGKKNHLKLENGSSGFKRLLNEVPAGSRFAMEATGEYHLNCARYLSSRGNPVAVFNPFAVKMHMQSDLRRCKNDRADAYSIAKFAAEKNTVCWSCPTDDEIRLKHLDAVIDNLQKQIRQSKNILHSLTQVSLRDDQAVSIIKKTISSLEALMEKARNRQLEMVETGKKEEIALACSIPGIGLETSLKFFTHVGNIERFGSSRSLISWIGLTPRNAQSGTSIHKNGSISRMGCTRLRGQFYMCAVVAIKYNPDCRSFYTRLKESGKPSKVALIAVANKLLRQLYAVLTKKEAYVPNFCTKAS

SEQ ID NO: 466580 - protein, 425 aa, unidentified
MSCLLHPTRVIDLLESSRKAVPIMTAPARPAPVVVGGSDTHADTVHVAAISTLGREVADREFPTTAAGYRAAVAFLTSHGPVDQVGIEGTSSYGAGLARAVTNAGLQVIEVNRPSRADRRRQGKSDPLDAYHAARAVLSGRATSDPKDQSTEAIRSLHNTRRSAVKARTAATNQITAMLITAQDGIRSKYRALQGQPLITALAKCRTAVVDSVDAAVLTALKALAHRHQFLTAQAEELSTLIDALVTTANPALRAAFGVGPDTAAQLLITAGANPDRLRSEASFAALCGVSPVPASSGKTTRHRLSRGGDRHANNALYRIALSRMAHEPRTKQYVARHVAAGRSTKEILRMLKRAIAREIHRLLTHKVALPEYADLRPARQAKNITVTAAANAFNIWPTVISRIERGLQRDDDLANRYRTWLQAA

SEQ ID NO: 466581 - protein, 424 aa, unidentified
MVRYVGCDVHKSMAVFAILNADGSVQANYSIPVTRESLTQFGELYLTRDDRLALEATTNTWAVTDVLRPHVGEIVISNPLRTRAIAEAKIKTDKIDARVLAELLRADYLPSVWQPGPDTQRLRRLTHRRSALVSDRTRLKNRLHSILHHCLIPLPKSDLFSKQGRAWLQSLSLPEPEAAARDSDLRLLEQVEQEIAHMEESLTREAWQDDKVRLLMSIPGIDYTVAQTCLAAIGDVTRFKNAKKLASYLGLNPSTHQSGLHCVYGHITKQGNAHARWLLVQAAQHISAYRGPIGQTMRTLIRRKNRKVAVVACARKLAVLIWHVLSSGEPFRYAVPKTLEAKYARLRVRATGARRKGGIPKGAPRPLQYGHGRTKAVPSLTQVLEQNGLPGPAQLSSGETTMLAVKRLEGFYSELQTPIRVKKL

SEQ ID NO: 466582 - protein, 512 aa, unidentified
MPTPPADALVTIPPIMEAIVSPFKSASANVHKPQTSQQIEADNELRRAARHAEQTRRQAQECAPLVSLPVQHDHAAGIDVGDASHWACVESTPDNSDTVREFPAHTPGLRQLVDWLRQCGVTTVALEATGAYAHVLFLTLVEAGFTVVMTPPQFARQIKGRPKTDKRDCQWIQRLHKHGLLPAIFQPDDATQTLRDYVRQRANLVRLSGQHIQRMQKALELMNVKLTKVLGDVTGVTGLKIIRAILSGQRDPHQLAQLRDRRCKHSVAQIAQALDGRYRDEHVLELRCCLAMWDKYQEVIAEVDEAIAAQLRSMRRPTELPPLPAKIRQRGRKPHDPRFDVRTALYYATGVDLTAIEGIDEIHALTLVSELGTDFTKWPTVKQFCSWLGLCPNWQQTGGKVKSSAVRRGQNRAARALRLASWSLLRSKSYLGAYLRRQRSRLGAPKALTACAHKLARIVYNLVRYGMAYVKQTESAYAEQVRARLERQLQRRALELGFEVRKIEAVPSPAVT

SEQ ID NO: 466583 - protein, 464 aa, unidentified
MTRKRTGTKKRSAQSKLDLKTVEIVHADAAGIDVGGSEHWVAISPDRDAEPVRRFGSFTADLRDMARWLVEKGVKSVAMQSTGVYWMPVFEVLEQHGLEVFLVNARHTKNVPGRKSDVQECQWLLKLHAFGLLNNSFQPTDEIRIARTLWRQRGNLVADASGTIQRMQKALIEMNVQLSSVLSDLSGVSGMSIIGAILKGERDPWKLAALVQPEVKAAPQAIAKSLEGNWRKELLFVLRQEVELYRTYQEKIHDCDLQLREHLKSFGSVVNLAAQPIGPKPKGKSKSKNAPQFDLRTELYRITGIDWSQVNGIDVLTAQTVIAECGANLSAFPSEKQFTSWLGLVPTNEQSGGKILKRRTRKVVNRAATAFRNAATTLLRSQSYLGAQYRRLRTRLGAPKAITAAARKLACLFYRLIKNGQQYVDKGTEYYETKYREQQVRILAKKAQRLGFQLVTPTPLEPAL

SEQ ID NO: 466584 - protein, 418 aa, unidentified
MKKHNNSPKKSEPTSRRTKARGPVQRDTKEVLAELVGKLKEKLDRKKVAAPSAEEEHQRDELGANLDRLTVGVDLGDQWSHYCILGLQGETLAEGQLRTTAQEVGEFFQGLNAARVVLEVGTHSAWIRDVLCSCGHEVLVANPRLMEGSKRRKRKNDRIDANKLARLGRVDPQSLHPIEHRSKEVRQDLVIIRARDVLVAARTELINATRGLVKSMGTRLPKCSSPSFAQKVEEAVPVEIRDALLPLVRMTAALSDCIQGYDKKIEKLGGEKYGHTALLRQVKGMGPITSLAYVLTLEDPQRFVKSRDVGPYLGLVPRQEDSGESQPQLGISKAGDRMVRRLLIGSAHYILGPFGPDTDLRRYGLRICERGGKNAKKRAAVAVARKLAVLLHCLWVSGEVYEPLRHGMSAATAHAVAA

SEQ ID NO: 466585 - protein, 435 aa, unidentified
MSTLGVDLAVRAAHVATLSNDRGDVIWSRRRFTSHPHDLAALSAAVGPASELTVVMEPTRSAWVVVAAHFRATGAKVVMIAPEQSADLRNYYKKHTKNDRLDSLVLSRVPLLHPEGLTEVSGLGPAEPLKRAVRRRVDLVDQRRACHQRIDAMLDLLGPAYNEALGSRGTKTSAVVLERYGNPKTLRRLGLSRLTDLVRKTSAGHLDAEYATGLLEAATEAITLWKGGGLDFDELAWDLAQEVRLINQLDVEIERLDGRIAELYELADPKGIVRSAPGVGPVLSAGIAGRLGDATRFANLAAIRSFSGIVPGVNQSGFTQTRPGITKQGDPGLRRDLYLAAERARHQDPQLAAKYYRLIMERRLHHFSAVCHLATTLVTRIAACMRSGQLYVVRDVDGTPVDSEEARAIIAKRYSIPPAARRRSRIPDAVSEPTR

SEQ ID NO: 466586 - protein, 389 aa, unidentified
MSQPFDASKSLATLEQDNTVIAVIEMSQSKWLVAAVVPGVKRQPLKKLQADEEALLKLLYRWRTEAGQTGREIKRVVVAYEAGRDGFWLARWLRTRGVEAYVIHPASIAVSREHRRAKTDRLDTELLMRAFLGWLRGEKRHCSMAAVPAAEEEDARRPNRERENLVTERTRIANQMKAILARFGIRSFKPTLRKAAEKLDGLRTAEGTPLLENTRAELSRHLARLRVVREQIRAIEQKRLHKLAAAPAEENGPHVMVRLIARVFGVGVETADMLVNEVFARHLRDRKAVARYAGLTGSPDESGKRRRERGLARAGNARVRRGMIQLAWCFIKFQKDSALAKWFDARTADGRGSTRKTMIVALARKLLIALWRLVTTGEVLEGVILRPAA

SEQ ID NO: 466587 - protein, 418 aa, unidentified
MADRITYVGLDVHKDSIVVAVAAGGLRGEVREYGRIANTPTALDRLLRKLGGDGMTLRFCYEAGPCGYGIQRRLSTGGHECVVVAPSLIPKRAGDRVKTDRRDAASLAKLHRAGELTAVWVPDARHEAMRDLVRARLDAVRSLRRARQQLSGFLLRHGCHYGRPAWTRLHRRWLAGLKFAQAVHHIVLEDYIAAVEAAEARRNRLTAQIEAMLSDWTLAPVVAALQTMRGMALVNAASLIAELGDLSRFANPRQLMAYLGLVPSEHSSGGSVKRGGITKAGNAAARRLLIEAAWSYRFPARLSRQLLLRQERQPRLIRDIAWKGQLRLCARYRKLARTGKPANIVTTAIARELSGFVWAIARQVAVTTDGSHKTNDPSQRRRQRTTQHRTSGQGRGRGRGQENPREHYLPNDHSDAGF

SEQ ID NO: 466588 - protein, 407 aa, unidentified
MRLFVGDDWAEDHHDIELMDSSGRRLARARLPEGVAGMARLHAMIGSQLGETDDDAEVVIGIETDRGPWVAALVAAGYTVLAVNPLQAARFRDRLGLSGAKSDAGDAHMLADMVRTHAHELRPVAGDSAQAEAIKVVARTHKTLIWERTRHTQRLRHALRDYFPAALTALQDLDAADTLELLAKAPTPAKAARLTLAQISAVLTRARRKNVAEKAAAIQAALRAEHLGQPEVVADAYAASIQALIAVITVLNAQIKALQGQVEAHFGRHPAAEIILSQPGLGVVCGARVLAEFGDDPHRYACAKARKNYAGTSPITRASGKKKVALARFIHNDRLIDALMTQAFAALKASPGARAYYDQQRARGAGHNAALRQLANRLVGILHGCLKTGTVYDETTAWSHHAENVAA

SEQ ID NO: 466589 - protein, 468 aa, unidentified
MPDRQQVEVDDHEQILGRVAAIDVAKASGMVCTRVPHATKAGKRVTRVWQVGSTTNQILELAEQLAGEGIQRVVVESTSDYWRPFVYLLEARGLVVWLVNAHDVKHLPGRPKTDKLDAVWLCKLNERGMLRPSFVPPAQIRRLRDYTRLRADLTGDRSRHKQRLEKLLEDALIKLSTVATDIFGVSGRAMIEALIAGQRDPKVLAELARGRLRVKHAALVEALTGRFGDHHAELARMLLDQIDTLSGQIDQLTARIEQTITAIPAAQPSASGPGGGPGAAVQAASQSARSAPGAVDPETGEILAAALPAVDRLDEVAGIGRHAAQVILAEVGLDMGQFPTPAHLVSWARLSPRTIQSGSTRRAGATGKGNPYLKSVLGEAATAAAKTDTFLGERYRRLVRRIGKRKALVAIARSILVIVWHLLADPTARFHDLGADYHARRIDRDRRTRNLVRQLEALGHKVTLQPAA

SEQ ID NO: 466590 - protein, 375 aa, unidentified
MDNHSEAFVAFDTSKLRNAVAIAESGRDGEVRFLGEIDNTPAATAKLVKKLSGKYRRLTFCYEAGPTGYGLYRQITKLEHECIVAAPSLIPKKPGDRVKTNRRDAVSLAKLLRAGELTAVWVPDRHHEAMRDLTRARDTAVTDLRRTRQRISAFLLRQGLHYADNKKTWTKAHLNWLMSQQLEYPEQRLVFEEMLLAERQGRERVERLEQAIRNAVPDWSLAKVVTGLMAMRGLDLTSSSTFMAEIGDLSRFQSPRELMGYLGLVPSEDSTGDTIKRGPITKTGNWRARRMLVECSWSYQHPARVGRAKQPKVEAAPPAVRSIAWKAQCRLSGRYRALVRRGKRKTVAVTAVARELAGFIWAVSREITTARAATK

SEQ ID NO: 466591 - protein, 346 aa, unidentified
MKYIGIDYHKQYFVATTMDEKGKVLSRNKVSTDRDSIRHYFNNAASEDRTKAVMEACYGWEYFYDEVDDLVDELIMAHPLKTRLIAEARIKTDSIDSETLAHLLRADLIPQAYAPGFETRDKKNILRYRSSLTAIRVKIKNTVHAVLARNHIEDKSFRELSDKFGKAGLAYLRAVTLRGNDTMILNHYLDLLEETETKIKSAETMIRAVCRQDEICKWLSSIPGIGDILAMTIRYEIDDIERFISPGKLCSYAGLVPSTYSSGGRTYQGRITKQGNKWLRWALVEAAQKAPLRDVWLGNFYTRISKKSKKTARVAVARKLLEIIYCLWKEQRPYYEKVGPVALCTV

SEQ ID NO: 466592 - protein, 372 aa, unidentified
MKEPTTSYIGLDIHKESIAIAIAIADAGRAAPRFIGTINPVPAELCKAMRRVCTKETTLIVYEAGPCGYGWVRYLRKQGWACDVIAPSRITRQPAEKRLKTDRRDALLLARESRAGNLTNIVVPDERDEAIRDLVRAREDVRIARHRVRLQMQAMMLRHGRHYQGKRNWTQAHDRHLSTIRFEHPAQELAFNEYRLTSKEACERVERITEALRVQCEDWRMNPVVKALMCLKGFDFVAAVTFVAEMGDLTRFAHPRALMAYLGVVPSEFSSGASRRQGGITKSGNKHARRILVEAAWNNRFKAQVSRELEVRQEGHPKIIRDISWKAQLRLSKRWRSLSMGRKLAQNKICVAIAREFAGFIWDVARHVKVKA

SEQ ID NO: 466593 - protein, 331 aa, unidentified
MNTLMMPAAAARFNHVIAFDVAKATLSLHILPTGESLCLENDGAAIRRLLKREQKRNRKQGLGPMLVICEATGGYEDAVLKAASELGLECHLAHGSSVRAYAKFRGRHAKSDPIDAFLIAEYGRDKPDLRLYKPPRPEESALRALMGRRAELKEMILAETSRLEHASLKAVRLSLESHLVALKEQLALIEKEIRALTRRDEAFTHKSRLMQTLAGIGAIAAQTLLAFLPELGQIPSPAAVALVGLAPYDRDSGKERGKRRIFAGRSQIRRCLYMAALAAIRSHAVFRDFAERLSRRGKPFKVAVTAVMRKLIVILSAMLRHNQPWKHAQTA

SEQ ID NO: 466594 - protein, 347 aa, unidentified
MANDHTNTDNVVKVLGIDLAKQSFHLYGVDAAGQRVINKTLSRKQLVAFVANLPPCLIGLEACGGAHHWARRFSEFGHTVRMMAPQFVKPYVKSNKNDAVDAEAICEAVQRPNMRFVPTKGIEQQDIQSLHRVRSQLVARRTAQANQVRGLLLEYGLVIPKGIHHVRKALPALLEDSENALSALFRELLNELYDEMGYLDQRIAALERKLAAISAQHEDCQRLMTIPGVGLLTATALLAAIGDISVFKSGRELAAWLGLVPRQHSTGGKPTLLGISKRGDAYLRTLLIHGGRSVSRVAHKHEDKHHRWISDIKRRRGENISNVAIANKNARIAWALLTKKENYRAAA

SEQ ID NO: 466595 - protein, 435 aa, unidentified
MRRCIGLDVHREFAEVAIWEQGVVRLAGRIETTPEALSLFAESLCDQDEVALEATCNTHAIARLLERHVGRVVVSNPMKTRAIAEAKVKTDKVDAQVLAQLLAAGFLPSVWLADEETQALRRQVARRAHIVRQRTRLKNRVQAILHRNLVPRCPAADLFGLKGRRWLAEQQLPADERQAVEALLRQLDFHAEELKLIDAALAQVALARAEVKRLMTIPGVDATVALSIVAAVGDFDRFRSPDKLVSYLGLNPRVRQSGSHPAVHGRITKQGRAHARGMLVEAAFAAARVPGPLRAFYERVRGRRGMQIAIVATARKLAVLCWQLISKGEDYAYQRPSLTAKKLRALELRAGTPSRRGRKGAAGAYSRREVRARENALAEQGELVYRHLVADWQAKRPAKAGAGAATGERPVATPETGPRRASRARKRPIGDKATR

SEQ ID NO: 466596 - protein, 383 aa, unidentified
MRIVCGLDVHKDSIYLCILSSTGEIIEKGFGVLTCQLQEMRDLMLTHHVEEAGMESTSVYWIPVWRVLEPHFKLKLINPYFIRQLPGHKSDVKDARWIAECMMKELVRGSFVPPERIQQLRQYDRRIYDLDDEIVRKLAKLDAVVQRCNIRLGNYVSNTDSKSYKSVIDRICEGVTDPKVLVEEIHGRIINRHGKDTIISSLTGCVTECDMDILRQLKAEIDMAGQHKQECMDKMQAICEREYSAALQNLQTIPGIKMRAATSLIAEIGTDMGHFQTANHLTSWSGLRPRNDQSNKTIKSRCITHGNRYLRRTLIQCAWGASRTQGCFFNRFSYHQTQVRRKNRMKVQVAIARKMLVCAWHILSRNVQYKDFDNRIGTSDENG

SEQ ID NO: 466597 - protein, 388 aa, unidentified
MSSHRKRVRPGPGPSSTLIIPDRAGNVIGVDPHKRTLTATIVDPRAGIVASEHFRVSGDGHRALEAWARQFGPIVRWGIEGASAFGRHTAMFLSARGYDVRDVCPNRTAHNDRARQRGKSDTLDSERIARETLAHPLLPRAFKRAGQDAGPNKQTELLATWWQARCSLVKRRQHLLPEADALLGKLPLGLVERLPATQKVRPRLAALTDRAQRRGFDPPATLRISLLGQYQAEIAKLDAEEKHIKQELAQLVKASGSTLDELCGLSIVSVAELLVEVGDPRRFTEGGFGRFNATAPLAASTAEGPGEPVRHRYNPGGNRRVNAALHRMAVTQLRCEPRAQAIYRNARANGHTKKEARRILKRNLSNVVYRRMIRDLQPQLTDQPLLAA

SEQ ID NO: 466598 - protein, 343 aa, unidentified
MKITRVGVDLAKKVFQVHGVDQAGRRVWQRQLKRSSWLSVLTEAVEPGCEIGMEACGGAHHWARELKSRGFEVKLISPQFVKPYLKSLKNDVNDAEAICEAMGRHHMRFVAVKTVEQQDIQAMHRVREGLMNHRKAKANQIRGLVAEYGLVAPRQMAPLRKAIPCWLEDAENGLRPAFRVLLHGIWQDLQSLDVRLKVLDKEIFALSENHADAKRLKQLRGIGPLIATAMVAQFGDGRHFKRGRQASASVGITPRHAGTGGKNYLFGITKKGNPYLRSILIHGARSVVSQAKHKDDRLSRWVTELARRKHPNVAAVALANKTVRIAWAMLRNGTDYDPELAVA

SEQ ID NO: 466599 - protein, 346 aa, unidentified
MKITTIGIDLAKEVFQIHGVDGRGKAVLRKQLKRKDMAKFFANLEPCLIGMEACGSAHHWARKLGEYGHTVKLMAPQFVKPYVKTNKNDVADAEAICEAVSRPNMRFVPVKNVEQQAMLSVHRAREGFVKARTAQGNQIRGLLSEFGIVIPKGIEAIAKRIPEILEDGENGLPGTMRRLLERLADNLKEMDRQEKELDAQIRKWHNENEASRKLAEIPGIGPITASALVASVGDASEFKNGRQMAAWLGLVPRQSSTGGKQVLLGISKRGDTYLRTLLIHGARSVIRFAEKKAEPDSWLRKLMARRNKNVAAVALANKNARIVWALLAKDRMFRPDYTPAAVAAGA

SEQ ID NO: 466600 - protein, 348 aa, unidentified
MRVYNQAHRFYCGVDLHARSLYTHVLDAAGQTVLDRNLAASPATFLDAVAPFRDGLVVGAECMFAWYWLADLCESERIPFVLGHALSMKMIHGGKAKNDRIDAAKFAGMLRGGLFPMAYVYPKAKRQTRDLLRRRSFFVRQRAQLIAHIVNTNSQFNLPPLSKKLTYAANRSDGIAERFEHPSTKLAISADLALIDGYDEQIAELERHLIKNAKVDDPVTFGLLRSVPGIGPILGLVLLYEIDTITRFPEVGNFLSYARLVRCSHESAGKVKGSGGKKIGNAHLKWAFSEAACLMLRSSPKAKAWMQRQEKKRGKRKALAVLEAKLGRAVYHLWKKQVPFDAKRFLTS

SEQ ID NO: 466601 - protein, 408 aa, unidentified
MSSTSNSTAIRVDLGAIFVSLELSQSKWLVTSLTPGGGEKMSKHLVKAGDIGDLLLRFAELRRKALVRTGQIFPIVVIQEAGLDGFWIHRVLLQEGIESHVVDPASVAISRRRRRAKTDRIDGEALVRTLLAYKRGEPRVCAMVRPPTPEEEDRRRIARERKVLVNERVAHVNRIKGLLYSHGVGAYEPLRRDRRERLDELRTGDGRPLPPHLQAQISRELDRLELVLAQIKDIERASTDMLTAEALAFPGAALLLGLKGIGAAAAAVLWGEGLCRHFDNRRQVAAYAGLAPTPWQSGQVDHEQGVSKSGNPRLRTTLIQIAWLWNRHQPDSALTLWFNRTRKKARVWRPCLCGGSKFGPFAPALVEISGCTPGLERPRPPFGRTPGVIMPPPVALAGGSGCRRRRSG

SEQ ID NO: 466602 - protein, 435 aa, unidentified
MEEVTDEPLYRDRVCGIDIGKAQMAATIRVPSEASPARRAAETRSFATTKRGVLALADWLRCWQVPAVVMEATGDYWKGPFYRLEAEGFECVLADARQVRHLPGRPKRDPADSRWLAACFERGAVTSCFVATEEFRLIRLHTRYRRDLTDERTREKNRAEKLLESAAIKLSSVLSDLHGVTGRDIMGHLIAGQRDPKALAQLARTRARRKIGELEAALDGAEFFTPAHAALLAAMLARIDRVSAEIARLTEVIEALLTPYEEQLAQAESMPGWGRRAAQDAVAETGVDMTRFPTGAHLASWAGRTPLDNQSGKRQGKSRSKKGNRYLAGLLGETAVAAGKTRTREGARYRKLARSRGKAKAQVALGNTQLKVYHKLLSNPGTRYEDLGPDYYERQASVRRQIAHHVGKLGALGFEVTLCRIPEPQPDQPPGTQVA

SEQ ID NO: 466603 - protein, 377 aa, unidentified
MQKPSTIDIDPVIYLAIELSASTWLVVSKIPTSEKTGLHRMEAGNSQALIALIADLRKKVSAKLGVESAVMSCFEAGRDGFWLHRLLSEHGVINHVVEPTSILVNRRARRAKTDRLDAQGLLRILTAHAKGDHDVCSVVHVPTIEEEDAKRQHREREHLVQERVRIENRIAALLTTQGVRKRPSLRSWQKDMEEMRTGDGHPIPPLLRAEANRLRRRLVMTLEMIREVEAEREQALQKQDDTASRTIQALRQLRGIGDNFAAVLTREVFYRSFENRRQIASYLGLTPTLFQSGGMDRDRRISRAGNARARKTLIQLAWLWLRYQPDSSLACWFRERVGNLQGRTRRIAIVAMARKLLIAIWRYATDGIVPEGAQISI

SEQ ID NO: 466604 - protein, 385 aa, unidentified
MVLIGVDPHKRTHTACAVDPATHRAVATLQIEASLAEYRRLLKWATGFPDRRWAVENARGLGRHLALWLVARGELVQDVPSTATARIRQLSRGNRRKNDVIDASAAASVAALSGDGNPVTAEDLTAVMVVLDERRNNLITHRTRLVNQLHALLRDLIPGGADRNLTATTATKLLAAVRPIGAAETARKQLCRDLIAEIKDADNGLKSVTALIASTVAQHGTTLTTVDGIGPVIAARLVGRTRRAGRFPTASAFASYAGVAPVEVASADHSRHRLPRGGDRQLNLSLHLVALTQIRMPNSIGRAYYDTKMAAGKNHNEAMRCLKRRLADKVWRVMIPDERRIGGAGPGGQSGATTRSSAVGPTPTADSSDQSLPRGDGLLRPCRSC

SEQ ID NO: 466605 - protein, 340 aa, unidentified
MSRKYFVGLDMAAETFVACVLQAPRQEVLAPQEFRNEPAGFDELLAWFAAQGIATAAAIFCMEATGVYGEALAYFLAAQDCWVAVHPPLEIKKAFYPVGHKNDAVDSRQIAEYAARFTDRLRRWQPKKAVLEQIKVLLTLREQYVRQHTAHGNALQALKRKVVRTPMAERLHQESRQQLSQHIATIEAEIRRLLEQDPDLHQNLLLLLSIPGVGLLLAAHTLVVLASLHDPGNPRAVAAFIGISPFEHTSGTSVYRRATSRHFGPAAMRKLLHLAALSLRTHQATFRRYFERKVAEGKPKSLVLNNIANKLVKIMCAVLRDQQPYIPNYRSVHPRVLKTP

SEQ ID NO: 466606 - protein, 319 aa, unidentified
MIISSAAGIDVGRDWLDVAIARSSDKGGAGRHFRIPNTPAAIARIPGRLRRAGVGGVVLEATGAPAACLVRTLAEAAMPLGVVDPRRIRALRLAEGGRAKTDKLDAGLIARFALIMTDAIRPAPSPAALELRALSTRRRQLVEMIAAEKTRLKQAFEPALMASFRLTIRLLGEERTRIEAMIEERTSATPEDRHKGELLRSIPGIGPAICATLMADLPELGARDNKAIASLAGVAPHIQQSGAQAGHAHIQGGRPCVRAALYMAALSAVRHNPGFRADYNAMRAARKPAKVALIAIARKIVVAANAIVKHQEPWTPNRS

SEQ ID NO: 466607 - protein, 416 aa, unidentified
MKKHNNSPKKSEPTSKRAKSRGPIQRDPKEVLAELVGKLREKLEPKVVAASAGEEHARGELRPNFDRLTVGVDLGDQWSHYCILGLEGETLAEGQLRTTPQDVTEFFEALNAARVVVEVGTHSAWVREVICSCGHEVLVANPRLMEGSKRRKRKNDRIDANKLARLGRVDPQSLHPMQHRSPEVRQDLVMLRARDALVAARTELINATRGLVKSMGARLPKCSSPSFAQKVEAAVPTEIQEALLPLVGLTAALSDCIQGYDEKIERLGREKYGHTALLRQVKGVGPITALAYVLTLENPGRFAKSRDVGPYLGLVPKQEDSGESQPQLGISKAGDTMVRRLLVGSAQYILGPFGPDTDLRRYGLRLCERGGKNAKKRAAVAVARKLAVLLHRLWVTGEVYEPLRHGGSGRMVHAAA

SEQ ID NO: 466608 - protein, 393 aa, unidentified
MSQTIKYAVGIDVSKDKLDVCFIELDTNQNQRIQGRRQFSNTAGGHKELDSWSRKHQKLNLPIHFLVEATGIYHEQVALYLQREQHPITVVLPSKARSYMKSIGLKTKNDKIDAWGLARMCAEQKHAQWQPMAEYFYKLRQLTRYHQRLQEMKTSFANMLHAFEHSGLVSKEVVKYPKQMLKEIQGQLEKLEQHLREYIYSDADVARKVQNITRIKGLGLLTVATVIAETNGFALFSNIRQLVKYCGYDVIENESGTRIGRTRISKQGNNRIRRILYLPALSAVNHNQKPFVNLFNRVYERTGIKMKGYVAVQKKLLVFIYALWVKDEVFQENYDQPQAGTSGNEEPRALFPLSDDKKLPTAQKKIVPPTGSTTLDGHRYNESPEALFPLVQT

SEQ ID NO: 466609 - protein, 344 aa, unidentified
MQIAVIGLDLAKNVFQVHGIDDAGQVVLKRKLRRSEVLPFFAGLDAALVGIEACHTAHYWGREIAALGHDVRLMPPQFVKPYVKSQKNDAADAEAIAEAVQRPTMRFVPIKSADQQAVLMLHRTRDLLIRQRSSLISAIRAHFAEFGIVIGQGIRNVERLLALLETAGDQRLPALAAEMLGILAAQLRYVAEQVKEVEVKLLAWHRADETSRRLQSVPGLGPITASAIVATVGDPKQFKSGRQFAAWLGLVPQQRSSGGKERLGGISKRGDGYIRRLLVHGARAIVGWRKRSATHKTPWIERLLARRPTNVATVAYANKLARIAWAIMMHGNRYNPALAFATIP

SEQ ID NO: 466610 - protein, 415 aa, unidentified
MEVLHPRCTGLDVHKDSVVACVRLAHDGEVTRHVETFKTTTRELQRLRDWIQSHGCSHVIMEATGVYWKPVWHVLDGHFELTLANALHVKAVPGRKTDINDATWLADLLAHGLVRASFVPESWIQHLRSLTRTRKQFVHEKTRHIQRLQKVLQDANIKLTSVLSDVMGKSGRAILEALIKGKTDPEELAGLASTRLRASRQEVIEALRGHFDPSHRFLLELHYRQVQAIEKAIEKIDAELGNAKEPFREAVELLTTIPGVSTTIAEVIVSELGTDMTRFPSVKHLLSWAGMCPRNDESAGKRRSTRVRMGAPWLKTQLVQAAWCATRAKRTYLRAQFLRLKSRRGPKKAVMAVAASILTAVYYMLREGAPYRDLGPDYFDRLDRNKLLKRLVRKLENLGYEVDLTQVATAQGTGG

SEQ ID NO: 466611 - protein, 343 aa, unidentified
MDYFAGLDVSLKETSICIVDDAGKIVREVRVASEPEALLQVLTNTIYRFKRVGLEAGPLSQWLYSVLAEAGLPVICVETRHMRAVLKAQINKTDRNDARGIAQMMRVGLYRAVHVKTLRSQKLRMLLTHRKLLQSKAIAIENDLRATLRNFGLKVGMIGTVKFETRIRELVEKLPDLAMLAEPLLIVRRVIREQLDILHRRLLAVVRDDDVCRRLMTIPGVGPVVALTFRVTVDVPARFRNSKAVGAVFGLTPAKYQSGENDRTGAISRCGDEMMRMMLYEAAQSMLMRSTKWSWLKAWAMKIARHRGMKKAIVALARRLAVIMHRMWVDGTQFRWTREAAAA

SEQ ID NO: 466612 - protein, 456 aa, unidentified
MVRRLVGIDLGIASSHTVRVLDETGAQVCRRRCEPSVASLARIEGAALRGAPQGTVLEVVVEPTGPAWLPVAVFFASRGHRVFRVSSAKSADLRRFLSKHAKSNSIDAETLARLPLFSPGGLLPLELADAEHAALDRRVRACDRLTRAASEHKTRIKDLVRQLLPLTPLTEDIGVADLAVLERWADPRTLLKIGPSKLKSLIVKASHNHHGAERAEQWRSAAAAAVELYGEHPAVAWQDLAAEVATEVRLLKAIQAELAVHSARREQAYRWADHGQLARSLPGIAKVGGPVIAAAIGRAERFPTGAQFKSYAGLAPRASETGNTDRKGQPMSKAGSSLLRTTFFRAADTARKQDPQLAKIYYTQMVERGANHVKALCVVAAHLAERAWAVMARGMPYVICDINGEAVTAQQAKTIIAEHWTVPPQVRARRRSTKTAKAGKAPQQVHAGQAKPNRRP

SEQ ID NO: 466613 - protein, 352 aa, unidentified
MIVLGADMHKSSHTLAAVVAMSGEMRGDKTINVGAAGFAAALDWGRSLGEQRTWALEDCRHVSGAFERFLLERGERVVRVTTKLMAQERRGARERGKSDLIDAIAVARAALREGLDRLPVAELAGVELDIRLLVDHRERLVHVRTKLYNDVLWHLHDLWPELVLPGSALLSQKWTTRIARRLARAEQTARVRIARDELRHMRELSHTINALEAEIADLVAQVAPQLLSEPGFGPLTAGKLIGEIAGARRFSTDAKLARAAGVAPIPASSGKTQRHRLDRGGNRQINTAIHRIAVTRARCHPETRDYIARKRAEGKTHREAIRCLKRHLARRIWHLLRASEPTRDPSSSTSLS

SEQ ID NO: 466614 - protein, 444 aa, unidentified
MFARLSGVPWLLIEICARSLGYGCVSGVFHGPLLATGTNGWRSVVAQRDIAWIGIDVGKTHHWACMVDAEGKKLSSIKVANDEAEIVALITNAGSQARQVVWAVDIIGAPSALLLALLARADHAVRYASGRVVAAMSAAYVGEGKTDAKDAYVIAETARLRGDLPVIDTGTDLVRKLAVLTGHRADLIADRVRMINRLRDLMTSVFPSLERAFDYSSHKGAVVLLTGYATPDGIRRIGQTRLTGWLRNRNVRGSADVAARAIAAAKAQTVVLPGQDLCASIITELATAILALDDRLKALDAQIEATFAEHPQAAIIQSMPGFGPFLGASLLVGANDLRAFPSAGHLAAAAGLVPVPNDSGRRTGNLHRPLRYSRPLRHVFYLSAQTSMMRAGPNRDYYLKKRSQGATHSQAVISLARRRIDVLWALLRENRMWTAAPPPLAQAA

SEQ ID NO: 466615 - protein, 429 aa, unidentified
MRTESTPGARGPVFCGVDTHADSHWLYVLDWRGRKVLSRQFPADAAGYEALAGAIAAAGEPACVAMEGTSSYGAGLTRHLASLGMPVREALSPARTQRRRPGQGKCDEADAERAARAAMSGSKLGTPKSQDGWVDGVRCMLAARSGAVKARTSAINTARSLLTTAPEGLRSRFRGVAGPRLMEELPSVRAEGALGAALGALADLWAAARDAALDMERAIEASLEENCPALLAMYGCGPVSAAKLAVAAGDNPGRLRSEASFAAICGACPIPASSGKTVRHRLNRGGDRQANSALHEIARQRVMRDPETAEYAERARARGKSDREVMRCLKRYVAREAYRALMHPHEIRRPEDASELVAARRAAKVSQVRAASILGTSEKYISMLERGQRELKPIRRAYEAWVEAGLPLDWDRQAFEAERKMDSKKHLAK

SEQ ID NO: 466616 - protein, 392 aa, unidentified
MQFIYERCCGLDVHQKTITACIITPKGKVVRTFGTMTGEILELVEWIKEHQCTHVAMESTGVYWKPIYNLLELSEIEAIVVNAQHIKAVPGRKTDVKDAEWIADLLRHGLLKGSYIPSREQRELRELVRYRKSLIEERSREVNRLQKILEGCNIKLSSVVSDITGVSARSMIEAIISNISDPKLLSKLAKGRLQSKKENLEQALHGLVGPHQRKMLAAQLDHIDFLDGKIKELDQEVEDRQRPFEEELELLDTIPGVGRRSAEVILAEIGTDMDRFPSAAHLASWAGMSPGSNESAGKRKSGKTTKGNKHLRSTLVQCARAAARSKQTYLSAQYHRIAARRGSNRAATAVGHSILVIAYHLLKKRQPYHDLGANYFDKRKSAAVLNSAVKRI

SEQ ID NO: 466617 - protein, 352 aa, unidentified
MFYLGLDYSKRFSVATVVDEKGRIIKEGKLENRRVEYEAFFRGLKKVKAVMEAGRNYHVGAELLEGLVGEIKLAHPLKVRAIAEAKIKTDSIDSLTLAQLLRGNLIPEAYFRDREQREKQLVLRLRSFFVRQRTGIRNRIHCLIDGQREEVREGAREFSDLFGKRSKAWLRDLELPGAASDALEDLLDQEERCSEKSKNSDTAVQGFYYADGDCKRIDTIPGFGVFLSVLAKVEIGTIDRFKSPSRLCSYAGVVPSTYGSGGKTRHGKITKTGNRHLRWCLVEAAIHSLKDKGELKAFYLRMRRRKGTKVARVATARKLCCILYRVLSGKSIYKIYRTKTQSRLGLVSGAST

SEQ ID NO: 466618 - protein, 368 aa, unidentified
MENVTTYVGIDAHKKDLFIAVLRGDETTPVTWTTPNEPRALRRLTKKLEREALGPVRVFYEAGPCGYALQRQVTTPKVSCDVVAPALIPRKPGERVKTNRRDARKLVELGRAGLLTVVRPPTPEDEAVRDLSRARDDAREDLQRCRHRLGKLLLRRGLHYPKRNWTRAHREWLESLQWDHAAERVVVEDYLLAIDHTESRLNELDAQLVEISQSEPYRQPVAWLRCFRGIDTLTAMLILAELHDFRRFHSPRALMAYLGLVPGENSSGEKHRRGRITKTGNALVRRLLVEAAWHYQHRPSIGAVLLRRRRGQPGHIIAIADKAQQRLCRRFRKLAARQKPRAKVVVAVARELAGFLWAALQTTPAKVG

SEQ ID NO: 466619 - protein, 363 aa, unidentified
MDVHKEKIVVVGLPEEGNHPLVREEFGGNDLLRLVKRLQRLAKTYGIEACYEAGPCGYGLARALRQAGMECRVAAPSLIPRRPGDRIKTDGRDARELALALRAHTLSFVRIPTPEEEEVRGLVRCREDIAKEVRRIKQVISHWLLLHGHRVPKGVKSWTPAHRRWMRDLEVSSLDRTVLDHYLDVAHLLGERLKLIEDQVVALADTEGFRNRVARLHAFKGFSKLSAMRVIAEVMEFARFPKATSFMKFTGLVPSEHSSSDRIRRGKITKAGNSHLRHVLVEAVQRGRSAARPGRSLSPRLAAICGPSRQVALSALTRLHHTFWRLTRRGVSAGKVKVALARELAGFVWAMMTIPETPDATAA

SEQ ID NO: 466620 - protein, 323 aa, unidentified
MNKGIKYFGIDISHLVFDVTDSEGNYYQFKNNPSGFKKFEKFLDVDSHCVMEATGYYHYQLAYYLLEFGIKVSVENPLSVKRFIQMKLSKIKTDKSDSKLICEYAKQVELKLWQGNSKHQTACLQMTRLLSVYTKQSTMLKNKLHGEAVLGNPSKVVVSSLRRSLKQVQKEIKTLEDKLLILVKQVHQDVLTRIKSIPGIGNKTAIMLVVLTDGFDRFKSGSELCSYAGLTPVIRQSGSSIQGRSRISKIGNQKLRNLLFMCSFNACKYNKACREIYERIVAKGKSKKLALIAVCNKLLKQAFAIAKSGLIYDDGHRSTLVKN

SEQ ID NO: 466621 - protein, 372 aa, unidentified
MRHHTEAFIGIDTSKSRNAVAIAEGVRGGEVRFLGEFPATEAAMRKLIAKLAAKYDKLTFCYEAGPTGYGLHRLIKSLGHECIVVAPSLIPKKPGERVKTNRRDALSLAKLLRAGELTAVWVPNERHEAMRDLSRARLAAKKDLQGKRQQISSLMLRLGRCYPGKTTWGPAHMKWLMSQKLEHREQRMALEELLQGIRQEGERLERLEEAIREAVPEWSLAEVVTALQAMRGIDLIAAVAILAEIGDLSRFQNPRELMAYLGLVPSESSTGDTVKRGGITKAGNGRARRILVEAAWSYRYPARVGRQKQPKVAAAPRRVREIAWKAQTRLCGRFRVLLRKGKLPTIVATAIARELSAFIWAINREIVQTRQT

SEQ ID NO: 466622 - protein, 362 aa, unidentified
MTEITRAPVARVGVDLSKRLYQIHAVDAQGHTVLAKALPVDRFFAWCAELPQGCIVAMEACGGAHHVARRLRLLGLDARLIAGHFVTPYRMTGKSGKNDANDAAAICEAAGRPHMRFVPVKTTGQQGQLAVHRLREGFKEERTALINRIRGLLTEFGLVFAQGPDALRLVLAGVIEDASNEIPGVARLALQRAHLHWIDIDLQIAWCDERIAAHVRSDARAAKAATLLGIGPTTASALVASVGEFGQFANARQFGAWLGLVPSQNSTGGKARLGGISKRGDDYLRTLLIQGAKSAVMSAPKRSDRISQWLVQLKERVGWQKAVVALANKNARILWAVLTRDGVFDPDHVPQIPAARQKPQPG

SEQ ID NO: 466623 - protein, 308 aa, unidentified
MTSLALERTDVIVGVDTHKDEHVAFAIDGVGGRLAEPLQIPATNDGYAELLTWATALGTVRGFGVEGCGSYGIGLARFLRNGHHPIEVSRPPRKGERRMSGKSDAIDAEHAARAVLAGEATVIPKLADGQVEALRLLKVARDTAVKAQSTAMIALKATLVTAHHDVREQLEPLSDFKLITACADLDNDGAVGDPTVAMRHVLRSLARRWLELHQEIKTHTRQLKQITAAAAPQLIDAYGIGSDIAAEMLITAGDNTDRVRSEAAFAKLCGACPLPAGSGKTNGRHRLNRGGNRQANAALYRAVIVRMR

SEQ ID NO: 466624 - protein, 343 aa, unidentified
MEAKRYIGIDLHRNCFTACLRLENGREYLKEWKLEDLEKFTAKLRPTDQVAVEVTGNTRLFHDAVAPHVERVVAVNASQFKVITHSVKKTDPNDARNLALYLAKDLLPEVRMKDKTQAQIASLTQTRDTMVKLRTALKNKVNNLCSAHGVNLNRESLASEKGLKAVLEMRFDLLVNLELKIIVEQIRSLNKSIAELEETIGQEGQKLEGHKNLTSIKGIGGLSGGILLSIIGDIKDFADEGKLAAYFGIVPRVSNSNETEHSGRITKRGTKLGRTTLIQCALIAQRYSPYLKTYYEKMKSRRGTGKAIVALARKFLGIIYRTLKNKWVFADFPNFVLAEETTA

SEQ ID NO: 466625 - protein, 343 aa, unidentified
MQTITTIGLDIAKSVFQVHGIDAEGNVILRRQLKRRYVVAFFQKLPPCLVGIEACASSHHWSRELQTLGHTVRLMPPAYVKPYVKRHKNDAIDAEAICEAVTRPNMRFVATKTREQQSCLTLHRTRHLCIRQQTSVINAIRAHLAEFGIVAPVGRNGVEELLTVVADASDKRLLDVARACIVALGAQLRTLKAQILQFDRLIMAWHRSNQASRRLDDIPGVGPVLATALVATVADPIAFRSGRNFSAWIGIVPRQHSSGGKDRLGSISKRGDRYLRGLFVAGALAVIRYAKIHGTTHRPWLTALLARRPTKVAAIALANKIARMAWAMMAKGECYKEPVALAA

SEQ ID NO: 466626 - protein, 461 aa, unidentified
MVHVLPPQGQADGRTLEREFRTFPRDLRNLRGWLKNCGVNEAVMESTGQYWRAVWNILEGAVPKLVLVHPAHVKALAGRKTDRIDACRLARYLENGDLDGSFVPPREVREWRDWTRWRVHLTQEVNRVKNRMGQMCEAGNIKVSSVASDLFGASGRRMLQAMVEGKGDAGWMADYAYGRLRTKRKELAPALDGTFTEHQRWMLGQELQHLQCLESQIGEAEKEITLRMQPYAEWQRRLMTIPGVDRMVGWTILAEWGPDMGVFPDADHAASWGGLCPGNRQSGGKRLSGRTRKANPYLRRALTEAAWAASHTQNSYLAALYYRLRGRLGHNQAIFAVAHQMLRVAYTMLRRGEGYGELGGDYYDRKNKPRVVHRLVERLSRRGYPVQLQVSTASAGTAAENRPEPPTTTRETEASLSAEPPREVKPRRGRPCKCVQRGVQCTHGRNKSEPEKTQPIENART

SEQ ID NO: 466627 - protein, 289 aa, unidentified
MEITTIGLDLAKNFFQVHGVDDAGVAVLRRTLRRSQVIPFFTKLSPCLVGMEACGTSHYWAREIARLGHEVKLMPPAYVKPYVKRGKTDANDAEAICEAVSRPTMRFVAVKSPEQQAALSMHRARDLMVQRTQMINMIRGLSSEFGVEAPRGLHQALALAHRLIDGEPMPIPALAIEVLASLSTQLLACHDRILDFERAINKWHRSNDVSRRLASIPGIGPIGASALAASVTDPHQFKSGRQFAAWLGLTPLQNSSGGKERLGRISKMGDQYLRKLLIIGMTALILAGR

SEQ ID NO: 466628 - protein, 416 aa, unidentified
MKKNSKSPMKKEQKAKRAKAQRPAQREPKEVLAELVEKLRGKLEVKATSASPAEAGPRAELGPNLDRLTVGVDLGDQWSHYCILGLQGETLSEGQLQTREAEVAEFFQALPPARVVMEVGTHSPWMQEIISGEGHEVVVANPRLMEGSKRRKRKNDRIDAKKLARLGRVDPQSLHPIRHRSREVRQDLVVLRAREALVAARTELINATRGLVKSMGTRLPKCSSPSFGQKVKDAIPEKVREALLPLVQLADALSDCIQSYDQKIEELGSEKYGHTKLLRQVKGVGPITALAYVLTLENPEHFAKSRDVGPYLGLVPKQEDSGESQPQLGISKAGDTMVRKLLVGSAHYILGPFGPDSDLRSYGLRLCERGGKNAKKRAAVAVARKLAVLLHRLWMSGEVYEPLGYASSRAIVQQAA

SEQ ID NO: 466629 - protein, 416 aa, unidentified
MSVTDPTEPVERPRPTGGVDWAKDDHAVAVVAPNGEQILRFSVTHDAAGLRTMIKRLLAADVAEVGIERPDGPVVDALRQAGLTVYVIPPGQLKNLRSRYGSAGNKDDRFDAYVLADVVRTDRRRLRPLLIDQPVTTALRQTVRARRDLVAHRVAVANQLRAHLQICFPGAVGLFRDIDSEITLRFLERFPTPERAAWLSVKRLTAWLASIGYCGRTPPETLYQRLTTAPAAATGADADTAAAVTAAFVAVLRTLTTQIEALAARISEQLDLHPDQAIFTSLPRSGRVRAARLLAEIGDARGRFPTADSLACLAGVAPSTRQSGKVEVVSFRWGADRQLRDAICDFAGDSRHANPWAADLYQRARNRGHDHPHAVRVLARAWVDIIWACWTSHSPYDPDRHGALQRILNQDQPAAA

SEQ ID NO: 466630 - protein, 465 aa, unidentified
MVEQHKASKRKPRVATPTALPVVRPQVAGIDIGSAEHWVCGPARADGAPNVRGFGTTTDELHALADWLVAQHVESVAMESTSVYWIPIYELLESRGMEVVLVNARQLHHVPGRKTDVSDCQWLQLLHSCGLLRGSFRPTEAIVRLRALQRQVANLVAERTRCVQWMQKALDQMNVQVHRAVADLTGTTGMAMVRAIVAGERDPTTLAAHRDRRCRKSVAEIARYLTGTWREEHLFTLASALRLYDTFGDEIAAFETRVLAELAALEPPERRAEPVPSHPNTTKEQAIRGRGEQPVRTTLWRFAGVDLTRIDGISIGVAKVVLTEVGPNLAAFPSEDDFVSWLRLCPRTPISGGKPLKKRRNGLGANRIAGALRMAATTVQRSKTALGASFRRIARHKGAAVAVFATARHLAKLIYRMLRFGQDYVDVGEQAYERRFQLRRLASLTEAARSLGFTLVERTPEQASG

SEQ ID NO: 466631 - protein, 353 aa, unidentified
MKKLFIGIDFAKEKFDAAIIEACGLKEFGNREYGTFTNDKKGYRQFFKWVKTNADKSVENEWLFCGEDTGSCSLGLSKWLYGKGLDIWIENAYSIKHSSGIQRVKSDKADSSMIAEYAWRHQDKAVLFEPLSESLSQLREVFLYRHKLVQQHIAMDVRKQDKEAAEPSKAISFIKRKSKHLMSEIDNAIKECDLMIDRIIESDAELKENYAIIISIKGVARQNGACLLIFTNNFRRFDLDARKIACYYGVAPFGKDSGTSIHSPAKTSHFANKLIKSLLGQAAHCAKKFNPEIREYYNRLIGRGKKPQVALNNVKNKLIRIIVALVRKKVYYDPKTYMFYNAKFTDVKQMLNS

SEQ ID NO: 466632 - protein, 387 aa, unidentified
MYFFGIDISKYKHDCFIATETGEVINEHFSFENNRKGFDELLLLLNSLNPNYEKRIGFEATGNYSMNLKLFLEKNDLSFMEFNPYTIKQFIKAQTLRRTKTDKADAFNIATKLMSVPYKPYPKQFYHIFSLKSLTGLRNNLVRQRSFYMIQLTNILDMIFPEFKPFFKGKFTATSLYILSKYKIFHRIANMKDYDSLRKVSRGHFSYMQFIKLKELAKNSIGVSNSIFETELDCILDCYNNLVRNIDEIELNIETIIKEINPPTLTIKGIGAISTAVIISEFGDITNFKSADSMLAFSGIEPSVIESGILSSSGKMVKHGSGHLRYTLMNVAGYVVMHEPTFAKYYHKKRSESKCHRVALTHVVKKLLRVIYCLETKNIPFDSSKLI

SEQ ID NO: 466633 - protein, 424 aa, unidentified
MNHPLPPQTEMAAWVGLDWADQQHVVSLQAADSPRIESQLLRQKPEALQEWINSLRERFSGRPVAVALEQSRGPLLYALMSTDFLILYPINPKTLAKYRESLYPSGAKDDPRDADLLRELIQRFASRFRAWKPEDPATRQLQLLVQHRRKLCHEKTRLTNQLTIYLKSYFPQALEWVGELDSYQACDFLQRWPTLSALQKATPGRIRKFYRLHHCHSTSLIDSRLAQIRQARPLTEDPAVVEAFSLMVKSRVGPLRPLLESLAELDRRLQKLFDQHPDHDIFASFPAAGPVLGPRLLSALGSDRTRFTQASELQNFSGVAPVTKQSGRTRIVSMRWACPRFLRQTFVEYAAASCGKSEWARTFYALKAQQRMKHHAILRELAFKWIRIILRCWQNRTPYVEAQYLAQLQKRKFQGRGAVLRMTG

SEQ ID NO: 466634 - protein, 377 aa, unidentified
MSKLRFVGLDVHAETIAVAVAEEAGEVRSLGIIPNRLESIRKMIGKLEPIGTLKCCYEAGPTGYVLYWQLTQLGVACEVIAPSLIPTKAGDRVKTDRRDAEKLARCYRAGELTPVWVPDAAHEALRDLVRAREAAKKDQLRHRHRLGKFLLRHGKRPVDAGKAWTQKYLDWIRIHVHFEQPALEATLKHYREEVDHVAERIAKLEQAIDEAVKQAPAEIRVVIEALQALRGVAQTTAATVVAELGCLSRFASPSQLMGYSGLVSSEHTSGNRVQRGAITKSGNAHLRRVLVEAAWTYRHRPNVQGRVLRRQKSLALSDEAKQIAWKAQQRLYKRFTALTARGKESNVAAIAVARELLGFMWAIAVHTESQSKPAKAA

SEQ ID NO: 466635 - protein, 320 aa, unidentified
MQSVCGIDVSKDRLDIMVLPEQQCFSVRNDAAGWAELVERLRGFSISAIGLEASGGYERGAMRALLAAGMPARQINPFKLRQFARASGVLAKNDPLDARMIASFVAIMPTQPAQPRAPAIDRLTEILAVRRQISAEKVAAENASRLLEDVMLQRLSRRRIARLEADIDMLDRHLTEIVGTDAALSYRYRLLTSMPGVGLVLACTLIALLPELGRMSRKQVAALVGVAPYAFESGKFKGRRCIWGGRAPVRNVLYMAAMSASNWNPVFKAFHDRLKAAGKLPKVAIVAIMRKMITALNAMVRDDVVWADHLSGRHSVPTAR

SEQ ID NO: 466636 - protein, 391 aa, unidentified
MIYIGIDVAKDKHDCFITNSDSEVLFKAFTISNNLDGFNDLYQKIESVMDDVTKVKVGLEATGHYSYNLLGYLIDKGLPTYVINPLHTNLYRKSLSLRQTKTDKVDARTIASMLMSDVNLKSYSDTSYHNEELKSLTRYRFDKVKERAKLKTSVSRLVCILFPELEKLVPTLHMASVYALLSEFPSAKHVATAHLTRLTNLLSESSKGRYGKDTAVTFRDSARASIGSNMPAKSLELKHTIKLIQELDSEIDEIENEIKIIMDEINSPILSIPGINYRMGAMIIAEIGDFNRFDSPDKILAYAGFSPSTYQSGQLDGAYAHMEKRGSRYLRYALYNATKYVCRWDPTFAAYLAKKRAEGKHYNVAISHAVKKLVRVIYHLEKTKQQYIKAA

SEQ ID NO: 466637 - protein, 312 aa, unidentified
MIVDTETGKRKSKVIANDASAINTFLAWLDKQGRAPEEVKVVLEPTGVYHERFCYQLYEAGIRVSVVNAYRVREFARGLGILTKNDTVDAYVLARFGHLGDPACWQPPAEEVRVLNALLQRRDGLAQDVLKERNRLEAQQSSLEVRPVLSSITQMLHSLEQELAMIEKLISEHIDRHPGLKEDMSLLSSIKSVGPQVGGHMLTILRTHDFANAGQVAAYLGVVPIERRSGTSVRGASRLSKAGPPEIRAKLYMAALTAIRFNPHVKALYERLVSKGKAKMLALGAAMRKLVHLCYGVLHTRQRYDENYASGS

SEQ ID NO: 466638 - protein, 348 aa, unidentified
MSQSNQYVGLDVSLKETSICVIDDADKIVWRGRADSTPEAIASAVKQHAPHAVRIGLESGQLSSWLFHGLKKVGLPVICVDARHAKAALSLKVNKTDANDALGLAQIMRVGWYREVTVKGLDCQAVRALLVARAQIVSQITTLKNCVRGILKTFGRVLPKGLRSQFPARVRAAIDGHPVLVAIIEPTLQVLEATRAQLLVYDRAVIQRARNDDTARQLMSAPGVGTVVALAYMTGVEDPARFKRSSSVAAYFGMTPRRYQSGEVDHAGRISKCGDGMVRGLLFEAAKVLLSRSARPSALKTWGEALGKRIGAKKATMAVARKLAVILHRMWTTGTTFQWNTEAASPAA

SEQ ID NO: 466639 - protein, 345 aa, unidentified
MPIVGGLDIHRKQITFDYLDTATGEVGRGQIAPADRAHLRAWLARFAGRDDAAFALEGCTGWRYVAEELAAAGVTAHVAEPADTAFARGRKRHAKTDRTGSRHLRVLLEQGRLPECWIPPAQILECRALLEAYHDLRREHTAWIERIHAVFFHQGAPRLGEGALRTDRGLAALREAAAVHLSPAGQLQVATALDMLAAIEARMDTLRQQLLHAARHLAGARALQARLYGVGPLAGLAMTCWPGGAGRFSSARKAVRFAGLDVTVYSSDGKRSPGHLSRQGPEILRWVAYEAGKTHGRASAPGHDYYAAVKDRQDGKIAALSQARRLIRQACHILAELGDDALTAA

SEQ ID NO: 466640 - protein, 423 aa, unidentified
MMKLKYSICCGLDVHKNVIVATIVTTNSQGISEYLQKSFSTINSDIQKFHDWLIENNCYHVCMESTGKYWIPIFNYLENDIEVCLTHPKYVKAIKGKKTDKKDSKWIADLYKFDLVRCSFIPPKDFRQLRELARYRFKLVCMKSSEKNRIQNCMTVSNIGIASILSAPFGKPATEIMSYLLEHTSESMDEKAVRKLIKKGAKAKSDEIIEAIKGYNIETDQAKKLELARAHLDYLDDMITQTEVELYVRIKPYYEFVEFVSSMPGMTELSSTIILAEIGINMDIFDDVKHLCSWCGLSPANNESAGKKKSVRIAKAGAYLKPMMVQCALAAIKNKKEPYFAIKYGRIKKRRGHKKAIIAIARMMMVCIYHMVSEKKPFSPTDYEELMDPQNHVERVVLNENNVFAYLESLGYDSSQLVKRNDY

SEQ ID NO: 466641 - protein, 363 aa, unidentified
MTPRQNAMFSWGIVLAGRKYWVGLDTGVAETAVCLIDEFGEILFEGKRETHAGQIKDILRPFGVEAVQRITIEAGVGTHMVRELQAQGFPVYVAEVRRASKFLAIRRQKTDSNDARGLAELGRVGRTIGTEVFVKPLDCQNLRSLLNVRKNLIQQRMKIDALVQSIVRLHGGKLKTSSGVGRLASGIEDQLEILRGDGLDVDADVRPLISIAENLRSHIAAMDKRLRAAALAHPVCSNLMTVPGVGPITALSFYSAIGDPWRFQRTRDVGPYFGLTPSIHQSGVLARVGRISRFGSKLTRTHLVSAATVLLCSTKAESALQAWGLALRKKVGLSKARVAVARKLAVVMLHMWKSGSSFDPART

SEQ ID NO: 466642 - protein, 408 aa, unidentified
MNAVGIDVSKGKSMVAALRPMGEVALLPQEFLHTEIGLEQMAYAIIALGEDTRVVMEATGRYHEPVAAALYEYGIYVCVLNPLFIKQSGGGSIRKVKTDKADAMKIAKYGLDNWVDLREYTPMDTVRQQLKLCSRQYNLYMKTVVSLQNNLISLADKTFPGVNELFSSPERADGHQKWVDFVMTFWHCDCVCRVSEKAFTERYQKWCKRKGYHFSAEKALDVYAGSCGHFTTLPKNDNTKLLITTAAQQLLAGKMTLAALRAEMTRLAKQLPEYDTVRAMYGVGETTAAQLMAEIGDVRRFPRRSSIVGFAGVDPAVDQSGKHEAKSTPTTKRGSPHLRKTLYQIVCTYLKRSPVDEPVYQFLDKKRSEGKPYFVYMTAAQNKFLRIYYARVKECLEAFDARQSLAQS

SEQ ID NO: 466643 - protein, 454 aa, unidentified
MGKPRVVPGEDHEVVYERVAAVDVAKASGVVCLRAPDPARPGRFASRIWDEVPAMRAAIEAVGRELLAHRVQMVTLESTSDYWRIWYYVLESLGLAVQLVSPSQAKNLKGRPKTDRLDAMWLARLTQWGMLRPSFVPPAAIRRVRDFTRARTDLVAERTRCLQRVEKLLEDAMIKVTSVARDGMKAKSVVAMVAALAEGERDPRALADLARGPLRGKRDALAAALDGMFDSHHGVIARALLDQVAFLDQQITVMEDQATAALAEVPQSWGVDPDGQAGPRCGITPGSPVLAAARRLAEIPGISVWLAIVIIAEIGLNMALFPTPAHLVSWMGLCRSAAQSGTRAGKGKPKKGNSYARAAAGQAAIGAARTATFLGERYRRIARRRGKAIAQAAVARSIMVIVWHLLNDPAARYHDLGPDWHASRINRDKKIRNHIQGLKALGVTVAITENEQAA

SEQ ID NO: 466644 - protein, 344 aa, unidentified
MPYNFYLGIDVSKASLSVVLMNSDSKVLWSSKKIANQPSGFKQMVEHASKIASKHADGDDYSIAAGMESTGVYGEQLSYYLADNNMSGRISLYVLNPFAVKSYRKATMHLNKNDAADARLIASYLISMITTGQITPWQAPSLAERLLRELTRRRAELVTLREAEYNRLEKFRAGGSHPHPVIESVQELIAHLEQQIREIDEAIEKHIDDAGLRDTAELLRSIDGIGKVSSASFIGEAGDISRYRSVKQLVSRLGIAPCENQSGTSVHKKPVMSRMGSAVLRHALYMAALVATRKNKVISAFYNRLLARGKCKKLAVIASMRKLLHIIWGVLTHGVKFDPEYAPA

SEQ ID NO: 466645 - protein, 396 aa, unidentified
MFIVGIDIAKHTHQASVMNTDGSLVGKSIKIPNTSVGFDAFISKLKEIDRDISHFEFGMEATGHYWLNIYTHLADLGCIVHVINPVQSDALRGLYIRQTKNDIKDSAIIADVIRIGRYCETSVSDDKMLALRDLTRQRFYLVDMVSDLKRKSLTLIDRIFPEYPTLFSDTFGTTSMELLANCNTPEDILSIETDKLVEMLSTASKGRFKQDKAEKIKETARNSFGALLCTDSASFMLKQFVEQIRFLENQIDELDEMISESLAELNSPITTITGIGDTLGAAILSEIGDIERFESADKLAAFAGIDPSVSQSGNFLGTRNKMSKRGSPYLRRAIWLAATAAILHDPAIKAFYDRKKAQGKHHYVCVGYICRKLVNIIFSVLKSGQPYQPVFPKNLD

SEQ ID NO: 466646 - protein, 421 aa, unidentified
MSNSTLSKKLASVKPGTLFVGVDLALDRNVAVVLSERAEQLGRFGFPNERDGYDYFYRRLEVIQEQQQAPALLVGMEPTNYFWKLLAADIEQRRPEYSYRLVNPYTVKKNREGDQLDRSKDDNRDAFAIGNLIRTGKYTETRLLHGAYAELRQYVTLYMRLQRDVQRQRSLIYNVAGQLFPELPQVFKDLTSLTALAMLRSHAAAAAVQEITQEAFIAGVRADFRGRRMQVAKLRRVHILAECSVGLTDGVEALQMALRLHIDALVTLQQQLETIRKALVDTFLALPESKHLLSMHGLGIITAATILSEIGDPNHYTTACQLVKLAGTQPVPNTSGRKTRSQTPMSRKGRPRLRTALFFAVMRLVRMDEAFAREYQRLQRREKNPLTKMQALGVLMNKLLRILWALMRNQTLYSPDFQGAA

SEQ ID NO: 466647 - protein, 336 aa, unidentified
MNEATWFLGIDVAKRKLDIALLVTDKIKSKVFDNNTSGHAALTRWLIERGAIQSHTHICLEATGPYSEALAIALVDAGWRVSVVNPARIKGFAQGELARNKTDRADASMLARFCAAMRPGFWTPPSSEWRELRGWVDRLQALKDMHQQESNRLEAHLASGQAALVEAVQTHLDWLTKHIEQLERDIDDHIDRHPELKRDAELLHSIPGIGNTTIAKVLAYAGDVRRFASAKALAAFVGVTPRQRLSGTSVKGRSMMSRTGHADLRRALYMPGLVARWHNPLLKVFGDRLSAAGLAPKAVVGAVMRKLAHLIYGVIKSGQPFDPKFSTARLDFQDGI

SEQ ID NO: 466648 - protein, 313 aa, unidentified
MSESLAQTIGIDISKASLDCHVHPAGAEHRFINTAKGHKALIAWLRQWPVERIAYEATATYHRALEAALADWPCVKLNPERARRFAQATGTLAKTDRIDAKVLARMAATLQPPAKPAPSPQQVQMAELINARDGLVRDRTACLNREKNLTIALLKRQCRQRIEQIERHIEALDTEITSLIAADAALARRHQILTSIAGVGTLTANQLIATMPELGTLDGKQAAALAGLAPAARQSGQWKGKSSIRGGRANVRQALYMPALVAARFNPDLKAKYRQLVAAGKPAKVAITAVMRKLLVTANALLKADRFWQQSLA

SEQ ID NO: 466649 - protein, 398 aa, unidentified
MTESSDCESVQVFIGVDVGKDTHHAVAINRSGKRLFDKALPNDENKLRSLISDLKQHGQILLVVDQPATIGALPVAVARSEGVLVGYLPGLAMRRIADLHAGEAKTDARNAAIIAEAARTLPHALRTLKLADEQIAELSMLCGFDDDLAAQTTQASNRIRGLLTQIHPAPERVLGPRLEHPAVLDLLQRYPSPEKLASLGEKKLAAQLCKLAPRLGKRLAADIAQALAEQTVVVPGTNAAAVVLPRLALQLITLRKQRDEVALEVEQRVLAHPLYPVLTSMPGVGVRTAARLLTEVACRAFASAAHLAAYAGLAPVTRRSGSSIRGEHPSRRGNKALKRALFLSAFTALRDPLSRAYYTRKMSQGKRHNQALIALARRRCDVLFAMMRDGTFYTPQGS

SEQ ID NO: 466650 - protein, 344 aa, unidentified
MKRYLGVDLHRNCFTVYTRQEDGRGESEEWSIHSLKAFVKTVKGNDEVAVEATGNVRLFCEALKDRGCRVVVVNPHQFQVISRSVKKTDEHDAKVLAEFLSKGMLPEVRVKDEVQARVASLAQTRDKLVKLRTTLKNKVNNLLAARGILIRKESLSSEKGLEQVLASPVSELERMELGILVDEIRHLNGSIAKVEALLREQGPKLPGWENLMSIKGIGATGASILLSTIGNVADFADEGKLAAYFGIVPRVSNSNETERSGRITKRGCKIGRTVLVQCALIAARYSPYLQTFYRRVAATRGTGKAIIALARKFLSVIYKTLKNNWIFEDFPQFVLRTADGQTGQ

SEQ ID NO: 466651 - protein, 361 aa, unidentified
MSGTMTWVGLDVHARSTYAAALDLATGELSRMRFGAGVEAPVAWLRDLPGPVRACYEAGPTGFGLYRAAVEAGIEMQVVAPGKTPRAASDRVKTDRKDAELLARCLLAGSLHPIVVPPVQVEAARELTRCHDACRRDLMNARHRVSKMLLRHGRVYPKPTTWSQEHRRWLAQQQFTEPASELTYANLIAAVDGLTARKRALAERLSHLATDERWWPTVARLRAFRGIDTLTALSIHLELGADWQRFEKAPRVGSWLGLTPSLNQSGESSRQGAITKTGSTLARRLLIESAWHYARQPRIGATLESRQHGQPEHVLAIANRAQHRLYHVHTRMRSRGKPHHVTIVAMARELVCFLWAATTAP

SEQ ID NO: 466652 - protein, 355 aa, unidentified
MVGCDLHAETMVLKVLGADGKKRTEIYPTGPSGRRQMFKALKEEAQKAGGLPIYLAYEASGLGFKLYDEATEEGVKCFVLAPTKIEKSVQQRKNKTDERDAEQLLEIIQCHIWAGKKIPSIWIPDQELRDDRELVRARLELGEESARVRVKIRSLLRRYEVKAPAKAGKGWTKGLKSFLGEQSKKSKKLGPQGRKVLQSLIRQLSALEDETEILEVGLGELAEKARYGKPAKKLTELNGVGLLTALVFVTEMGDMGRFRNRRQVGSYLGLAPSVYESGSSGERKGHITRHGSPRLRKVLCQAVWAEVRARGRERDVYEKIAEKNPRHKKIAVVALMRRLAVRMWHVGLEAQKKAA

SEQ ID NO: 466653 - protein, 348 aa, unidentified
MALTIVETRAITGGVDTHADMHVAAALDPVGGLLGVQEFPVTAAGYARLLDWLGGFGTVCLVGIEGTGSYGAGLARHVAAAGIRVVEVDRSDRQDRRRQGKSDPLDAVSAARAAQSGRARGASKGRDGSVEAIRALMVAKRSARAERTQTINQARSLIVTGPEDLRARFSGHTVAALVAETASLRPRPGSTVGYATRIALRELGRRAVFLDAQLERLDELIVPLVTARAPGLLALYGVGADTAALLLIAAGDHPGRLRSEAAWAHLCAVAPIPASSGKRTRHRLNPGGDRQANHALWRIVITRMSSHPPTRAYVERRTAEGLSKTEIIRCLKRYVAREIYPRLLDAAD

SEQ ID NO: 466654 - protein, 315 aa, unidentified
MANLTKSKTIVNVGVDVGKQFLDICIHEKQLYWQEENSVEGIKHLLKRLSHYQIERLVMEATGRYEFELAQAAYSKDVPVCIAKPLSVRRYAGAVDQLAKTDKIDAGIIAQFAAVIKPRITPQKSQNLIAIKDLITRRRQLVNLRTQEKNRQKIMGKALAVSCKRIIRCLDSEIQRIEKRLAKHVEQQAEWTEKQTILKSAPGVGDALIYTLLADLPELGALNNREISSLVGVAPINRDSGRLRGKRRIQGGRASIRTVLYMATLSATQCNPVIKAFYKKLVAQGKHKKVALTACMRKFITILNTMIKNKTEWAF

SEQ ID NO: 466655 - protein, 386 aa, unidentified
MKKSSTIAAKPSKKILQQRLTIGLDLGDRNRWYCVLDESGQIQREQRVRTNATALREVFSEMAHSRIALEIGTHSPWISRLLSELGHEVMVANARRVRLIGESRNKDDGLDAQTLARLARIDPQLLYPVGHRSAQAQADLMMIRARAGLVRARTGLVNMARGLAKSYGERLRGCNVRNLNPEKAEGLSPELQRALEPLLACIESVSEQIAEYNERIEKLAQDSYPQVALLKQVKGVGTLIALTFLLTLEDPHRFRKSRDVGCYLGLQPGRRNSGQSEPQMYISKEGDPYLRTLLVQGAQHILRPFGVDCDLRRWGLKLAERGGRSGKKRAIVATARKLAVLLHHLWVSGEVYEPLHNSNPRAMPSAKHKPKTFFERKSKSPQAEFR

SEQ ID NO: 466656 - protein, 360 aa, unidentified
MRIIGCDLHARQQTLAMLDTQTGEVVTRTLMHEGNQVREFYAQLPHPVLVGIEAIGPMHWFLNLLEELGIECQVGDAAKIRAAEPRKQKHDRRDAELILKLLVENRFPAIWKPSKEQLDLRALLLHRHHWVCLRTQIQNALQAIALANGLRRGPGLWSYDGQAKIAFLPLPPHASYRRSALQTTYRKMAEEIEGLTEQVAEQAKERCGARLLMTHPGVGPVTALATDVFLGDPQRFADAKALASYVGMIPREYSSGERQRLGAVTKQGSPLLRFLWSEAAAHAARRDPDLQRFYRRKLVQKGLGKARVAVARKLGIRLWIMLRDQIDYEEFCRRGQKQSSAACAGMPEVGYGANRHRPID

SEQ ID NO: 466657 - protein, 343 aa, unidentified
MESIYYIGLDVHKKTIAYCIKTVTGKIVCQGMVKAQRRALHQWLVDLPGSWVGAMEATMFTGWVYDFLKPYAVELKVAHPAMLKAITAAKKKSDRADAEKLADLLRVNLLPECTMMSEELRELRRILRYRNMVVRTSSKMKNKISGLLMEVGATYDKRKLHGKKYFGQLLEQVEDVPESVKDLLKLSRSSMELFEAVQKKLLKTLREDSLISRRVELLRSISGVGEVTALTWVLEVGDPERFSNSRQAISYCGLCSAQHESAGKEHRGPISKKRNKYLQTMLIEAANLAPYWNPQLAMLYEKELTRGSRNRATLAVARKIVIYMLAVDRRGEPFITEKESLVA

SEQ ID NO: 466658 - protein, 476 aa, unidentified
MPRGAPREHENLLGGEPARGCLMPRARLLSWAGGLQGITECCLGETESARVKFLKRSGPPTALDRMEVGVMEVVHPRCAGLDVHKKTVVACVMIPGRKQVRTFGTMTDDLLRLADWLQQEQVSHVAMESTGVYWKPIYNVLEGTGLELLVVNAQHIKAVPGRKTDVKDAEWIADLLKHGLVRASFIPSRPERELRELVRYRTGLVEQRGHVVQRIQKLLEGANIKLSDVASDVVGVSGLAMLRAMAAGEQDTHRLAEMGKSQLRNKREELKRALQGSFGEHQRFMLNNQLGLLEFLDRKIAELNQEVERRLRPFETLLERLQAIPGIGPRNSEQILVEVGTDMSRFPSDSHFASWAKLCPGNDESAGKRKSGRTGQGSRWLRATLVEAAWSAARVKNSYFAAQYHRLVPRRGKRRAAVAVAHSMLIVIYHLIKDGTVYQDLGPTHFDELDRRRVTRRAVHRLESLGFEVSLREVGA

SEQ ID NO: 466659 - protein, 323 aa, unidentified
MSKSSMVCAGIDTGKYKLDVAIHSSREQLQIDNTADGHAALLVWLKRHKVQRVGIEASGGYEQNVVARLRADKFVVVVFQPVQVRAYARFLLQRAKNDKIDAVLIAACTAATKKIHAPPDPRLVPLAERMTLIDQLTDDIAGFKNCREGSRDPRIRQFWKERIAHFTKLLRAELKELVAAIRQHHDLAERLDLIESVDGVGLKTAVAILVRMPEIGRLTREQAASLSGLAPFDDDSGMHAGIRHIAGGRERLRGSLYKASLSAAFHWNPQLMALYRRLIAAGKLHKVALIACARKLLIFVNTVVERGTPWVSNRSPSRVRAAA

SEQ ID NO: 466660 - protein, 342 aa, unidentified
MNIKTIGLDIAKNVFQLHGVDVNGKTVLRKQLKRDKLLEFFANLLPCLIGLEACSGAHYWARELIKLGHDARLISPQFVKPYVKGNKNDANDAEAICEAVGRPAMRFVPIKSIEQQDIQMLHRVRSGLVKERTALANRIRGLLAEYGIIVAIGLVKVRQQLPDILEDAENDLTMAARMIFADLQDQLVELDKQVTTYGEKIQAVHRASEVSQRLSDVPGIGPITATAILAALGDGKAFGSARQVAAWLGLVPRQDSSGGKPKLLGISKRGDVYLRTLLIHGGRAVVNAAAKKDDAQSRWINELVKRRNINIAAVAVANKNARIVWALLTKSVEYDLSAPTSV

SEQ ID NO: 466661 - protein, 489 aa, unidentified
MARLLEHSPRPESTYRPTWAVVFGKAEKMQDSDQRKDNADSSKQIAGLPVVRHKVAGIDLGSERHWVCAATVEGSGREVADFGATTCELIRMAKWLNARKVESVAMESTGVYWIAPHEVLEAEGLEVMLVDTRQLARVPGRDKKSDPFDCEWIQRLHSCGLLMGSFRPKEAVCMLRTLVRDKGNLVAEAGDWLRRMQKSLDQMNVRVHRAVSDIDGVTGMAILRAIVDGERDARQLAKLRNPRCHKSEEEIAEQLRGHWREDHLFSLRQGLKMYDAIQERITDYEKEILQKLAKMERQECRGQEVPKSKNPKKGRAIQSQGAEPMRQALYWMSGVDLTGIDAIGVETVQVVLSEYGPDLSRFPSEKQFVSHVTLVPHKPTSAGKPLKKKKRNSASTRVAAALRMAASSLRHSESALGAYYRQIARRIGADVAVFATARKLATIIYRLLRWGQPYVDEGAETYEQRYRENRIKSLTARAKELGYQLTPTA

SEQ ID NO: 466662 - protein, 314 aa, unidentified
MNPAPIYVGIDVAKDRLDVAQRPGTEAWWVTNDDRGIADLVARLKALRPTLVVLEATGGVELPLVGALAAVGLPVVVVNPRQTREFARATGRLAKTDAIDAQVLARFAEAVRPALRPLPDAASQQLSGLVARRRQVIEMLTAEKNRLRTAAPAVRDHIKEHILWLERSLSDLDSELGQAIHSSDIWRAQDNLLQSAPGVGPVLSTTLLAELPELGSLNRKEIAALVGVAPLNRDSGTLRGRRTVWGGRSQVRAALYMAALVASRFNPVIRAFYQRLEAAGKPKKVALTACMRKLLTILNAMMRHQAPWQICSTS

SEQ ID NO: 466663 - protein, 343 aa, unidentified
MEYYVGLDVSLKQTSICVVNQTGSIVQEGVVDSDPEAIASFVRSRAPGTVRIGIETGPTTTWLWTELNRLGLPVICIDARHAKAVLKMQINKSDRNDAAGIARIMQTGWFKEVRVKDLDSHAIKALLASRALLVKIKRDLENQIRGLLKNLGLVIGRAKFNVFAVRAEELIEDRPELVAAVRPLLDARKAIERQVGDLDRKVHKLARHDAQVRRFMTVPGVGPITALCFKATIDDPTRFKRSRSVGAYIGLTTRRHASGEIDWSGRISKCGDAMLRMYLFEAAGVLLTRVPKWSGLKAWGAKLTKRNGLRKAKVAVARKLAVILHRMWIDGTEFNWSTKKAAA

SEQ ID NO: 466664 - protein, 472 aa, unidentified
MRESSMPPLQRHRTRKAVARGSGLPASLQAVHLNAAGIDIGSAEHYVAVPADRDPQPVRRFACFTADLERLAEWLEQCGIDTVAMESTGVYWIPLFQILETRGFEVKLVNARHVKTVPGRKSDVQDCQWLQQLHTFGLLAGSFRPDDQTCVLRSYLRQRDTLIRDCAAHIQRMQKALTQMNIHLHQVISDITGATGMRILRAILAGERNPVQLAAMKDPRVRSSRAQIAKALHGDYRAEHLFALQQSLELHDTYRKMIAECDVHIEHCLAGFDARVDLAEHPLGPPKHGHRTPRGNAVGFDLRAHLYRIAGVDFTRIDGFDALTVQTILSEVGLDPSRFPSEKHFASWLALCPDNRVTGGVVKHTKSRKVISRVATALRRAAQSAANSRSALGGFYRRLRARLGPAKAITATAHKLARIFYRMWKYREPYHPLSLDHYETQYRERTLASLRKRAAALGFELVQSPTVSGVVS

SEQ ID NO: 466665 - protein, 366 aa, unidentified
MSKYMAFDSHKHYTLAEVEDAASGRTQQCRVEHGPGAIRTYLSRYPTGREVAVEATGNWYWIVSEIEQAGDVPRLVHPRKAKLMMGMINKTDKLDVHGLNRLQRNGTLPTVWIPPAELRDLRELTRCRMLLTHQRTELKNRVLAMLEKYALTPRGISDLFGRKGMAALRERMEALPEQSAWVMGMHMEQIEALTRQILLQEGRLKGLVKVTESMQRLMTAPGVGVILAATILLEVGDVARFPDAEHLASYAGTTPRVHSSGGKTRYGPTRPDVNRILKWAFAEAGNSIVVHRRSRPDRYVSRLYAKIRHRRGHAKAVGALARHLAESTWHMLSKNQPYLERGKKPSLESVVEPGRREGEKVMIRRA

SEQ ID NO: 466666 - protein, 347 aa, unidentified
MRFYTQQHQYYCGIDLHARKMYVCIQNNIGKIVLHKNFKTDPEILFEILFPFLPEIVVGVECMFSWYWIADLCHEHCIPFILGHAFYMKAIHGGKTKNDKIDSRKIAALIRGGNFPLAYPYPKGMRSTRDLLRRRIHLVRKRSELLSHIQNTNTQYNLPVIGERIKYKANRKGIAERFEDPSVNKSIQIDLAMIDTYDKLLKDVELYILKHAKAHDANTLYLLQTVPGVGKILALVMLYEIHNIGRFPLVQDFSSYCRLIRPGKESNGKKTGKGNKKIGNPHLKWAFSEATVLLLRHSERAKKLHQKLVKKNGEGKALGILSNKLGRAVYYMLKNKEAFDMNKFFSN

SEQ ID NO: 466667 - protein, 436 aa, unidentified
MQTLPLLDPKAAGIDVGSETLHVSLAGDAPKVFGTTTGQLHALRDWLKAQGAHSVAMEATGVYWLCAYEVLEGAGLEVLVVNGKHVKNLPGRKTDLKDCQWIATLHAHGLLRSGFVPPEHIRRLQDYLRLRADHITMAASHVQHLQKALERMNVKLHDVISSVVGVSGLKVIRAILAGQRQPAVLLALCDVQIQKKKADAVKEALRGTWKSEHLFALQQALELWEFYQQKIAECDQRIEGVLRELTGPEPTQTQPGRGGKPGGPNTPQIANLHAMLVRLCGDKDATALPGLGDHTLLSLVGEVGTDLTRWKSEKHFTAWCGLPPGSKQSGKRRGNTARQRNRAGRLFCVMARSVGRSVDKALGGFYRRLKGRRGGLVANQALARKLAALFWRLMVHGKDYVEEGLKQYETKVAETEARWLRKLAKKHGMTLLPKPA

SEQ ID NO: 466668 - protein, 383 aa, unidentified
MKQYVGLDVSQRETAVCVVNETGQVIFEGKAKSNPGALTDLLSKHAPHAERIGFETGAMASWLWHELRRIELPVVCIDARHAHAALSVRMNKSDQNDARGLAELVRVGWYREVKVKSEESQKIRAILVARSRLVSMRRDIENQVRSLIKECGLLFPRAIGQQFRNQVSELLGVDHLLLSVISPLLSIHENVCQQQGKFDNEVRRLAKLDETTRRLMTVPGVGVVTALTFRHTIDDPSRFRSASTVGAYLGLTPRRSQSGETDTNGKISRWGDRLLRTYLFEAATVLLYRTKKMVFPKGLGHEARQADRHEEGKGRHRPKDRRDSPLHLGRWHIVRLGPAEANLIFARKFLVRSAGLAMSRWDGGRGDLGQSAGGGSPALRCKR

SEQ ID NO: 466669 - protein, 401 aa, unidentified
MVSDFRKGRYNLMKIYVGIDIAKLNHFAAAISSDGEIIIEPFKFTNDADGFQLLVSKLESFDKNSLIIGLESTAHYGDNLVRFLVTELYQVCVLNPIKTCQMRKNNVRKTKTDKVDTYVIAKTLMMQDNLRFVSFFDLDMMDLKALGRFRQKTIKQRTRLKIQLTTYVDQVFPEIQYFFKSGLHQHAVYALLKEAPSPKEIASMHMTHLANLLKVNSHGHFTKEQAKELRVLAQKSVGANDSAISIQITQTIQQIELLDSQLEKIEAEMTDIMKFNDSVIMTIPGIGYINGGMILGEIGDIHRFSNPNKLLAFAGLDPSVYQSGNFQAKTTRMSKRGSRVLRYALVNAAWNVVRNNATFKAYYDAKRAEGRSHYNALGHCAGKLVRVIWKMLTDKVEFNLE

SEQ ID NO: 466670 - protein, 342 aa, unidentified
MQISTIGLDIAKNVFQVHGIDAAEKVVVRKRLRRRQVLEFFKALPPCLIGMEACATAHYWARELTKLGHRVRLMPAKDVKAYVKRNKNDAADAEAICEAVRRPTMRFVRIKSAEQQGQLMQHRTRDVLIRQRTQIINALRAHLAELGLVAAQGDKGVKELLAIVADKEDTRLPIDARASVIVLAAQLEAVQTLIGSIEKRIKMQHRSNEASQRVETIPGIGVLGASAITATAVDPTVFRSGRDFAAWIGLVPRQDSTGGKQKLGPISKQGDRYLRRILIVGAISVLRRARENPGKFPWLTQLLARRPFKVVAVALANKMARMAWALLAHGGTYRAPELAETA

SEQ ID NO: 466671 - protein, 383 aa, unidentified
MEALLYCCCGLDVHKDLIEACILHGEGIEPDAVRESFGTTKPELKRLTLWLSRNDCYSVAMESTGVYWKPIFETLELCSEYLENIWVVNANHMRNLPGRKSDVGDAEWIATLLRHGLLEKSFVPPAAIRDLRECSRLHRSFVQERCRYVNRLEKFLQAHGFRFSSVMKDVLCVSGRRLLDILRDTGSLTQLDVIENCRRLRRSHEEISAAVCGNLSPAEQRLLKQLLHKLDSCQEDISSILEDMRLLSQQFQEQLAVIDSVPGFDEESAMEIIAEISAAPQEHFSSAEKLCRWAGVTPRNDESAGKVKSRKTLHGNPYVKAILCQAAWAAVKVRNSPFHDWFWTHQHKLGQKKAIVAVSRKLLMLIYLLLQTGQTYRPPEKAA

SEQ ID NO: 466672 - protein, 408 aa, unidentified
MTVVGIDVSKGKSMVAAMKPGGELVAAPYEVRHSDIELSHLALDVLCMEPDTRVVMEATGRYHEPVAALLHSEGIFVSILNPLLIKQSGAGSLRKVKSDPKDALKIAKYGLDNWSTLREYTPMEAIRQQLKLCARQCDLYNKNIVMLTNNLISLSDKTFPGVNELFSSPEKADGHLKWVDFYRSFWHCDCINRMSPDAFEERYKKWCKRKGYHFSTDAADALYAASCGSYTTLPRDNNAKLLVTVAADQLIALRENQSKLETEMLNLCKQLPEYETVMAMYGVGKSTGPHLMAELGDVRRFPHRSSIVAFAGVDPGVVGSGKMQLSSVTTSKRGSPQLRKALFQVVSTYVKCKPENEAVYQFYAKKRDEGKPFFVCTTAAANKFLRIYYARVKECLNAAESATQVEEG

SEQ ID NO: 466673 - protein, 342 aa, unidentified
MTLYIGVDIHARQQTLSYLDTNDGTTGRRELSHERDDIKGFYSQLVGEVIVGIEACGYTNWFEELLEELGHQLVVGDAAEIRRLARRRQKNDRRDADLLLDLLVHNEFPVLYRYSKESREVLRQLRYRHKLVKLRTMVVNTLHALAINAGLSLRAKLLTKGGRQQLGGLQLSAVSQQQRDELLSLADELTRRMQTVEQWLQTQAKSDARVQRLQTHPGVGLLTSLCVVHTLGDLSRFASTRKVAAYVGFDPMEDSSAERKAYGGISKAGSRLLRYLLIEAGQTAVKDDEQLKQFYRRLVPRRGKARAKVAVGRKLLVRCFIMGRAEIDYAEFLRRGKQDEAE

SEQ ID NO: 466674 - protein, 415 aa, unidentified
MKVHRNCCGLDVHKQTIAACLIREDGSGKSFKEKRLFGTMTQDLRELSGWLREAEVSAVAMEATGIYWVPVWNVLERAGFHLLLINPEHYRAIRGKKTDLKDGERIAELLQDGRLEGSFVPSTELRVLRDLTRYRVKLVEHQSSVACRIQKLLEQCNIKLASVASNVLGVSGTAMLRALAGGETDSQRLANLARKQLRRKIPALRLALDGCLLPHHRFLLGEMLHELSHIETQLARLEAEIELQMQPFENALSAWMSVPGIKHRVAWTLVAEIGTDMNVFPSAADLASWVGVCPGNNESAGKRKSGKTRKGNRWARRALCEAAWVAAKAKNSYLAAQFRRFAATRGSKRAIIAVAHTILIIGYHMLQRGTTYQDLGANYFDQRHILRTTKRLVKRLEALGHRVILQSPILNPSIG

SEQ ID NO: 466675 - protein, 339 aa, unidentified
MNRIVVGVDIAKRVFQLHWVEPETGEIVALQLKRERLLEHFANRSPCLIGMEACGGSQHWARSLQKLGHEVKLLSARMVKPFVGGNKNDAADARGIWTAMQQPGIKAVAVKSEEQQAVLALHRMREQLVKFRTAQINGLRGLLTEYGEVMPQGRAGIKRDIPGALGRLSDRLPAMVIETLREQYARLGELDEQIGQIERRLRHWQREDSATQRIAAIPGVGLLSATAAVATMGDAKAFKSGREFAAWLGLVPGQTGTGGRVRLLGISKRGDKYLRTLLIHGARSVLTHSKSPSEWLSELMKRRPKNVAVVAMANKMARTIWALLAHERAYQSGYVSRPA

SEQ ID NO: 466676 - protein, 345 aa, unidentified
MREASVSEISIIGLDIAKHVFQAHGADALGRAVLRKKIGRAKLLPFFASQPRCRVVLEACGGAHYWARELARLGHDVQLIAPAYVRPFVKRQKNDAADAEAICEAAQRPSMRFVPIKSEAQQAAAMVFRGRDLLVRQRTQISNALRGHMAEYGWVAPKGLAHLDKLATLLADPTAVPEGVRSVCTALLENLALLDRQIAALDKEIVRRSREDEIARRLMTIPGIGPITATAITALAPPPGTFAKGRDFAAWVGLTPRQHSTGGKQKLGAISKMGERTLRRLLIIGSSAVVLQASRRGAPRGSWLEQMLARKPRMLVTVALANKTARIVWALLMKNEDYRAPVVAA

SEQ ID NO: 466677 - protein, 393 aa, unidentified
MFYLGIDIAKNTHVASLMDEKGKTIFKGFSFSNSTDGGKSLLEIIKKHSEFTNITVGMEATGHYWLSIYSFLYDYDFHCIHVINPIQTDGWRKSAEIRKRKNDTIDSVLIADLIRYGDFVETTLSNEDLYSLRNICRMRNYLIQSAGDLKRKVICVLDQVFPEYQTIFSNTFGTTSKQLLLDYSSPSDFEELSVENLTEILENLSRKKVGQSTAEKLINSAKNSFGITFSKESFTFQLKLLIEQIKFIDNQVKDCETEIKKLMKKINSPITTIPGIGPVLGAVIISEFGDISRFDKPSKLVAFAGIDATVSQSGEFEGTHNVMSKRGSPYLRKALFQAALVASNTDPVLKEYYQKKRAEGKHHKTCIGAVARKMCNIIYAVLKNNTTYEVPKQ

SEQ ID NO: 466678 - protein, 411 aa, unidentified
MEALYRWVAGIDVHKKMLAVVVRAPQGEYVQRKFGTTKTEIGHLAAWLQDHQVSEVVMESTAQYWRPVWYGLEAHFKLHLTHPLKTRAPRGRKADFRDARRLADRWHSGDLEDSFIPGAEQRSWRWLTRSRVHLKRMLGVIRNQVEGLLEQGGIKLSAVASDIFGVSGWAILERIAAGESDVDQLLKEARGVLKRKKSKLREALQGKLDPLYRLLLQQHLEQAQLIRQQVEELNQALAEALKEHVAVLCRLTKVPGINLYAAQELVAEIGPGAVAFPSAEQFASWVGVCPGSQETAGVNYSRRSAKGNRYLRRRLCQNAWGAIHTKNTFFAGLFARLKPKIKGKGAAWAVAHRIAKLVWLILHEGVEYVEKGTAPLNPRTLVRKFKRLLREFDRHGIDAKSLLEQELVATS

SEQ ID NO: 466679 - protein, 346 aa, unidentified
MMLIGCDYHPSWQQICWLDTATGETGEKKLEHASGEAERFYRQLPAPALIGMESTGNCQWFVELAATLGHDLWIGDAAKIRACEVRAQKHDRRDAALIPKLLLEGRFPRIWTPSGEEKDLRQLLIHRYKLVRIRAQVKNELQHLAMNQGVTKKRKLWSKAGEKVLRELPLAPWAGRRREDLFKVREMLNGQIDLLDQAVVEAAEKNEKARLLMTQPGVGPITSMAFVLTMGDVHRFQRGKQVASYLGLIPREYSSGEHQRYGSISKQGNRFMRMLLVEAAQCAVRYDPQMRSEYLHRCHRKAKGVAKVAAARKLAIRLYWMLRTNTGYPEVVRVESSSRVPLVSAS

SEQ ID NO: 466680 - protein, 374 aa, unidentified
MGNHSEAFVAFDTSKLRNAVAIAEAGRAGAVRFLGEVENSSAATAKLVRKLAAKYERLMFCYEAGPTGYGLYRHIENLGHTCVVVAPSLIPKKAGDRVKTNRRDALHLVKLLRAGELTAVWVPDARHEAMRDLCRARGAAVEDLRSKRQQVSAFLLRQELHYTGKKTWTKAPMSWLASLKLVHAEQRIAFEEMLLAVRQAQERIERLEQAIRTAVPDWSLAAVVTALMAMRGMDLVSATALLAEIGDLSRFQTPRQLMAYLGLVPSEHSTGDTIKRGAITKAGNCRARRILVECSWSYQYPPRVGREKQAKVAAAPQAVRDIAWKAQSRLCGRYRTLIRKGKRKTIAITAIARELAGFVWAISREITTVGAAAR

SEQ ID NO: 466681 - protein, 461 aa, unidentified
MSANKPTGAKKKSVPKKVDWKALEVVHPDAAGIDVGGSEHWVAVSPDRDPEPVRRFGCFTADLREMACWLVEKGVRSVAMQSTGVYWMPVFEILEQQGLEVYLVNAQHTKNVPGRKSDIQECQWLLKLHAFGLLNNSFQPNDEIRIARTLWRHRGNLVAEASSVVQRMQKVLTERNVQLSNVLSDISGVSGMKIIKAILDRVRDPWELAALVEPGVKATPEDIVKSLEGNWREELLFVLRQHVEFYQIYQKKIRACDLQLRKHLQSLGSKLDLQAQPLGPRPKGKKLSRNAPTFDLRTELYRITGIDWSQINGIDVLTAQTVISEAGADLSAFPSEKQFASWLGLCPTNQQSGKKILNRRTRKVVNRATVAFRNAAMTLVRSQSYLGAQYRRLRTRLGAPKAITAMARKLACLFYRLIKHGQQYVDQGTEYYETRYREQQIRALAKRAQKLGLQLVIPKTA

SEQ ID NO: 466682 - protein, 345 aa, unidentified
MKKVIAGMDLHSNNVVIGVMDMDGKRVASRKMPCELKEVVRFLAPFKRRLEQVAVESTYNWYWLVDGLQALRYPVVLANPAGMEQYSGIKHADDTNDAFFVAELLRLKILPTGHIYDAELRPVRDLLRRRVTLVHQRTALMLSFKSLYTRTTGQELTLSALKNLEIKAAQALYEHPANQLIAEMQIKHIEQLTESIEKIEKAVLGSARELPYYEKLATLPGVGRILGMTITMEVGDIKRFAEPGNFASYCRTVEAKRMSNSKKKGENNSKCGNKYLAWAFVEAANFARRYDGQCQKWFERKVARTSKIIAIKALACKLAKAAWYLMAEGTDYDPKRMFGQPTKTK

SEQ ID NO: 466683 - protein, 340 aa, unidentified
MSEISIIGLDIAKHVFQAHGADALGRAVLRKKISRAKLLPFFASQPRCRVVLEACGGAHHWARELARLGHDVQLIAPAYVRPFVKRQKNDAADAEAICEAAQRPSMRFVPIKSEAQQAAAMVFRGRDLLVRQRTQISNALRGHMAEYGWVAPKGLAHLDKLARLLADPTAVPEGVRSVCTVLLESLALLDRQIAALDKEIVRRSREDAVARRLMTIPGIGPITATAIAALAPPPGTFAKGRDFAAWVGLTPRQHSTGGKQKLGAISKMGERTLRRLLIIGSSAVVLQASKRGAPKGSWLEQMLARKPRMLVTVALANKTARIVWALLMKNEDYRAPVVAA

SEQ ID NO: 466684 - protein, 387 aa, unidentified
MSKKKGRVVGLDVHPDSFAGAVVEGSDAASAQVLSTSRRVELEQLEKWASSHTNKEDILVLEASGNAFAVAARLRGIGREVEILDSHRAGKVGKAYCANDRVDAVKIARIYLSALSPMVWQPDAKTLERREIFSAYQGVVKESTRARQQLRAMLNEHCVRLEKGFRVCHPKAITRLLALREWTPARRMLLQQLHGSLVAARARRTLLRRHMAQEIVAEEALLRLTRLCGINLVTLYGVVAAVGDVRRFSHSKKLVAYLGLNPSVSQSGNFEGNGALKRHGRGALRALLIQSGKRLLEVTNPLQKWGLAVAARRGRNKAAVAVARKLCVALWHVMMGHLIGALERLDTLETKLSKFATELGPAALTAFGYKNKADFVEKKVYVLRSYP

SEQ ID NO: 466685 - protein, 418 aa, unidentified
MIEVINKACGLDIHKLFFIATILSRSGEKQQQRFNRDDEGILSLKNWVISKKCDVVACESTSDFWVPIYDSLIKHLPVIVGNARDMKVFTHKKTDKIDSEVIAQLALNNMIQPSRVFPNDHRDFRSDVRLRLTLVQKRTDLKNKAHSILASEMLNLKNVLTDIFGKNGRMILSGISSGKTVDQIIASLSPNVRKKSDKIREILDREISQSAASRLQICLKLIKSLDDEIEVLEKEIFNYAYINHKREMEILMSVPGIGELGAAILLAEIGNFKDFSSGDKLASWLGLVPNVYQSADKYHNGRITKRGSKRARWILTQIAQAAARKNNSKLKEFFNRKKKSIGHSKTIIALARKIATITWHLITNDEMYEDETGYKKREIQKRKIVETEIFSVDKRIKIISEIFAITGKEDEEEDEEST

SEQ ID NO: 466686 - protein, 483 aa, unidentified
MKPKPQEKTKTATGDPTQPHWNQMNRKQQLETMRKIQSEDLSLEMVHPDAAGIDIGNESHYVAVPPKRDSQPVRRFGCTTAELKAMAEWLKQCRIRTVAMQSTGVYWIAVYDILEEAGLQVYLVNARETKNLPGRKSDVQESQWLMKLHTYGLLRNSFRPAQEIRRLRTYWRQRNDLVRSAGRHIQRMQKALTQMNIQLANVLSDVSGMTGQAIIKAILGGQRDPHKLAEFRDPRVKASEEQIARSLEGNWEEDLLFVLKQEQDGYEFCQKQMAECDRRLEQYLREREDRSQGVSLPEEKRKERLKKKKKGNAPQFGLRADLFRMTGTDLTQIDGIDVMTATTILSEAGWDMSKWKTEDHFVSWLRLCPDNRISGDKIIGKGRLPTNNRISIALKMAASTLRLSSTYIGAQFRRLRTKLGAPVAIKAMAAKLARLVYRMLRYGMKYVDQGAEFYEPQHRQRQISHLKWKAAKLGFQIIDAPAA

SEQ ID NO: 466687 - protein, 365 aa, unidentified
MNRLIERCAMLDIHKSQITACVRVPDDAGGRRQEIREFRTTTAGLITLADWLRSWAVTVVGMESTGVYWRAVFYLLEDEFECQLFNARHLRHVPGRKSDVQDAEWGCQLIEHGLVRPSFVPPRPLRELRDLVRYRKAKIQERTREVQRVEKTLQDAGIKLSSVASEVLGVSARKMLDALISGTHDPEVLADLAKGTLRKKIPALREALEGRFTGHHALLVGQMLSQIDFLDETIATLSERIAELTRPFSRELELLDTIPGVDKRAAEMLLAEIGPDMSRFPTEHHLASWAGMCPGQRESGGKKHSAATRKGSKWLRGTLTECAKGIVRTKGTYLSAATTGSKAAAATPKPRSPPATRSSPPPTTS

SEQ ID NO: 466688 - protein, 375 aa, unidentified
METIYIGVDFHARQQTICYLTTETGEFVTHELKHQDKDEVRTFYAQFGGRVIVGLEASGYSPWFEQLLEDLGHEVWLGDATEIRRRARWRQKNDRRDAELILDLLVHDEFPRLHRPSLESREILRMLRYRHKLVKMRTIIKNSLQALALQSGLSRRTKLFTKIGQQELRAAPMSPVMKQQQEQWLELLLVLNQRIVETTLWLKQQSLNDARIRLLRTHPGIGLLTSLGLVHTLDPISRFRNQRKVTAYAGLEPMERSSAERKRFLGISKAGSRLLRYLVIEAAHTAVKKDDDLKRFYRRLQERRGRPKAKVAVARKLLVRSFIMLRDEIDYAEFQRRAVAARLARQSSRPSVPDRLIGQPASSESQERVLSAAKK

SEQ ID NO: 466689 - protein, 433 aa, unidentified
MTTDPYVAYIGYLLRRGFANDWADRKHDIALYDCASDSWQESTIPSRPQDILDWVNRLRARYGDGRIAVGMEQKRGPLLYALCQYDNLVLFPINPRTVANYRKAFQPSRAKSDPVDARLLVELMQKHPDKLERWVAGCPQTRALRQWVESRRMLVGEKVRLTNRITAVLKSYFPQVLDWFEDKDTLVFCEFIEQFSEVQLAQAATPEQLTLFFHAHKVTRKSAIHRRIAQIQQAGPPLTTDRSIVVPAQALTGALIALLKVVLHQLADFNAQIAALFEAIPDAELFASLPGAGPYRAPRLLVAFGAERTRFSSAQAFMSYVGIAPVKEESGKKRWVHWRWSCPIFLRQTFVEWVNQARRFSPWSQAFYLQQKRTGKSHQKAIRALAYKWGRILWRCWQSNTAYDEEKYLAALAREKSLLVKLLGSDSQQMATF

SEQ ID NO: 466690 - protein, 317 aa, unidentified
MLQTSTNTAGIDTSKLKLDIAIHGRTECWQVANALPGWRSLVVSLIKAGVGRVGIEATGGYERGVVEHLRAAGFVVLVLQPSQVKAYARVHLRRAKNDALDAVLIAACAETIDAPRIAPDPRLVKLAEYLTFLEQTEEDIARFKTRLEHVGEPGLRRIVTNDIARLKARRSAQIRLIERQLRAHPDLGRRLDLVLSVPGIGKRTALALIVRMPELGQVSREEAAALAGLAPFDDDSGKHKGQRHIAGGRGRLRRSLYAAALPAAFRWNKALVELYARLLARGKAHNAILIACARKLLVYANTVVQRGTPWIESPLRV

SEQ ID NO: 466691 - protein, 420 aa, unidentified
MVYLERGYNLKELPWSKIVSNSFLFKEACMILVGVDVAKDKHDCYIMTSEGEVLFKSFTIANNMEGFNQLYEKILSVIDNFDNVKIGLEATGHYSYNILGYLLDKGLTPYVINPLHSNLYRKSLSLRKTKTDKVDSRIIASMLMSDVSLKPYSNTLYHNEELKSLTRYRFTKVQERAKLKISISRLVTILFPELEKLVPTLQMNSIYALLYEFPSAHAISKAHLTRLTNLLNTTSKGHYTKDKAVLIREAAKNSIGSNMPAKSLELKHTIKLIKELTSEINEIEEEIKIIMNKINSPILTIPGIGLSTGAQILAEIGDFKNFSSPDKLLAFAGLSPSTYQSGNMYSSNAKMEKRDSKYLRFALFNAAIYVSYWEPTFSQYLKKKRVEGKHYYVAISHVVKKLVRVIFHLEKTNERYSTVV

SEQ ID NO: 466692 - protein, 337 aa, unidentified
MKSWSVTVLSETSVLKKFSQHPSPEALYGFLTRSYPGAEYHSVYEAGFCGFWIHERLTALGIDNIVVNPADVPTKSSEKLRKTDTVDSGKLARSLRANELKGIYTPDSVSLEMRSLIRLKNSITKDTTRQKNRLKSQLRYLGIEIPQEFLTPFSNWSKRFFAWLKEIETLTPSGRQALDIHIRHLEELRRQKLEMTRALRALAKADRFREPQRLIMSVPGFGQATGMAFLSEICDITRFRNAEQLAAYIGMIPMCHSSGEKDGTGDITIRKHAVMRCNLIEAAWVAVRQDPAMNLFYTEQCKRMPKSKAIVKVARKLVNRLFFVLKHQTEYVNSIVS

SEQ ID NO: 466693 - protein, 398 aa, unidentified
MFYCGIDIAKFKHEATVIDSDGKALLNSISFTNTQEGCQKVIALFEKLNITVDLVIIGMEATGHYWLSVYEFFSELGYDVKVINPIQSDAFRKMYIRQTKTDSIDSFIIAQIMRFGQYSATTLSDENIIALRQLSRYRLALVDSCGDCKRRVIALLDQVFPEYDKLFSDTFGVASKELLLKCQTPEDILNISTKKLTTLLQKTSRGRLKETKAVEIKTVAKNSFGISFAKDAFSFQIKQLIEQLIFIEKQIEELEIEIASLLKQTNQVITTISGIGDTLGAIIVSEIGDINRFDAPNKLVAFAGLDVKVSQSGEFVGTKNKISKRGSPYLRRAIWLAAGRAAFCDPILSEYYQSLRSRGKHHLTAVGAVARKLCNIIFVILKENRPYEPAPPKKSTDT

SEQ ID NO: 466694 - protein, 296 aa, unidentified
MKRIKFVGLDVHAETISIAVAEQGGEIRSLGVISNREESIRKLVKKLGPVEELRFCYEAGPTGYALYWQLTRMGAKCEVVAPTLVPVKAGDRVKTDRRDALKLARNYRAGELTAVWVPDAAHEALRDLVRAREAAKQDELRARHRLSKFLLRHGRRPPMGVKAWSMKYLEWVKREVHFEQMAQEATLLDYLHEVEHGAARIARLESAITEAVKSAPPQMRAVIEALQALRGIAHVSAVTVVAELGELSRFTRARQLMAYGGSVPSEDSSGERSRRGNITKTGNAHLRRVVVEAAWA

SEQ ID NO: 466695 - protein, 323 aa, unidentified
MTKHITICAGIDTGKSKLDVAVEGSREQLQVENTSEGHAVLLAWLRRHRVKRVGIEASGGYEQPVVAELRRKRFVVVVFQPAQVRAYAKFHLQRAKNDKIDAALIAACTAAVRKIHPAPDPRLQPFAEQLTMIDQIGEDIARLKNRIESCRNTQIKGLWEEDLARLAKREKVELKALIASICKHPDLAKRLDLINSIDGIGLPTAVAILVRMPEIGQITREQAAALAGLAPYDDDSGEQVGTRHIEGGRQRLRHALYAAALAASFRWNKQLMTLYRRLIAAGKEHKRALVACARKMLVFANTIVARGTPWQDRPPENAALTAS

SEQ ID NO: 466696 - protein, 307 aa, unidentified
MEHGKSSTVIAGVDVGKFRLDAAIGTQIQTANDAEGIKALRDWLDGHGVSRVGMEATSGYERPLRLALEAEGLEVVLHQPIEIKLYARLSRQHAKTDAGDARLIAAATAAIRRPAKRADPALLELGERLTAYEQIADQLMTLRTFKDSVSLIDLIAMIDRQIDQLKALKAALCRQLLEAVKACPWFKTRYGLLTSLPGIGPIVAVSLIVRMPELGQMQRGQSASLLGVAPHARQSGQWKGQRFISGGRTRPRPMIYLAALAARRSLNTFANALIARGKPPKLAIVPIMRKLIEAANLVLKRQQPWTN

SEQ ID NO: 466697 - protein, 356 aa, unidentified
MEYGAIDLHKKESQVRIITESGEVIDCRIPTRRDRLTTLFWGRPHARILIEASTESEWVAQHLETLGHEVVVADPNYGLMYGHRSRRVKTDRRDVTALAEACRHGIYRPAHRRSARQRSVQWQLNIRRELVAARTRGISVARAITRHAGYRIAGGATDTFLQRVAALQLPPALDEMLSPVRNVMEVLDEELSRVDTNFETLIADDPVVKRLTTCPSIGAITAAAFVAALDDVGRFAGRRGAAQVTSYLGLVPREYSSGEQQQRGRVMRSAHPYVQALLVQAAWRVFRSSDPRVAALRSWAQAIARRRGNKIAIVALARRLARILYAMWRDGTDYQSATIREHQTQTPVAAGTQPTV

SEQ ID NO: 466698 - protein, 358 aa, unidentified
MRTMEQQNNGLTLEKKVYVGIDVHKENWHVTIRTLGEEVFNGRIPGSYISFKKVLDRYRGNSVKVAYEAGPFGFWLYDRLTEDGVEALVVPPSTIPIESGNKVKTDKRDSRKLAILLERNMLKRTYVLSEEEREHRDLLRTRRQIVDHRNDVARQIKSKILFYGIPVPFSSKTRLTHRYIAWLKTLAFGTPYMKESLDLLIQLYEYLTRQIVQINRKVVALCREKKYHERIKLLCTAPGIGKLTAIELLVELQDMARFKSASQLASYIGLTPAEYSTGEKTRQGRITRCGNKRVRTYLVESTWILITKDPWIRAKYLKLKAIRGGKRAVVAIARRFIIRLRRMLLDNVPYNATASLTA

SEQ ID NO: 466699 - protein, 256 aa, unidentified
MKQYDYYIGLDWSQAKMAIAISQKSSDESRVVELDSDVRRLKYFLKSLKGTKVLTLEESTASQWLWVELYDHADEIIVCDPYHNFLLSSGPKNDRIDAGKLLELLRGGLLKPVFHSADVFMEYRKLISTYDDVVKTGVRWKNRRSAILRAQGKGKQTHMLDSEIDRFNLATADSYIAQYEDAKKVYHERFKQLISGSKTLRALHSIPGIGPIGAVRIAAVIVDPERFQDKGRFWSYCGLVKHHKMSGGRSYGSRSP

SEQ ID NO: 466700 - protein, 411 aa, unidentified
MEVVHVRCAGLDISKKDAKVCVRVAGAGRRKTVETVTTWSSMTSQILALREHLIAEHITCAVMEATSDYWKPFYYLLEDAGFDVLLVNSRHVKNLPGRKTDVADATWLAQLGAHGLVRASFVPPEPIRQLRDLTRTRTAITRERSREVQRLEKLLEDAGIKLSAVASDIVGVSGRAMLESLIAGNSDPAALADLAKRRLRSKIPALTEALSGRFTDHHAFLARVHLDLIDQHTAAIDEITIRIEQLIAPFHGFRDLICTIPGISTLTADVIIAETGADMTRFPTAAQLASWAGTTPGNNASAGKVKSSRTRPGNPYLQGALGAAAMSCAQNPRTYLGARYRRIASRRGPQKANVAIQHSILIAIWHMGTNGCLYDDPGADYFNRLHPDRAKKRAINQLEAMGYQVTLTHAS

SEQ ID NO: 466701 - protein, 410 aa, unidentified
MGRCIGLDVHRDFCEVAIWQDGAVGRAPRVAARREALEQFARALGAEDRVALEATGNALAIARIIRPHVGEVVIVNTRRLAAISQSKQKTDRHDARTLAQLLAAGMLQGSWQPDETTRALRRRVARRAKLVTHRARAKNEILAVLHRNLKARPPMTDPFGVAGRTWLAEQSLPADERDTIAAALRQVDFHSEEITVIERDLAAFVLGSADARRLMTVPGVGMITVAAFLAHVGDIARFGDPRRLVGYLGLNPKVRQSGNGPAHTGRISKEGAAIVRHVLVEAAHTTVRSPGPLRGFYERTRARRGHQIAIVAVARKMCTLFWHLLTRGEDYAYALPTSTAKKLRGVELKAGATRRQGSPGQPRQPLNRNQRRAQERQTAEHAQAAYQRTVADYHLQQRQRATNTKTAART

SEQ ID NO: 466702 - protein, 345 aa, unidentified
MAEISTIGFDIAKNVFQVHGVDAAGQVVLRRQLRRGQVLTFFGGLPPCLVGMEACGSSHYWARQVAALGHAVRLLPPAQVRPYVRRGKKNDAADAAAICEAVCRPHLQPVPVKSAEQQGVLMLHRARDLLVRQRTMLICALRSHLAEFGLVGGQGKGNFRKLVAVLDRSDGQALPELALSALRLLAEQIDDAAAKIAALEKEIIAHHRGDAAGRLLASIPGVGPIIASALAAAVPDASVFKSGRQFAAWLGLVPRQNSTGGKQRLGGITKAGDRYLRRLLVIGATGLIRYKRKNVPGGIAWLSAMLQRKPARLVTVALANKMARIAWAVLCRGELYREAAPPSAA

SEQ ID NO: 466703 - protein, 422 aa, unidentified
MPTNLEIAAFIGLDWADQQHVIRLRVAGSETVEAQRLDQKPETLRTWIGQLRQRFGARPVAIALEQSRGSLLYALMNVDFLLLYPVNPQSLAQYRKAFYPSGAKDDPQDALLLLEMLEKHRDRLRVWVPDDADTRCLRLLAENRRKLVNRRTALTNQLTSLLKESFPQALDWAGSLDSEWACDFLQNWPNLHLLQTTSTSRLRRFYRDHTRLDSQAIQQRLQQISQAQPLTSDPAVLAAAELIIPALARQLRCLLESIQQFDQQLKDRFQLHDDYTLFHSFPGAGPALGPRLLSAFGSNRNRFECAAEVQMLSGIAPVTERSGKSRWIHWRLACPKFLRQSFHEFAAQSILVSPWARAFYDQLRARGVSHQAAVRTLAFKWIRILFRCWKNRTPYDEQIYLASLRRRRSPLCAVLSSTPTGA

SEQ ID NO: 466704 - protein, 271 aa, unidentified
MNKITTLGVDLAKNPFQLHGVDRAGKVVLRREVRRAQLMKTIAQLEPCVIGIEACGGAHYWARRFSEHGHQVKMMSPQFVKPYRKSDKNDRNDAEAICEAVTRPSMRFVAVTSVEQQDMLTLHRVREGLMKERVALINRIRGSLSEYGIVIPKNVCNLWHALPLILEDAGNGLTTMARQVFNELYEDLGVREERIAQLENSIRALGSQHEVVRRLETIPGVGPLSATAMFATVGDAKQYRNGRQLAASIGLVPRQSSSGGRQLSTSHFYVT

SEQ ID NO: 466705 - protein, 463 aa, unidentified
MKHNSTRERKEKSARRSVSLLERIQPDAAGIDCGQNSHFVAVPPERDPQPVREFRTFTADLHRLADWLVQCGVKTVAMESTGVFWIPLYEILEQRGLQVVLVNARDVHNVPGRKSDVKDCEWLRELHSVGLLRASFRPAAAIVPLRSFMRQRETLVEEAATRIHRMQKALSEMNLKLHTVLTDLTGQTGLRIVRSILAGERNPERLAAHRDYHCHASQAEIVAALTGNYRTEHLFALRHNFATYEFLLKQIAECDGEIEALLTTLAAQQPPPSAPLPAARRRRASKHQPQFDIRGPLHRLTGGADLSQIDSIGPQTALQLIAEIGTDMRRWPSEYHFASWTSLAPNNRISGGRLLSSRTPPSANRVAAILRRCAMSVGKTSTALGAFYRRLAIRIGKAKAITATARKLALLVYRVLSGQLVYNDPGADAYHQLNRTRELKSLRKRARLLGFHLVDQTTGEVTA

SEQ ID NO: 466706 - protein, 333 aa, unidentified
MVDGTKGSHRKEGTTKMSENNINAAGIDTGKAKLDVALAGGKARLQIDNALSGWRELATWVKRHNVDRIGIEASGGYERGVVAYLREKGFIVILFQPLQIRAYAGFRLQRAKNDRIDADLIAACTAATTTVRQAPDPRFQAFCEHLTLIEQIEEDIVRAKTRLEGFRDDRHREILASEIKRFKAWRTAELKRLLDALRCHNDLANRLTLIESVPGIGSRTALALLIRMPELGSLSREEAAALAGLAPYDDDSAKHHGLRHIAGGRGRLRKSLFAAALPAAFQWNPSLVALYARLTAAGKSHKVALIACARKLLIFANTVVARGTPWTEHHATV

SEQ ID NO: 466707 - protein, 390 aa, unidentified
MLCLTEACPPALTVVAPVDDGSKEMIMTVVGIDAHKDWHTLVAVDEVGKRIAELTVPARAGGHRQIVAWLEQFGEVRVAVEDCRHLTRRLEADLLAAGHRVVRVHARLVAGMRRSAREPGKSDPIDAEAVARVALREDDLPTAELPGPMREIKLLSDHRRTLVARRTAMQSKVRWFLHEIDPDLHVPSRALRRYQLLGELLSHLEGRDGALVEVARDLLEDIAAVTRRVNALEHRLAELVRATHPTLLDIPGMGVLGAAMILGETAGARRFRSKHAYARFNGTAPIPVWSGNKVKVRLSRGGNRTINTALHIAAVTQLRLGGEGAAYVSKLTDAGKTRTEALRLLRRRISDRVFTALRADEQRGDQHVMATTDSDPSVRSDPALGLRRAA

SEQ ID NO: 466708 - protein, 345 aa, unidentified
MKITTVGIDLAKNLFQVHAVDERGRAVLRKQLRRDQMARFFANLPPCLIGMEACASAHHWARTLQKFGHTVRLMAPQFVKPYVKTNKNDVADAEAICEAVSRPNMRFVPIKSVEQQAVLSLHRVRQGFVRARTAQGNQIRGLLGEAGLIIPKGVVNVAKRVPALLEDAGDEGPASFRRLIQRLTEHLKELDRQVDELEAQIKAWHRGSELSRKLEKIPGIGPLGASALVASIADATSFDNGRQLSAWLGLVPRQDSSGGKPKLLGISKRGDVYLRTLLIHGARSAILAAQRKAVNTNIWLASLLNRRHPNIAAVALANKNARTVWALLAHGREFRADYAPEVLAA

SEQ ID NO: 466709 - protein, 374 aa, unidentified
MKNSITYVAMDTHKKEHKVALHYSGDEEIVQFTVKNTASDIRKMVNKIKKNSPHEVRFCYEAGVCGFTLKRRIEELGCQCAVIAPSLTPVKPGEHIKTDRRDAVKLLSMFKADLLTEVYAPDEKQEAARELTRCRQSAQENLKRIRHQLLKFLIRHGYIYTDGDHWTQKHLRWLGGLEFDQPMLREVFDCYFTEMQHCIQRLSSLDRQVEKLAGSEPYRQIVGLLCCFHGIDTLTAITTVTEIFEFGRFSSPGEFMSYLGLTPSEDSSGEKARKGSITKAGNKRIRKLLIEAGWHYRHPCNVTSKALRQRRKDQPQWVINIADRAGQRLRKRYWYLINRGKPPSVAVVAIARELAGFIWSVFKEYEARNGKKVV

SEQ ID NO: 466710 - protein, 467 aa, unidentified
MVNTLSPTVESLISPLEIEVENQTFMFDYGIGIDCHSKFYQACLLFKNVERFMRYEITFPAEWQEILKAKSKIQKKLDEYNINEGKFRYTLESSGVYHKPILYAWKGEPTVINPLLAGSTKRKTDVLDARLLAQHSITGLWRASFIAPIEFEYIRRLCKRRTDHVREATRCFNQCNGILTSLGYTFGAAITLRSAKWREAVYNAIEGVETGNRYASDIPIPAGLCEELKYLILCGDNATEASKRVFQQLRGILGSMCFTAGGKVLNGERLFHLLTTCPGVGETTATVWLSEICTTDRFQSVKQCTAYCGCDPSLKVSAGKVTSHVRRHGNLRLNYALRQAATLLLNRHNEPFGLWGWAIYKRSPKGGYKKAVGAVSRRIAESLFYIHSRFQEFTYAGYRFNKELTFTSDEIPKLHHIAKRTLETMGISTLTQVAENWENILTAKGIGKITLSILEEALYGKGTGSKN

SEQ ID NO: 466711 - protein, 325 aa, unidentified
METKKLCCGIDVSFTTLDVCYQNNLGELFHLHVGNNNAGFKKIMEHTGTNHHFVMEATGVYYIRLAFFLHSHGCTQSVVNALSIKRFIQMHGERNKSDKKDAGWICRYAIEQQPPAWQMPDSAYFQGKQLYNTIREYQEQIKRFNNQLHSLGLLPIQSKEAIRSIEKIRSSLQKEVKTLEGKLQELLAAWQPEQLKNISSVKGIGKRAAAMLIIFTQGFKHTHSHRQLISFAGLSPTEYSSGTSIQGESKICKRGGKLLRDVLYMCAMNAMKTNPACKALYERLRAKGKTGKQALIAVCNKLLKQVFAVMKNNTLYQPAYRSAKP

SEQ ID NO: 466712 - protein, 421 aa, unidentified
MKQEAHEEFAAFIGLDWADSKHDVCLQAAGSAKREYFILTHTPEAIDAWVSTLRTRFNGHPIAVCLERNKGPIVSALRKYDFLVLFPINPLTLARYREAFTPSRAKDDPTDAALQLELLLTHRDKLQPLKPQSPAMRALAQLVEHRRRVVNDRVRITNRLTSTLKNYFPHVLQWFQDKDTSVFCDFLSRWPTLKAAQLARRSTLETFFRDHHVRAADLIEKRIQAIKTATPLTSDEGVIAPHVLFVQALVSQLRVTLDAIETFDHAIAQRAQSHPDFPLFQALPGAGPVFAPRLLVAFGEQRARYASAAELQQYAGIAPVTERSGKKSWVHWRLQCPQFVRQTFVEWAAESIRHSFWAQIYYQQQRDKGKAHQAAVRALAFKWIRILYRCWQERTPYDEATYLQALTRRGSSLLQNLAKVS

SEQ ID NO: 466713 - protein, 364 aa, unidentified
MKRKVYVGMDVHKETIRIAYLTSNSKEILKEQQIKHNEVQIKKFIKKLKTEWNEIHCCYEAGVTGYPLYRYLKSLGVNCILVAPGKIPRQNTDKIKTDKRDAIKLARLMRSGELESIHVPSEEDEAVRDYLRSRDSLRLDLGRNRQRLMKFLLRKDIKYSTTKYWTVSHYKWLNNLHFNNEILQETFNDYYSRVRVQEENLKSMDKKIQEIAESEPYREKVGILRCFRGVDYLTAMFLLCEVNDFKRFKTAGSFMSFLGLVPGEYSSGSKRKQTGITKTGSPRLRRILTEAAWQHRFPGTGSKIITARRSRQPALVVALAEKASLRLHKKFRNLQLRGKTPQVMITAVSRELSGFLWAAMNLVA

SEQ ID NO: 466714 - protein, 392 aa, unidentified
MRFAGVDIASETHVVALVDEDGKVLVKATAFTEDAAGYEKLFAQLGASAELLVAMEATGHYWKNLFAALAARGFSVALLNPLRTHRFAEEDLQRTKTDAIDALGIARFAAQKRPPATRLPDPATEELRELVRLRQRLLQDFGDRVRQLHRLVDLGFPEFTRYVKGLDSELASAILHDYPTAAAFQGVSAKRLAGLRYDGRHQVGTELAGLLIAAAQRSVGHHHGEAYRVQVRYACEDLDILRRRLRQLDRDIEGTLGAHEVGTLLTSIQGIGPNTAARLIAELGDPAHFRSPGALAAYVGVVPALSQSGKRKNTRAPTTAIGNAGLRAALWMPTLTAVRKNPWLRAHYQRLLARGKLPKVALVACMHKLLFAVYSVAKHRRPFVAHLTTAQP

SEQ ID NO: 466715 - protein, 475 aa, unidentified
MSSKLFAGIDVSLGNNQLCLMDADGSVVGKSLSFTNNLPGTLAMVEHLNTIVENGDFESLTIGMEATALYWFPLFNFLSSEAAFGKTQTQVLSLNPKIISNFRSSYPDMDKTDNRDSFVIADRLRFGRVPQGQTPDADFLALQRLTRFRYHLVQCASELKNYAGSFLFLTFSEWNRSKPFSDLFGTTPSRLLKKFHSASELAEVPTEELKQLLGEFSKGHFRDVDAKAEEIKQSVKDSFPIPKKLADQVHLVLKQTLQQLELLKKHVARLDKKIAKQISKFNNVLQSIPGIGPVLSAGILAEIGDVSRFPGQAQLAKYAGLTWRKNQSGNFCGDVTPLTKTGNSYLRYYLIQVAQCMVQHNAEYREYFSRKYKETPRHPHKRALSLTARKLVRLVYVLLSRNQLYMAPHEREHRQLARKEVTMTSAAQIRPETSWASHLPEVDTSKKVKTPSVAARLQRTLPRQQEHARGRAVNT

SEQ ID NO: 466716 - protein, 416 aa, unidentified
MRGTSSVPVFCGIDWAEAHYDVALVDDAGAVLARKRISDDSVGYQVLVGLLGEHGDRQDDPIPVAIESPRGLLVACLRRTGRKIYAINPLSVARYRERHSVARAKSDRVDAELLANILRTDRHAHRPLPADSELAQAIGVLARAQQDAVWNRQHIANQLRSLLREYYPAFLEAFQDRRPHGLAHPDARAILAIAATPTQAARLTRPQLAAASKRAGRQRGIAAASIRLQAIFRRTSLHQLPLVEQAMGHQALALLLQLNAAAQAEHELAEATRAAFQQHRDSAIFTSFPGLGELPSARLLAEIGDDRTRFADARGLKAYAGAAPVTRASGKTLVVLHRTVKNNRLAATGYLWTFAAIRLSVGARAHYNRRRLAGDRHAAAQRNLFNRFLGCLYYCLQNGQTYSEAHAFPTADALAA

SEQ ID NO: 466717 - protein, 349 aa, unidentified
MSQQCSTAIARMGIDIGKSVFHVVGLDAKGKPVFRNRFTRERLLEFLARASPTIIGMEACPGSNWLARKAMGQGHQVRIVPAQFVKPFVKSNKTDIVDAEAIAEAISRPTMRFTQPKTEAQLDLQALHRVRQRLVSSKTAIVNQARAFLLEYGLTIGAGPAYFVRDMPSVLADDGNGLTPAMRDLLQEQWQEYRSIEARLLQLRRQIEAIAGADAVATRLISVPGIAHLTATAITAFAGTGTQFKSGRHFAAWLGLVPGEFSTGGKQHLLGITKRGNPYLRKLLIHGARACVLHLDRTKDHLGLWISQMEAKGIHRNKIIVALANKLARIAWTILTRRGTFYLRQPQAQ

SEQ ID NO: 466718 - protein, 337 aa, unidentified
METQPQYVGIDLHRRRSVIVRRDPDGKAIDTVQIVNDPATLAEVVSRAGEAPEVVLEATYGWYWAADVLAELGANVHLAHPLGNNWGHRRVKNDERDAADLVDLLRLGRLAESYIAPPGLRELRELVRYRAKLVAIRSGLKAQVHAVLAKEGIAVHVSDLFGVAGRGLLAMAPLGECYRLRVDSTLGLIADLDEQIKEFSELIADVLSVHAGYRAIQAIPGVGPVLAAIFVAEIGEIDRFGGPAQLCSWAGLTPRHRESDTTVHRGHITKQGSRLVRWAAVEAVGQQRGSTPISDHHRRVAERRGKGIARVAAARKLLILVYYGLRDGEIRCLANAG

SEQ ID NO: 466719 - protein, 424 aa, unidentified
MAGVVIGIDPHKGSHTAVALDVHEKQLGRLRVRASSRQVDGLLEWASGWPRRRWAIEGARGLGQLLAQQLIASGERVLDVPPKLAARVRLLDSGQINKNDPNDARSVAVAALRAHELPELAAEDQAMVMRVWARRYHDLARLRTQVVCRLHAVVCELVPGGVRKYLRASQATDVLDRIVADSPVAQAKLELARELVADLERIDAQRREAKGRTARAVAATRTSINDVYGVGPIVAGTVLGYVRDIRRFPTRDRFASYNGTAPIEVSSGDRKIYRLSRRGNRQLNHAIHMAAISQIRHHDSEGRAYYEKKIAEGMTGKTALRALKRKISDALYTRMIDDARRLAAKDPGGHTGNDSASSAAGSHPETPALRKSHSRATANSKTGTGQRPLRLRPAPDRRRTSRRAAGVQVEPRLGPHRGRRQDRP

SEQ ID NO: 466720 - protein, 379 aa, unidentified
MTTLGMPAALPAIHDVEAAAEPRMVVLGVDTHKDVHVAAVLDHLGRLLSSGEFPATAAGYRHLLDWARQCGTVLRAGVECTGSYGAGLARFLATQQVSVVEVNQPDRSTRRRRGKTDAVDAEAAARGALSGMARALPKSGDGHVEALRMLRLAKNSAVKARTQALNQLKSVLVNAPSALREELEPLSTSLLLRRCAGLADTREDNPAADTAVFTLRLLAQRVMQLRQEANELGRRMTIAVRATAPSLPEQLGIGPDSAAALLITAGDNPERLASEASFAALCGVSPVEKSSGKSQRRRLNRGGDRQANAALHRIVVTRMRQDERTRLYLERRTAEGKGKREVMRCLKRYAAREVYHLIHADMITRHQQPHTSATLMIAA

SEQ ID NO: 466721 - protein, 389 aa, unidentified
MKKTQKTQKTKETLKGEHITKEGILYMSFELSNTKWKIAFSDGNKKRLVTIDARKLDQLQEEIEKAKRRFHFDDDIRIVSCYEAGRDGFWLHRYLLSCGIDNIVVDSSSIEVNRRQRRAKTDRIDAVKLLRMLMRYHGGERKIWSVVNVPGVEDEDGRNLNRDLDVLKKERNMHRNRIDGLLIQHGIEVKNPSSKRFLEELDSLRTWDNKELPSDLKARLVREHQRLRFVEDQIGDLNKEREERVMSGATASLRKVAQLRTLYGIGVISSWDFVMEMFGWRNFKNRREVGAFPGLTPTPYDSGGSQHEQGISKNGRGRIRKLIIQISWGWLRFQPESKLTQWFNERYAGGGKRMRRIGIVAVARKLLIALWRYLQYGQIPDGARLRTAA

SEQ ID NO: 466722 - protein, 419 aa, unidentified
MSFKILKFNCCGLDVHKTWIYACIGITDSNNRTEYKQARFSSFTKGLNELCNWLAKYNCTDVCMESTGKYWIPVFNILEQHNLWVTLSHPKYTKPMKGNKTDRKDAKWICDLYMCGMVKPSFIPPADIRELRDLVRYRFKLTCMITGEKNRAQNCLTVSNLKLDDVFSDVFGKSSRSITEQILQHPGEIFDVAPFIHGRCKTPIEEIQAAVDGAISKEQAVKLRQCLDHIDELNKHISEVEQEILCLSDKYEAALNLIRTVPGFNKNPMTAIQVLSEIGCDMSVFPTDKHLVSWAGCCPRNDKSDRKIKSTRISRAGSYFKPVLVQVANALIKSKKYPEFITRYKRIKARRGHKKAIIAICRMILTAIWHILSDLKPYTPEGFLESRPVKEEKILTTSQALNLLKLRGYVIKDDPLPTS

SEQ ID NO: 466723 - protein, 401 aa, unidentified
MDGEIIVGIDWGSASHRVCVLDARRNVLDEFDVEHDGAALAHLADRLLKHTRSAVVGIETRWTAVAETLLERGIKVFVINPKQLDRFRDRHTVAGAKDDRRDAFVIADSLRTDAFAFREVTLGDPRLVELRELSRMQSELKELHKVVCNRLFQQLLRVFPQIFELGSIYTDGWILEVLERAPTPAEAHALTPSKIRSILDKHRIRRLKADDVLRILRKTPLTVAPGICDASRAHIRVLLPQIRLVHKQLDETVDAMKELLDDLERAPEKKEHRDVAIIRSLPGAGTIVAATMLAEAREALSSRDYHRLRLIAGTAPVTRQSGKSSHVCMRYACNQRLRLAMFFMAATLARYDARSKALYAAHRARGHSHGLALRVVADRALKMLVAMLRSGTTYDEKKRVA

SEQ ID NO: 466724 - protein, 297 aa, unidentified
MGEVSTIGIDIAKSVFQVHGVDTDGAVVIRKRIGRTKILKFFTDLPPCLVGMEACATSHHWARELRRLGHDVWLMPPTYVKAYVKRSKNDAADAAAICEAVTRPSMRFVPIKSAEQQSALMLHRTRDLLIRQRTQLINALRAHLAELGLVAAKGREGLHQLVTIVMESCDEKLLSDARFACQAIVMQLHAAQTQINGLDKRIIQAHRVNADSKRLNAIPGFGVILSTAVVATMTDPKAFKTGREFAAWIGLVPRQNSTGGKERLGSISKQGDRYLRRLFVVGAIAIVRTARMRPEND

SEQ ID NO: 466725 - protein, 412 aa, unidentified
MQVIIERCAGLDVHQETVVACVLAGTPGQRPTKEIRTFCTMTRDLEALRDWLKAAGVTHVGMESTGVYWRPVYAVLEGHFELIVGNARHIRNVPGRKTDVKDSEWIADLVRHGLIAKSFVPPKPLREMRELLRYRRKLVESQAAERNRLLKLLETANIKLASVASDVFGVSGRAMLKALILGTASSEEMAALAKGRLRRKHADLILALDGRIEDYHRFLLTLQLRRLDAAEQDITALDKRIDEKLEPYRTQHALLMQIPGVDWLVAAVLIAEIGIDMSQFLSVFHLAAWAGVCPGSYESAGKQKSGRARKGNVHLRTILVGAAISASRTKGSYLRDKFHRLKARRGALRAALAIAHKILVAAYHMLAKGVPYKDLGEAYLDEIGQTRTLANLKRRIERLGYHVILEPQAAAA

SEQ ID NO: 466726 - protein, 396 aa, unidentified
MIEGGRSRRAGRFATTAEALRRVATTLTAEDHVVLEATCNTEAIARVLQQHAGRVVISNPLRTRAIADAKIKTDKIDATVLAQLLASGFLPEVWLPDEETARRRRQVARRAQVVRQRTQVKNQIHAILHRHRVPPCPYADLFGKGGRVWLASQPLPADERQTVASLLRTLDQFTEEVAGIERDVAEETVACVPARRLMTMPGVDAAVAMTLVAAVGEIARFSSSQKLVSYLGLDPRVRQSGLHPATHGRISTQGHAHARSMLVQAAWAVTKTPGPLRAFFLRLRARRGEQIAVVATARKLAVLVWHLWSKEQDYLWARPSLTATKLRNLELRAGRPTRRGQRGPTANYSIKRLREQERAIGEHAERAYAEAVARWQPRRPAKPKSVGVSAAKEERT

SEQ ID NO: 466727 - protein, 351 aa, unidentified
MFAQSLGIDVAGKAFRVCLKIRRTDGQVKIKGSRKFSNTPKGFAALLKWVTSKQTSDDPMRAVMEATGVYYESLAYFLHEQGWRVFVLLPNRIKGYFKFLNLKSKTDNIEAAGLAELGINHNLPTWEPASPQMYSLKRLCRERNTLIDEKTVISNRLHAEKSCKTPDRGTVRRLKQLIRLIDKQVKEVEQDLSQGLEQDPELKQRIDNICQVKGLGWITVLCIIAETNGFKLVTHKSQLVSYAGYDVVERQSGSTINGKTRISKKGNRHIRRALHFPALSVVKYHDEFTNLYNRVYDRTKIKMKGYVGVQRKLLVLIYTLYKKNEAYDPKYAQRNEDNSRSRQGTMPAYTG

SEQ ID NO: 466728 - protein, 337 aa, unidentified
MGKEDLVHYVGIDLHKRDLVVAFEAESGPVGKPCRIRCEEEGTIVSLFEKLRPFRAVIEASASYRWLHDLLSPLGTVVLAHPLRLRAIVTSRAKTDKLDAAVLAKLLRLGEIPTAYVPPKPYQELRDLARARAKLSHAATAAKCQLHALLGAANVHPPYRAPFGKRGRRWLGTLELGLAANLQRDELLLRLEHYEREVVKLDAGLARMAEAFPEVEALTELHGIGLYSALLIVAELGEVDRFHNDRQVGAYAGLTARVHQSGGHDYHGHITRQGSTWLRWILVQAAMKLIREDAPLRNFYTRIRKRSSKHVARVAVARKLAGICWVRLRRWHREHAA

SEQ ID NO: 466729 - protein, 427 aa, unidentified
MKKRTYRAVKINGVVREKLAEAVAGQRVVFGVDVAKVTCLAQAMVPTMAGPERVMQAISFEQSQNEAFVSLLQGLPATVEVALEPTGTYGDALRWQLEQAGIAVYRVGAKRSHDAAEVFDGVPSMHDAKAADVVARLHLQGASRRWEMKTEEQRQLSAEVKRMSFYDERRLKALQLLESLLARHWPELTEVLELTSATLAALLSRYGSAAAVSADSEGARELMREASHGRLSGESIDAVVEGARTTRGMPPIAAETALLMELAREAQLARQQTEQAKKPVVARVAHDEGAKHMARVVGHVTAGVLLDAGGDPRRYAGARQYMKALGLNLKVRQSGESQGQLKLTKRGPARARRYLYYAVLRLVQADGVVRAWYRKKVARDGERYRGRAVVAVMRKLAAALFHVARGELFDSSKLFDTSKLTSLLAVG

SEQ ID NO: 466730 - protein, 324 aa, unidentified
MNKSKKFFGIDISKDVFDVMDQADTHYQFKNDLSGFRKFGKILTEDSHCVMEVTGSYYQNLATWLFSKSIDVSVVNPLSVKRFIQMRLKTLKTDKSDARMIRIYGEYENLELWQPPSQYIIEANELHKLIELLLRQRTALKNKMHGLKSKGISTSVVVTSVRRQIRNLDKVVSSMEIKLENLIKVWQADLLTRLCSIPGIGKRTAIFLIVLTQGFERFENSRQLISYFGLDPTIHQSGSSIRGSSRISKTGNNHIRNLLFMCSFTACEHNKSCKDIYLRIIAKGKSKKLALIAVANKLLKQSLAIAKSGLLYDENFKSVYVKVG

SEQ ID NO: 466731 - protein, 346 aa, unidentified
MNFYNHQHKHYCGIDLHARSLYLCILSQDGEILLHKECPAKPDRLLELITPFLNDLIIGVECMHCWYWVADFCEEQNIHFILGHALYMRAIHGGKAKNDRIDSLKIAQLMRGGNFPLAYVYPREMRATRDLLRRRTNLVRHGANLKAHVANTTSQYNLPPNKVNLKNVSAREQLRNSFPDEGVQRMINLDMAVLECYHRELSQTEWYLEQQAKKHQPVYLNLLKTIPGIGRILALTILYEIGAIERFETVQQFASYSRLVKCKAESAGKSYGTQGAKIGNGHLKWAFSEAAVLYLRGNDKAQRHLRKLQKRMSKAKALSALAHKIGRATYFMLKKRTVFDEQRFLS

SEQ ID NO: 466732 - protein, 364 aa, unidentified
MTTIAQSAGERRVLGGVDTHKDVHVAAVIDDVGRILDTAAFASTRDGYRRLLAWLGGFGELVAVGVEGCGSWGAGLSRYLAARGVSVVEVNRPNRQNRRRRGKSDTVDAEAAARAVLAGDATVTPKAGTGPVEALRQLRVARAGAMKARTAAANQLHSLIDTAPERVRAQLRNLTFKKKIALAARWRPTRTATPDGASRYALASVARRWQALAAEIGELGRRIKTILDDVAAPLVAVHGVGYDTAGQLLVTAGDNPDRLRHERSYAALCGSSPVQASSGKTDRHRLNRGGDRHANSALWRIVIVRMTSHQPTKDYIARRTAEGLSKQEIIRCLKRYVARELFPHVQKVIAPTILEPPMNTQRAA

SEQ ID NO: 466733 - protein, 355 aa, unidentified
MSQEKYIGMDVHQATISVAVMDAGGKLIMECLLETKAATIVEFIRGLHGTLSLTFEEGTSAAWLHDLLKPHVSRLVVCDPRKNALLKDGNKSDRIDARKLAELLRGNQLHPVYHGEHGVRTLKELGRSYLTITQDVTRVMNRIKALYRSWAIPCAGTTVYAPRHRAEWLAKIGEPGVRVRAERLYQQLDLLQPVRLQARRELLAESHRHSAVKLLRQIPAIGPIRSALLVALLQTPHRFRTKRQLWAYSGFAVETHDSGEYRSVRGKLQRNRERMTVRGLNDNHNRDLKNLFKSAAISASTRPGPLRDFYVARVEKGMRPTMARLTLARKMAAISLTIWKKGVDFDAKQLDQQLA

SEQ ID NO: 466734 - protein, 343 aa, unidentified
MQIRTIGVDLAKNVFQVHGVDSAGKVVITRQLRRKQVIEFFSKIPPCLVGMEACGTAHHWAREVSKLGHTVRLMPPSYVKGYVKRSKNDAADAAAICEAVTRPSMRFVAVKSTDQQASLMLHRTRDLLIRQRTQLINALRAHLAEFGLVAETGREGVAQLAALITDESNREALPFAMKQALQAIVDQLAALELQVGTLDRAIYAHHRANDMSGRLETVPGIGVIGATAIASTVTDPSNFKSGRDFAAWIGLVPRQHSTGGKERLGGISKQGDRYLRRLLVIGATAVVRHARQHPQKHPWVMRLLAKKPAKLVAVAVANKMARIAWAIMAKGGYYRAPELAAAA

SEQ ID NO: 466735 - protein, 330 aa, unidentified
MNRNQPQECAVFGIDIGKNLFHVVGLDCSGAIIQRVKFRRETLLQFFERAHRTLVGMEACPGSQWLARKLQTMSHSVRIIPAQFVKPYVKSNKNDIIDAAAIAEAATRPTMRFVGVKQADQVDLQMLHRVRSRLVSARTNLICQMRAYCLEHGVAMRQGAGVFKVDICRVMDDLDNDLTPMARSVLRDLHDDFRRLEARIRQVSDDIEKIADTDERARRLMTIPGIGPLGATAILSAIGDPTRFSKARDIAAWLGLVPRQYSTGGKQNLLGISKRGNNYLRRLIIHGARSCMLHLDRGKDRLGVWIDTLRLRMHVNKVTVALAAKLARIV

SEQ ID NO: 466736 - protein, 344 aa, unidentified
MIIIGIDPHKSSITAAAIDPSGSQLAVRRFVVNAGTARQLLAWAAQWPERTFAIEGANGLGRGTAQILVAHGEVVVDVPSTLAMKVRVLSTGGGRKSDPADAFAVALTGLRQKNLRVVAAEDQTTILRLLAERREDLGHERARLLNRLHRLLRELLPGGVEPGLSADKTAAALRTIRPATATDAVRRELTKELLTDLRRIDSFIKSNEAHTRTALDASSTTLQEIPGIGVVLAAKLLGHVGDITRFPSASHFASYTGTAPLEASSGNHNRHRLNTGGNRQLNSVLHTMAVCQSRDPGPGRDYYLKKIAEGKTPREARRALKRRLSNVLYRQILHDHHQAEKAAA

SEQ ID NO: 466737 - protein, 332 aa, unidentified
MENCIGIDVSKATINAHISKNSQDLVLENSLKGFKSLFSKLKKIYKKEIENIIFIFEPTGSYSEALRKYCSDKNIKCFIINPKQFSNYAKALGVEVKNDIEDARVLSKALYLAKDGQVKVPVFNEDVEQIKELMSFYKFTKKQTTQQKNHLESLTSKCGGKFSIKELKKSIKESQEKELRIIEQVQTLIDSTDEYRVAYENITSIKGVGQIAGIVLLHLFLKYPEANQRQITSLTGLNPIYRQSGSSIQSGYKIAKTGASLYRSVLFMSVFTAVQHDKNFKAFYERLKDNGKHTTSAQIAVMRKIILTAHSLYKNNKKYDENFNPQEVVEVE

SEQ ID NO: 466738 - protein, 343 aa, unidentified
MEQVSIIGIDISKKSFQLHGATSEGSPVFRKKLSRGRFLTFLCEVPPCLVVMEACGGAHHWGRQIIALGHACKMIPPTYVKPYLKRQKNDSNDAAAIVEAAQRPTMRFVAVKSEEAQADSMLFRTRALLVRQRTQSINSLRGHLAEFGLIAAQGTGSIAVLRLELATVKEGLPEQVISMSRLLLEQIAVLNEQITDLDKEIRSRSRTHEEMKRLMTIPGIGPNCAMAVQAFAPPMESFGCGRDFAAWIGLTPKQHSTAGKQKLGRITKMGQRDLRRLLVLGATAVLQHRRKCPELDDPWLRRMIAEKPPKLVAVALANKMARIIWALSVKKEPYRAPAAAGAG

SEQ ID NO: 466739 - protein, 316 aa, unidentified
MSEPVYVGIDVARASFEVAVTGETQTLNLGNDEAGHAELCQVLVPLAPRLILLEATGGHERLLALALAAAGLRVSVINPRQARDFARCMGKLAKTDRIDAQVLRGFAAVLDAQGHEPRALLDEQQRELTALVTRRRQLVAMLVAERQRLALAHPKAKNSILAIMDAIAAQLHDVDGQLREHVRAHHADLAKLLTSVKGVGPTTASTLLAQLPELGRLNRKQITSLVGLAPMNRDSGTLRGQRHIFGGRADVRRVLYVAALVGTRFNPVLKAFYAKLLVAGKPKKVALVACMHKLLIILNAIARTKSPWSNEIARVV

SEQ ID NO: 466740 - protein, 312 aa, unidentified
MVVIAGIDVSKDKLDIHVLPSNQTFVVGRDRRGLASLVRRLRKAGVEQVALEASGDYERIVIEALEAAGFVVRLLNPARVRAFAEAIGILAKTDPIDARLIALYCQHFPDKGLTRRPEQARKLGEFLNMRAMLLKLAGEIRNSLEHVREPGLKALADTLSADIAAKLKDVDDRIAKVIAGHDATMRKARIIRSFTGAGPVLTSGLLARVPELGGVTRHAAARLCRAAPTDRQSGRTRHRSSIEGGRDQVRPVLHMAALAAIRSNPIIKAFAHRLSAAGKPKPLVIAACARKMVVILNAMLRDNTEWKYAKAA

SEQ ID NO: 466741 - protein, 315 aa, unidentified
MGEYSEIFVAFDVAKRKHAVAVAESGRRGEVRFLGEIENSGTAIERTLKKLSGRHGRLHVCFEAGPTGYGLYRQVQALGHACTVVAPALIPRRAGERVKTNRRDAVTLARLHRAGELTGVWVPDAVHEAVRDLVRARQAAADDLRRKRQQLLSFLLRQGRIYGAGGHWTLAHRRWLARQSFEHPAQQIVFQEGVDAIEDAAQRLHRLEKQLAIIVPSWSMAPVVAAFQAMRGASFLVAVTFAAEIGDVRRFDTPRQLMSFLGLVPAESSTGDTIRRKGLTLAGNRRARRALVEAAWTYRFPARVSETLRARFSSV

SEQ ID NO: 466742 - protein, 343 aa, unidentified
MQVVRIGLDLAKYVFEVHGVDNHGKVVVRKRLRRDAVAGFFANLPACLVGMEASNGAHYWARVLTELGHQVRLISPQFVTPYVKSNKNDQNDAEAICEAVGRPSMRFVPAKSTDQLAVQAVHRIRRRLVADRVRLVNQIRGLLSEHGIVIARDIAQLRRGLAVVVGNINDGLSEMLRALMRELQEELSELDTRIASYDRRIREIFRTNEQCQRLGKIEGVGPVTATALIAAVGDRSCFKNGRQFAAWLGLVPKQRSSGGRARLFGISKRGDRYLRTLMIHGARAALSRATGKQDPRSPWLGKIRQRRHPNVAAVALANKNARIVWAMLTGDAAYEPALSVRAA

SEQ ID NO: 466743 - protein, 345 aa, unidentified
MEIRTIGIDLGKTVFHFVGVNARGEVVVRKKGSRTQLLRFTSNLPKCLIGMEACGGSHFLGRALREQGHDVRLMPAQYVKPYVKTNKNDYIDAEACAEAVTRPSMRFVPIKTDDQLDLQSLHRVRERWVGRRTAVINQIRGLLLERGITIRKGRHHIEESLPSILEDPDNKLSGALRVLLTQLRLEMQYLHGQVEESDKLIVRICGELEPCTRLVAIPGIGPITATATIAAIGNGAAFKKGRGFAAWLGVVPGEHSTGGKQKLTGTRRRGNKYLRKLFVQGAHSVLLQRTKQSAGLSTWLAQLTTRKRAQVATVALANKMARMAWAVLYKGEAYRPPSLPQVIAA

SEQ ID NO: 466744 - protein, 342 aa, unidentified
MSVYVGIDVHRKRSQVAVIDPGGQVLANRNVPNGAEPILKVIGGLPPGTPAAFEACYGTSWLVELLEDYGFDPHLVHPSRCKAIASARLKNDKVDAAILAQLLRADLLPEAWIAPPAIRQLRALLRHRVALVRLRTRLRNRIHAIVADYGYDRPAGGYWTGPGRAWLAALELAAVSRELVEDYLGLIDALQDRIDRLDWEIRQRARSDPQVKVLTQLPGIGPFTALVIVAEVGDISRFASARKLASWAGLTPTVRGSDRVAHYGHISKEGSAWLRWVLCEAAQTAKRHPQFAASFQRIATRRGRKIATTAVARKLLTRAWHLLASAGHAAAPQPAAPQTAAR

SEQ ID NO: 466745 - protein, 343 aa, unidentified
MDHYVGIDVSLELSSVCILDATGKIVKEAKVASEPEALTTFLTRLGLPLTRIGLEAGPLSQWLHAALVTAGFQAVLLETRHVKAALSAMIVKTDRRDARGIAQLLRMGWFRPVHCKSAPAQEVRALLVARKQLQAKMRDVELSLRGLLRGFGLKVGEISKGQYAARVRTLVAGHTMLEQIAEAMLQAREALRTEFGKLHRAMLAIARADEVCRRLMSVPGVGALVAVTFTSGVDAPERFSRSKAVGAHFGLTPKKYQSGETDITGAVSRVGDVMVRTALYEAAHILLTRAVRFSSLKRWAVEVAKRRGMRRAKVALARKLSVILHRMWVEGTTFRWGREVAAA

SEQ ID NO: 466746 - protein, 316 aa, unidentified
MKATTIGIDLAKSMLQVHGVDARGNAVVRKQLKRDQVLPFFGNLVACRIGMEACGSAHYWARKLEKLGHSVKLMAPQFVKPYVKTNRNDAADAEAICEAVSRPNMRFVPIKNGEQQAVLALHRARQGFVTARTAQANQIRGLLSEYGIVIPQGLSHVSKRLSEILEDGENDLPGVFRQLLQRLGDHLRELHRQVGELELQIQLWHRQHEASCRLAQIPGIGPLTASALVASVGNAKSFANGRQLAAWLGLVPRQHSSGGKSVLLGISKRGDSYLRMLLVHGARAVIRVAEKKPGYADSWLARLMGVSEIPCESRLH

SEQ ID NO: 466747 - protein, 340 aa, unidentified
MRKYIRIGVDIAKNSFQVHALESEDCSATKRKLSRSGIVKFLAEVEPCAIGMEACGSAHYWARRFLAMGHEVKLTPPIYVKAYVKRGKNDAADAAAICEAMSRPNMRFVAVKSEDQQATLMAHKTRELLIKQRTMGVNALRGHLAEFGVIAAKGISHVEELVERAAAADLPAMVQATLGVLLAQLRSLDAAIDELERAIVADHRRDPVSRLAASVPGVGALAASAILASAPDPHAFKSGRDFAAWLGATPKQNSTGGKEKLGSITKQGNRYIRRLLVLGAISVLRAAPKRKGALCDWLAALRARKPAKVVAVALANKLARIVWAIITTGEAFRSSIYAKA

SEQ ID NO: 466748 - protein, 360 aa, unidentified
MDVHKKTITIAIADKGRQKQPRIYGTIANDLDALDKFCRKMVSTSSLLYLVYEAGPCGYGIYRHLSAKGFDCMVVAPSMIPKKSGDRIKNDHRDAAMLARLHRAGELTAVYVPNAQDEAMRDLSRAREDAVMVAKKAKQRLKAFLLRNGIVFTGKSQWSKAYFNWLANIAMPFPAQQVALQEYIDTVHENLNRVNRLTDQIRQLVPGWRLAPIVNALQAARGVSLIVAVTVLAELGDLSRFDKPSQLMAHLGLVPSEHSSGDSIKRGGITKTGNSHVRKVLVEAAWAYRMQARISLLLLKRQQGLPDQVCRIAWKAQLRLCVRFRRLTARGKTKQKVVTAIARELSAFLWAMAKQVQPVV

SEQ ID NO: 466749 - protein, 324 aa, unidentified
MREKLRFLGLDVHAETIAVAVAEPNGEVRSLGTIANREESIRKFIKKLGSPEQLRACYEAGPTGFVLYWQLTQLGVDCAVIAPSLVPKKPGDRVKTDRRDALNLARCHRNGDLTAVWVPDEASEALRDLVRQREAAKQDQLRARHRLTKFLLRTGQRPPLGLKAWTERYWRWLDQVRYVQPAQEATLRDCLNEVQHMSARVKRLEDAILEVVKLAPQPMQEVIRGLQALRGMAHISAVTIASELGHISSRFPSARKLMGYSGAYPDEDSSGDRIRRGGITKAGNAHLRRIVVESAWCYRHWPRVGAKLRKRQEGKPGITNVWVG

SEQ ID NO: 466750 - protein, 420 aa, unidentified
MTISNTIPADAVLVAIDIAKVRNEVLIEVPGDKRRRRLQVLNNRAEHDRLIEILQSYGRPIVCGFEATGNYHRPIAWRLAEAVFEVRLVSSLALARTREALHNGWDKNDPKDAQVILHMLRIQATQAYHDPLRAGINDVQELSKTHEAIAKAKTEIQHRILTHYLPLYFPEIERIRGNSRSDWFFAFLDAFPTPASITALTKEEFVTAAWDVVGRKVSKTQILMDIYEMARTSIGLPLPLDAPAIRMFRMVVAEARSLIRQRNEIEAQADELLRHSHDYQLLRQIPGIGPINALTIIAEAGDLRRFHHHRQFLKFCGLDLSTQQSGQYRGQTRLSKFGNARLRRTLWIAGQVAVRQRENGFRHKFERYIARDRDNPDLRRKAMTAITAKMARVVHAVIKGGSDYRPFVEGRVPGGRTTVS

SEQ ID NO: 466751 - protein, 452 aa, unidentified
MPAGKDITMHYQKVLKMPESIPYLSVGFDVGADFTWMSIMLPYGILTGKPFKIIHSDPQSRELAISKIKEAQEMYSLESRCFLESTGIYHIPLLCFLRDKGFDCAVINPIITKNSTNMNVRKLHNDKFDSKKAAKVGLDASLKASIVPDDAIIDLRNLVRDYYYFKDLQSAIVLKLHAELKVSFPAYLNVFSKVTTQTSLKLLEAYPLAADMLAAPKDELVETIRSTARFGETYALARYDAICTAAKDAAVFGRALPSNALRIRLYIKMYREYQAHLDSILEELHQAVGKLEGTPDYDRISFIQTLHGVGFLSAVVLIAEMGSFDLFSSPKKLYAYFGLDPGVNDSGKFHGDRVHMSKRGSSLARRILHMVAINNLKVDKATKTPVNPVIYDYYTRKCASKKKSVAVGAVMHKICNIIFAMLRDNKPFELITPEEHRERYAAEHPESVNTAA

SEQ ID NO: 466752 - protein, 427 aa, unidentified
MKIVSLRPGVNASGHLVLSVDVSKKYLDCYVRLTDSYRRILNTSPAVRAHLAELFRLARLEDLSGILVACEPSGGFERTLLETARALDCLCVYVSGEQVAQLRKIESLDTGKTDVKDPRVIELAVSLGKTLRYRRLPQIYEELRLVTAASDADEQARARTKQRIITTTIGLFPGYDLGKDRFFSRTGRAVIDAYHLDPSSIVRAGRTRFEGTMRRRVPRVHRATLDKIFAQAEEATFRSETSTRVLKGRIMELMGDVDRFNGRMDHYRTRIEDLGRALQEDGLLCRLDEDISGLTLYNLARIAGEAGPFTDFHSKRALLRYAGLNLRERQSGVYRGRTRLSKKGRIMLRKATSQATFPLLRHDRLFGTMYAHKREGGMCAQKAKVAVMRKFLVMVYAMSISRRSFDAYRFLNAKREATRQSALQMVC

SEQ ID NO: 466753 - protein, 410 aa, unidentified
MQLIYQHCCGLDVHKKTVVACLRTPGARGRRRSETRTFLTTTVELLRLSDWLVENGCTHVAMESTGVYWKPVFNVLEGVCEVLLVNAYHVKILPGRKTDVGDSEWLAELLECGLLRGSFIPPEPIRALRDLTRYRKTLTQARASESNRIQKLLETANIKLSSVATDVLGASGRAMLSALVSGKRDAEQLAEMAKGTLRTKRGQLVDALSGRFTDHHAFLLGQLLAHVEHLDRAIAECGARIEGAMLPFSQAAIRLQTITGVGRRTAETLVAEVGVDMSRFPTPAHLASWAAMCPGNNESAGRRKSGRIRKGNLWLKSALIEAAWAASHQRGTYLGALYARLSRRRGAKRAVVGVGHAILVAVWHILSKNEPYRELGPRHFDSIDKDRLKRRYIRRLQDLGFEVTIEGTAA

SEQ ID NO: 466754 - protein, 339 aa, unidentified
MLYVDIDVAKNKHDVTALNVPGKTVLKPLTFSNNKAGFELLDLSLRQLNQDCLIALEDTGHYAFNLLNFLHEQGYKVYTYNPLLIKEFAKSLSLRKTKTDKKDAHGIALKLLSDPNREQFQHDNRQVELKILARHIHRLKKKQSDWKVQYTRCLDIIFPELDKIVGKHSEYTYQLLTRYPNPQKRIEAGFDKLIEIKRLTASKIQDILSVAPRSIGTTSPAREFEIIKHYKRLIDKAETCVNDLMAEFNSVITTVTGIGNRLGAVILAEIRNIHAFDNPAQLQAFAGLDSSIYQSGQIDLAGRMIKRGSPHLRWALIQAAKACARFSPAFKAYLKTKLE

SEQ ID NO: 466755 - protein, 412 aa, unidentified
MEVRYTRCAGLDVHKQSVVACVLTNAAQGQAAQQVRTFGTMTRELETLATWLREQQVEQVALESTGVYWWPVYNMLEEAGLPVTLVNPRHLKVPPGHKTDRGDAIWLADLLRHGLVRASFIPPADIRALRELTRYRANQVGARAKEVNQLLKTLESANLKLANVATDPVGVSGRAMLAAVAAGEDDPATLAQLAKAGLRNKLDALEQAFTGRVKPHHQVLIRASLDHLRFLERTIEQLDQEVARALAPFAAQMAALDAVPGIGPVAAAAIIAEIGVDMARFPTAGHLASWAGLCPGNKQSGGRRLSSATTKGNVWLRRILGEVAWAAIRERGSSFRARYYRLKPRLGAQQALMAIMHQLLKVLYHLLQTGEPYREVGAASSQTANPQRAVRRHKRGLERLGYIVSLTPAPAA

SEQ ID NO: 466756 - protein, 346 aa, unidentified
MSYSTTVGVDLAKNVIQISVVSGRGKELSNRSLTRKKFAEFLGKQKPSLIAFESCASAHYWSRAAKRHGHEARIIPAKAVAPFRQGHKTDSNDALAVAEAARRPNIKEAPMKTAEQQGLQAIQRSRELLIGECTALSNHLRGILLEFGVAIPQGFASLLRTLPEILEDGDNELPDLYRPTLHRMYTRLIELREDIESMTKEVDNLVKQHPVCKRLTAIEGIGPIGALSLYAVMGSGKAFTKSREFSAYLGLTPRQFSSGGKTNIIGISKKVGNRRLRSILIQGARAYVYRMKEPRSLKDRWLKDLIERAGPNRAAVALANKNVRTAWAMVTQGTDYQRRLQLEMAA

SEQ ID NO: 466757 - protein, 325 aa, unidentified
MKFILGIDIAKDKFDCCLLSEGRKFHQEFLNAPRGFKQLLGWLRKADASPAALWACMEATGIYGEALLRFLFEKGLRVSKVNPAQIKHYARSLLSRNKTDRQDAWIIAEFARERSASGQLRIWQPPSPAIARLRQLTRLLAARKGQRAREKRRARMVDRELRAHTRAMLRAFEKQIDAIEAEINALIASSAELKRRHDLLRSIPCVGPVTAQTVLAELPEQIANARAAAAYAGVTPRREDSGQKKGRARLSKTGNAHLRQALYMPASSGRKTNPRLRACAQRLAHKGKTRKLAIGACMHLLLRLCVGVMASGKPFDPHWPKQPMR

SEQ ID NO: 466758 - protein, 341 aa, unidentified
MSTIIRFGLDLAKSSFAVCGVDAAERVVLRKTMARSELLIFFSTQNRAVIAMESGTGAHHWARSLRAMGHEPRIIDPRFVAPYRRQGRSGKNDTNDAEAICEAAGRPSMRFVPIKSADQQALIMVHRIRSAVVTDHTRTINQLRALLAEFGIVTARGADHFKRQWSEIRQRFAEEIPGLAWESLDALYVELGRMHDRILELDQRLRTFIRDDAAAARLAEVPGIGVVTASALVATVGDGRDFKNGRQFAAWLGLVPSQNSTGGVSRLGHITKRGDRYLRTLLVHGARSELTRTARRTDQRSRWAESLKSRRGWNKTAVALANKHARIAWALLAHHQSYQPN

SEQ ID NO: 466759 - protein, 340 aa, unidentified
MSNVATIGLDIAKSVFQVHGVDAAGEIAVRRKLTRGRVLAFFKSLPRCLVGIEACSSSHYWARELIALGHDVRLLPAQYVKPYLKRQKNDAADAEAICEAVTRPTMRFVPVKSPEQQSVMMLHRVRLMLNRQRTQISNALRSHLSEFGVVASIGRNGIEQLLVVINDESDARIPADARLCLRMLEAQLKVVKEQILENDRRVRASARETELGRRLMEIPGVGPLLASAFVATIADPHAFKSGRCLSAWIGLVPKQNSSGGKEKLGSISKAGNRYLRQLLVVGAMAVIRYAERNGTRRPWLVQLMARRTTKVAAVALANKTARMVWALMTGGERYREPVIA

SEQ ID NO: 466760 - protein, 347 aa, unidentified
MKFYTNSHPFYCGIDLHSRILYVCIIDNEGKTVLHQQIKADKQQLLNLLKPYIGHVVVGVECMHCWYWVSDWCEEYSIDFILGHALYMKAIHGGKAKNDKIDSYKIACLMRGGNFPLAYVYPSRMRATRDLLRRRTHVVRHGADLKAHVVNTDSQYNLPSQALNLKNISAREGLKHHYEDPVIQRTIELDMVLLDCYAKELKKVEWFIEKQAKEHHGCYLSLIRTFPGIGQILGLTILYEIGEICRFESVQNFASYSRLVKCKAESAGKIYGTSGNKIGNGYLKWAFSEAAVLYLRGNDRAKNHLSKLQKRMSKGKALSALAHKIGRCVYYMLKNKTVFDEDKFLKG

SEQ ID NO: 466761 - protein, 344 aa, unidentified
MKVTTVGLDLAKNVFQVHGIDSTGKVIVRRTLRRRQMMPFFGKLEPCLIGIEACGTSHFWSRELQALGHEVKLMPPIYVKPYVKRGKTDAADAEAICEAVTRPTMRFVAIKSAEQQSVLALHRTRDLLVGQRTQLVNMIRSQLAELGIVLAKGIHHALRLVDQLVEGVVPDIPPLACKIVIALAEQIRELQARVAMIEGEIKTWFRGNDLAKRLATIPGIGYITASALAASVTDPHRFTSARQFAASLGLTPKADSSAGKDRMGRISKMGDRYLRRLLVIGMTSQLQSARRKPEVHPWITNLLVSKPNKLVAVAMANKAARIAWVIMTRGEAYRAHRPATEGTA

SEQ ID NO: 466762 - protein, 341 aa, unidentified
MDHYAGIDVSMEQASVCVVDASGKIVRETKVASEPDALIAWFGGLGLKLTRIGLEAGPLSQWLYAGLREAGFAVELLETRHAHAAFQVMPVKTDRKDARGIAQLIRLGWFRSVHCKSMSAQETRAILSARRLLGTKLHDVEMSLRGLLRGFGLKVGKTTSSRFAWRIRELVAGHPTLEVVAEAMLAVRATLLREFNGFEKRVRTMARSDARVRLLMSAPGVGVVVALTFVSAIDDPARFKSSKGVGAYFGLTPTKYQSGETDVTGRISKIGDADVRAVLYEAAHVILTRPIRGGALKSWAARIAKRAGMKTAKVALARKLAVILHRMWVDATEFNFAAAAA

SEQ ID NO: 466763 - protein, 467 aa, unidentified
MTPHKDYCLDPCPPVLTPMLPPSPILSDALQVCHPHAAGIDIGEAEHWVAVPPGSDPQPVRRFGPFTADLDALADWLIDCGVTTVAMESTGVYWIPLFELLEARGVQVLLIDPRQAKRAPGRPKTDRLDCQWLQRLHAYGLLAGAFRPADQVCVLRGYLRHRQMLLTYAAHHIQHRHKALEQMNLKLTQVVSDITGVTGMAILKAIIAGERDPVTLAKLRNPHGQHSEDEIAKALQGTWRAEHLFALQQAVELYQFYHQQLTTCDQRITAHLETFADQSDGQPLPPKARRHKKTNEPRFDARTPLSRLAGVDLTTIEGIEENTALILLSEIGTDMHRWPSVKHFCRWLGLCPQHQSSGGKVLSRRVRPGAHRVTVALRLAARSLHHSQSALGAFFRRMKARLGTPKAITATAHKLARLVSHLLKHGSAYVQQGLENYEAQYHERKVKTMAKQAKALGYTLVPLAAQG

SEQ ID NO: 466764 - protein, 417 aa, unidentified
MQYAPPALPAQPPNGLTCGIDWARDDHAIAIVDAQGHQVYRSTVEHNAVGLRELMALLARTGVGEAAIERPDGPVVDALLGAGITVVVISPNRVKNLRGRYGSAGNKDDRFDAFVLADTLRTDRTQLRPLTPDSPATVALRAAVRARRNLVAHRVAVANQLREHLKGVFPGALGLFADLDSVISLTFLTRFDCQERADWLTPKRLGAWLKSVRYTGRTDPATLHTRLTAAPRGATGAQGAAHAHITGALVTTLTTLVEQITALSEQIGEQLAAHADAHIFTSLPRSGTVRAARLLAEIGDCRARFPTPEALVGLAGVAPSTRQSGKLTLVGFRWSCDKNLRDAVCDFANDSRHANPWAADLYDRAIARGKDHPHAVRILARAWLYIIWHCWQNNTPYDPANHRALQTLLKQHQQPAA

SEQ ID NO: 466765 - protein, 438 aa, unidentified
METTENMNRGIAPEEIVAWIGLDWADNEHKISMCDVTTGEVEASVLKHSSEALQEWLAGLEKRYEGKKVAVILEQSRGAVIYALMSSDFIVLYPINPQSLASYRRALYPSGAKDDPVDGALLREMVQKNPERFRQWIPDDPDTRSLRLLVEGRRKLVKQMTRLTNQLTSQLKTFYPQALEWAGELNSRQACEFLEEWPTLEAVQKVRPARLRKLYKKYGRPRPETINRRIEQIKEATPLTRDPAAILAGSTMVRAIAMQIRPLIAAIENYDDEIKRLFQKHPDRLIFESLPGAGPVFAPRLLAAFGADRERWGSAAEIQKLSGIAPVTERSGKQCWVHWRLACPKFVRQTFHEFAASSIQWCNWAKGYYQHLRDQGKEHHAAVRALAYKWIRILFACWKNRTPYDNEVFLNALARRGSLLSQRAAAVVPAGRAKAQPA

SEQ ID NO: 466766 - protein, 312 aa, unidentified
MELRYIGIDVSKDRLDVHILPEGTAFAVARDGKGLAELVERLSAVQPERIAVEATGGFETVAAAALAGASLPVVIVNPAQVRHFAQAVGQRAKTDPIDASMIVRFVEATKPDVRPLADEATQLLADLVARRRQIIEMIVAERNRERRVEVKRIKKSIARLIAALEKELSEIDAEIDASVRGSPAWRDKEDLIASGPGVGPITARTLIAELPELGALNGKQIASLAGLAPFTRQSGQWKGKAMIAGGRKAVRSALFLASLAACRHNPILKAFRQRLIDAGKPKMLVAIAAARKLLTILNAILRDKQPWRPEIA

SEQ ID NO: 466767 - protein, 366 aa, unidentified
METIYIGVDFHARQQTICYLKTETGELVTCELKHQDKQKVRAFYAQFCGRVIVGLEASGYSPWFERLLEELGGEVWLGHATEIRRRARWRQKNDRRDAELILELMLHDEFPRLHRPAVQSREVLRMLRYRQKLIKMRTMSKNSLQAIALQAGLAKGSRLFTKAGQQELAAAEMSPVMHWQREHWLQLMEPLNQQLLETMVWFKAQSKGDACITRLRTHPGIGLLTSLCIVHTLQPVSRFRNTRKVAAYAGFDPVERSSAERKCFLGISKAGSRLLRYLLVEAAQTAVRKDEDLKRFYQRLADRRGRPKAKVAAARKLLIRAYIMLRDEIDYAEFRHRAVAARLARRGQGPSNVPEVLIGQPASPEH

SEQ ID NO: 466768 - protein, 321 aa, unidentified
MPPTPSRFNHIVAFEVSKASLVVHTLPADRQQTIDNTPVAVRRLLRAEQRTNLKLGLGPMLMVCEATGGYERHVLEAADAQGLALHRAHGSRTRMFARFNGKLAKTDAIDARLIARYGLTIDLPLYTPPSPEQVALRQLRQRRDEIGLMLRMEANRTEHATLKRLKTSLTRHQAWLKQELDAIETEIEDLIGNTPELHRKATLMRSLTGIGPHTVAAILAYLPEIGTLSKATVAAISGLAPIAQDSGKHSGKRHIAGGRATLRASLYMAALVACYRNPTLRAFAQSLRERGKPNKLILTAVMRKLIVILNAIVASGQPART

SEQ ID NO: 466769 - protein, 416 aa, unidentified
MDVLHPRCAGLDVHKRTVVAAARLVEDGKVNKEVRTFETTTAGLMALAEWLSNRAVTSVAMEATGVYWKPVWHILSSVGGFELVLANALHVKAVPGRKRDVSDAAWIADLQAHGLIRASFVPPREVGELRSLMRTRKQLVRERTSHTQRIQKTLEEANIKLDSVISDVLGQSGRAMLEAMIAGESDAKRLARLASPRIKAAPETLERALDGRLAEVQRLLLRVHLAQIDAVEASIATIDRHVETHLDPFRTAVEQVVTVPGMGVRSAMAVLAETGIDMSRFPSQGQFLSWACLVPRSDESAGKRRSSRLRPGGNWLKTMMVQCAWAAVRKKGSRFAALFERLSAKRGARRAICAVAAEMLRTIYHMLKDGTCYEHKCLSLHRQATPQEEAKRLIRRLARIGYVADIKPIPTPAPSV

SEQ ID NO: 466770 - protein, 338 aa, unidentified
MKVYAGIDLHSSNNYIGIIDEQDHRLYQKRLPNQLAHIKQALEPFKESLEGVVVESTYNWYWMVDGLQEDGYKVHLANPSAIKQYEGLKHTDDKWDSFWLAHMKRLNILPEGYIYPKEERPVRDALRRRLLYVRHRTSHILSLQSAITRNLGYKMSGQDIKKLNESDADKLFNEPFLILSATNSISTIHFLGKKIKEIEKAVKTHVKLKPEFEYLLTMPGIGDILGLTIMLEAGDISRFPTVGKYSSYCRCVKSERLSNKKKKGEGNRKNGNKYLSWAYVEAANFAIRSYPEFQSFYNRKKAKTNGIVAIKALSNKLARASYYVIRDQVPYDASKLFR

SEQ ID NO: 466771 - protein, 343 aa, unidentified
MGNDTRIAVDVAKAVFEVAISDRPGHVARRPRLQRAEFLPFMAQQPATTVVMEACGSSHHWARKLEGLGHRVVLLPPHHVRPYVRGNKTDRTDAKGILEASRNEDIHPVPIKTVAQQVLTSLHRLRSGWVKERTARINALRGLLREQGFFIPVGVRQVVPAVWLLIEDADSDLPDPLRGILAEACQEIRQIEARIKLVERQLEATAEQLPAVAWLFTIPGIGILTATALVAFLGDIRRFPSGRHLASYLGLTPKEFSSGLKRRLGRISKRGHGYLRTLLIHGARSVLLHARKQQPDRLREWAHKLESTHVHNKAAVAVANKLARIVWAVLTYQTPYGSLRKAA

SEQ ID NO: 466772 - protein, 394 aa, unidentified
MHTIGIDVGKRQHIAAICHEGEREARRSVLRFGSDRRGFAELERWIERQGPISRAVLESSGHYHLSLAAALQRSGVPVAVINPLESKYFAKRRLQRTKSDPADARTLAALAMVDQPEVRDVLAGAELREAERFAMMLVNEQGRICQRITRLVELGFPELEAAYDDPTCISALAVLRTAPTATAVGRKRLATLAAAARPGGGRAIGAKKAGQIQELAQDTMAPPELSRQIAFQMRLLIAQHDLLGAQITEAEAHLATLLDGELVRRLRTIPGVGPAIVATLIAEIGDIRRFSDFDKLVAYVGVHPAEKSSGEKGADPETSWRMSKAGNAYLRTALYQMAIVGITHNPTIRAHYARKRAQGKSKMNAVGHCMKKALAIVWGVWRSGADYAAPPTNA

SEQ ID NO: 466773 - protein, 345 aa, unidentified
MDYYAGIDVSLEQSSVCVLDAGGKIVREAKVASEPEALIAWLGSLGLAMTRIGLEAGPLSQWLFAAMKRAGLPVELLETRHVRNAFKTMPVKTDRKDARGIAELMRMGWFRPVHCKSISAQETRAILTTRTLIEAKLRDVEMSLRGVLRGFGLKVGKTTPTNFSERIKELVSGHANLQVVADALLAVREVLLREFRGFEKRVRTMARHDGRATLLMTTTGVGAVISLTYAAAIDDPARFKNSKQVGAHYGITPKRYQSGEIDYTGRISKIGDKSVRTALYQAAHIILMRPVKASALKTWAMQLAKRVGMAKAKVALARKLAVIMHRMLVDEKPFDHKLPNQVATA

SEQ ID NO: 466774 - protein, 318 aa, unidentified
MTKSSTLTAGIDTSKDKLDVAVHGTATRLTVENCEAGWQRLAGELTKAGVERVGIEATGGYERDVTRHLQAAGFTVVVLQPLQVKAFAKLHLKRAKSDRIDAALVAACTYIFDARNKLPPDPRFDALADDLTFIEQIEEDIARFKTRLEHIRDNRLQRTVTADIKRLDKRRAVELKRLIARLRSHADLAQRFELVLSIPGIGERTTVTLIVRMPELGRVSREQAAALAGLAPFVHQSGKRQGETHIGGGRSRLRRSLYAAALAASFRWNPALIGLYRRLTARGKSHNSALIACARKLLVFANTVVARGTPWVVAPAGA

SEQ ID NO: 466775 - protein, 412 aa, unidentified
MTATNQFAAHVGLDWADKKHDVCVQFKNGERVFHVIEHTAEALDVWLTELHQKVKGRIAIALELKKGPVVYALKKYPFITVFPVHALSLARYRQAFSPSGAKDDPQDAELALELMLRYPQKIKAIEPDNADIRLLQQLVEQRRQLVEDKRRFVNRLINTLKQYYPQPLEWFSHRGSLLLCELIMRWPSLQQLKRARRDTIRNFLNAKGGRAMALTEQRVVSIDNAIPLTTDPSVIEANALMATALATQIKVVSEIIKTYDERIETLFDTLPDSGLFKSLPGMGPCMGPRMLAALGDNRDRFNSAEEIQNYAGIAPVTERSGQKSWVHWRWQCAKFVRQTFVEWAAKTVNSSYWARLYYRGLREKGKSHQSAIRALAFKWIRIIYRCWKAKTQYDEAKYLLVLEVRKSPLLKP

SEQ ID NO: 466776 - protein, 415 aa, unidentified
MLFVGDDWAEDHHDVELVDETGRRLTKARLPEGLEGITRLHAMIGAHGPAQWAELDPAEAAARVLVGIETDRGAWVQALVAAGYQVYPINPLQVARYRQRHSTSGAKSDAADAHVLAEIVRLDHAHHRPIAGDSAEVEALKLVARTHQTLIWDRSRQVLRLRSGLREFFPAALAAFDDLDAPDALELLGRAPDPDRAAALSKAQIAATLRRANRRDIDAKTTRLQQVLRAPALRQPGPVQAAYAAVVTVQVRLIATLNTQIDELGEVVASHFGRHHDAKRYLSHPGLGVVLAARILGEFGDDANRFADAKARKNYAGTSPITRASGNRRVVQARYARNKRLGDAVQQWAFCSLRGSPGARAYYRTLRKRGIGHQAALRQLGNRLVGVLHGCLKTNTTYNETVAWAHHIQNQPAAS

SEQ ID NO: 466777 - protein, 343 aa, unidentified
MQAVTTIGLDIAKSVFQIHGVDAAGNVIVRRQLKRRYVLPFFQRLPPCLIGIEACASSHHWSRELQALGHTVRLMPPAYVKPYVKRQKNDAADAEAICEAVTRANMRFVETKTPEQQSCLMLHRTRHLFIRQQTAVINAIRAHLAEYGIVAAVGRNGVEELLGVVADPSDKRVPEIARACLAALGAQLRMLKAQILEFDRMITAWHRSNETSKRLDAIPGVGPALATALVASVPDPKAFRSGRNFSAWIGLVPKQHSSGGKDKLGSISKQGDRYLRSLFTAGALAVIRYAKIHGTKHRPWLTALLARRPTKVAAIALANKIARMAWAMMARGDHYKEPVALAA

SEQ ID NO: 466778 - protein, 400 aa, unidentified
MSERRAQAWAGVDAGKGHHWAAVVDETGATLWSKKIDNDESAILTALGEILDLADEVHWAVDICGTSSALLLALLAAHGQQAVYVPGRTVNRMSGAYRGEAKTDARDAYVIAETARHRTDSTTVDVPAQLAADLALLTAHRSDLVADRVRMINRLRDVLTGVFPALERAFDYSSHKGALVLLTGYQTPAAIRRRGRSRLTAWLANRGVRGADEVAAAALEAAQAQQTALPGEDVAAQIVAGLAEQILALDDRLKRIGKQTSETFRTHPQAEIIESLPGMGPILGAEFIVAAGDLVAYADAGHLTSAAGLVPVTRDSGRRTGNLHRPKRYSRRLRRVFCMSAQTSMMREGPNRDFYLKKRGEGLKHVQAVIALARRRASVLWALLRDNRVFTSAPPVARAA

SEQ ID NO: 466779 - protein, 318 aa, unidentified
MRFAGIDVSKAQLDAAVRGDVEEIWSTANDAAGIRSMVERLHAHAPALIVLEATGGFQAACAAALVEAGLPVVVANPRQVRDFARATGQLAKTDRIDAAVLALFAERVRPEVRPLPDEQAQALQALLARRRQVLEMITAEKNRLGFSSAAVVRKGIARHIRWLERQLEDLDGDLDRFIQDSPVWRAKENLLRSVPGVGPNLARTLLADLPELGRLSRKQIAALAGVAPLARDSGTLRGKRMTWGGRANVRTALFLSTWSASRWNPSIRPFYDRLRAAGKPPKVAQVACMRKLLTILNAMVRDGTTWSPEIEPELQHGC

SEQ ID NO: 466780 - protein, 343 aa, unidentified
MKLHVLGIDLGKTVFHLVGLDSTGKVVIRKKCSRSQLLAFTANLQVELIGMESCSGSHFLGQALREQGHEVRLMPAQYVKPYVQTNKSDFLDAEAIAEAVQRPRMRFVPIKTEEQLDLQALHRVRERCVMRRTAVVNQIRSLLLERGLTLPKGRSHVDALLPRILEDAELSLSGCFRVLLAQLKMELEQSTARIEQMDRVIHKTAKENEDCQRLTEIPGVGPVTATALVAAVGNGSTFGKGRNLAAWMGIVPGEYSTGGKQKLLGISKRGNTYLRRLFVQGARSVLQQRHKQAPGLSSWLAQLLARAHQNVAVVALANKLVRMAWAVLCKNERYRPPIVAVST

SEQ ID NO: 466781 - protein, 446 aa, unidentified
MEVVFPYCAGLDVHKKRVTACRLVSDSTGQAPEGVAELQTFGTMTHELLALADWLVEAGVTHVAMESTGDYWKPVYNLLEGIVTIFLVNASHVKNVPGRKTDPADARWLAKLMRYGLLQASFIPPIAQRDLRDLTRYRTKLVQERAREVNRVQGVLERANIKLASVASDVLGVSGRAMLEALITGQADPATMAALAKRRMRSKIPALEQALTGTVRDHHRRLLAMQLRHIDFLDEQIAALNSAIAQCVTTLSQEAPVSPAPLAPTTIDVPTPADPPPPLTFTRAVELLDTIPGVNQRGAEMIIAEIGIDMTRFGTAARLAAWSGVAPGNDESAGKQRSGKTRKGNQVLRAGLTQLAHGAVRTKGTYVSALYRRLAARRGKRRAILAVAHSIMGSVFHMLSRNEPYRELGPNYFDERRRHYTVDRLTSRIEHLGYRVHLEPLPTAAA

SEQ ID NO: 466782 - protein, 383 aa, unidentified
MKKNSIAKLQANKSQIRKMAAKQKLTVGLDLGDRTSRYCILDGAGNKVGEDQLPTTKVGLDSLFGKMAPSRIALEVGMHSPWVSRQLAALGHEAIVANPRKVRLITQSVKKNDRMDAEHLARLARVDPQLLAPIRHRGVEAQADLAVIRARAELVEARTKLINAARGLAKPMGERLKSCDADYVKESLADGLGEATQNVIRPLLKSVEDISQQIGVYDKKIREVEKRYAETELLKQVHGVGTLIALTYMLTLEDAERFEHSREVGPYLGLTRKQRDSGDSQPELGISKAGDELLRRLLVQAAHCILRDGAPDSDLKVWGMTKVQTGAKTGNGKKGSKRRKKKAAVAVARKLAVLLHKLWVTGEVYDPQYNRKAVEAGKGKAAA

SEQ ID NO: 466783 - protein, 372 aa, unidentified
MPDSTRFAGLDVHRDTVVVALAPAAGPVEQVVELPHHLPRLRAFFEKLARLFPVKACYEAGGCGYGLQRAMASWGVECVVIAPSLIPRKPGERCKTDRRDAIRLAESYRAGQLTPVHVPTEAEERVRGLTRARQSVVGDVHQCRQRVLKLLQLRGLVYREGRSAWTKKFHDWLVALLPTLPELDRLVLSTHISAIDHNTLLRAGLDQEIEKIATQEPYCATVSRLRCLRGVDTLTALSLVAEIGDVRRFDTPRRLMGYLGLNVSERSSGGTQRRGGITKAGNSRCRRLLIEAAWNYRHAPKGSVAIRKRREGQPPDVISHAARAEVRLHKRFAALLERMPSQKAVTAVARELAGFVWAQMRGTADVLTAKAQ

SEQ ID NO: 466784 - protein, 413 aa, unidentified
MLGIGIDWAEEFHDVAFGTPEKGVVEQFRISHGPDGVGALIDRALRLEPDPAEVRVVLETRHGLLVEALIDAGFTVLPVNPDLVARRRGPARKKDDAEDARICCLLALDRHAGLKALVPHGEFGGELRAIARDDERAARDQRRLLNRLRADLQTTYPAALTLAGADLGAPTVLRLLQRWPTQPELAQASRDDLISFARAGRHGWPDRFADQVAAALATPSLPTRDYLVRAKAAGIRLAAVQLLALHEARRGWEQRMAELLLGGRRTGRDHTVTDPDPGNAFPGGAIYLSMAGLGDRLAARVAGEIGEHIEQFTSPNGLQCYAGQAPVTRRSGKSDLVVARRLAHNRYLGDAVHQWAFCSLRQSGWAREFYDQKIAAGKSHHNALRALTWIFHGYGRGGLRLTGPKILIMGSVR

SEQ ID NO: 466785 - protein, 339 aa, unidentified
MDEYIGLDVSLKETAVSIRRDGKRVWRGKCASDPQALATLIRKHAPAAKRVVFETGPLSVWFFHALTAEGVPAICIDARHAKAALDMAPNKTDANDADGLAQLAEVGFYREVRVKGYDSMLSRTLISSRTRLVRIGTELSNQIRGMMKTFGLLVPSTKGGRFDDQVRRLLADNEALARIILPVLEAWRSVRLRAAELGRQILANARQSTDCRLLMSIPGVGAITASSYVAAIEDPANFKKSRSVGAWFGLTTRRYQSGEVDYDGHISRRGDAHMRGLLYEAATVLLTRTRGDSDLRTWGLKLREKLGFKRAAIAVARKLAVIMHAMLKTGELFARTAAA

SEQ ID NO: 466786 - protein, 371 aa, unidentified
MEQYSTDPIWVGLDVHQSTITAAILEGDSHEPEIIRMKSDLNTVRRLFRRLSKHGAPRSCYEASGAGYVLQRALGRDGFHCEVIAPSLIPRKPGDRRKTDRLDAVMLARLYRSGHLTPVTVPDEEQEAVRQLVRARLAVQTHITRLKHRIVKILATHGYRFTGGRSNWTKKHRTWLRQLRRELEGPLATVIGIHLEHLEYLETQLRSLDAEIERFSQSEPWRAGADALRCFRGIKTLTAMTILTEVGDMRRFRSPTQLMAYTGLIPSERSSGDVERRGPISRTGNRYLRRVLVESAWHYRHKAEADLILKRRRQGQNPVVVAIAVKAQHRLHKTFWKLAAKKHTNKAVVAVARELTGFIWDALTTTVDHEG

SEQ ID NO: 466787 - protein, 331 aa, unidentified
MEKIVIGIDISAKTLDICIKKCGSYSFYVIANEAKAIKVFFKIFQKPKSETIVSMENTGRYNWELYQVLEYFNFKVFVLNPLHLKKSIGLIRGKNDKIDAKRICEFTEKHEKELIEWKPCSDNIKKIKVLFSERNSKIKLRASLLKQRHLYSQLESIGYDSKFLRMNKKEIEVLEKHIDFLENEIEQLIDNDSDLYSKKRCIQSIPGVGKVLSWMIIAKTEGFTKINSPRKLACYAGVVPFGYQSGTSIKFKPKLSYYADKSLKTVLHMAAMRAVRLENDLKIYYHRKISDGKNKMAVLNAVRNKIIHRIFAMIRTGKLYEKNYNNSLFLS

SEQ ID NO: 466788 - protein, 497 aa, unidentified
MAREGVGVAEIFRHAGGVYSERMAGRLDAGRLKVMGAIEACRTAAPGGHIYRCDGCGREHPLYRYHEHAGTESSVAAKETRREGQHLLSERDRQQRSGRMPNSPDTTALTGATHSTIFVAVEISLKSWIVGVHCPDASGGSVSIHTLAAADTAGLLDLVGSVRERVARELGARPRVMLTYEAGYEGFWLARDIERRGAEIDIFMNDPASLRVNRRAKKKKTDRIDARRMVRALKAWDQGDSEAMSWVRVPDVDQEDAKRLLRERDTLVSERTRLNNRIKGLLQLHGIFDLAPRKPEFLERLATARTGYGAPLPPRARAEIERAVAMLRLVESHIEMIEAEKKALLKAGRKAQDASDCDGTAMIAALTRIHGIGLNDATLLAGEVFYRDFHNRRELGSWAGLTSVPWASGDVDHDLGISKAGPSHVRKHMIQMAWRWLKLQPESAITKWFHAYVAKDAGGGRGRRARKRAIVGVARKLLIALWRYATQGLVPEGAIVA

SEQ ID NO: 466789 - protein, 391 aa, unidentified
MTQVDDLSRSLAVFDQNTSLVVVVEMSEASWLVAGLVPGVDRQPLKKLEPDPDALLRLLERWRAEAVKTGQTIGRVTLAYEAGRDWFWLARWLQARGIEVYVIHSTSVAVSREHRRAKTDRLDTAMLMRVVLGWLRGERGHCGMVAIPTLQEEDAKRPSRERENLVSEQTRISNRMKSALARLGIRGFKPKLRKAPQRLAALRTPEDLPIPPNTLDALGRDMARLAVVRDQIEEIEQARLERLEQAPDEGPNAMVRLLARIVGVGVGVGVETADMLVREVLSRNLRDRRAVARYAGLTGSPDESGSKRREKGLAKSGNARVRRGLIQLAWRFLMFQKERALAQWYRARTEGAKGARKTTMIVALARKLLIELWRMVTTGAVPEGVVLRPAA

SEQ ID NO: 466790 - protein, 424 aa, unidentified
MSLEFVFCTRFYEISAVDITLHILRKECMIMILVGIDIGKNQHTFSIIDKNTGEILSNPSCFPNNREGFLFLIKKLNTYSKSDLLIGMEDTGHYHFALLKHFLDSRYTVALINPTTTDLTRKLQGGITKNDPLDSLTICDVIGSNQRNKPYRITKVNRFDLYEQKQLTRHHHNLKEELNTYKNRLQKCIDIVFPEFNSLFRSKYGIVYMNVLKTFSSAEKIANSDIRTIRKCFEYNKRGKRISLSAEQLKAAAKTSIGMPSVAEEIQIRHLVCQIEMIEEQLSEIDKKIEEFSLQNNSPILSIPGISHFSGTSILAELGDICNYTKAAQIIKFAGVAPYHYESSQFNAQHTAITKKGSRYLRKTLYQIIFPVIYHNKVFNVYYNKKLAEGKGHRCAQGHCVRKLLRIIYHLLSTGQTFNPALLR

SEQ ID NO: 466791 - protein, 410 aa, unidentified
MNETAVGIDVSKGKSTIAIQQPCGVIVRRPFDVHHNRHELQALADQILGIQGDVKVIMEYTGHYYEPIAHFLKNAGIFTSVINPKLIKDYDNNSLRHVKTDKADAMKIARYGIDKWRLLREYCPMDEKREQLRALNRQFSFYNKQKTAIRNNLISILDQTFPGVNNLFNSPVRKDGHQKWVDFAASFWHADCVRQCSLEAFRERYAKWCSKNGYDCRKGKSEEIYNFTQDLVPTLPKDSTTKYLVTTTVKAMTMASVTLESIRDHMNELASTLPEYPVVMDMAGVGPSLGPQLIAEIGDISKFTRRSEITAFAGVDPGENQSGTHDQKSVHASKAGSPYLRSTLFNIMSVLIKTHPDDPVYRFIEKKRAEGKPFYVCMTAGANKFLRIYYGKVKSYLETQQSQGGELEKE

SEQ ID NO: 466792 - protein, 342 aa, unidentified
MVRMIVGGVDTHADVHVAAAIDANGGIVGVESFPADQAGFEALFGWLVSHGEVARVGVEGTGSWGVGLSRFLHDLEITVVEVDRPNRQTRRRVGKSDPTDAVSAARAALSGTATVTPKRRNGPVEQMRILLIARRSARQQRIQTLNQLRHVIFTGPEPVRARFKDRYKTGLVSEVAKLRPRNGSDPILYTTLVTMRGLARRIEMLNTDVRDLDRMLTELVNDTAPSLVALYGAGVDTAASLLVTAGDNPDRIGTEASWAHLCGVTPIPASSGRTTRYRLNRGGDRQADAALYRIVLTRMSSDPRTRDYVQRRRAEGLSNREIMRCLKRYVARETFKHLPSTT

SEQ ID NO: 466793 - protein, 408 aa, unidentified
MANKIAGIDVHKKVLMVVVIDAHAPDSKPERRRFTTMPSELCRLSIWLKEHGVEEAVMESTAQYWRPVWLELEPHIRLHLAQAFSNRAPRGRKQDFKDAERLVRRLIAQELILSFVPDGEQRIWRNLTRMKLQLVRDRMRLQSQIECLLEEMRIKLSIVVTDLLGTSGLRILHALANGETEAKNLALLGDYRLKCSEEQLVEALTGRPHSMHRQMLALQLERLRLLDEQIGKLNSLIATAMTPHQDTVIRLAEVPGLGIDSAQQIIAEVGVTASTFPSAAEFTSWVGTCPGSQESAEENSSSRSAKGNKYMRRVLNQAANSAARSKGTHFQAVFRRLLPRLGYQSAIWAIAHRLCRLVWKILHEGIRYIEQGIESEPKLLISRARSLAKQLRKFGYNIQITPADAAPA

SEQ ID NO: 466794 - protein, 379 aa, unidentified
MPDVSSTVPAEVKCWVALDVHKNSIVAAMLAASGGSPRLAQIETTERAIRRFVGGLGDPGTIALCYEAGPCGYDLLRLFARLGVACDVVAPSLVPVQAGARVKTDRRDAKKLVTLYRAGALSFVALPSLEQEGLRDLVRARDDLRRARTAARHRVAKTLLRYGHVFREGKKSWTRAHVAWVRRQRLADPFAQEALTHLLCHLDAVDAQLAALDHRLDQLAATEPWSDPVRWLCSFRGISTRTALGLLAEIGDFRRFASARELMGFLGLTPSEYSSGESRHRGHITKTGNEHARRLLVEAAWHYRHAPRRSARAQAHAAHVPPDVPARAWAAQVRLHHRHRHLTAHGKRSTVANVAVARELCGFLWAAMTHQPLREEVAA

SEQ ID NO: 466795 - protein, 397 aa, unidentified
MFYLGIDIGKNNHVASLIDEKCKIIFKAFSFSNTYVGGDSLLDKLASFNISVNDVEIGMEATGHYWLSIYSFLVEKGFVIHVINPIQTDGWRKGTEIRKRKTDIIDSILIADLIRYGDFLETSLANEDTLSLRNLSRFRNYLINSIGDLKRKTICVLDQVFPEYQSIFSNIFGQTSKEILLHFNTPDDFENISSEQLQKVLSEITMKKFAMDKINEISSATKKSFGIKFCLDSFSLQLKLLIEQINFIEKQVIDVEQQISALLDKINSPITTIPGIGNITAATILGEIGDISRFKNPSKLVAYAGIDASISQSGEYNSTNNKMSKRGSPYLRKALFSAALVASNCDPVFKAFYQKKRSEGKHHLTAVGAVARKLCYTIYAILKNNCSYEVKLPKNDC

SEQ ID NO: 466796 - protein, 360 aa, unidentified
MNATTLKTIGVDLHKAALTATVLDSTGAILERKEIPTKCRRQVADYFASHGPSAQVAVESVGFYHWFWDTVRPKVQILRLADPAGVRACAGRQTKTDRNDSLLLARLLREDRLPMAYVPEEPVRALRELCRHRHRLARQLALARRHLRWIALKNNLAGPTMLVSDRAQKWLLSQESKLSAVHRLAARQLLDQIITLERQLSDTEATLKQSVAAHADLAPTLALIQSVPGIGFITAVTILCECGDIRRFDSIDQLSAYAGLCPRVSQSGLTAHHGHISKQGPPLLRWVLQQAAWVAMRCDPNARRIFARIARKAGAKKAATALARKLLSYAWSVCRQGHPFVWPTDRKTGPGPVPVWSYDI

SEQ ID NO: 466797 - protein, 452 aa, unidentified
MNRRVEKPAGLPIIHDRAAGIDVGARFHVVAIGPDLSDEPVQTFQAFTGDIERMADWLISAGVKTVAMESTGVYWVPVYEVLEDRGIEVIVANAREARTVPGRKSDVNDAQWLQRLHACGLLRPSFRPGRDIAALRTYLRLRERHLEYGAAHIQHMQKALTFMNLQLQHVVSNVTGVTGLNIIRAIVNGERDPQVLATLRDVRCKASSETVRQALVGNYQPEHVFALSQALALYDFYQARIGECDVEIERALAVLNAIQAIPATPLPEPRHKTKQSNAVSFDTRVPLYQLTGVDLTQIHGIGPYLALSLVGECGTDLSRWPTPKHFTSWLTLAPGCKISGGKVLSAHTRKTTNRLAAHLRLAAVSVGRTSTALGAFYRRLAGRIGKAKAVTATARKIAVLFYNAMRFGLAYQDPGADYYESRYRERVVKQLHRRAAEFGFTLQEAAASTAVS

SEQ ID NO: 466798 - protein, 341 aa, unidentified
MNIKRIGIDIAKQVFQLHGVDHQEKPVLRKQLRRNQMLNYFAKLPSCLIGIEACSSSHYWARELQKQGHTVKLMAPQFVKPYVKGNKNDANDAEAICEAVARPNIRFVAIKTIEQQDIQIVHRIRSGLVQQRTAKVNQIRGFLAEYGIVVERRVEKLRKALPLILEDAENGLSFDFRTLLQSLQQDLITLDDRTSEMDRRIQQLANSNNTAKRLQQIPGIGPITATALVCAFGDGKKFKRGRDLAAWLGLTPRQHSSGGKDCLLGISKRGDAYLRTLLIHGARAVLRVAENKDDPRSRWLQNLCCRRNKNIAAVALANKNARIVWALLTKETDFLPEGKPA

SEQ ID NO: 466799 - protein, 368 aa, unidentified
MKENISSNQTARNRALKETKEVFAFCIGIDLGDKHSDVCVLDSEGEIGKQFRLKMKGPDLQAYFSSIPRSRVAVEAGGQSRWVAELVEQCGHEVLVSNTRKVPYIYQSHDKDDPGDAYKLAELLYWKPRLLHPILHRSQETQADLSWIRARGALVESRTQLINTVRGISKSFGERLAKCSTESFTAKRADQIPAAIRGAVAPLLEMLDHLNEKIAYYDEMMKHIARTRYPKYCLLDQVAGVGVHTALTYMLTIGDPERFPKSRLVGCYLGMRPRKQDSGENRPQLGITKAGDVYLRKTLVNCAHHILGPRGQDSDLRRFGLRICERGGKNAKKRAVVAVARKLSVLLHRLWVTGEVYEPLRNSQRAAA

SEQ ID NO: 466800 - protein, 343 aa, unidentified
MKHYIGLDVSMKRTFICAVNEQGKIVHEGSESTDPHLITEYLSRLNLEELVVGFESGSLTPYLLAGFKERGIDAICMDARKLSPILALKVNKTDKNDARGIAEALRSGMYTRVHCKTEESINRSILLTSRRALVEQQTHLKNTVRGLLKSYGIRLGAISAKKFSGAVIKRIEGCQEVLILSVKCLLDAFDKLVEEANKIDKKMLEIAYNDREVQRFMTIPGVGPVTALTYKAEIFDASRFKESRSVGAYLGMTPTQYASGETQRQGKTSKCGSKELRFLLVEAGIVILTRSKKWSRLKAWGLKIMRKKGLKKAAVAVGRKLAVIMHRMMVEEKDFIYGEPKAA

SEQ ID NO: 466801 - protein, 416 aa, unidentified
MNAVGIDVSSRKSTVAVLRPLGEVVCLPFDVSHDADGLASLAEKLKALDGETRVVMEHTGRYYEAVAKALHEAGFFVCAVNPLLIKEYGANSLRRVKTDKADAIKIARYALDNWADLRDFTPMDAIRYDLKTLNRQFQLASKQRTASANNLIALLEQSFPGIRKCFDSPVRSDGTQKWVDFAHSFWHVDCVRKQPFAAFCERYRKWCKLHAYFFKLRNAEKVYALAKRAVVLTPKSKVVKVLVQEAANQLSSISRSVEVYRAEMDRLAAMLPEYPVVMAMYGVGKSYGPQLMAEIGDVRRFERKQALVAFAGIDPMPNQSGDKNVRSNKSSKRGSPYLRKTLFNVIRTYLQCAPQDEPVFQFLNRKQAEGKPFYVYMLAAANKFLRRYYAKLRDYFASLDTLQSVDPIPTTLKASL

SEQ ID NO: 466802 - protein, 395 aa, unidentified
MPRPLREEISELQVMIEGQSHFQPFGLSCWGFVDLNKGVGSMTASYDYHIGVDYHKSYSHLVVQDSSGKTLRSGRVKNDRQSVGGFLERYRENSHAVIEATRNWMVMYDWLDDICDDVVLAHPLKVKAIADAKIKTDKIDATVLAHLLRADLVPEAWAPSEKSRELRVALRERMFYVRLRTMTKNRIVTVFDRYPEQTAQLKKLGDLFGKAGRIQLAEVNVSDIDRIQIDRGLAFIGDINERIKQSETTIRAMTKANANVKLLKTIPGIGEFFARLIDAEIDDVSRFRNAKKFAAYAGLVPSTYSSGGKTYHGKIIKQGNKWLRWAFVEAVAPAIASDAQLRAQYEQLKIRGTNKARVAIARKLLTIAFQILRDQRAYEPRGTTTEGASTISRLS

SEQ ID NO: 466803 - protein, 359 aa, unidentified
MKKRLSKKQIFFNKIKLTKDDDLYVGIDVHKETYGVALWLNGTPAIDFLMPADNGKLLKLLEKVRIAVRKVVYEAGSTGYTLARTLQKADIPTTVVAPSKTPRQSARDSKTDQLDAKTLARYAAKGLLRTIAIPTRQQEADRQLTRTRDQLVSKQSRLKLQIKSFLLQHGIEQPPALRIWSAKALKQLSALRLSKQLRLCLDLLAQELQFLQNQLTTIQERLKDNFDKGRHARDVALLKTHPGVGPVIARQYTAELFNPKRFKHKTEIAKYVGLAPTIIQSGQSRRDGPVTKTGRPQLRSNLIQGAWIWIRRDPQARKTFNRILHNTANKNKAITAMARRLAIHLWKMLCDNKPFTNTA

SEQ ID NO: 466804 - protein, 412 aa, unidentified
MEVLHPHCAGLDVHKDTVVACVRHTVEGKVEREVRSFKTTTQDLMTLSEWLSAEGCTHIVMEATGIYWKPVWHILSDGEFELVLANAAHVKNVPGRKTDVNDATWLADLMAHGLVRGSFVPDEQTQEMRSLLRTRKQFVREHSSHVQRLQKTLEDANIKLDSVITDIVGLSGRRMIEAIIAGETDPNVLAALAHRRIKAAPSELEAALRGRVTAHHRFMLRLHLDHMTALDEAIARIDKEVEANVEPFRTAIQILSTVPGISQLSAEVIVAEIGIDMGRFPSQGHLISWAGLCPKNDESAGKRRSTRMRKGAPWLKTTLIQCAWAAARTKGSYLQAQFHRLRSRRGAKKAIGAVAASILTAAYHMLKNGTLYQDLGADYFDGRAKTNQVLRLVGRLQNLGFAVHITPTETAA

SEQ ID NO: 466805 - protein, 341 aa, unidentified
MYYIGLDVHKKAISYCVKDASGRIHDEGKIGATRNDLDSWMKILPQPWTVAMEATIFTGWIYDHLLPHAAGVKVAHPLMLRAIAASKKKNDRIDAGKIADCLRCDFLPECHMASTEIRDRRRTLRYRHLLVRQMVQMKNRISGLLMETGVSHNKQRLHKVGYFRELLSTNEEIDENIRPLLRLSRDTIVRCQKTEYALVSSLQRDPLLAERIKRLRTVPGVGPITALTWALEIGDVTRFRSIRQAISYCGLCGDEKSSADKMMRTPLSKQRNKHIQRVLVEAAKLAPRQNHELAMVHEKEKQRGNANRATLAVARKMLIWLLAVDRRARDFVPSQDRHAAA

SEQ ID NO: 466806 - protein, 343 aa, unidentified
MDHFAGLDVSVKDTSICIVDDTGRITREVKVASEPGALLAVLMNASHRFKRIGLEAGPLSQWLFSALAEAGLPVICVETRHMRAVLKAQINKTDRNDARGIAQMMRVGLYRPVHVKTLRSQKLRMLLTHRKLLQSKAIAVENDLRATLRNFGLKVGMVGTVRFEARIRELVENVADLVVLVEPLLVVRRVVREQIGILHRRLLAIVRDDEVCRRLMTVPGVGPVVALTYRATVDVPARFRKSKSVGAVFGLTCSRDQSGERDRPGAISRCGDEMMRAMLYEAAQVMLLRSTKWSWLKAWAMQIARRRGMKRAIIALARRLAVIMHRIWTDGTEFRWTREAAAA

SEQ ID NO: 466807 - protein, 354 aa, unidentified
MTRTDKYVALDVHQATTLASVRAETGRVIARTILPTEAPALVEFFRGMRGTVHVAFEEGTQAQWLHDLLVPLVHRVVVCDRHGEPRRGNKGDLVDADQLSARLWRGELRAVYHGSPARAALKELTRAYRNLVEDATRVMLRLKALFRARAIPVRGTRVYQVRERASWLAKLPERGVRFRAEALYAELDVLRELRPKAKAAMLAEARRDPAWRVLRTIPFLGPIRVALLLATMQTPWRFRTKRHLWAYTGLAVVTRSSADHEIQDGRPVRRRRAPLTRGLNPNHNRVLKDVFKGAATAATARPGPLQAFYHGMLARGMREELARVTLTRKLAALTLRLWKKGERYDPTQLTQQAH

SEQ ID NO: 466808 - protein, 319 aa, unidentified
MPQHHRPANAGLRILGADVAKSHVVFHDSLTGRSWTTANAPADLGQALYAYADYDWLVCETTGGYERQLLEAAMQLGLTSCRADAAQVKAFIASHGGRAKTDRIDAAWLARYGLERAHRLLSWQTPDPHRQAFAELLRHRQSLLAQRTQAKNRRSAPGGGQRLQALLDEQIAFLTRQIDRIDQDMADLVQAVPDLARDEQTLRAIPGVGPVAARSLIALLPELGRLGPKQAASLAGLAPHPRESGKLKGRRRMNGGRNGLRPVLFMAALAAARAHPSLSTVYQRLISAGKPKRLAIAAIARKLVVIANAKLRDHHQQLT

SEQ ID NO: 466809 - protein, 307 aa, unidentified
MFFAGIDAHTRYVVVVIINKTGKRVLGPTRVQIDRPERLVALLAPYRPLDAVVETSSSWPWLHEVLTAAGVRFVLAHARRLRAIADANYKRDDVDADLLARMRLAGLIPEVYPTPVTQREWATLLRHRTTLVTQRTALVNRIHAQLHMRGLHLERGRLLTRAGRRWVRTEAWPHLSLEQRALVRSHLRVIAGLRPLIRALDRHIAQVAATIPEAQLVRSIPGIGPHRALVICAEALPISRFRTPGHLASYAGLVPRSKQSGVGPVRHGPMPAGANGWWDNFTSQNRLGDPADPRESWRLFKAERRLA

SEQ ID NO: 466810 - protein, 348 aa, unidentified
MEKLIRIGMDTSKSVFQLHGVDSVEQPILRRKLRRGQVLPFFSDLPPAQVAMEACGASHYWARELQALGHEVVLIPPQYVKPYVQRGKSDAADAEAICEAASRPKLRKNFVPIKSIEQQAAQMLTKLRAQFIGRRTQLANSIRGYAAEFGLTAPKGLSRLRELLADIRADATVPDLAMELMEALAGGLTRVDDQIATLDKKLMQLHRGNEMSRRLAGIPGIGPVAATLLSIKVTDAHSFKSGRNFAAWLGLTPKNHSTAGKNRLGVITRAGDEMLRSVLVAGATAVIGDLRRGGNRIWPWLKALIARKPPKLVAIALANKMARIAWKLMISGERYRSIGGSAPMATPT

SEQ ID NO: 466811 - protein, 487 aa, unidentified
MAEHSMAYVAFDTSKLHNAIALAEAGRAGEVRYLGEFESSPAATAALLRKLAAKHGALSCCYEAGPTGYGLYRQIKQLGHDCIVVAPSLIPRKPGKRVKTNRLDALSLVKQLRAGDLTAVWVPDQRHEAMRELTRARGAAVLELRAKCQQVSAMLLRLGRHYPGKKTWGKAHMSWLAGQKLEHLEQRIALEERLVAVRQAQERIERLERAIREAVPGWSLAPLVTALMALRGIDFIAATTLLAEIGDLSRFRTPRELMAWLGLVPSESSTGEDTRRGPITKAGNRRARQLLIECAWSYRHPPRVGRDKLARVNAAPAAVRDIAWKAQVRLTGRYRSLCRAGKLDVVAMTAVARELSGFIWAIAHAVADNAALAAADAKPTEADKGSGGTRPASAPSAISSRNGIHGEPAHGTQATGRTRTERRRTPGALPDTAHPVAASDTAAGATAPADTATPRQPGAALARGGRRDRRLAAGVCRVAARPAGGNP

SEQ ID NO: 466812 - protein, 341 aa, unidentified
MTISLLAIDLAKHVFQLHGVDHSGAVVLRKRLKRNQLLGFVQALPPCTIAMEACSSAHFWGREFTRLGQSVKLLPPQYVKPYVKTNKHDAADAEAIAEAATRPSMRTVTVKSQEQQDLQTLHRGRERVIKTKTMLLNSLRGLCAEYGIITPKGSSWLTRDLAGTRQQLEAVNSQCLTLLFERSLAEFHRIEEDEKFYTAQLERIATTHPVALRLMQIPGVGLLTATAALAVVAAPQEFKNGRHFAAFLGLVPRQHSSGGKAKLLGLSKRGNSYLRRILVSGAQSLLRWSPRRTDAIGRWVTALRQKKPWNLVAVALANKTARVIWPLLRYDVDYCPYGAVA

SEQ ID NO: 466813 - protein, 348 aa, unidentified
MTLTIVETRAVTGGVDTHADTHVAAALDSIGGMLGVREFPATPVGYAGLLGWLGGFGTVHLVGVEGTGSYGAGLARYLGAAGVRVVEVDRCDRQDRRRQGKSDPLDAVSAARAALSGRALGVPKGRDGAVEAIRALMVAKRSARGERTQTINQARALIVTGPDELRARFARHSPAALVAELAALRPRAGDVPGYATQIALRELARRVEFFDAQLQRLDALIVPLVTTHAPGLLAVYGVGPDTAAMLLVAAGDEPARLRSEAAWAHLCAVAPIPASSGKVTRRRFNPGGDRQANHALWRIVITRMSAHPPTQAYVARRTAEGLSKKEIIRCLKRYIAREVYPHLRPAGG

SEQ ID NO: 466814 - protein, 347 aa, unidentified
MKIATIGLDLAKTLFQVHGVDSQGHIVVRKQLRRADVLPFFAKLEPCVVGMEACGSSHYWGRELTKLGHTVRLIAPQFVRPYVKNNKTDAADAEAICEAVNRPNMRFVPIKTQAQQTTLSLHRARAGLVKSRTALANQIRGLLSEFGIVLPQGIRLLGQRAIEALSNREYEHCEQFRTLIQILVEHLRELGNKAAELEGRIRAMHRTDEAGQFLETIPGVGPLTASALAASIGNPRAFRDGRELAAWLGLVPRQHSSGGKPRLLGISKRGDTALRTLLIHGARAVIRMAATKPEMADSWVMKLCRRRHKNIAAVALAAKNARTAWALLVRKQVYQVSHVPIRSGVTA

SEQ ID NO: 466815 - protein, 334 aa, unidentified
MFIVGIDIAKRSHEAIIIAEDGQVVRKAFSFRNNCTGYNLLLEQVRRLTLVKSQIVFAMESTAHYWLALYARLLKDGYTVMVLNPIQSHSLRELYIRKAKTDARDSLIIADLVRFGRCKASNVPQDKILALRELCRSRAYLVDMAADLKRKLIALLDRIFPEYESLFDSVFSKASIAVLSKYSTPQKVKNANLRKLTDLLMESSNGHFGEWKAHQLKEAACSSFGIDDSGGVYSTLLGMFLEQILSLTAQADSLEKQISVFFQEFNNPLTSIPGVGTVLAATILSEIGDITRFSSADKLLAYAGLDPSVKQSGEFKSNQNRMSKRGSPYLRRAI

SEQ ID NO: 466816 - protein, 346 aa, unidentified
MNHYAGIDVSLECSSVCVVDASGKILREAKVASEPEALIDWFRSLGFGLERIGLEAGPLSQWLFAAMKAAGLAVELLETRHVRKAFEAMPVKSDRNDARGIAQLMRLGWFRPVHCKSLGAQETRTVLTARKLVQSKLRDVENSLRGILRGFGLKVGLTTERSFCGRIRELVAGHPSLETVTGALLAVHAVLLREFNGFEKQVRRMARSDANAKLLMSTPCVGPVVSLTYASAIDDPARFRSSKQVGAHFGMTPKKYQSGETDYTGRISKIGDASVRTALYEAAHIMLTKPVKGCSELKSWAMRIARRAGMSKAKVALARRLAVIMHRMLVDGMPFDPAHKQVTAAA

SEQ ID NO: 466817 - protein, 385 aa, unidentified
MQKLNDLSRSPIPLDPDGTLIAVIELSLSSWLVAGIVPGVERQPLKKLEADESALLKLLDRWREEAKKAGHWIERIAVAFEAGRDGFWLARWLRARDIEAHVIHASSVAVSREHRRAKTDRLDTELLKRSFLGWLRGERDHCKMVPIPTIKDEDAKRPNREHESLVGEQSRIVNRMKAALIRLGVRGFNPKLKKAAERLDGLRTPEGEPIPPNTLAEMRRDMVRRRLISDQIRQIEDARLELLKQAPNDGPHAMVHLLARIIGVGVETADMLVQEVLSRSMRDRRAVARYAGLTGSPDESGRRRREKGLTRSGNARVRRGMIQLAWRFLMFQKDSTLAQWFRARTESARGTRKTMIVALARKLLIALWRLVREGVVPDGVVLRPA

SEQ ID NO: 466818 - protein, 320 aa, unidentified
MTYIGIDVSKDSFVAAYPKKGDYKTLKFANTTSGVRKFINSLPAECHCVMEATGNYSMLLLYLLQQANITVSMENPQKIKHFARAMLSTTKTDEIDAQLIARYGEKMEPEPYKIPSESIILLKQKRTVLRQLKKQLTMMINLQHSLSVLPKQDPAAKVATEQTIKFLRKQISKLEDEITHLSNKEFKRQMELLTSIKGIGENIASALIMATGGFTYFSNAKQISRFLGLCPTYQKSGTSVNFKGHINRNGDTHLRSLMYVVAFASIRCNSACRDMYERLRSRGKSGRVAIIAVANKLIRQAFAIVTNNRPYIDGYVSTLA

SEQ ID NO: 466819 - protein, 347 aa, unidentified
MNQISRIGMDTSKHIFQLHGVDAAEQPVLRRRLRRKEMVAFFAKLPPTVIGMEACGASHYWARELGQLGHTVKLIAPQHVKPYIKRNKNDGRDAEGLCEAMSRPTMRFVPMKTEEQQAALMLAGMRERLVARRTQLSNAIRGYAAEFGLTVAKGLDKIEPLLAEIAADEALPVLARELFAMYGREYAQLQIELKKIDARLMAWHRANADSRRLAQIPGIGPIVATALVMKAPDPRAFPSGRHFAAWIGLTPKDHSTAGKTRLGKITRAGDEMLRSVLVAGATAVIQQARLGRGRASPWLLALLARKSSPKLAAIALANKIARIAWKLLVTGESYHAGGKPIASAHAA

SEQ ID NO: 466820 - protein, 316 aa, unidentified
MQKAAGIDCHQSNFKVAICKEGEEPIITTFATFTDEVEKLKDLLLQHDIKDVIIESTGVYWRYLYRVLTEAGIKVVVVNPFTVKQNPLEKTDKGDAVWLATILMNGMAKRSLMVSEQQEALREFTRQKLTANHQTHLKFLLSDLTHIEGQIQAVNKAIATLFTDDQKIKIKKLDEVEGVAQEGAEVIMAEMGINIKDFKGEDSAAKYAGFAAGVHESSDKKIIVKCHPGNKYLRTTMIQIAWAAVKVKNGYWRAVYLQLKKSRGAKKAIVAVARRRVKGIYKILVYDHTYQKWTAEKYFENRAQVKEFKQTFKKAC

SEQ ID NO: 466821 - protein, 343 aa, unidentified
MDHFAGLDVSVKETSVCIVDDTGRIVRELKVASEPEALLAVLQNPACRFKRIGLEAGPLSQWLFSALAEAGLPVICVETRHMRAVLKAQINKTDRNDARGIAQMMRAGLYRPVHVKTLRSQKLRMLLTHRKLLQSKAISIDNDLRGTLRNFGLKVGMVGTMKFEARIKELVEKLPDLAVLVEPLLIVRRVLREQLGILHHRLLAIVRDDDVCRRLMTIPGVGPVVALTYRATIDVPARFRNSKAVGAVLGLTPSKYQSGETNRTGGISRCGDEMMRMMLYEAAQSMLVHSAKWSWLKAWAMKIARHRGMKKAIVALARRLAVIMHRIWVDGTEFRWTREVAVA

SEQ ID NO: 466822 - protein, 387 aa, unidentified
MARKRTLSTLDTSIAYEAVGLDLAKEDVALAAFDSDHKEPYLIDRIPYDKLYELLADMAPTLVAMEPCSGAHQIAEQIQELGHEVMMISGRHVQAWVKDHCNGQKTDLNDAFAILNLAYDRWLTPIRGKTREECRLLALQASYRQLKGQRTKTMVHVKATLHAWGFPIRAGSFNQKVLHELIDTNREAFGDEVVETLHLMINRVRDLDHDIATVLKLLTEATKRDPRASLLRSIPGFGILTTSRWCAVIGDIARFDSPKQTMAFIGLVPNNRITGHHTETSSGREARGQGKMSKRGDKMLRSLCILGAGALCLMVRNDRLPDCPFVASIKERLASPRPWFKVLVYVAAKLVRIATALLKYGETFSFEKAGISKAVLKQWELEQAKAA

SEQ ID NO: 466823 - protein, 469 aa, unidentified
MFLTRRSNQQSNSISKRILRDCRPRLSIRPARNEIKAHSIPNLTRRSLKMKAYNVDDFNVLIGIDWADKKHDICEHPNHSDDYHYCVVQSKPEALHDWAMDLKKRYPNQKIAVACELKKGPLIYALSKYDHLVLFTINPSTVAKYRKAFTPSGAKDDPSDAFIQVEILSLHMDKLSVIEPEPASIRALSQLVEYRRSLVQDSVDLSNKITATLKNYYPQALEWFGEKDTIIFCDFIQKWPSLSKVKKAKKQTLLKFFIDHNSHYHDVNEARIIKIKNALPLTADIGVIAPNQILIEVLIVQFKVLLQGIETLNKAIKSSYKEQRDKPIFDSLPGAGAKFAPRLLVAFGSDRSRYSDASDIQKYAGIAPVIERSGKKMWTHWRYSCPTFLRQTFVEWAGLSIRYSFWAKAYYEQQKSKGKPHNTIIRSLAFKWIRIIFRCWKTNTLYDESTYLDALKRRGSPLLKFAINS

SEQ ID NO: 466824 - protein, 278 aa, unidentified
MEFLETIGIDISKQWFDARMHLAKQEKRFDNTQTGFKRMSLWIDKSLTVPKESILFAFEHTGLYSHGLAAYLSSQQLKFILIPALELHRSMGIVRGKEDRVDAAKIALYAYRRKDEITPYQMPAQILYQLRHLLSLRDRIVIQRAGYEASLKESKCFLTKTKDPLYFQTQERIIRYLNKQIDKIDSELCHTIQQDNRINTTYELITGIKGVGSQTAYFMIVYTHNFSLFSEWRKFASYAGTAPFPYQSGSSIHGKTKVNHMANKKVKTLLNLCAVSSI

SEQ ID NO: 466825 - protein, 346 aa, unidentified
MVLIGCDYHPSWQQVCWFDQATGETGDEKLVHALGDAEKFYRRFSSPVRVGLEATGNCQWFLDLLNRLGNEVWVGDAAKIRASDSRQQKHDKRDARLLLQLLREDRFPRIWTPTREQKDLRQLLMHRYKLVGLRARVKNELQHLAMNQGITKKRKLWSKAGEQVLRELPLAPWASQRRKDLFRIREMLNEQLDLLDRAVVEAAEKNEKARLLMTQPGVGPITAMAFVLTMGDVSRFQRGKQVASYLGLIPREYSSGGKQRFGSISKQGNRFLRMLLVEAAQAAVRYDPGFRSEYLHRCHTRAKGVAKVAAARKLAIRLYWMLRTNTRYPEVVHVESSSRVALVSAS

SEQ ID NO: 466826 - protein, 334 aa, unidentified
MSKIAVSVGLDYHPGSVQICVLDEHGAVLTNGTRENSSQELNRVARLYGEQIQAAIEVSPGAANLADELVTRFGWSVDLAHPGYVARIKQSPDKTDFGDARLLADLTRVGYLPKVWLAPLDVRELRELVRYRQQLVRERRSTKLRVRALLRNQRLNGPGNAWTKAWLEWVRNEAALPDHSRWVMTQQLSNLERLQREIRQVEQRLEEVTKEDVIFQKLLEQEEVGLVTAVTLRAEIGRFDRFRSGKQLCRFCGLSPRNASSGARQADAGLIKASNPELRCVLIELGQRLMNHSDKWSERSAEMRARGKPRSLIAAAVANRWLRKLYHEMKSTHE

SEQ ID NO: 466827 - protein, 416 aa, unidentified
MFAVGVDVANGRSMVAVLDGMRNMVAKPFEVVHTAQGFAALVEKLRQLDGEVRIVMEHTGRYYESFAMSMHRAGFFVSAVNPLLIKNYQGSINVRKVKTDKADAQKIAQFALDKWTILPHYTPMDTIRYNLKTLHRQFQLASKTKTALSNNLIALLEQSYPGANRYFDSPVRTDGSQKWVDFVDTFWHVDCVAMSSEHAFVERYRKWCKRHGYVFSEQKAIELHADARQKIPLVPKSDTCKLLVREAVSQLNAVSRTVETYRAEMDRLASQLPEYETVMGMTGVGKSMGPQLMAEIGDLRCFAHQKSLVGFAGTDPIKEESGDKVSQSAPSSKRGSPYLRKTLFVIMTILLQLQPQEDPVYQFLDKKRSEGKPYYVYMTAGGTKFLRVYYGKVRDCLKAKGLWEVPASASQEVNPG

SEQ ID NO: 466828 - protein, 336 aa, unidentified
MNPYNYFIGSDLGKTTLAVCVLNTQEKIVLELIIPNTKVGMETLLKRLEKLPDFTHGTTLHCMEHTGIYCQPLVGFFYPKGAKLWLDSAVRIKHSLGIKRGKTDKADARAIARYCIRNHGDCQLFALADEVLCRVRQLAQQRDRLMEMAKELADLSTDYKAMNLAAELLLHQQTSQPVVAILHKQIALIERQIQHEIKAAPALQTNFDLLTSIPGVGKRTAIFMLVLTGNFSRFTDPKKLASYSGIAPFAYESGTSVRGRTKVNRMANMKLKCLLHLASLGAIKREVELRAYYERKVAEGKNKMSVLHAVRNKIVHRMVAVIERQTAYEPVWDRIA

SEQ ID NO: 466829 - protein, 343 aa, unidentified
MQTITTIGLDIAKSVFQVHGVDAQGNVVLRRQLKRRYVLAFFQKLPSCLIGIEACASSHHWSRELQALGHTVRLMPPAYVKPYVKRQKNDATDAEAICEAVTRPNMRFVATKTPEQQGCLTIHRTRHLFIRQQTSVINAIRAHLAEFGIVAPVGRNGVEQLLGVVADTNDKRLPEVARACVAALGAQLRMLKAQILEFDRLIRAWHRSNEASMRLDAIPGIGPALATALVASVADPKAFRSGRDFSAWIGLVPKQNSSGGKERLGNISKRGDRYLRSLFTTGALAVIRYAKIHGTRHRPWLTALLARRPTKVAAIALANKIARMAWAMLARGERYKEPVALAA

SEQ ID NO: 466830 - protein, 312 aa, unidentified
MPENTVLDYVGVDIAAERLDYCVNETTEGNFPNSPTGRAELIAKVKRLPHPRVICEASGGYEKLVVAELLAGGIEVCVVQPGRVRAFAYAEGLLAKTDRIDARLLRRYAQKVPLRLAVPVDAVLTTLRELLDHRRALTTQLSEVEGRLPLAGATLAKLLGRQRTFLKKQLEQVEKTLRCHIDNDPDLRGKSERLQQIKGVGPVLASTLLAFVPELGKIESSQLSALIGVAPHPRDSGKSHAPRHVRGGRSSVRHVLYMAAVCATRCNPILAAFYQRLKANGKPAKVCLVAVMRKMLCVLNRLIENPNFALAR

SEQ ID NO: 466831 - protein, 356 aa, unidentified
MVSNSLLQTIRDCTKKSDKIKVGLEATGHYSYNILGFLLDNDLPVYVMNPLHTNLYRKSLSLRKTKTDRVDAKTIATMLLSDVDLKSYTDIAYHNEELKSLTRYRFDKVQERAKLKQSVSRLVTILFPELEQLVSSIHGTSIYALLSEYPGAKQISEAHLTRLANILVKTSKGHYRKDKATHIRDAARTSIGSVMPAKSLELKHTIKLIQELTSEINEIEDAIRKIMDELKPPILSIPGMGFHSAAMILAEVGDFSNFNSPDKVLAYAGCSPSTYQSGKLTNCYAHMEKRGSRYLRYALYTATKYVCYWNPVFTEYLTKKQAEGKHYNVALSHATKKLVRLIYALQKSGKAYLAVT

SEQ ID NO: 466832 - protein, 438 aa, unidentified
MSNKVIFNLDELFISVGIDVGADFSWMSIALPNQQFVGKPFKILHNSIDSLTTAVSKIKEAEELYSLESRIFLESTGIYHYPLFCYLRDKGFNCSVINPIITKNSTNINIRKVHNDRFDSKKAALVGLKPDLKVSLMPSDLALNCRNLCREYYDLMDNRSAYVNKLQGELRMAFPQYLGIFSKVTINTSLTLLETYTSPSAFLEADKQEIIDIIKSTARFGLTYAQNKYNAIIQAATDANQFGYIIDSNIKRIRLYISFIRKYDEEINSILESLHELVDANEDTDFVKQIHLIKTFKGAGFLSAVSIMGEIGDFSAFSKPKQLFAYFGLDPAVKQSGKFEGTKVQMSKRGSAIARRVIHTLTLQSISISRNGEAKNPVLREYYLKKCDSKPKLVAMGAVSHKVCNMIFAILRDNKPFKIIAPQEHIKQYNAAKCDMTA

SEQ ID NO: 466833 - protein, 410 aa, unidentified
MEAMIERCAGLDVHQKVIVGCVLHGSLDKRPKREIKSFSTTTEGLLELSDWLLSMEVTDAVMESTGVYWKPIWNILEDKCHLILANARHVKNVPGRKTDVKDAEWLAKLLRSGLIEGNFVPEESIRDLRDLTRYRTKLIYNRTTERNRIHKILQDANIKLTSVFSDIFGKSGRRILEKIMNGEKIELNDLEKLVHPRTKAKLTDIASAINGRIRLHHRYMFRQHWEHMIYLEGKIEEIEKQIDHCLKPYQEEVELLDTIPGIDKNGAATLVAEMGVDMSVFKSGKHFASWAGVSPGNNESAGKKKRTKSKKGNKILKTMAVQCALSTRPQNNRISSFFKRIHKRQGAKKAQMATAHLLLKIAYTILLTKEPYKELGPDYMKQKQKNKELKMVEYLKKKGYEISSTDPEVA

SEQ ID NO: 466834 - protein, 328 aa, unidentified
METINILPALLGIDVAKKTFNVTLLRGEKKKHKQFANSEKGFSELSVWLTKQSTPQVWACLEATGSYSDALAHYLHQLGHQVSLVNPARIKAYGQSQLQRTKNDRADADLIVRFLHDTRPQLWVPPPLEQRQLQALVRHLDDLIETRQQLQNRLTDGPQVQAVLDSLRQVIAQLDVQIKQIEEQIRRHIDNHPDLKEAHDLLVSIKSLGSRTATVLLGEIERLRQYRHSEEVVAYAGLNPKERQSGTSIKGKTCLSKIGNARVRKALYLPAVNAIKYNPIVKSLAERLEKRGLCKMAIIGAAMRKLLQLAFGVLKTGKPFDEKHALAC

SEQ ID NO: 466835 - protein, 384 aa, unidentified
MEKSSTLYVELDVHKDIIDIATVDAGLEGEVRHVASLGGDLVGLDKALRRLISKGHRLHVVYEAGPCGFVIWRHLRAQGIDCEVVAPSSIPKRSGDRVKTDRRDAMMLARLSRSGDLTAVRVPGAADEAVRDLARSREDAVRKCRNARHRLKALLLRNGIGYAGKSAWTAAHLRWLATLKLEHAAQQIALQEYLHAVTEATARIARLEQAMRDTLPEWGLAPVVQALQAMRGVQLVAAMTLVAELQDFLRFDNPRQLMAYVGLVPGEHSSGPKRRQGSITKAGNSAARRMLVEVAWHYQHSPRVSPIIAARHDQLPKAVTDIAWKAQLRLNAKFKRLVARRVMKNKAVVAVARELTGFVWAIGREVQTSGWQGIKAEPVRSAAD

SEQ ID NO: 466836 - protein, 332 aa, unidentified
MSRQFTLGIDLAKDSFVATLLDPQGNTLLPVQTFVNNADGALQLLAAIPQPRHTQVILESTGVYGKLLIQSLSTSTLELFEVNPLIIKRLSCSMVQTKTDQADAVRIARVGRLLAESQPETLEKYRVQHDPDRENLALWVAEYKRLSEAGARLKQQIKSLAFHAAPQASVILERREQELEQIKQQLKTTKREIETLLRDHADEPAQCLMSIAGVGPLTTATALVSIQNIHRFSSADSLKAYWGVYPRRRQSGKQEGRTRMANHGNKLMRHMLWNAAKSAARHNTVCCELFERLIAKGKTAPAAYGAVARKLVQIIYGVMKSLTKFNPSPKCT

SEQ ID NO: 466837 - protein, 370 aa, unidentified
MRNRNMFVGLDVHKETIDVSIAEGQRDGEVRHYGVIASDLEPLDKVVRALRAPDRQLHFVYEAGPCGFDHYRHLTKRGEACGVVSPSMIPKRSGDRVKTDRRDSQMLARLHRAGELRAIYIPDATDEAMRDLVRAREDAVVVGTQAKYRLKAFLLRQGRRYPGREGWTLPYRRWLADLSFPNAAQPIALQEYRDAIDDTETRIDRLTEQLRQLAPTWRWAPVVAALQALRGVSFVTAVALVAELGDLTRFGHPCELMAYLGLVPSEYSSGPSVRRGGITKAGNPHVRRLLAEAAWAYQGIPRIGRQHAYRQEALPKVVGDIAWKAPLRLTARFQRLVARGKAKPKVATAIARELAGFIWPIAREVSPTPQ

SEQ ID NO: 466838 - protein, 422 aa, unidentified
MKAFNPADFAALIAIDWADRKHDVCELEHQNNKPIFTVISSKPEAINAWANALKQKYKGQLVAVACELKKGPLIYALSKFKHIVLFTINPSTVAKYRKAFTQSGAKDDPTDAAIQLEILQQHMPKLNVITPDTKSVRSLAQLVEYRRKLVQDRVDLTNKITTTLKNYYPQVLDWFSEKDSMIFCDFLLRWPSLEQVKRARKQTIIDFFNQHNSRYPAVNEKRLNDIKQAEALTNDDAIIQPNLLLVECLVAQLKPLMLSIERFDHDIKSIYKKHNDRFIYDSLPGAGPQMAPRLLAAMGSNRERYQSSEEVQKYAGIAPVTERSGKKEWIHWRYSCTTFLRQTFVEWAGQSVRYSFWAKAYYLQQAAKGKPHNTIIRALAFKWIRILFRCWKAKTAYDESTYLEALKRKGSPLLKYAVESKF

SEQ ID NO: 466839 - protein, 332 aa, unidentified
MDNCIGIDVSKASINVHISKNGEDLEFVNSIQGFKSLHAKLKKVYKKEIEDNIFIFEPTGSYSETLRKYCYQQKIKCFIINPKQFSNYAKALGVEVKNDIEDARVLSKALPIAKVHQIRVPMYDEDVERIKELMSYYKFTTKQTTQQKNHLESLTSKDGDLFSIRELNRSIKESKSKEQRILDQIQQVIDANPQYKKAYANITSIKGVGQIGGIVLLHLFLKYPEANQRQITSLAGLNPVYKQSGTSVQSGYKISKAGSSMYRGSLFMGVLTAVRFEPTFKTFFNQLIAKGKHTTIAHIAVMRKIIITAHSLYKNDKKFDNNFSSQEVNMTE

SEQ ID NO: 466840 - protein, 318 aa, unidentified
MFIGIDVAKDTLVVAARPTGTLETVANSAAGLQPLLTTWRAHPPTLIVVEATGGYEVLVVLTLSLAGLPVSVVNPRQVRDFAKGTGQLAKTDAIDAHVLAHFAELMQPPVRPLADAETRALEALVARREQLRLMLEAERQRLTQPAAHAPAVRTSLEHTIAFLQQQLAQTDDEIGTAVAAHPVWAARSALLQSVPGVGPMIAQALLGWLPELGQLTRQQIGKLVGVAPFNRDSGRYRGTRRIAGGRAAVRAKLYMGALVAVRYNARIKAFYLRLLANGKPKKVALVACMHKLLTILNQIVRTAMPWDASHHMAAPQLA

SEQ ID NO: 466841 - protein, 347 aa, unidentified
MRFYTKQHNYYCGIDLHTNKMYVCIINQDGETVFHRNMKAEPETFLRAIKSFRDDLVVSAECMFTWYWLADLCEDENIPFILGHALYMRAIHGGKSKNDRIDSHKIAALLKGGLMPMAYVYPRKMRATRDLMRRRNHFMRKRAELFAHIQNTASQYNLQDPLGRIAVPKNRDGVIERFDLPCVQRSIGANMALIETYDMVIAELERDIIKSAKSHDPVAYALLKTIPGVGKIIALNLLYEIEDIKRFPRVQDFVSYSRLVKCAKESNGKRVGSAGKKIGNAHLRWAFSEASQLFLKCNEPGKKYLQKITNKHGKGKALSILAHKLGRAVYYVLKKQKAFDLNKFLAT

SEQ ID NO: 466842 - protein, 324 aa, unidentified
MIDGILGIDVCKNTLDVSISSYTKVRTKSFTNSPDGWRHLLDWLIAQKIQRVHACLESTGRYSLGIACALYEADHVVSIINPAQIRDFVRTKLGRNKTDGVDASHIREYCELFKPSPWVPPSEAHRRLGELQTIRSGIVAGLTEWKNRKNSGIVDGEAQALADATISHFTSQLGAVDKAIALTIENDCDLQSKRDLLLSISGVGETLAGVVLAELPGPDVLRSSAEVVAYAGLNPRQHQSGTSIDRATRISKIGNAVLRAALYMPALSAMRYNSAIVALVARLKSRGRLKPKQIVVAAMRKLLVLCFGVLKTGRPFDAAIAMGG

SEQ ID NO: 466843 - protein, 351 aa, unidentified
MAGSKRLVSGGVDTHCATHHAAVIDRNGRLIADAEFSATPAGYASMLTWMRSKGKLGQVGVEGTGAYGAGLARYLHQQSIEVLEVPRPDRRLRRQRGKSDPIDAEAAARTVLAGKASGAPKLADGPIEAIRMLRVARNGAVKARTAALNTLRSIVITAPEPLRTQLRSLSSAQLVTACARLRPDPTNLLDPAQSAKQALRSIAQRAQHLDTETRSLRKQLDELTQTAAPATTAIFGLGPETVSALLVTIGDNPDRLRSEAAFAHLCGVAPIPASSGKTHRHRLHRGGDRASNSALHIATVVRLRYDPRSRAYADRRTTEGLSMPEIIRCQKRYLAREIFHALRADYAQLST

SEQ ID NO: 466844 - protein, 341 aa, unidentified
MDQYIGLDVSLKDTAISIRQDGKRIWRGKSPSDPKIVAEMIRKHAPSARRVVFETGPLSTWFYHALTAEGVPAICIEARHAQKILDETLNKTDANDADGLAQLAEAGFYKEVRVKSFDAMLTRTLAGARKQLIRISTRLGNQIRGVMKTFGLIVPKGSGLVFDGHVRNLLEGRDGLARIILPLLEAWRDIRKHAAGLTRYLLTMARKSQETQLLMTIPGVGSVTAVSYLVAIEDPNNFRNSRSVGAWLGLTTRRYQSGEVDRNGHISKRGDNYLRGLLYEAAVSLLTRTRIESSLRDWGLGLCERLGFKRAAIAVARKLAVIMHSMLKTGDPFNRSAGVSA

SEQ ID NO: 466845 - protein, 342 aa, unidentified
MKFYCGIDLSARDCHVCVIDEQLRIVIEQKLRNELPGIIKLLEPYKANLKIVVESSFNWYWLIDGLQAEGFEVVLAHTLGLYLITGAKVKTDRRDAYALAKLLLVGAVPAAYIYPVETRPVRDLLRRRMYLVQVRAGEYGSLRRLLLRQGILSSKQQEIKTATETELEQWFEHPLVRLHASQELQRIELYSAQIAELEKTILSLAQTEKSYELLLQLPGVGQTIALTILYEVGELTRFANVKVFSSYCRVVPGIAQSGKVTGRGRASKQGNHYLKAAFSQAAVHAVRCYPKVRRYYERQLQRHRGRGRQMICYNIIAHKLAQAAFHVLKEQTEYREELLFGR

SEQ ID NO: 466846 - protein, 358 aa, unidentified
MAGKVTETAVVGGVDTHKDLHVAAVVDQNNKVLGTQFFSTTRQGYRQMLAWMTSFGALKRISVECTGTYGSGLLRYLQNAGLDVLEVTAPDRMERRKRGKSDTIDAECAAHAAFSGIRTVTPKTRNGMIESLRVLKTCRKTAISARRVALQIIHSNIISAPDELREQLRNMTRMQLIRTLGSWRPDASEYRNVTNVYRISLKSLARRYLELHDEIADLDVMIAAIVDELAPELIKRNAIGYESASQLLITAGDNPQRLRSESGFAALCGVSPVPVSSGKTNRYRLNRGGDRAANSALHIIAIGRLRTDDKTKEYVARRVAEGHTKMEAIRCLKRYISREVYTLLRNQNRQINSIPITA

SEQ ID NO: 466847 - protein, 290 aa, unidentified
MKVTTIGFDLAKNVFQVHGVDERGHVVVRKQLRRDQVAIFFGKLPACLVGMEACGSAHHWARKLQGFGHCVRLISPQFVKPYVKSNKNDAADAEAICKAVARPNMRFVPIKTMEQQAVLSVHRVRQGVVKARTAQANQIRGLLTEFGLVLPQGITNVMRGVPLLIDAATDLPASMRQLVARLLENMKVLDRQVNELEAQIKAWHQGSELSRKLEKIPGIGALAASALVASIADARSFKNGRQLAAWLGLVPRQDSSGGKPKLLGMSKRGDTYLSNIVDSRRALGHRSGAA

SEQ ID NO: 466848 - protein, 385 aa, unidentified
MLRYIGLDLHKEYVHGCEWVPDADPGHKERHFRFPNTPASWSRLIAQLTRDCWVAIEVTGSAFEIHDLLSPHAGRVLLANPVELKRLGSGRHTDRSDALRLAKLLATDAIPAVWVPPVPVREVRRLLHYRQRLLTHHHRCIYQARAVLRRHGILIPHGADVGRWATEVPETVPLGDRVIFESALRQVAMLAEELAGLDIHIARVVADVPAVELLLTITGYGLIAAAATWAAIGDPRRFIHPKQLTRYAGLDPSVLQSGEEHYQGRISKNGNSLLRTVLVEAAHTVALHDTGSLRQFYLRKAKQIGHMKAIVALARKLLIVAWRMLLTGETYRAAKPHLVTRKHRHLQKLSTARSGANGDRVLAALVRQYWNPGVREARSRTKAPA

SEQ ID NO: 466849 - protein, 390 aa, unidentified
MRAGASLTQSRGLPSKALFGSAYMCWEAPVFIERTSVGLDVHARSVVAAAIDGVTGEVFRARLTPGNDDVLGWVRALPGPSAVVYEAGPTGFGLSRALTTAGIRCEIVAPSKIQRPAGDRVKTDARDAMHLARLLRLDEIVSVTVPTVEREAARDLVRARDDVRGDLMRARHRVSKLLLRQGIVYYGGRAWTGAHLVWLQAQHFDAPGLQFAYDAAHEAVLQAEARRGRLDKAITAMAADSEFTPVVHRLGCLRGVSTLTAFGLAVEVGDWDRLTGATIGAYLGLVPTESSSGQSRSQGSITKTGNTHARRLLVEAAWHHRKPYRSPGVAMKARWELAPAAARARGHAGNQRLHQRWLTFTDRKKKPVIANVAIARELAGWCWSLAVMDG

SEQ ID NO: 466850 - protein, 376 aa, unidentified
MERGSLMLNTTTFVGLDVHARSIKAVALDAMTGEVRSATFGYDAAEVAGWVSSVDPSAKCVYESGVTGFDLQKRLSSMGIDCVVGAVSKMIKPSADRRRKNDRNDAEFLARMLSVGNVVEVWVPDDECEAARDLVRALDDAREDLKRCKQRLSKFLMRHGYAFSETTPTGRRKGNWTAAHWAWIRSIEFPEKADDDVLAYYIDATRQAMEDKKRLEKLVEAEASKPRWKKRVDSLRCLKGVDAMTAADIAFEAGEFSRFKNARSFAAWLGLTPSEHSSGESVRQGGITKAGNKHLRRVLVEAAWHYISASPHPKDLARGQAPDPAARRHAAKGIRRLVKRREEMLGRGVHKNKANVATARELACWCWAVGRMVENG

SEQ ID NO: 466851 - protein, 361 aa, unidentified
MIQGPQIYSHRRPLMRFYTTQHKFYCGIDLHARTMYLCILDQEGKIVLNRDIKTNPDIFLKTIAPYRQDIVVAVECIFTWYWFADLCSQENISFVLGHALYMKAIHGGKAKNDKVDAYKIAALLRGGMMPMAYVYPSEMRSTRDLLRRRNHLARKRAELLAHVQNTNHQYNLPAIEKNLGKKGNREGVAKRFADLCVQKSIELDLGLIDHYDQLLHRIEHEISLIAKKYDADSYFRLRSIPGIGRILGLTILYEIHDISRFERVQDFVSYCRLVKCAKESAGKIIGSSGKKIGNAHLKWAFSEAAVLFLRRNPEAVAYRNKLARKHGAAKSLTILAHKLARAVYNILKKKEVFHPEVFFTK

SEQ ID NO: 466852 - protein, 437 aa, unidentified
MQPITARLLDPTFEAIPDPFHGYDKRQEPLPDRLYLPCGIDPGKKECGVAFLHPLPAHDEVLAHKTIRNCHLEDAQWLLATGNKLADPFGATPAYVFESTNNLWRPLWRFVQSQGGVTATVAGRQTAHSRSTKTRKAQNDFIDAKNIAKVFKDGYSHASRSPKEPIASLREYERLHLFITEFAVAIQNRMNNIRFDIFPEFDGLFCQDKTLATTLTLMRHELVHPQNLLAVSPEDLLCLVHQASHGKLGDERVKAILRAAENTFALPYAVEGFSFSLKLLADIYAYLEEVILPALKERIVACLARVPFQYHLDEIPYFGPIVIGTLLGELGDPAWFPTVDSVVAWFGLDPAVSESCHQPSGPSHLTKRGTKYGRRMMWLVARNWAQYRPEGRDFFKRQVYAYHRSYDAGIVMLAAKLLRAAYAMLRDGSHFDPDRLF

SEQ ID NO: 466853 - protein, 450 aa, unidentified
MDVVNTNAAGIDVGSRSHFVAIGQELKDVKEFGVYAEDLSALCQWLVDSGVTTVAMESTGDYWQNLYTELISFGLEVVLANGKFTKNAKGKKTDVKDCRWIQKLHTLGLLTGSFLPDFDTEQLRTYCRQRGNWIELASSATHKMQKYLKLLNLRLDVVVKDVCGLTGMKIIEDICKGNLDPYSLAEHRHYNCRKPKEEIAKALHGNNRGDYLFGLKQELQSYKFYQQKIKACDDQINRKIKAYIRQDSKRKDLKTTEKPFKRINKNAPKIKDMNQLAFQYFDGVDLFAIEGLSHASILSIMSEIGPEGFKKFPTAKHFTSWLRLAPNNKISGGKTLSNRVPKGSNRLKIALRQAANAIGNLKDTHLSDFFRRVAYRKGRHSAVSATARKLAVIIWNMVTKKIQYNPPKQYLYLDQKRKLGLAKRIRKQIDKFGLTDEDLGINLNNCKIAT

SEQ ID NO: 466854 - protein, 362 aa, unidentified
MAGMDLHGNNVMVGIVDAQGARLQHRRLACELPEIIEFLAPYKTELESIAVESTFNWYWLVDGLKAAGFPVVLANPAKIDQYSGIKHADDKNDAYFLAELQRLKILPTGYIYDPELRPVRDLLRRRMSLMRQRTTLFLSAKSLHQRTTGRALELRRLKAMEPEEAVALYTHPANQLIARIQKEHIDSLDQSIRQIEKAVMKVALQQPYYQRLQTMPGVGIILGLTISMEVGNIDRFAGPGQFASYCRTVDAKRVSNGKTKGENNQKCGNKYLAWAFVEAAHGARRFDTACRRWYDRKAGKRCPTVATKALACKLAKAAWYVMAKGEEYQAGRAFPGLTEPKAEEISGEQASARKGVGPNPED

SEQ ID NO: 466855 - protein, 347 aa, unidentified
MRKIAYLAMDVHARNTVMGDMNGDGKFLGNRCFPTSDDNIANALKMVKAKKKLLVMEAGPLANWVAQTATPFVTEAFISDPRENALIYNSSVKKDKIDTQKLCRLLRLNEFKAVYRPENDQRAIFKAAVQHYNDLRDQLKAIKQKTKAMYRQWGVIDVFTDSVYSTSGRDKFLVQVQQRPILLQLKRLYALMDFTADMKQDAKKTMIALGRKYPEIKEFKKMPGISTVGAHTFDAYIQTPHRFARRNRLWKYCRTGVTDRSSDGKPLGFKRLDRAGIGELKAVSYRAFISAMKSDNEVKRFYLQSLQRTHNHKHARLNTQRKILAVMLGIWKKGQPYRAELFLDPCK

SEQ ID NO: 466856 - protein, 318 aa, unidentified
MTSQTCVYVGIDVSKGRLDVAIGEQGEFWSVANDEKGIAKLVERMEEIQPELVVLESTGGLELPVMTELYASQVRVALVNPGRVREFAKSIGLLAKTDKLDARLLARFAEVVKPPVTRLPDEQEQHLIALVTRRRQLIEMLVAEQNRLNTVRLSMRQNLEEHITWLRQALADLDQEIKQFIHQSPIWKDKGDLLQSVPGVGPVTACTLLAELPELGKLDRKKIAALVGVAPFNDDSGHRRGKRRVKGGRSSVRSVLYMAALSASKFNPVLSLFYKRLIQRGKEKKVALTACMRKLLTFLNAIIRDQLPWNPALKHFAS

SEQ ID NO: 466857 - protein, 341 aa, unidentified
MKRFIGVDLHKNSFTVCYMQEGGEYSLKSFKVDPRGIEEFKRTLAKDDELALESTGNAGYLARQIEGLVARIRIINPVQFKVISESIKKTDEHDATVISRYLSKGLIPEVRMRSKEEAKLASLIGTRDKFVKLRTALKNKIHNILNANGIVTTKEMFNADKSLDRVLEMELDEGDLFELRVIIDEIKNLNRSIDEINKELVDRGKKLSGHKNLTSIKGIGDISATILLSAIGNIDDFKDDSKLAAYLGIVPRVYVSNEMSHYGRITKMGNKIARTALVQSTLIAIRYSPYLRGSYLKLKTKKGSGKAIIATSRKLLTIVYRTLKNNWVFEDFDNFKLAVSI

SEQ ID NO: 466858 - protein, 467 aa, unidentified
MRLRLGIDVACKAAHQVSCTDETGRFLFSGRRFRTTVEDLEKLWVSLPAADEVLVVLEPTRNAWVPLAAWLRAHGAKVALVPPEQSADLRDYYHKHTKNDRLDSRVLARLPLLHPEGLRVLGDDELGPADPLRRATRRRRSLVKRRTAIYARLDALLELLGPHWADTLGSGEYSKTALTLLERTGGDPHALKRLGRKRLTALLVRTSRGQWRDDHAETILHAAEQSLRLWAAGGLDFTELSHDLSGEARLALQLSTEIDGLDDRIGVLYEEADPAGLLTTAPGLAVTSAATILAGLGDPDRFTTLAGVRSFTGLVPKLDESGTSSRYGPPTKAGDPALREALFNAADRARKTDPTLAARYQRLIQAGKHHNSALCTRAAVLVTRLAACWRSRTPYQLHDVDGRPITAAEGRTICATRYQVTDADRAKNRSQRAAQRQKQGTGRRRKESRSAPAAGPSTNHINHLPAA

SEQ ID NO: 466859 - protein, 430 aa, unidentified
MTKRSSTPADAVLVAIDMSKHRQEVLIERPEGGRRRRMTVMATKADYDRLATDLSDVGRPIVVGFEATGNYHRTLAHRLLAAGFELRLISSVALARTREALHNGWDKNDSKDAQVILHMLRIGATQRYVDPLAAGINDLQEMSKTHEAISKAKTQTWHRILTHYLPLYFPEIERFAGNSRSDWFLALIERFPTPASMTALGQEAFTREAWSLVGRKVSKARLINDIYETACASVALPVDEDSIAITMFRMVIAQARSLIRQRDEIERTAHAVLAENRDYQLLRKIPGIGPINALTILAEAGDLRRFAHHRQFLKFCGLDLATCQSGTFRGRTKLSKYGNARLRRTFWMATQVAIRQRDNSFRDKLGRYVAGHGNDPDRRRKAMTALTAKMARVAHAVIKTGTEYRPFVERADTRWKDPSLSCREGATATL

SEQ ID NO: 466860 - protein, 336 aa, unidentified
MYIVSCGLDIAKNVFQLYALDNEGNELRRRLKRSQLLRFFSQLEPCLVGIEACGGAHYWARELGNLGHTVRLIAPQKVKPYVQGNKTDANDAEGIHAALLRPGMQLVSTKTIEQQDLLMLHRVRSLAVKTRTAHANQIRGLLAEYGVVLPQRLATLRRRLIAVLAEDERLSVMAREQLHGLYQELLHLDERIKRQEALILQMCHTHPACRRLLGIPGIGPLTATALVASAGDVSVFRNGREFAAWLGIVPRQHSSGDKTMLQGISKRGDAYLRTLLVHGARAVLSRAKGKEDRNSRWLVALEARRGYNKACVAQANKTARIAWALLRYDSTYEVAA

SEQ ID NO: 466861 - protein, 403 aa, unidentified
MVKYHVGVDVGKHRHHVSIRDLSQDDYCKAFSFSNNRDGFIELIAVLEKLSPERSDFLIGVEACSYALNLSYFLMALEFTLVEVNPFRAGQFRKAQGKKAKTDKIDARTIAAILPLGDHKPLSIPDPILDNLKELTRFRVTLVDEKSTMIIHLREALSTLFPEYEKVFRQLDSAASLALLAAYPGPEHIIGAGEEEVGRTLSLASPHRMSIGMARRIIEAAKCTVGVVQKQPSLGIKMSILAKRIAGLQSTIRDLDRQITTLFNSLPCKPRGFPVGRAPSLATIISEIGDIHRYPTLKKFLSHLGWCPQSFQTGNFRLKHPKMSHAGNKYVRRLIWMLSIFAVQFVPRYREYFQRRVSEGKAKMHIIVAVGRKLLSALYAMLKTGTAYNPNWEENSRSALARR

SEQ ID NO: 466862 - protein, 385 aa, unidentified
MTQAILQMEHNSIPRKLCVALELGGTRWKLIASSGGTKVTESSVAAGDVENLWEKIGAATARHGVPAGSSIVSCYEAGRDGFWLHRELERRGVRNVVVDSSSIEVNRRARRAKTDRIDGHKLLTLLWRHETGERTVWRVVRVPSVAEEDARRLHRELDRLTKERTAHVNRIRALLVLHGVGHRLGRRTVTARTVMAQLRSCTQRDGTPLPPHLRAELDREGQRWELVDAQIRAVETQRRQQLHAAQTAAARQVQHLTRLQAVGDTSAWLLVQEIFAWRHIRNRREAGALVGLTPTPYSSDGSQREQGISKAGNRHVRRVLIQLAWGWLRYQPQSALSRWFHRRFGAGRGRMRRVGIVALARRLFIALWRFVDFGVVPEGARLRAA

SEQ ID NO: 466863 - protein, 393 aa, unidentified
MICVGIDVAKDKYDCFILSSEGEVLADVFTIPNNAEGFDTLLQTIRRCARPEDKIKVGLEATGHYSYNILGFLLDKGLPTYVINPLHTNLYRKSLSLRKTKTDRVDARTIAAMLMSDVDLKSYTDTVYHNEELKSLTRYRFDKVRERAKLKQSVSRLVTILFPELEKLVSSLHSASVYALLSEFPGAKQISSTHMTHLKAVLKNASQGRYGQEMAETIRNAARSSVGSVMPAKSLELQHTIRLIRELDAEIEDIETAIQAIVDEMQSPITTIPGMGVRMGAVILAEIGDFSRFDSPDKILAYAGMSPSTYQSGQLSLSGAYSHMEKRGSRYLRYALYNATKHVCHWDPTFAAYLAKKRAEGKHYNVALSHAAKKLVRLIFAMEKSQRPYCAAA

SEQ ID NO: 466864 - protein, 348 aa, unidentified
MTTMTDTARRVTGGVDTHRDLHVVCALDERGAELGVESFPTTPAGYRRMLHWLRHFGEVGRVGVEGTGSYGAGLTRYLQTEGVEVIEICCPNRQRRRSHGKSDPVDAVAAARAVFSGDAVIEPKIRTGNVEAIRALRIADRSARHNRIKAINQMRALLLTGPEDLREQFRGTTVWRMVRGAARLRPGDPTTPIGATKFTLRILARRVLELEAELKELETILKPLVAQTAPELVARHGVGTETAGALLVAAGDNPERLRDERAFAHYCGTSPIDASSGTVVRKRLNRGGNRQANEALWRIVMVRLVSDPATRHYMERRTKEGLSKKEAIRCLKRYVARELYPFLASIGP

SEQ ID NO: 466865 - protein, 388 aa, unidentified
MNQTKLNTKRTSSAGSDLAALIGLDWASQQHALCLYDCATGKRESSTLEHTPEAIAQWAQGLEQRFGGRKIAVCLEQAKGALINALLEYPFFVLYPINPATSARYRQAFKTSRAKDDPSDAQVCLELVLHHREKLTPWLANDTPTRQLSRLLEARRSFVDLRTLLSNMLRDALKSYYPQALELAGQDLFAPLSCQFLLKWPSLQELQKARTESVRKFYAHNCRRKDVIEKRLQAIGQMTPLCRDRALIEPALIQVKMLARQLLQLGIALKEYDSKIEHLFAQHQDASIWQSFPGAGPTLGPRLCCAFGSERSRYQSALAIQQYSGIAPVQEKSGKNSIGSIAAGAARTSSIRASLNMPASRSSTAPGPKCLSRISSTAVKLIPPRCAL

SEQ ID NO: 466866 - protein, 440 aa, unidentified
MSQEDRSRLEEFRQFRKEVRGSTEYLLVGIDVAKDKHHAFFGTATGKTLFRRLVFENNLEGFRRLLVQAEAMKVEHGLKRVVFGMEPTGNYHKPLGEHLIRSGHWVVLVSGVAAHENRKTLDGRWDTNDTRDAANVADLMSQGKCLFYEFPGGVFQDLRNLLSLKRRLKRMEQGHRVRIRNHLVAKYFPELDRYYEQSESTVLAIVRWCLDPSEIAGLEYQKFVQMVGSIRGRCSQEKRLQAIWKMAVDSVGCEAGATVEFEARVMVEGLRQIRESIREIDERIQEVCSQFSEYECLRSIPGFGPDVSSKVLGAIGDPFRFQKGSQVLKMAGLDLSAERSGKTSESAIPVISKKGKADLRYALYQAAFIASTRNQDFIVYYTDQLRGREREPGIKIKMRVKLSAKLLIVAWTLMKKKEPFHPGYLRVEGQSFSAEAGRER

SEQ ID NO: 466867 - protein, 329 aa, unidentified
MEPLYIGIDVSKANLDVVVRRSGHNSPAKTFANTQAGITALWKWLAQQKGASLWACLEATGQYGEPVAERLYASGCRVSVVNPLRIKRYAQACAVRNQTDRVDATLIASFCEHLQPHLWVPPSPAQQLLRQLSRRLSDLQGMLQMERNRLAASQRLPLSLKTSLQAVIHLLEEQIREIKRELFHLLNADPELKRQKKLLMSIQGIGELTAVRFLAELGDLREFSSAKQLAAFLGLTPESKVSGTSVHTKPKLSKKGNAHVRQFLYMPAVVAKNHNLLIRAFCGRLAARQKGNMSLIGAAMHKLVLLMFGVVHSGMSFDAHYLGKPAFPS

SEQ ID NO: 466868 - protein, 393 aa, unidentified
MKDVYASVDACGMDVHYKFTTVTMRDGAGRVVRRERLDHRDRSALRQRLSQWPAGVSMVMEASFGWGWLADLMQELGLSPQLSNCYKLEQMRKARGLAKTNKKDADLLSLLPHEKEDWWKVWMAPPEVRDRREWMRHRASLVKVQTETKNRISALLHRHGIVHEFSDLFGVGGRRFLGEVAAGGGPEEAALEGGAVSALRGLLSLLDHVRGQLAVLARSLRSQLEQDDLARRLAGIPGIGSILAHTLLAEIGRIERFRHHRALASYSLLAPIAADTGEDTGRKPLGRHLGRRGNRTLKWAFIEAAHGAVRKGGRWRKRFDSVTDGGTRDRQRGYIKVARELVKVVYVIWKKNVAYMECPPPRRGRSARCCAEAFFNDTRSVTGQPCRPMAAVR

SEQ ID NO: 466869 - protein, 351 aa, unidentified
MGIDLGKRTYEAAIAGKGNVVRCNGKTCAAGRRALYKKLRAGDKVAVEACSLAFVMAKEIEAAVGCRVYVLNPHHLPLIYGSMNKTDKEDSLKLAHILEDFQEERLPSVPVPGDKEMNRRKLLAGYRRAQQGRNREINKLHGLFLSRGVTTVAKKDLATGEARREAVRALGGVELEEAGYLAECLDLHERRIETLNRQIKEESAGDEVIERLQSVPGVGPAVAFAFVSHVAAERFENSGQVSNYLGLVPKVYMSGDTVRYGKITKRGNGYLRALLVQAAWALTRSKQGGKLKERFEYMTVGKSVSKKKAIVAVARRMAELLYTLMRDGTVYENRPFVREKKGDELARLASA

SEQ ID NO: 466870 - protein, 420 aa, unidentified
MKSNTQNAKIEAITEKTLVLGIDVGSETHYARAFDYRGIEYSKKPFKFSNTEAGFVTFKEWILVLKEKHEKDKVVPGMEPTGHYWFNLGKFLQDNEFFRFLVNPHHVKKSKELDDNNPTKNDRKDPKVIAGLVREGRYMIPYLPDGVYADLRTASNIRFQLQAELTRIQNRISRWFNIYFPEYKTVYGKPDAKSGMLILKQAPLPEDILTLGIDGVNQIWRDAKMRAVGKARAKTLIEAAEHSVGEIRMLLEDYESRNIRLQEIMTLIEELVNQIPMAEKLLEIKGVGIKTVSGFLAEVGDISRFNNPKELQKLAGLALVENSSGKHKGRTTISRRGRKRLRYLLFEVAMSLVAKNPEFRELHTYYTTRRLNPLKKMQSLMAVAAKLIRVFYVMLTKGVDYDPKKMVGDIKRPAVYLQAA

SEQ ID NO: 466871 - protein, 415 aa, unidentified
MWNEVTSARGTVDPAASINLRRIAMVYLGIDVAKDKHDCYIVNSDREILANVFTIANDQTGFNQLLQRLKSVAPDLSKVKVGLEATGHYSYNILGFLLGKGLHTYVINPLHVNLFRKATNIRKTKTDPIDARTIAEMIMSNVVLTSYTAKSYHNEELKSLTRYRFDKVQERAKLKTSVARLVSILFPELEKLVPTLHMHSIYALLTEFPGARQIASCHLTRLTHLLSKFSKGHYKRDKAFQIREAARNSIGSVMPAKSLELKHTIHLIEVLTEEVDEIELSIKRIMDADPSPILTIPGISYRMGAMILGEIGDFSRFSSPDQILAYAGLSPSTYQSGKLDNAYPHMEKRGSHYLRFALFNATRFVCNWDPTFAAYLAKKRAEGKHYYVAISHAAKKLVRLIFALVRSGQAYSPAT

SEQ ID NO: 466872 - protein, 476 aa, unidentified
MSSNIKAHANLTPLPMLPQESLYVGIDVGKFRHIAGFLSRTLLVRHKQFEGCPTFAFEQSREGFRSFVDRIRSYVPLEQAVVLLEHTGHYHRLLEQYLLELDITVYRIHVQKRADGMMKTDKRDALALANTLYTQLELGAQVMDKMQLVRRIAPPTRAAAQLQSVMRHRYELSHMSTQYRNKLTAICDELFPELVQVFHDPNLSTALAFREAFPTPHAVAVASLNDLRTVRQRNFPSEAQLLHLQQVASETIGVTDLDRQRGLVLEQGLLIKELRLVQEHLENLQMTIADIVQNSREGQILLSIPPIGLVQAATIIATIGNIANFAKASELKSYFGWAPRENQTGVTKDQTHLSKRGVRPMKQMLFLMAARATTLDCEWARIYQRLLPRLCTYDERVRDYRGKKKVLGRIAGQMASMIYALLKTDQETMSQIPPEEDPPPPMLYDPAIHRKHREGFYHSLKPNTQPRTILQLPRKP

SEQ ID NO: 466873 - protein, 364 aa, unidentified
MKEEKTKTRYIGIDLGKKTYHMAVVGKGGKVTMSNGTTYTAGRQGLYNKLRPEDKVAIESCSLAFTMAKEMEASVGCKVYVLNPGRLAIIYKSMKKTDKEDALKLAHILQDFAEERLPVVPVPSDKEMNRRKILANSRRAQNNRNRLINLLHALFVSQGITSKVRKELATEGVRKEAIKELSGIERDEAEYLVQCLDLCEKRIEKLDQMIALESAGDEEIERLQSIPGVGPKLSFAFVSHVGAERFENSGQLSNYLGLVPRVYMSGDTVRYGPITKRGNSYVRALLVQGSWALVRSKTGGKLKELYEHMTKEKSKNKKKAIVAVARQLAEMMYTMMRDKTWYARRKFNPGKEEAAELAQLAISA

SEQ ID NO: 466874 - protein, 403 aa, unidentified
MNAVGIDVSKGKSMVAVMRPLGELVVKPFEVHHTANELKDLSDLLRGLDGEVRIIMEFTGRYYQPIARYLVEAGFFVGVVHAKLIHDFGNNSIRKVKTDRADAIKIANYGLSNWISLKRYTPKDETRLLLKTCNRQYNQYMKLKVSLKNNLIAILDQTFSGLNEMFTSPVRADGHEKWVDFAEKFWHCEIVSSMSRAKFTTQYSKWCQKHGYNRSDSKASALYELALNQVATLPPTTQTKALIVQAISQLNFVSVSLAELRRQMQQLAASLPEYPVVLAMSGVGETLGPQLIAEIGDVRRFSHKGALVAFAGVDAPPFQSGVFESASRSISKRGSPALRKALFQVMKSILKNSPSDDAVYQFLDRKRAEGKHYYVYMVAGCNKFLRIYYARVKEYLITLENIS

SEQ ID NO: 466875 - protein, 315 aa, unidentified
MMSTQVFVGIDVSKAQLDLALRPEGRFSAPNDEAGFAQVLERLSAVRPTLVVLEATGGLEIPLTGVLAAAGVPVVVVNPRQVRDFAKATGRLAKTDALDAQTLAHFAEVIRPELRPLPDEQTQALAAILARRRQLVEMLTAEKNRLGSARKPVRKSLRTHIAWLERELSHTDGDLAQAIRESPVWREKDALLRSTPGVGPVLTTTLLANLPELGTLTGKQIAALVGVAPLNRDSGTLRGKRTVWGGRAQVRAVLYMGAIVAARFNPVIRAFYQRLCAAGKAKKVALTACMRKLLIILNAMLKHRTPWRAELVQCA

SEQ ID NO: 466876 - protein, 340 aa, unidentified
MKLSVIGIDVGKNVLHVHGADAQGQSVLRKTFGRGALVEWLAQQAPCLIGMEACGGAHHLARVLIDCGHTVRLIHPSFVKAYVKSNKNDFRDAEAIAEAVTRPTMRFVAIKTVAQQELQALHRLRSGAVAQRTAIINQIRGLLLEFGITVPQGPTALRRRLPAILETVDGGLEALGRDLVAELQQEWVRLDERIAALEQRLKQQTQTLEPCRRLQTIPGIGVLGASAFVAAFGDGRQFASGRDCAAALGLVPRQHSTGGRPQLGHISKRGDPYLRTLFIHGARAVLRYADRHDDSRSRWVRALKERRGIPVAAVALANKMTRTAWAVLTRGTTYQVPAAA

SEQ ID NO: 466877 - protein, 343 aa, unidentified
MRKYAALDVSMEQTAICVVEEDGRKVVEGKVPTDPDAIAEWLAGKAGEIERVGMETGPLAVWLWNELTRRGLPIMCLDARHASAALSMMPNKTDRHDAAGLAQIVRTGWFKEVRIKSHDAYVVRALLSARDLLVGIRGRIENEIRGLLKTFGVMFGKKVGGFARRAEEIVSGELAAAPEIKAIVEAMMEARHYIIERIKVLDARVRAAAKQNSMARLFMTAPGVGAVIALSVASTYDDASRFRRSSSAGAYLGLTPRRYESGEVSRNGRVSKRGDKLTRTHLYEAANVILTRQVGFSSLKAWGLRIAKGAGFKKAKVAVARKLAVILHAMWKTNEPFRYAAAG

SEQ ID NO: 466878 - protein, 404 aa, unidentified
MNNVAGVDVSKGKSMVSVLRPFGEVVAKPFAVRHTGSELKELADYLKSLDGETRVVMEHTGRYYEPVAQFLCHEGIFVSAVNPKLIKDYGNNSLRKVKTDAADSRKIARYGLDNWVELRQHTPMDTIRYQLKTLNRQQGLYSKTKTMMKNNLIALLDQTYPGVNALFDSPAREDGSQKWVDFAASFWHVDSVRSMSLSAFTERYRKWCQRHGYNFSESKAAEIHAGAQDLIAMLPNDALTKLLVQQAIDSLNAISKSVEQLKSEMRTLAAQLPEYPVVMAMRGVGDSLGPQLMAEIGDVTRFTHRGSITSFAGVDPGANQSGTYEAKSVRTSKSGQPELRKALFLVMDCLLKTMPQDDPVYLFMDKKRAEGKPYLVYMTAGANKFLRIYYGRVKEYLASLEAGE

SEQ ID NO: 466879 - protein, 343 aa, unidentified
MQTITTIGLDIAKSVFQVHGVDGAGQVVIRRQLKRRSVLTFFEKLPPCLVGIEACASAHHWSRELQALGHKVRLIPPAYVKPYVKRQKNDAADAEAICEAVARANMRFVPTKTPEQQSGLVLHRTRHLFIRQQTAVINAIRAHLAEFGIVAPVGRRGVEELLNVVADPNDKRVPEIARACLSAFRAQLRMIKEQVLEFDRLIRAWHRSNEMSMRLDEAPGVGPVLATALVAAVADPKSFRSGRNFSAWIGIVPKQHSSGGKNRLGNISKQGDRYLRGLFVAGALAVIRYAKIHGTKHRPWLTALLARKPTKVAAIALANKIARMVWAMMARGERYKEPIALAR

SEQ ID NO: 466880 - protein, 343 aa, unidentified
MLIIGCDYHPSFQQIAFVDDATGEYGQRRLEHGNEEAQQYYRSLKGQKVLVGVEATGSMRWFERLLAECGHELWWGNPAKIRAAAVGRQKTDKRDADLILQLLIEKRFPRLWVPSVEQREGRQLVLHRHRLVQMRTRVKNQLQALAMNEGVQRKHKLWSQAGQAELQGLSLGPWASVRRTDLTDLRKDLDGKIDVLNQGLEQQVEQRPEVRRLMTHPGVGPVVATAFVLTIGEPGRFKKSKEVAAYLGLVPLEDSSGGRQRLGHITKQGNSMLRGLLVEAAHVAVRREPEWQRKYKRLAMKKNRSIAAVAVARCLAVRLWWMWKLGLDYGPMKESRSHAESLV

SEQ ID NO: 466881 - protein, 343 aa, unidentified
MKITTIGLDLAKSVFQVHGVDAEGRTVSCKRLRRGQLLDFFKALEPCLVGMEACGGAHHWAREIMALGHEVKLMPPQYVRPYVKRNKTDAADAEAICEAVRRPNMHFVPVKTLEQQSILMLHRGRELLLRQRTMLINALRGHLAELGLVARQGRGGVDDLVQTMAEADEMPSLARRVLDHLAEELREIETRLKEMEKELLAWHKASEASQRLATIPGIGPITATALAATAGDGRAFKSGRQFAAWLGLVPGQHSSGGKPRLGGISKKGDGYLRRLLVHGARTQTRWRDRASPWFQELLGRRPVNVAVTALANKNARIAWALLNRDETFRRTPPNRETAQPIAA

SEQ ID NO: 466882 - protein, 318 aa, unidentified
MSVAHGYWGIDVAKDTLELAEFEASEQGQVTNDSAGIAALLNRMTEAPPQLIVLEATGGYEQEVVWALGTAGLPVVVVNPRQVREFARATGQLAKTDRLDTKVLARFAAMVRPEPRPLPDAAALELEAYLTRRRQLRDMLTMEQQRLALVRPREVRQSLRKHIAYLQRELRSTESDLSQLIKGSPLWREADDLLQSVPGIGPTTAQTLIALLPELGTLGRRAIAKLVGVAPLNQESGRLRGARRTWGGRAPVRRTLYMAALVGTRWNPVIRAFYQRLIAAGKARKVALTACMRKLLTILNVILKTKRPWQPTMVSTSA

SEQ ID NO: 466883 - protein, 348 aa, unidentified
MVEGTEGSHHKEGSKKMSKDSTVCAGIDTGKYKLDVVIDASADRLQVDNSPEGYRSLSVWLRQRGVERIGIEASGGYEQAVVSFLRADGFVVIVFQPVQVRAYAKFVLQHAKNDNIDAALIARCTAAATDIHEPPDTRLAPLAQRLTMIEQLTQDVAQLKTRREACRDQRIREFWKQEIDRLKRLLQAELKQLVAAIGEHRDLATRLDLIASVDGVGLRTAVAILVRMPEIGRVTREQAAAIAGLAPYDDESGQRRGLRQYQRWAPTIAAEPLRGDIAGGLLLECPIESFVQATDHSRKNSQARPRRLRPQAPNLCQHSRRPRDPLDVRASNHIMVAQHEAEQAASRR

SEQ ID NO: 466884 - protein, 434 aa, unidentified
MTLYVGIDIGKTSHVAALLSIALLNKHRIYEHCPTFAFEQSHAGFEKLLTAIRLHAPLSDVRILVERTGHYGRALEQYLQEQEVAVYQIHVQERPKGSKSDKRDAQALAVLLYNQVERGVLATEKSRIAHLLIAPSASARLLRGLVQHRTELIRERTQRKNKLRAICDEIFPELTQIYVDPNGPSALILREKYPLPTDIATAPLDDLLATRKRTRPSRANMEDLQKLATHTIGTKDSSRLIALALEQKQLIKELQVSNEHIEELDSKIAAAIAESREGKILLSMPAIGVNQAAMLIAGIGSIANFESAAKLRAYSGWSPRQDQTGTSYDSMVLSRNGNRLLKHTLYLIALQAIKLDTAWKTLYDRLVPLKCAWDERAGRYRGKMKVIGRIIGQMVGLIFTLLRRDYEILARTPAGKEPAAPELYDVAKHRVRRN

SEQ ID NO: 466885 - protein, 452 aa, unidentified
MALIVGIDLGRKSAQDAVVLRRESAQQLGRVFRFGSTPSGIETLFTRIDAICQEEEPIAFVIDSPGKAWIPIAAVLKNRGYPIYRPSSYRVRKMRQAGDRKNKSNRIDALALARCLLAYPQDTQEVFLPQKVQAQLDQLVRQRDRIVDSLRRRKQRIQDLSEAINPGLTSAAGGFLLTEAGRAFLRTYLDPRAVVRLGRKRFAAFLDKRYRLPLEKERIDGIFLACKDAAQLNKTVRQVGQMPLDERLLQEEINWELDQLEREEQRVVSLENQLKECNQKLDPQDAFLSLPGIQHITAAGIRACIGDIDRFNSLTNHRGFAGLYPSVRKTGDGESASMPISKMSGNRYKRYLYLAAENAYKWDVDCAAFYHKRRERGHTHTQAVCAVANGKLLPRIHQLLKQLSQAETKAQHRPRYVFRDLEGNPISKAEARAIIQAQWGNRKYGKKGLATA

SEQ ID NO: 466886 - protein, 424 aa, unidentified
MKVTYQICCGVDVHKSFLVATIVKTTGGIEPSYQKKRFSTFNNSILEFKQWLLDNDCHDVCMESTGKYWVPVFNLLEDEINVVIANPKWVKAVKGNKDDTKDSKWIGDLFRLGLVKGSYIPCKIVRILREYTRYRCKLVSCRSSEKNRYQNALTVCNVALDSVVSDIFGKSSTSIIDYLLEQSGTSINHEEIASKLLRSLKSKEDAVIESVEGYQMTDAQKYRMRLVRAHMDYITAEIKDVDKMIENMISSNPDFENAVQFLCTIPGVKCDSAITIISEIGTDMSQFSSSKRLCCWAGLTPGSNESAGKKKSVRITRAGVYLKPALVQCAHAAVKSDQSPYYKKKYESLVKRRGKKRAIIAIARMILTAIYQMLSTGEQWNPSDLYKIDVPEALIEKQKAKAIKQAKKLLQREGLLPPDEPVAS

SEQ ID NO: 466887 - protein, 362 aa, unidentified
MPKMIWLGMDVHAASITVAQYEDQAPTATVQTIANDPAQVRRLVRRLPAGSDVRACYEAGSCGYGLHRQLTALGVHCDVIAPALIPRRPGERIKTDRRDAEKLGHFYRSGELTTITVPTPSQEGVRDLVRAREDVRRDRTAARQRLAKFLLRHGHRYPGSHWTKRHWEWVCGHTFDGPARTVFVHYCDHVLALNERLAHLEREIRTLAESAAYQPVVTRLSCLRGLATLSALVLIAELYDLRRFRTPRELMAYLGLVPSEHSSGARARRGRITKTGNALARRLLIEAAWAYRHPARQTRRVHQALTTQPPEVHAISDRALHRLTARYRRLLSRGKTPHHAVTAIARELCGFVWAIALVPDLA

SEQ ID NO: 466888 - protein, 359 aa, unidentified
MQEQINKLDFRGENIYVGIDVHKMNWVVTIVLDQITHRTFSQPPCANILGDYLRKNFPGGNYYSAYEAGFCGFSTHRLLEKEGISNVVVNPSDIPTTDKDKRQKEDMRDSRKIAYSLKQNALRGIHIPREETEELRSLLKCRVNLVKEISRYKNRVKSLLFQYGIHIPENFANISKHFSNTYINWLKCIQFQTASGDIALKSLISTTIALRQELLKMNREIRAVYRSQRYKELVGILTSIPGIGEYTAIVFIAFIEDMRRFYSLDDLCSYIGLIPSTNSSGENEKTGKITRRSNKVLRGLIIESAWIAARRDPALMMAYQTLCGRMKPSKAIIRVAKKLLSRMRYVWINNEKYEYAVVA

SEQ ID NO: 466889 - protein, 353 aa, unidentified
MKKYIGCDLHKKYAVFVAMDESGRKESPVRVATDTLELREYLKTLEAGTSVSVEAGGSWYWFVDLLEEYRLDVRLANPVELKKRLPGRNKTDNSDAGGSAMLLRNGTLPEVWIPPAGLRDFRGLLRTRLSLRCHTTTLKNRIHGAIRRYGQYDEEEPKTLFEGKGRVCLSRYVGGLPPSTRLATRHEWDVVDTIERHIGELEKQIRGSIGQIGYVRLLKSLPGVGEILSATIYLEIGDVTRFPSCDRLASYAGLTPTVYASGGKSRLGHTSPVCNHYLKWAFVEAANAIVMRKALYAGTHAVQLYERLQKSKGHGKAATAVARHLAEASWWMLTKKQPYREPAPASTSSSKNG

SEQ ID NO: 466890 - protein, 350 aa, unidentified
MNITIYGLDLAKRVFQVHWVETDTGELKRKSLARAEVSAFFARRAPGIVAMESCGSAHHWGRVLGGLGHQVRLIAAQFVKPFVKTNKTDAADAEAIWEAAQRPGMRFVALKSEEQQAVLSLHRMRAQLVKIRAMQAYQVRSLLYEFGVVAPKGFRALKEKLGPVLADPTGCPVPELARVELLSQLEGLRSLSTRIDELERRIGGWQRRESECERLAGIPGVGRLTATAVVATVADARSFRSGREFAAFLGLVPRQSGTGGRVKLLGISKRGDPYLRTLLIHGARSILLSQSRADRVMDPWLRDVLARRPKNVAIVALANKMARTIWALMAHGRMFDENWGRTAIAVAAGQ

SEQ ID NO: 466891 - protein, 356 aa, unidentified
MKTIGVDLHKASLTATVLDATGTILERKDIPTKCRKQIATYFASHGPDVQVAVESVGFYHWFWDTVKPAVRKLHLAAPAAVPACAGRRTKTARNDSLLLAELLRNDRLPMAYVPDDSIRALRELCRHRHRLARQLALARRHLRWIGLKNNLPGPDTFTSDRAQKWLLSQDAKLNAAHRFASRQFVDQITSLERQLADTESTLQESVAAHADLAPTLALFQSVPGIGFITAVTILCECGDITRFDTIDQLSAYAGLCPRVTQSGESAHHGHISKQGPPQLRWVLQQAAWVAIRCDPNARRIYARIAKRAGSKKAATALARKLLSYAWSVCRQGRPFVWPNAGIKPVTATGPVWSYDI

SEQ ID NO: 466892 - protein, 345 aa, unidentified
MRSMYYIGLDVHKKTISYCVKDGSGQIHSQGAIPATRLDLDRWMKTLPQPWTAAMEATIFTAWIYDHLLPHAAALKVAHPLMLRAIAAAKKKNDRIDAHKIADCLRCDFLPECYMASTEIRKRRRTLRYRNLLVRQAVQMKNKIAVLLMEAGVSYNKQKLHKVGYFCELLATNKDIDDGLRPLLRLCRETLVRLGKTESALVRSLGRDPLLVERVERLMTIPAVGPITALTWVLEVGDVRRFSSIKKAISYCGLCGAEKSSAEAIKRTPLSKQRNKHLQSVLIEAAKLAPRRSPDLALVYDQEKQKGNANRATLAVARKLVAYLVAVDRRQKEFLPVQRENRTAA

SEQ ID NO: 466893 - protein, 367 aa, unidentified
MTSTRRVVTVGVDTHSDVHHAAVIDGVGRPLADAGFPTTPDGYRALLAWAGGHGEITAFGVEGTGAYGAGLARHLRAAGETVIEVDRPDRRTRRQRRGKSDPIDAYAAAAAVLSGAAAGTPKTRDGRVEAIRTLRVARRSAIKGRTQAINQLKALVLTGPAELRQALAGQTTRRLLASCRRLRVTERLTEAADPITAATKLTLRRLARRIAALTEEIDDLDAELRPLVSAAAPALMAVYGVGTEVAAQLLVTAGDNPDRLRSEAAFAHLCGVAPIPASTGKTHRHRLNRGGDRAADNALYVVVLTRLRLDPRTRAYFTRRRAEGLSKREVTRCLQRYVARELYQLLVRLPAFSSSWPIPREAGLGQP

SEQ ID NO: 466894 - protein, 454 aa, unidentified
MTKPKEQKYEQMPVLNEHAAGIDVGSREHYVAIGQGKEHVKRFGVYTEELAELCQWLVQHGVRTVAMESTGNYWKNLFIMLQQRNLKPILVNGSFTKNLKGRKTDVQDCQFIQRMHTLGLLPDSFQPDVFTEQLRNLTRHRTMLLSQAADTSKRLQQSLRLMNLRIDIAVSDITGKSGMNIIAAILKGERNPVLLAAICDANVKKSREEIAAALTGFYRNDYLFQLKQNVGIWQFIQQQIKDVDQELNSLLEKHLHDSNKNDRNYVPHKNARKKKQKNNPAFDIAKKSFQLFNGVDVIEVPGISHGTALTIISEMGENISMFNSAKSFCSWLRLVPNKRKSGGKVLSNKIKQGSHILSVALRSAANTIGNMKKEIPLTKFFKRLHFKYGRAAAITATGRKLAVIIWNMITKCQSYLPLSNAVYDHRIRHLTLKNIQKKIIKLKIKQEDLQFAIA

SEQ ID NO: 466895 - protein, 384 aa, unidentified
MSSRAAAPTVPAAARSMIYLGMDVHKDSITIAVLPASAKTPTRLERLPNDLPKLQKWIARVARDGEIRACYEASGAGYVLHRALREWGYACDVIAPSLIPKRSGVHRKHDKRDAADLARLYRAGELVAVRIPSEADERVRDVVRCRETFQREILKSRHYILKFLARRGFVFREGTNWCTPHLQWLQHLTTDGSPLAPEDRLIYREYHALLLYKLQRREELDRHIERLAELPTLAPMVKQLQCFRGIALQTAMVLATEIVDWRRFERPNQLACYLGLIPREDSSGDRQRLGSITKAGNSHCRHVLVQAAWSYRHRPQTSVDLKRRQEGQPPAVITHAWKAQQRLHKRFNHLSYRKRPQIAVVAVARELVGFLWAVMRELEPVQAA

SEQ ID NO: 466896 - protein, 349 aa, unidentified
MLADELDYVLGVDTHRDEHVLAVVTAPAGAVVAGSSVAASRRGYHEALCFAERYAAGRRAWAIEGTGSYGAGLARFLADRGEVVLELSRTPQAERRLAGKDDALDAARTARAALASETLALPRAGERREALRLLLAARRSAVDVRRQALGQLRAVIVTAPDGLREQLRGLPVGRLLVRCGRLRRSSSAPPDELATRLVLRSLARRVQAATVEAEELEREILGHVRALAPVLLDEPGVGPIVAAQLIVAWSHHGRLRSEACFARLAGVAPVPASSGQTHRHRLSRGGDRQLNRALHTIVLHRRQHDPATRDYIARRIAEGKSRRDATRLLKRYLARHLFRLLQSQEPLVA

SEQ ID NO: 466897 - protein, 446 aa, unidentified
MDVVFTHCAALDVHKKTVTACRIVPDPTGAQAEGIAELETFGTMTRELLTWADWLATAGITHVAMESTGEYWKPVYNLLEGTFAVILVNAAHVKNVPGRKTDKADARWLAKLMRYGLLQASFIPPEGQRDLRDLPRYRTKLVQERAREVNRVQGVLERANIKLASVVSDIMGVSGRARIEALIAGQADPAAMAALAKRRMRRKLPLLEQALTGIVRDHHRQLLAMQLAYIDFLDDQIEALSAAIQSWLGTLSTTEVSPSPAPGLPEDQRPQAADVPPPLTFTRAVELLDTIPGVDQRGAEMLVAENGIDMTRFGTAPRLAAWAGVAPGNDESAGKQRSGRTRKGNQTLRAGLTQLAHAAVHTKETYLTAFYRRLAARRGKKRAIRAVAHSIMVSAFYMLARNEPYRELGANYFDERRRHYTVERLASRLERLGYRVHLEPVAATAA

SEQ ID NO: 466898 - protein, 315 aa, unidentified
MEHLPAAPSFVGIDVSKDRLDVHILPTGQTLAVQRNEKGFEDLVSELRKLAPALIALEATGGLEVAVAAALASANLPVAVVNPRQIRDFARAVGRLAKTDALDAQAIALFAERVRPEPRPLADADSQSLAELVARRRQVVEMIGMETNRLHQARNPRIQRMLRATLKTLTAQLAQLDRDINDLIKRSSLWRAADDLLTSVPGVGDVTAHTLIADLPELGQLDRRRVAALVGVAPVNRDSGQLRGRRTIAGGRIGVRNTLYMATLSAIQWNPVISTHYHSLVNRGRPKKIALVACMRRLLGILNAIMRTKTPWQCA

SEQ ID NO: 466899 - protein, 367 aa, unidentified
MSTAKFIGLDVHKETIAVAVANDGRSGEIRFHGTIPNTPDAIRRLVARLAAPDVTLHFCYEAGGCGYGIYRQLTDLGVECSVIAPSVIPRKSADRVKTDRRDAQMLARLLRSGELTAIWVPDEAHEAIRDLIRGRRQAKQDLVASRQTVLSFLLRHGRKFTGRSNWTKAHWRWLSEQAFDAPHQQFVFGEGIRRIEEAQHRCDRLDCMLVEALPQWSLAPLVQALQALRGVGLVVAATLVAEIGDLSRFDTPKQLMSWLGLVPSEASSGARTRRGAITKTGNREARAMLVEAAWSYRLPAREERRYQMRVEGLPEDIRAIAWKAQVRLCQRYRLLASTGKALPKVITAIARELVGFIWDIGRRIQPI

SEQ ID NO: 466900 - protein, 360 aa, unidentified
MTELKDAQKHEESPILWIGVDVSKDSFTAAASFPALEDVVYPADSGTFENNRGGAKRLYRWIGELEDRFKSPAGVAMEATGTYSTRLYGNLKKIRSELHVSICNPTSVSYYMLSRSMNKTDKADAAFIAWYAAHIRPGRYTELSKDQEKLRCLSRDRDFLVDNRTEFQNRMEAAQDSSSRQRMKNVITTINAQIDKIDTEIKDYLLKEASMECRDEIDLMQTVPGVGMLSAAIIYGELGSLAGYTRKQLSALSGICPTTRQSGTSLHKGGLSKRGSKWLRRILFLDSTQNIQRSPAMAAFHQRMLEKPDSSKMSAKVACMRKLLLILRGIVVSGKAYDKNHVSVRPDQQSKNLEKSEKTA

SEQ ID NO: 466901 - protein, 407 aa, unidentified
MRPIYGRCCGLDVHKKTVVACRLTPEGSQTRAFGTMTTDLIQLREWLLAGGVTQVAMESTGVYWKPVFNLLENQGMELLVVNARHVKAVPGRKTDVKDAEWLAELLQHGLLKASFIPDRESRERRELVRYRRSLVEQRAHLVQRIQKLLEGANIKLGDVASDVMGVSGRAMLQALAQGVDDPAAVAGMAKTALRNKIPELERALTGSVGHHQRFLLRSQFRLLESIEAEIASLDEEVAERMRPFQVALERLDEIPGIGRRAAEQILVETGTDMSRFPTSAHFASWARVCPGNNESAGKPQYASIGAGNRWLRNALLEAAWTVSHSRKQTFFTARYRRIASRRGKKRAAIATAHSLLIAVYHVLRDGVVFQDLGPAHFERRNVDAIVRRSLHRLEVLGYKVTLEAMPA

SEQ ID NO: 466902 - protein, 423 aa, unidentified
MKNSAARKLKQVPKGYLVMGVDPHKKRHATVAMTQDFTTHSKFKFNNSREGFEIALKRARAEMVRTGSRGVIFAIETGGHYWRNLAYFLDERGIPFHFINQFTLKRRREGKDLNRRKNDYRDSEVAAQLLCTGEFTDTKLQHGVYAELRAAHNAYRRLVKERTRITNLIKGLLDGIFPEFTQVFKDPCGLTALSVLFICSVPNIIAQMTEEEFVDAIRAKHQGRLMRKKLRALHYAAQASIGIDAGAWSVSSEISFLVEKRCLIRQQIRSIDETLVRLVDGTEEGKYLLSIIGLNYISVAGLLAELGSFRSYRSAKQLIKMAGSNPTESESGGKRSAHTPMSKKGRPVLRYCAWTAVIPMLRLNPDFRAWAKKLRERPVYANPLAGREVVGAALNKLLRLAFALVKKQTFYQVPQLEIVQVAV

SEQ ID NO: 466903 - protein, 461 aa, unidentified
MARKRKNPKRLVRSLETIQPHAAGIDLGSREHWVAGPPREDKTPNVTCLGTTTPDLFRLADWLKEQGVETVAMESTGVYWIPLFEILDSRGFEVLLANARQITHVPGRKTDMLDCQWIQLLHACGLLRGSFRPSDDICRLRALIRERNTMVEQRSDWVRRMQKSLNQMNVCVHHAVSDITGVTGMAIIRAIIAGERDPNTLARLRDRRCRKSQQQITAELTGNWRPEHLFNLRQALKMYDQFCTVIADYDEEILAYIQTLQPPDDNDTSAPPPASTSKANNIAKRGQEPLRQALYQLSGVDLTTIDGIGVDIASEIISELGLDFTVFPNENHFVSYLRLAPNLSISAGKKVSNKFKANTCTRVATALRMAAVTLRNSKTALGAFYRRVAWRKGASVAVFATARKLAQLIYRLVRYGQAYFDTGAQAYEARFNQRRLKYYTKALNAMGYNVEPLSSAKAILT

SEQ ID NO: 466904 - protein, 440 aa, unidentified
MELVYERCCGVDVHKKMVVACLITPDERGQRRKEVRTFRTTTQELLLLQDWLVVAGCTHVAMESTGVYWKPIYNLLEGGLELLVVNARHIKAVPGRKTDVRDAEWIADLLQHGLLSSSFIPPAPQRELRELTRYRTNLVEERARAVNRLQKTLEDTNLKLGDVATDIMGKSARAILDALLAGQTDPAALAELARGRMKAKRAELEQALVGTLKPHHRFMLTEHLVLIDTLEEAIARATQEIETRMGPSYPEHQSPEPEDDGLHQGEPVREEPKERLPLNWTSAVKLLDTIPGINARAAQGIIAEIGTDMSRFKTARHLASWAGMCPGNNESAGKRLGSKTRKGSPWLRKLLVEAAHAAAHTKNTYLSAQYRRVAVRRGAKTAMIAVGHTLLTVIYHMLSEHQPYADLGGNYFDEQDRHVTEKRLVRRLEKLGYQVSVSAA

SEQ ID NO: 466905 - protein, 453 aa, unidentified
MARKAEKEKTKDGLKLKIVNPNAAGIDIAYGEMQVCVPEDRDGENNRCFGSFTCDYEEIASWLKACGITTVAMESTGSYWVGLYFFLEEKGFDVLLANAKDVKNVSGKKTDEADAEWIMLMHSYGLLKPSFHPDAAARSIRELARHRDNMLRSASKEVQHMQKSLVLMNIKVDTVISDILGKSGKAIIEAILNGNHDPKSLVQLVDPRCKASKETIEKSLEGTWDVVHLFELKQSYDLYKYIHIQIADCEAEMDRLLGEYTDGCGTDMQGYTATKKRVAKKNAISFDAEKHAFSMWGVNAMEIPGMSLGALAVLMGELGSGFTEKFTSAKSFCKWCNLVPNNKISGGKLLSSKVPKQKNRVGQVFRLCANSVKSVKTGLGIYFRRQKSKGGHLQAIVATANKIAKIFYTMVVTKNHYDESKVGLDEKQLLERKIIMAQRTLDRLNLKLSVAQG

SEQ ID NO: 466906 - protein, 344 aa, unidentified
MVTTIGIDPHKATHTAVAIDDDETVLGEFTIPADKDQAKRLVDWAGSVNGDGRVWAVEAATGLGLLLSQQLVASGESVLDVPPVLASRIRVLSSGKSNKNDENDARSIAIAALRRDGLAEVHREDDAAVLRMLAKRHLELTALRTQAVCRLHAMLAVLRPGGMGYRLSAKQASRMLGGIRGLDAVGEQRRLMAKAHIGDIRRLDRDLDANKKRIRRAVAATDTTVTDIYGIGPVVASFLIGYTPPIERFTTPDKYAAYNGTAPIEVSSGGKTRHRLSRRGNRTLNHAIHTAAVTQISHPTPGRIYYDKKLDEGKTTKEALRALKRRISNAVYRCLVADARRHAS

SEQ ID NO: 466907 - protein, 344 aa, unidentified
MSYYTALDVSLRSVSICIIDDKGDVQHEAKVAAEVDQIVACLRHFSPDIASVGFEAGTLAQYLTYGLQEAGFETICLEARQVAAALSAMRNKTDRNDARGIAQILRTGWYSRVYVKSMESHHVRILLSSRRAVLAKCVDLENELRGLLKNFGVRLASKVPHGAYDETLRPLVSTDPMRARALLPMLDARLVLYKTYLKLDNEVKAAVRADPICQRLMTVPGVGAVTALTFRAAVDDPNRFKSSRTVAAHFGLTPRRFQSGETDNPGRISRCGDPEVRSALYVAAHALVTRSKAWCSLKSWGIGLARTRGHRRAVIAVARKLAVVLHKMWIDGSEFRWGVEEAKA

SEQ ID NO: 466908 - protein, 322 aa, unidentified
MAMHSFGGIDVSKDRLDVMVLPEEQCSSVPNDAAGWAKLVEQLRGFSISAVGIEASGGYERGAVRALLAAGMSVRQVNPFKLRQFARASGVLAKNDPLDARMIASFIAIMPTRPAQPHAPAVERLGEILTMRRQLSDAKVAAENASRLLEDAMLQRLSRRRIARLAADIDLLDGRLVEIVMADAALVRRYQLLTSMPGVGPVLACTLIALLPELGRMNRKQVAALVGLAPYAFDSGKLKGARCIWGGRASIRRVLYMAALIAMRCNPALKAFHNRLAATGKKPKVVIVAVMRKMIITLNAMLRNETPWVDRSSGRHSVLTAR

SEQ ID NO: 466909 - protein, 359 aa, unidentified
MRIIGCDLHASQQTIAMLDRESGEVVERTLKHDGDTIREFYAGLPRPVVVGIEATGSMGWFLRLMAELEITCHVGHPATIRRAETRRQKHDRRDAALLLELLTQDRFPSIWMPSIELGDLRALLLHRHQWVRIRTRVMNALQGMALAHGLRRRAGLWSRDGQATIASLALPPHAAYRRTQLQALYVHLTQQVDELDQRVRTHAQERPQAVRLMTHPGVGPVTALATEVFLGDPARFADGKAVTSYVGLIPSEYSSGDRQRLGKITKQGNPLLRLLWCEATIHAVQRDPGLRRFYRRKLQQKGSAKRVSPRRASWESGSGSCYAIRSITQSSAVVHRHERPRGEALYAGVPVWRRGPDHL

SEQ ID NO: 466910 - protein, 389 aa, unidentified
MPTIADRHDAPTAIQTNLAAIFISLELSRSIWLITSLSPGFAGKMSKHSVQAGDVAALLARVSELKRKASERTGKSFPIVVIQEAGLDGFWLHRVLQSEGIESHVVDPASIATSRRRRRAKTDRIDGEALLRALLAFKRGEPRVCAMVKAPTPEEEDRRRLFRERKVLVAERVKHVNRVKGLLFSQGVSGYEPLRRDRRQRLEDLTTGDGRSLPMHLKTQISRELDRLELLLDQIKQAETERDALLASQQAAAPASAGRMLLEFKGIGAEFAASLWLEALFRSFDNRRQLASYAGLAPTPWQSGSVDHEQGVSKAGNPRLRTTLIQLAWLWLRHQPQSALALWFKERVNRNGGRLKKTTIVALARKLLVALWKYVTAGVVIEGAVMKDA

SEQ ID NO: 466911 - protein, 458 aa, unidentified
MHTQMLPFEDSTIRGAVFRQGRRKRRRTVNRHETFVAWIGVDWADEGHAVCEYEVEGAGKRRYEIEHGSESLQDWISQLRKRYAGKAVAVVMEQARGGLIYALMGCDFITIYPVNPQSLAKFRKALYPSGAKSDPPDAELLEEMVRQNRDRFRAWAPGDEQTRSLQLLTEARRKFVDDMTALTNQVTSALKTYYPQALDWAGDLGGEQACAFLTKWPTLAVLQKARAFRIREFYEKYGRPQREVLNERIKQIEKALPLTKDSAVTMAGVMMVQTLVTQIEPLRLAIAKYDDEIARIFQQHPDRAVFESFPGAGKVLAPRLAAAFGADRDRFQAALEVQELSGIAPVTERSGKSKWVHRRWACPKFMLQTFHEFADQARRLCAWSKLYYHQLRMRGKEHHAAVRALAYKWIRIMFRCWKDHKPYDDAVYVNSLHLRKSGFALGLTAQAPPNCGNLSSEL

SEQ ID NO: 466912 - protein, 371 aa, unidentified
MTSMPATARVVTTTLTTVVTVGVDTHKDLHVAVALDGLGRWLAELATPVTADGYQQLRRWAFDLGQVESSGVEGAGSYGAGLARYLPRCGERVIVVNRPDRATRHRRGKSDPIDAEAAARAVLAGTATGTPKNGDDRVEIIRMLKMTRDSAVKSQTQAVNQLKAVLVTAPDELRESLTALGLVTLLERCAALRPGELTTPLSAAKHALRLLARRALTLRAEAKELREHIDRLTTAAAPTLVELIGIGPDTAAALLLTDGDNPNRLRSEAAFAALCGTNPVPASSGKITRHRLNRSGDRQANAALHRAVITRMHWHEPTKIYVERRTAEGKTKPEIMRCLKRYLARQVYRCLLPTTADNAQTSPQEDLRDAA

SEQ ID NO: 466913 - protein, 316 aa, unidentified
MTTEVFIGIDVARDSLEIAVRSTGEQWQVGNDAAGIPTLVPRLRVLRPTLIVLEATGGFELPVLAALGSAGLPVVAVNPRQVRDFAKAIGKLAKTDAIDARVLAHFAEAVRPPVRPLPDAATQALGALVTRRRQLVEMLTAEENRRASASLPVRADIQQTISFLRTRLKGIDKELSQAVRNSPLWRQQENVLRSVPGIGPIVSVTLLADLPELGILGRKQIAALVGLAPLNRDSGTVRGKRTVWGGRATVRSALYMAALVGVRFNPVLRALYTRLVAVGKTKKVALTACMHKLLTILNAMLKHHTPWQPATSPAAA

SEQ ID NO: 466914 - protein, 455 aa, unidentified
MSKGVGRRRRVRAHLKRVNLFAAGIDVGARSHFVAVPEDLDPTPVREFAAFTGDLHRLADWLVALGIRTVAMESTGVYWIPLYEILEDRGLEVLLVDARHVRNVPGRKSDVLDCQWLQQLHSYGLLRGAFRPPDEMVRLRAYLRQRERLLAAAADSIRHMQKALRQMNLVLDTVVSDITGVTGMAIIRAIVAGERDAGRLAALRDRRCRAEARVIAGSLEGHYREEHLFELGQAVERYDFLGGQIAACEQAIRRQLDRVGEGEPAAPLPARRKPKGHSKNDLSFDARPLLYRLTGVDLTEIKGMSDSTVLAVLSETGADMSAWPTEKHFASWLALSPGTKVSGGKRLSGRTRASANRAAAAFRMAAYAVANSKSALGAFYRRLRTRLGAPKAITATAHKLARIFYRMLTTKTPFVDSGQDYYERQYRQRVTRSLKKRAAQLGFDLVPLPSAISMA

SEQ ID NO: 466915 - protein, 370 aa, unidentified
MLNTTTFVGLDVHARSIKAVALDAMTGEVRSATFGYDAAEVAGWVSSVDPSAKCVYESGVTGFDLQKRLSSMGVDCVVGAVSKMIKPSADRRRKNDRNDAEFLARMLSVGNVVEVWVPDGECEAARDLVRALDDARDDLKRCKQRLSKLLLRHGHAFSETTPSGRRKGNWTAAHWAWIKSISFAEKADDDVLAYYIDATRQAMEDKARLERLVEAEASKPRWKRRVDSVRCLKGIDVMSAADLVFEAGEFSRFRNARSFAAWIGLTPSEHSSGESVRQGGITKAGNKHLRRVLVESAWHYLGCSPHSKDLAKGQAPDPGARRHAAKGVRRLVGRRAAMLERGVHKNKANVATARELACWCWAIGCMVENG

SEQ ID NO: 466916 - protein, 386 aa, unidentified
MIYVGIDISKYKHDCFICNNTGEVIVENLSFENNQKGFQQLADLLKPYDNSNVHIGLEATGHYGLNLKLFLEKNNYSFMEFNPLLIKEFAKSLSLRKTKTDKVDATIICQKLMSVPYKPNSQLFYHKYSIKSLSRLRETLVKQRSKYLIQLTNVLDILFPEYKPFFANHFGNTALFILNKYKSANKIANMKDYDSIRKISHGKFSYSKFVKLKDLAKNTIGESNINFEFELQIILNLYNEINSKIVSIDKQLSTIIKDLNPPTLSIPGIGVISCASIISEFGDISKFNNPGQMLSFAGLEPGIIQSGTIDVKGKMVKRGSGYLRHSLMNVAMVVICNNRTFYNYYYKKRSEGKCHRVALSHVCKKLVRVIYTLETKQLSFDPSLIK

SEQ ID NO: 466917 - protein, 452 aa, unidentified
MSNKKVALEIVNPHAAGIDVGSRSHYVAIGQSAEDVKEFGVYAEDLKELADWLLENNIETVAMESTGTYWQNLFSILQQAGLKVILVNGKFTKNIQGKKTDVKDCQWLQKLHSIGLLTGSFLPDDATEQLRTYCRHRSSLIDTAADTTRRMQKYLRLLNLRLDIVVKDITGLTGLAIIEAICKGETNAEALSSHRHGNCRKSKEEIEKSLQSNGRQDYLFALQQEFEMYKMLQKKITECDAAMNNLLIEQISNDENKKRLKAEKKVHKRINKNAPKNIDVNQLAYQHFNGIDLMNIEGVSHNTVIALMSEVGYDGIKKFEAAKQFTSWLRVSPNNKISGGKILSNRIAKGSNRLKIALRNAANAIGNLKDTHLSNFFKRVCFRRGRPAAISATARKLAVVIWNMIVKGIPYQPPTTYEFLDQKRKRKVQEMKKLIHKFDIKTHELGLQLIRL

SEQ ID NO: 466918 - protein, 411 aa, unidentified
MGTILCGIDWASDHHDAALIDPEGNKLGRRRISDDATGLGELTAMFAAHGAGPGTVKIAIETERGLLVASLRAAGYEIYAINPKAVDRYRDRHHLARGKSDAADAMVLAHILRTDAHLHRPLPADSAKAQAIEVLARAHQDLVWSRQHEVNRLRSLLAGYYPAALAAFGDLTTRTAMTVLAAAPAPAQATRLTLEGLLDPLAAAGRGRRHSEARRLAAVFAAPQMRQPAEVEQAMGDAATAITGTITAMNAGIAALQQRIDANFEQHPDAAIYHSMPALGSILSARVLGEFGDDRTRWPDPASRRAYAGSAPITRASGKKRVVLARFIRNRRLYDAVRWWAFAALSTSPGARACYDQRRAAGDSHEAALRRLASKLIGQLHHCLEHRVLYDEATAWNQPENRSNPASPAAA

SEQ ID NO: 466919 - protein, 344 aa, unidentified
MVTFGVDAHKRTHTIVAVNDRGTPVGQTTVGTTSQDHLVLLRWAARFGAERRWAVEDCRHLSRRLERDLLAAGESIMRVPPKLMAHVRDSARTYGKSDPIDALAVARAAQREPNLPLARLDGPDREVRLLVDHRESLISERTRLICRLRWHLHELDPAWEPKARSLDAQRTLDEVRGRLQDHVGVVARLAVELTERCAELTITIKALEKEITDLTTQLTPALLELPGCGALTAAKIIGETAGVDRFKSRDAYARFNGTAPLPVWSSNKARHRLSRTGNRQLNAALHRIALTQARWHPPAKEMIERRKSGGNTGREALRVLKRRLSDAVFQALLHDQNAGLTLAA

SEQ ID NO: 466920 - protein, 397 aa, unidentified
MYIVGIDIAKRKHEAAVIDGEGAVIIKPFSFTNNCSGYNRLLAMLTKAKLPLDEVSFAMEATGHYWLALFTRLQKEGFRVQVINPVQTNSIRSFYIRQAKTDPRDALLIAEVIRFGHFSESTLHPENIYELRELCRGRHAIVSMQADVKRKVVALLDQVFPEYETAFTNMFSDTSMAILQTCPTPKELSEMPLEELCHLIEVSSRKRFRMAKARELQELARNSFGFAMAGDVFSTMIRLYAKHLDFLKQQVREMDRKIAEIMKTLDTPITTITGIGPTLGAYILSEIGDISRFSSAAKLAAYAGIDPTMRQSGEYNGVRNRMSKRGSPYLRHAIWLAASSAVLHDPALKLYFQKKRDEGKPYMASVGHACRKMVSIIYAVMRDNKAYTPYIPNEISA

SEQ ID NO: 466921 - protein, 320 aa, unidentified
MRNAVGLDISKLTFDASAMVGKTEHSAKFDNDSKGLDQFSDRLKSLGCQNLHICMEATGNYYEEVADYFAQYYSVYVVNPLKISKYAESRFKRTKTGKQDAKLIAQYCRSAQESELVKRQKPTDEQYRLLRMTAAYAQIKSECAAMKNRHHAAKDEEAAKAYAQIIKAMNEQLEVLKEKIKEQTEKPNCKEGVKRLETIPAIGRMTAAVLFHHLTSSKFETSNKFAAFAGLSPQQKESGTSVRGKGKLTKFGNRKLRAVLFMPAMVAYRIRAFPDFIKRLEEKKKPKKVIIAALMRKLAVIAYHVHKKGGDYDPSRYKSA

SEQ ID NO: 466922 - protein, 340 aa, unidentified
MQLYTGIDLHSSNSYLAIIDETGKRVFKRKLPNDSEQILTALAPYRDTIIGIVIESTYNWYWLVDALMAEGYKVHLANPTEIKQYKGLKYSDDQHDAFWLAEMLRLGILPEGYIYPKEDRPVRDLLRKRSHLVKLRTSLIISLQNIICRNNGFRLKTNDVKTLNTDRVAPFLEQNEDLALAGKISKEAIDFLTRQIKTVESVIEERMELREPYKKLLTLQGVGKTLGLTIMLETGPITRFAQVGNYCSYCRKVSTKWISNDKKKGKGNKKSGNKYLAWAFSEAAEIARRYYPEARAYYQRKMQKTNAMIAHQALSHKLARAAYYIMRDGVSFMPEKIFTR

SEQ ID NO: 466923 - protein, 344 aa, unidentified
MSTIKVLGIDLGKSSFHVIGRDYSDNQIIRKKFSRSALIHFLHQLTPCTIAFEACGGAHWLGRQCESIGHTVRLIPPQYVKPFVKSNKNDFIDAEAICEASTRPNMRFVSVKSEEAQVISAIHKARHGYIKDRTACMSRIGALLLEFGVALPTGHSVMKQLFNWLAQQKQTIPELLMQELMELHEYYLFLNENIDRQDKKLKQLVETNPIGQLLKTIPGIGDMTASLCIANISSATDFKSGRNMAAWLGLVPAQHSTGGKPKLLGISKRGNKELRTLFIHAARAVMSRPDKTGKIYGEWLINLRATKPFNVVTVALANKLARIAWAVMKTKQAFNNNALAPSLQ

SEQ ID NO: 466924 - protein, 342 aa, unidentified
MEQYVALDVSLKEISVCIVDSNGEVVFEGKTAAEPAILVELIRSKAPQVKRVGLETGATSPWLFHALASAGLPVVCMDARHAHAALSIRPTKSDRSDARGLADMLRMGWYREVHAKSVTSHERRTILGARHQLVTMRSELDAQIRGILKTFGLILGTGNKDTLIQRAEKLAAGHPVMSGLVAKLAEVRRHVTSQIAAIDRDIRHLVHTEPTLKRLMSVPGVGPITALAFLSVVDDPRRFKHARDIGPYLGLTPTRYQSGETDRQGRISKCGDTFTRTCLYEAAHVLLTRVQRFSPLKAWGMRLAKRIGGRKARIAVARKIAVILHCIWTDGTEFWWTREKAA

SEQ ID NO: 466925 - protein, 346 aa, unidentified
MGYFAGLDVSLEETAICVVDDIGCIVREARAASEPEALIAFFKTCEMKIERVGLEACSLTAWLHARLTEAGLPAICIEARQAKAAMGAMPNKTDRNDARGIAQIMRTGWYRAVHVKSPSCQSWRALLTARRLMLNKRRDVENGVRALLREAGLKVGTPSRKDFSARVRELAGDDRVLAALSESLLAAIETMNQEVERLTKRVFDEVKVEPTCRRLMTVPGVGPLTALTFRATIDQPNRFRKSRDVGAHLGLTPRRYQSGETDVQGRISRCGDELARTALYEAAHSLLIRSSKWSALRAWGMTIAKRRGMARARVSVARKLAVILHRMWADGSDFRYSKHTAAVAAV

SEQ ID NO: 466926 - protein, 392 aa, unidentified
MLYIGIDVAKLKHDCFITNTDGEALCDVFSFQNSKEGFLKLYSKIKEFEADPSSENTRIGLEATGHYDDNLVSFLRKMDVPPVILNPLQVNLYRKGQSLRKTKTDKSDAKFIAKYLMSEGFKPIPSSSYHSDELKSLTRYRWRLVRVRSNCKVSYDRLLTLLFPELEGFVGGNPSLTEFNVFLEFPGAGHIADAHLTHLTNIARKYSRGRFGKEWATGLRKLARDSIGMNSHAKSMELRQVIEQILFMESQIEIVEKEIKALVIKSGTTLMTIPGISYTLAAIITAEIGNIFRFANPDKLQAFAGLDPSIYQSGQFVGTKDVMVKRGSTYLRWALLMAARTVSMFEPTFAEYRDRKTAEGKHYNCAMTHVAKKLIRVIFHLMVTGETYQKKI

SEQ ID NO: 466927 - protein, 336 aa, unidentified
MFPKPRHGAPRLDWAVFDGNRIILQVQSENSELAIKTTVKLIKALPGFEVAQSVCCIEQTGIYCAHLLSTLYKIHLPICGAARRLESSLQIKKAGGLQRGKSDAIDSVRIAEYGYRFRDKMRLWQPPRRVVQQFGALSVLRQRLILMRQQLQQPLTEQKDFVDSALQKQLIKTCQASLKALTADLEKADEQIDELIQNDPRLKELFDWVTSIPGVGTTTATELLIATDEFKSIDDPKKLACHAGVAPFEHRSGSSIRGRTSVSRHAHKRLKSLFHLGAMSAIRVRGEMQDYYNRKLAEGKNRMVVINAIRNKLIHRICSVVRRGQKYDKNYLPILV

SEQ ID NO: 466928 - protein, 431 aa, unidentified
MNYTQNKKIMQVKETTLVVGVDIAKHTHVARAQNYRGIQYGIPISFANTDGGFKQFIDWLNAMKEQYNKTNVMVGMEPTGHYWLALEQYLRGLDSVKLVLVNPAHVKKSKTLDDNSPTKNDKKDARVIAQLVKDGRYSEPHMPEGIYAEMRSAMTHREKLTRDKISLNNKIQQWLDKYFPEFTEVFANWEGKAALAVLKEVPLPSQIKQLSPEKIVEVFKKGAKRAVGIKRAKHLKKKALNSIGIKDGLKMASIELKNLLQQYELITAQIESLEEDIEKILKEIPGAKEMQSIKGVGAMTVAGFIAEVGDVRDYDHPRQIQKLAGLNLMENSSGKHKGQTRISKRGRPRLRSLLYRVAFPLVAKNEEFKQLHHYYTNRHDNALKKKQSLIALTCKLIRVLFALGKKQVNYDGEKLMKDIKRNQDLNIQEAA

SEQ ID NO: 466929 - protein, 352 aa, unidentified
MDKYVGLDSHSQTCTLGVMSPSGKRLGSKVVETNGRALVDAVRDIPGDVHLCLEEGTQSAWLHEILSPHVAELVVSVPEKNDGPKDDLRDAWSRAEDLRTGHVRTRVYKAPKHFAGLRSAACAYRLATQDMVRTKNRLKAVLRSRGLLGDTGVYDKVARTKWLEQLPAGHRQLAQWLGRELDELLPLRDEAEEWLVKESKSHPIIRKLRTGPGMGPIRTAQLVAIVGTPDRFRTSRQFWSYCGLAIVCRSSSDWVQNKRGEWVRAEVRQTRGLTRKRHPVLKSVFKGAATTVIAQLPDDPLHAHYRRMLDSGIKPNLAKLTVARRIAAIVLAMWRHKEVYDPKRHAVVTDKA

SEQ ID NO: 466930 - protein, 357 aa, unidentified
MKRYYIGVDWGDRLHQVYVGDEEGEKVKEVKVQESPEGLAEIGRWLDERRAEGIELWAAIEKPAGRIVDFLLDHGVEVYPVNPKAVDRVRDRHRMSGSKSDAFDAYVLAEFLRSDHAHLRALRPSSEKAQELKLLSRDQRRVGRHKTRLLNQITTTLKEYYVRPLEVFEDLETEIALDFLQQYPTPAHLSALKRKQFNRFATTQHHLSKQRCEELWEKLQKPQLRVPEHVVRAKAQLLEVLIEQLRASIKAVKIYHHKVESFFASSPAAEFAKTLPGGKSGTLVAAIWAELGDAQGRWESSRHLQAEAGAVPVTKASGKSRVVHFRFACNKHLRYTMYWFSFVSLNQSEWAKLYYRG

SEQ ID NO: 466931 - protein, 405 aa, unidentified
MSSDKPTRFIGLDLHKYYLVATGVDAELNKVYGPRRVDLIELEDWIQKVITKQDALVVEATANAFMLYDALVPHAHSVTIVHPPHLALIVHSQVKTDKIAAYHLARLLAKELLESIWVPPQDVRDLRTLVGQRNKMIRLKTQVKNRLQGVLHRYSIPLPEGPLFDPAQREWWKTLPVSKLEKIRIVSDLAALDFALEQIQQLEAHFAEWAAQDERIPRLFEISGLGLISAVTLLSAIGDIRRFPTPDHLVGYAGLAARVHVSGITNHTGGITKTGRREMRAVLVEAAQVAVLHDPRWKAELERLEPHTGRNKAIVAIARKMLVAVWFLLHEQVAEKHLNLERVARKYYEFAYTVGKSNWGECKTAVEFIRQKLDQAGIGQEMKSFIYSRKKVELPPSKLSVTANK

SEQ ID NO: 466932 - protein, 350 aa, unidentified
MMVIGTDPHKRQHTCSAVDAVTGELRSSETVQASGAGHEALLGWGRGLDAQRVWAIEDCRHVSGRLERFLVARGERVVRVAPKLMAGQRRSSRQAGKSDPIDATAVARAALREGVGSLPGAHLDERALEIKLLLDHREDLVRERTAIQGRLRWHLHDLWGADGVPVGGLDRAKWLDRLARRLARCEQSTRVRICREQLTRLRALARRATELEREIGQLVLAHAPELLALRGCGPLTAAKIVAETAGAQRFSTDAKFARHAGIAPIPAASGRNQRVRLHRGGNRQLNCAIHRIAVTQGRVHPPAIEYLARKQAEGKSRIEALRCLKRHLARTVWRTMTTNANAPATTLALT

SEQ ID NO: 466933 - protein, 324 aa, unidentified
MSKRSIICAGIDTGKRRLDVALENRAQELQVENTAEGHRQLSAWLRKHKVARVGIEASGGYELAVVSQLRRDGFVVVVFQPAQVRAYAMFHLQRAKNDKIDAGLIAACTAVTKKIYPPPDPRLAPFAEIMTFIDQINEDIARLQTRQESCRDDRIEGHWNSEIRRLRALVRVELKQVVAGIRQHDDLAKRLDLILSVDGVGLRTAVAILVRMPEIGSVTREQAAALVGLAPYDADSADYVGQRHIAGGRERLRGNLYNAALPASFRWNPQLIALYERLIAKGKPHKVALVACARKLLIYVNIVVQRGTPWIKEMPALAMARRSN

SEQ ID NO: 466934 - protein, 337 aa, unidentified
MQKRYFVGIDVSKLTLDVCVVLNAKVLKQQTLSNQPKTIEGFVKQICRSNKITPKDILICMEHTGIYNSHLLEYASRMSIAVCLEHPMQIKNSMGLQRTKSDKVDAQRIALYAYKHRETLRLWQPAREVVMRLKDLMGLRRRLLNALNQLKVPAKEMKGFKNKNSVKHLTAFCQHSIKTLQKELTGINKAIKALIKEDAYLNKLFSQVTSIDGVGIITAVEVIITTNEFKNINSAKKFACYAGIAPFEQTSGTSLRVRNRVSHFANKNVKQLLHMAALSAIVMPGELRNYYLRKTKAGKNKMSVINAVRNKLVHRIFACVNQDRLYQKKLRKSLVNP

SEQ ID NO: 466935 - protein, 419 aa, unidentified
MDVVVARCAGLDVHKDTVVACIRAPGPDGQRTSEVRTFGTMTVELLALRDWLVTHEVTRVGMESTGVYWKPVFYVLEEAVEETWLLNAAHLRNVPGRKTDVADAVWIAQLVEHGLVRPSFVPPPPIRELRALTRYRKTQVEERTREAQRLDKELQDAGLKLSSVATDILGKSGRDILDALVSGTRDAQVLADLARGKLRPKIPALTQALTGRFRPTHALIIGEILAHLDYLEEAIARVSAQIDEVIAPFVIERDLLSTIPGVDQRLAGAIIAEIGVDMTRFGTAGRLASWAGMCPGQHESAGRSKSGQARHGDTHLQKYLAVAAMGAARTKDTYLAAQYARLVGRRGKKRARKAVGHSILVAVFHILAGGVPYADLGGDYFLQRNSPARRARKNLNELKALGWTITETSDGITGTPPAA

SEQ ID NO: 466936 - protein, 453 aa, unidentified
MAKKRGKQEKSERAVLPVMRPNAAGIDIGATEIFVAVPPDRDAEKVRSFPTFTQDLYALADWLQQCRVTTVAMESTGVYWIPLFQILEERGLEVCLVNARHVKNVPGRRTDVSDCQWLQFLHGVGLLRASYRPEQEICAVRSLLRHRESLVQMAATHINHMQKALDQMNLQLHHVISDITGQTGLAIVDAILGGERNPYVLAKLRNERIQASAEVIAKSLVGDYRPEHLFTLRQSLAAYRSYQKLIEDCDREIRRSLEEFNPPTHPVAGDADRQQPKPQPPSNHGTLRLELKRVFGVDLTKIPGIQTGIAQTLFGEIGPDFTKFRSASAFASWMSLCPDNDISGGKVLWVGTRKVNCRAATALRMAAQSLHHSKTALGDFYRRMRAKLGAPKAITAAAHKLARILFHLVTTGQEFDDSHFAADQLRYQKRQEAKLRAKVKALGFQLVPLQQAG

SEQ ID NO: 466937 - protein, 411 aa, unidentified
MRVHHNVCCGIDVHKKSVTACLMWGPADKEPEFEIRRFGTMTRELQNLAEWLKQAGCEAATMESTGSYWRPVWNVLEGQIAKLILANAQHVRALPGEKTDRKDGKRLAELTRYGQVRPSYVPPRAILELRDLTRYRSKLLSAGSSERNRIQKVLEDANIKLGSVLSDVFGVSGQKMLQALVKQDSVATAKVAQLAQWSLKPKIEAIQQALEGKLTDHHRFLIDVSMRHMRFIEEQLIRLDEEIQRRLQPYQEEYALLQTIPGIKETGAARILSEIGADMSPFADGDHLSSWGSVCPGNNESAGKKFQSKIRKGNVHLLSALTECAWAATKKKDCHFRNKYYRLKSRRGSQRAIVAIDHAMLKCVYVVLSQRKPYEEPKPTSLTEAQKQRKASSLCRQIRALGYDVKIQKTA

SEQ ID NO: 466938 - protein, 340 aa, unidentified
MDIATLGIDLAKNLFQVHGVDGKGRTVVQRQLRRRQLLPFVAQLEPCLVAMEACGGAHYWAREIARRGHEVRLMSPRFVRPYVKSNKNDARDAEAICEAVGRPSMRFVAVKNQAQQDMLALHRVRSLLIRERTALMNQMRGLLAEYGIVVTQGAAPLRRALALILEDRDNGVSELLRELLGEMSEHLRFIEDRLKRYDLRIAEFARADERAGRLMAVEGVGPLTATALIAAVGNARQFHSGRELSAWLGLVPRQHSSGGRSILLGISKRGDRYLRTLLIHGARATLRFAAHKRDFRSRWISAVRERRGANIAAVALANKNARVLWALLAHEEDYRTPAAA

SEQ ID NO: 466939 - protein, 358 aa, unidentified
MAIVGGMDIHRKQITFDYLDTGSGEVRRGQVAPADRAHLREWLARFAGRDDVAFAIEGCTGWRYVAEELAGAGARVHLAEPADTAAARGRKRRAKTDRGDSRHLRTLLAEGRVPECWIPPPHILECRALLESYHDLRAEHTAWLQRIHAVMFHQGAPVPAEAAMRARRRPGEIPAAAAAHLTWSGQLQVVVAVDVLACLEKHMDDLLGQIRAQARALPAARELAARLYGVGPIASLALACWLGGSGRFSSSRKAVRFTGLDITVWSSDGKGPPGRLSRQGPAVLRWALYEAGKAHARASAPDHAYYTQVKDRCNGKRAALAEARKLTRQAVHILDALGNDALTTDRPAARHTAARQAA

SEQ ID NO: 466940 - protein, 319 aa, unidentified
MSGYLGIDVAKADLVVARDGVVGCTTYPNTDAGHRALVRALEGREPVDLIVLEATGGYERGVVAALGGAGLPVVVVNPRQVRDFAKATGQLAKTDALDAHVLAAFGARVQPARRPLPSEAQDELRDFLARQQQVQQMLGAERTRLLQALGRKARAPLRRKISRHISFLERELHLLDADLDDLLRASPLWRAQDDLLQSVPGIGPQTARILLGFMPELGHVSAGEAGKLSGLAPLNRESGTMRGHRQIGGGRPRIRSVLYMATLTAIQHNPTVRAWYEHLLAAHKPKKVAITACMRKLLVVLNAMLKTNTRWQADLPTTA

SEQ ID NO: 466941 - protein, 341 aa, unidentified
MKVSTLGLDLAKNVFQIHGVDDKGNVTVRRQLRRQQMFSFFSDLPPCLIGLEACGTAHYSARELEARGHDVRIIPPSYVKPYVRRGKNDAADAEAICEAVGRPSIRFVPVKSEDQQAALMQHKARELLIRQQNMLVNALRSHMAEMGLIATQGRERLNRIVDVIMEDEDESLPALARASLRPLVAMLQANKAAIDEIDREIKAAHKENEVSQRLASIPGVGVLTASAIAATVPDPSFFKSGREFAAWLGLVPRQNSSGGKERLGRISKQGNRYIRKLLVIGATSMLKIVRRKSSRQADWAKRLLERKPTKLVTIAMANKAARIAWALMTKKEIYRATTIAV

SEQ ID NO: 466942 - protein, 371 aa, unidentified
MEHTRFIGLDIHKERISVAVAQSGRSGAVEYLGEIINEPGAISKLCDRLRRPGKPLAFCYEAGPCGYGVHRQLTSLGHRCDVVAPSLIPTKAGDRVKTNRRDATMLARLHRAGELTPVWVPDTDHEAMRDLIRLRSVVRQIVTRARQHLQGFLLRHGRKHGGGTAWRMAYRRWLSTLAFEHPAQQIAFQDYVDAVMDAERRLKRVEEQIFSLLPEWTLRPVVDGLQAMRGIALINAVVLVTEVGDFTRFSNPRQLMAYFGLVPGERSSGETVRRGGITKTGNTHARRALVEGAWAYRMKARIGRHKVDRIEALPQAVRDIGWKAQVRLCARYRRLSARGKTANVVNVAIAREMVGFIWSIACTIQSAPKTA

SEQ ID NO: 466943 - protein, 398 aa, unidentified
MSKFISVGIDVGADFSFMSLALPDQTFIGKPFKIVHNNLNTLENAVLTIKKAEELHSMKARIVMESTGIYHYPLFCYLCDRGFETLVINPIISKNSTNLNIRKVDNDKFSSKKLALIGLKPDLKNSVIPSNAVLDLRNLVREYYNLMDCRSAYANKLLGVLKASFPRYIGVFSKMTVQTSLALLEKYPSYSDVLASKKNDIIRLIRKTSRFGETYAETKYRALVEAAESAKIFGHYVSSNSVQIRLCVSFIKKYDEEIANVLSLMHGLAEEHADEIFVKQIRLIETIPGAGFLSAVTVICEVGNFSVFKSPKQLFAYFGLDPSVKQSGNFTGTRAKMSKRGSSIARRAIYTIALVGIGLTRKGTANNFVLRDYYLCKCQSKPKMVALGAVMHKVCNRP

SEQ ID NO: 466944 - protein, 412 aa, unidentified
MKKHTYRSKNVNKINFTQVKERLANEPVVFAIDIAKEKQYGLLSNASGTVSELIWWTHTEQTVELLSALKELECPLDIVIESTGTYGDALRFQFRDCGFEIYQMNAKRVKDASEIYDGVPSMHDAKSATIITRLHRDGLSKLWVELNDDERTMNALRREYDMHQSQYQRNQGRLEAYLSRHWPEVCYFLSLDSVTLEKLLIEYGSPASIAADAKNAANNMRLWGKHLLSDAKIEAIISSACNSLGQPCIESELRYLQALAKELQHSRLQQKQAKQALEESIKSKDDLRELGALIGMVTTAVLFSCHLDPRKYDCARSYQKALGLNLKEKSSGRHVGQLKITKRGSSVARSYLYFAALRLIKNNSVVKAWYLNKVDPRAKNKTVIAVMRKLSKSLWYVGRGDKFDATKLFTVA

SEQ ID NO: 466945 - protein, 465 aa, unidentified
MKSKTSKNKKQSKKVILNAVWEPVNLHAAGVDIGSREHWACVPPEATGQNVRKFGTFTADLEAMAKWFQECGVTSVAMEATGIYWLPLFQILERCGLQVILVNGRQTKNVAGRKSDVQDCQWIQRLHRYGLLQGSFRPEGAYCVLRTYLRYRDELVSARSTQCQHMQKALLQMNLQLPQVLSDVTGVSGLAIIDAILKGQRDPVVLAALVHRSVRATAATLQAALKGDYREEHLFVLRLAYELHNTYEEKLKACDEQIVRETASLPAKVDPVLKPLPGRKPGRKPYLDKMAGVDMRPELYHKFGVDLTGIEGIGVLTGMVLLTEVGPNIGRFRTEKHFCSWLGLCPDNRISGGKVLSSRTRRVVNRASDALRLAASTLERSQSALGGFARRMKARLGAAEGITATAHKLARIIYRLIKHGEAYVRQGVEDYEKKFQAGKLRALQKTAKAFGFELIQKQPLPSGVS

SEQ ID NO: 466946 - protein, 347 aa, unidentified
MVTLGGDCHKRTHTLVAVDDNGQQLGVTTISAMQAGHLEALDWARQWTERRWALENVRHLSRRLEADLLLAGELVVQVSPKLMAGTRRSAREWGKSDPIDALAVARAALRESDLPVAQLEGASRDVKLLLDHRDDMVAERTRVQNRLRWHLHDLEPGFDVAERSLDRKVVLKRVRNVLAGHHGVEAGIAVELLEWVIQQTQRINELERQISALVTELAPTLLQLDGCAALSAAKLIGETADITRFKTSARFAMHNGSAPIPVWSGNAERHRLNRGGNRQLNVVLHRIALTQMRVGGRGHDYIQHRRASGDTKKEAIRALRRRISDEVYRRMWQDAMRATTLPAEAAA

SEQ ID NO: 466947 - protein, 465 aa, unidentified
MKHVHRRVVDGPRQGRRQRVASTDARAAGGRPVSFSESPDGTSSAPAGRPRIDNDGPGTTRDHSSSSPVPEPTRFAGIDVGSETHVVAILNKEGGILLKPTPIGEDAAGYEKLFILLGEVTDILVAMEATGHYSRNLFAALTRRGFRVAVVNALRTHRFAEEDLARAKTDAIDALGIARFAAQKRPRATPALDEAGEELRELVALYARLTQDQGDRVRQLHRLTDLCFPEFTRYVRTLDSQLAAAILREYPAAKAFDESCLKSLAELRYDGRHRVGAELAHRLIAGAKASAAQHHGQVYAAEVRYICDDIAVLRGRLGSLVAEIQARVARHSLASLLTTIEGLGPLSAARIIASVGDPARFRHGAAFAAYVGVVPRTNRSGLRRPAHGVLSPLGSARLRSALYMTTLGAVRSNPWLRAFYERLRTKGKLPKVALIAAERKLLVAVYSVAKSRRPFVARLPSTPEE

SEQ ID NO: 466948 - protein, 408 aa, unidentified
MNTLYVGIDVSSKSNVIYLMLPNGDKHSNFSVANSHEGSTQLVKRILSALTSHSLDTVLIGLEATSVYGDNLVYFLREDATLAPFNRKIHVLNPKQVKKFHDAYNDLPKNDYVDSFVIADCLRFGRINKEVYMGDYRYKALQNLTRARFFAVQNLVKEKQRFMNVLFKKYSTMTQEKVFSDTFSTTALAVYDEFESAEALANMDLHELTDFIIEKGKNRFPDPDAVAKAIQKAARSSYRLPKTVNDSVNQVLSISITSMKALESQIKEFDKAIKAQMELLPNVLISIPGIGPVYSAGIMAEIGDINRFNSQAALAKYAGLAWKQHQSGGFESEVTRLIPSGNRFLKYYLCEAAFSLVRCDKEYSDFYHLKYKEVNRCQHKRALALTARKFVRLVFRLLKDNRLYCPAK

SEQ ID NO: 466949 - protein, 344 aa, unidentified
MEISTIGLDLAKSIFQVHGVDASGAVVVRKTLRRSQVLPFFTKLPPCVVGIEACGTSHHWARELIKLGHEVRLMPPAYVKPYVKRGKTDANDAEAICEAVTRPTIRFGAVKSPEQQAALALHRARDLLVKERTQLVNMVRGLLAEFGIDIPRGLERALTMARQINEGEILDVPDEAATAIAILCEQALAAHERLRSIDRAMLAWQHASDLATRLATIPGIGPVGASALAASVADPHQFKSGREFAAWLGLTPLQKSSGGKERQGRISKMGDKYLRKLLIVGMTSLVRRAKYKPESVDPYVADLLARKPVRVATVAMANKTARIAWAIMARGGTYREPAPRLLAA

SEQ ID NO: 466950 - protein, 364 aa, unidentified
MKCVIENTELSSHEGTRCQFNGSKAVIKLGIDVHQQFYVVVMQEGGSNPKPPQRFRKEGFLHWAARLKSQGGQVHAVYEACGFGFGLQRKLSALGIECHVVCPQKLDEHNRRVKTDSLDAKALCLKLDRFVQGNKEALALVRVPSEAEEQLRAIHRQREQLVKARKQLEAQGRSLMVNHGIEPIQQWWKQRAFAKLEVPAWMKELLSNSQPILLALQEKIRALTVQLQSAAGEDQPRGLGLMSSVIIDREVGNWDRFRNRRQVGSYTGLCPGEHSSGNTRMQSCVTKHGNPRLRAALVETAWRLVRFQPNYKPIRKWNQILAKGALATGAARKKAIVAVARQLAVDLWRIRTGRVSPEQLGLNH

SEQ ID NO: 466951 - protein, 345 aa, unidentified
MITIGIDPHKDTHTAAAVADGTGQLLGELTIPGTAEGHERLLAWAHELAGEDGDLRFALEDCRHVNGRLERFLLAAEELVLRVGTRLTARERNTARTYGKSDSIDALAVARAALREPNLPRATHDPKLRELKLLVDHREDLVGERTAICSRLRWLMHDLDSGLEPFARTLNRADTRRGLSQRLGRYGDGVQVRICRELLARIGELTRAIDALRAEIAVLVRPMAPGLLALSGVGDLVAARLLVEVGGPRRFHSDAALARHAGCAPIEVSSGRYARHRLSRMGNRKLNAALHQVVLTQARVHPPARAYLAKKRAEGKSTKEAFRCLKRHLVRVVFRAMQEPIPVPA

SEQ ID NO: 466952 - protein, 354 aa, unidentified
MIIIGVDFHPEFQQIASVDTDTGELQERRLGHREEAETFYRELVTQRVRVRVGMEASGHARWFERLLAELQFELWIGDAAEIRTKRVRKQKTDRQDARLILQLLLEDRFPQIWVPSWENRDLRQLLWHRHRMVQARTRIMNQLQAVALNEGLRSKKRLWRQRGRQQLESFRLAPWASRRRRDLLELLDRLNPTIAELTQAIEQEAEKCPPAQRLRTHPGVGALTALAFVLIIGEADRFHCGKQVASYLGLVPLEDSSGNRRRLGHITKQGSSILRFLLVEAAQVTVRSLPEWRSKYFHLAMRRGRKIAKVAMARKLAVCLYWMWRKGWNYEQLTKFGSHAGQPGNRHGVQSNTE

SEQ ID NO: 466953 - protein, 404 aa, unidentified
MELTVLYRRVAALDVHQAKLTVCIMYENELGEVLSETQEFGGFKKDRLAMADWVASFNPELVVMESTGIYWKSPYAALERHGLKIAVVNARHVKQVPGRKTDIADAQWLAILARNGLLRGGFVPPSLFRELRLVSRQMQKLTGILSGEKNRLHKLLTDAGIRLSVVVSDLYGKSARAMIKGLLNGESPEQVLKYADKRLKASEEDLLDALAGDLTPCHRFIITEVMAHLEELDRRIQSCLTYLLQGLAPYTTILQSLQTIPGIDEMGAAMLLVEIGDDMSAFGTPAKLASWAGVCPGNNESAGKKKSGKARKGNPYVRRILCEAANAASKTRCRLSDKFKGLMIRRGRKRAIFAIAHKLLKTVFLLIERSDYYRDAETDYEALSVQRNAPRWIKKLKQYGYISA

SEQ ID NO: 466954 - protein, 339 aa, unidentified
MKDQDVSDVVRTKKRTAMRYIGIDVSKATFVVAYSSDKGGEIRTFNNTTAGIRQFIGTLPKDGSIHCVMEATGNYSAMLLYLLNVAGITVSMENPLKIKNFAKAMLSTVKTDKSDARLIALYGEKMNPQPFKMQGEAILRLRQKRTVIRQLTKQITAMSNLRGSLVCLPVPDKGATHTVDETIKFLEKKRDRLQSELTDLVEVEFSRQLALLTTIKGIGITLATALIITTGGFTYFQNAKQLSRYLGICPTYEQSGTSVNIRGHINRNGDAYTRGLIYVAAWNASRFNAKCGETYTRLRQNGKPGKLAMIAVANKLVRQAFAVVAHDKEYVDGFVSNRH

SEQ ID NO: 466955 - protein, 317 aa, unidentified
MKKITNFFVGVDVSKKWLDIYIHPKNEFFRISNCVIGINKLLQTLSAYNIERIVCESSGGYENLLLNLCAEAQYKIWQVDPKRIKAFIVSEGIKAKTDKIDAKMIALFASQKEPKYDKHQKSLIHCKLRALVQRKTDLTNMASMEKKRLNGPSGLYCKENIENILKIFSDNINTLDVEIQKIIDEDDDMNNRKQILESIPGIGKTTAANLIAHMPELGTVENKEAAALLGVAPYTKQSGTYKGQETISGGRFAPRCALYMAALTACRYNPVMKNFYSRLRNTGKKPKVAVVAVMNKLIVTINAMCKKNMKWVHLPIS

SEQ ID NO: 466956 - protein, 434 aa, unidentified
MSHRLQVGIDFSQQRADFCLLCPDGQFIEPHRAFDNSLLGYGLAKRLLLDALDQFAFDGVDVSGEATGYYWLPFFLQLAADPDLEPHDLKLHVLNPRWVYWFKKCFAQDDKSDQKDPYYIAERTRTRPSAISWTPDEDALRLRFYTRLRFHLVQNLAREKCYFSAFLFLQASAYRRLKPFSDLFGVTSRLVLTQQPSLDELADLPVDILAAQLHELSGHHLPDPFDNARKLKQVALESFALPESLSLPVQRILELTLDHIRFLEGQIAQVDAWIATEVASCPAIVNLATIPGIGPVFSAGVGSEVGDTQRYLQGTKWDSKRKQNRPRNLRDAEDAVAKTAGLWWPRISSGDFEAQDRHMAKSGNRYLRYYLIQAADCMRKSIPEYGAFYARKHREAAKHHHKRALVLTARKGVGLFVGLLHRNEPYRPGGASNT

SEQ ID NO: 466957 - protein, 349 aa, unidentified
MDHIGIDVHKRESQIYILAAGGEVMEQRIRTEAERFDAVLGSRSRGRILIEASTDSEWVARCLEALGHEVIVADPNFAPMYATRSRKVKTDRRDARALAEACLLGAYRPAHRLSDPQRHVRGRLGVRDALVHTRTRYISVIRALLRQHGYRVPSGSAGCFIARVQTLPLPGRLRSVVAPLLAVMRPLNQQLAYSDAMIEHLAGQDPRVPRLRSVPSIGPVTAAAFLAAIDDAGRFPAAHQLEAYLGLVPREYSSGDSQRRGPITKAGHSRVRWLLVQAAVSILRRRPPAAEVLWTWALRIAARRGKKVAVVALARRLAGILYALLRDGTVYTPRPAAAALPHPVAALHA

SEQ ID NO: 466958 - protein, 424 aa, unidentified
MNFTQNDRLKQVTADTLIVGVDVGSQTHFCRAFDWRGFELSRRVFKFSNDRMGFLTFLRWIEELMNKTDMKKVIVGCEPTGCYWLTFQKFLQDHDVRLVTVNPFTVNRSKELDDNSPEKSDLKDPKTIAMLVKEGRYSTSYLPEGVYAEIREASVCRDQIMKQHVRLSNQIQGWLQKFFPEYLDCYSEWDSTSGMMLLKSAPLPQDILKIGAGGINQIWRDAKVRAAGLKRAQTLVEAAQESVGLEAGEAARLEIWVLVNDYILKAEQLKRLDEYLEEKIKEVPNVEKLLAIKGVGMSTVIGFVAEVGDIGRFTDPKQIQKLAGLEIVKKSSGKKKGQPRISKRGRRKLRRTMYESARALMNWNPAFQDVFLYYRNRTRNPLGGMQAKIAVACKAIRVFYVILQTGCDFDEEKFRRDIIRPEAA

SEQ ID NO: 466959 - protein, 398 aa, unidentified
MRQVVAVPVDVGKATAMLMACDFTGRVVLPAVEFAMTRDGVAGVLARLRAALPGDVQVVRVGVEAAGHYHRPLTAAGVWPDGWQVVQLNPAHVTAQRRVNGQRAVKTDRVDLAAIADLLLAGRGVPVSFAGEALVELAAWVAHRSRRVQVRTATKNQLLGQLDRAFPGLTLAVSDVLGTKVGRLVAAQFADPARLAHLGLERFRDFAARRGVLVNRTVAGRLVAAARAALPTAEAAVARQVLAADLALLDDLDAQIDRAEERIAALLPATEYAILTTVAGWGSVRVAAYAAALGPISRWPAAPKIYRAAGLTPTQYESAGRRRDGGISREGSVPLRRALLDLGIGLWHRDPAARAYAGQLRERGKPGGVIACALAHRANKIAYAIVRDQKPYDPTRWA

SEQ ID NO: 466960 - protein, 406 aa, unidentified
MRYVGIDIAKKDHQIAAVDEFGNVILKSFSAGNNESGFAKIAEKLEAARIESDECLVGMEATGHYWISLWEFLDANGYEVVVINPIQTDAFRKVDSLRKTKTDAIDSVLIAEYLRFANPESSKMANPDVEQLRELARFRSFLVEQATQLKNKAIRVLDQAFPEYGKLFSNTFGEASKALLKQCPTPEEVLATDIRTLTRILKENSGGNCGRAKAEAVKDAARSSIGAKFGARALSFEIKLLVKRLSFTQVQIEELEDEISELLHRSDGHWLTTIPGIGDSLAASIAGEIGDPDRFETPKKLIAYAGMDASKYQSGANQDTNGHMSKRGSSELRRALMLAADKVRIYDPYFGEYYDSMKARGKHHYVALSGGARKLAGVCLSLMREQRPYESEPPEHHLPGHLQRQA

SEQ ID NO: 466961 - protein, 309 aa, unidentified
MKQEVVYCGIDVAKEQLDVALGQERWRVPNTREGIARLLKRFKGQRLKLHVICEASGGYEKPIVRALQKSALAVSLVQANRVRQFARAAGVLAKTDQIDAAILVSFGRAMRPPPSAAQTEQIARLRELDAQRRHLSRLLSAEQNRLAQLSCAELRSLSRSLISKVKKQIATIDARIASLIAQDQNLSVKAQKLTSIVGVGARTAALLLAQMPELGSLNRAQAAALAGLAPFNRDSGSMRGKRTIFGGRRAVRTGLYMAALTAARYNHVLAPFYQRLCAAGKPSKVALTAVMRKLLLALNSALAPTLNPA

SEQ ID NO: 466962 - protein, 367 aa, unidentified
MKKVSTVAVKQSRNISQPKLTIGLDLGDRNSWYCMVDEAGQIRLEQRVRTNAKALQEVFGALPRCRIALETGTHSPWISRLLHGLGHEVIVANARRVRLIGESRKKDDRLDAQTLARLARIDPQLLSPVKHRSAPAQADLTVIRARAGLVRARTALVNTVRGLAKSYGERLRGCNVRNMNPEKAEGLSPELQAALQPLLAALESLSEQIAEYNERIEHLALESYPQVALLKQIKGVGTLIALTYMLTLEDPHRFRQSRDVGCYLGLQPGRRNSGQSEPQMHISKEGDPYLRTLLVQGAQHILGPFGVDCDLRRWGLRLAERGGKNGKKRAIIATARKLAVLLHRLWVSGEVYEPLHNSNQREMPAAA

SEQ ID NO: 466963 - protein, 343 aa, unidentified
MSYKLYFGVDVSKHWLDIAYYDGVDIDWKHGHIRVDNNEKGFCLLGRWLEKLDVRQGSCIFCMEYTGLYSQEFRQWLERKKIIYGMISPRKMHRFEPDLGEDERALDRIKTDEMDSFRIAIYCKEHSMKIRRKPSRLPSDAYFRLKRLLAERRQYIKQSTLYKQQLHDIGRFDTEGSRHRKESELASLTGKALQTSSEMESIIKEDAAIKRNYDLLCSIKGIGLVVAAETIVLTENFTSITNPRRYACYIGIAPGRKESGVSIQGGDHVSRKGFTQAKADLSMAALQGIRHDKGIRAYWLRRKAEGKHSGVVLNAVKFKIVLRMFAVIRRQKPYVEMEEYGKK

SEQ ID NO: 466964 - protein, 320 aa, unidentified
MSNTTLGIDVGKSELALALLKNGKFVDKLVENNQKGFRQILKFLQNNAPEAEVYLEATGRYGEAVTDFLSSRKFDVKVLNPSQIRAFAQAKLARHKTDKVDARIIAEYGATFGGRTYSKIKENVKELRELYRGSLALKDELVATKNHLENKELLPKSVSDLWEKRAEDLEKDVQLVEKKMKEIILADPGLKLKFELLIKVPGIGEGTATAVLAEVTRLENFRTARELAAFVGLTPRHRTSGSSVRGKPRISKMGLKTLRKALYLPALTAMRFNPALKKFTEKLRGKGKKFKQIICTVMRKLVHIIFGVLKYDVPKFRAKG

SEQ ID NO: 466965 - protein, 371 aa, unidentified
MQDSIFIGLDVHKATISVAIAKAERGGEVRHWGTIPHRPDHVRKLVERLGINGSQLHFCYEAGPCGYGLHRQLVEIGHDCIVVAPSLIPVKAGDRVKTDRRDAVMLAKLHRAGELTAVWVPDAAHEAMRDLVRARATAVRVLGKARQHLQGFLLRHGRIYPGKKGWTVAYRRWLTTLGFQHPAQQIVFQDYVDAVSDAQARVDRLTRQIAELVPTWSLAPVVEAVQAMRGVAFIVAVTVVAEVGDFHRFDNPRQLMAYLGLTPSEHSSGSSVRRGGITKAGSSLARRALIEGAWSYRMQARVGRKMFDRLEALPQAVRDIAWKGQLRMCQRHRHLVAAGKPKVVVTTAIAREMLGFIWAIAREVSVAPART

SEQ ID NO: 466966 - protein, 422 aa, unidentified
MLTTTQDNEEIIERVAALDIGKAELVCCVRVPDEDRPGRRLQEVQTYSTMTRSLLGMADRLRCLGVTRVVMEATSDYWKCAFYLLEAAGFEAWLVNAKDVKHLPGRPKTDKLDAVWLCKVAERQMIRPSFVPPPEFRRLRDVTRYRADLVAVRTAEKQRAEKLLEDAQIKLSVVASDIFGVSGRQMMAAMIAGERDPKVLAQMARAAMRGKITALQEAFTGFFTGHHAFLLQRMLARVDAIDADIAALDARIEEMTAPFTAAAQRLDEIPGVNVTIASVILAEIGIDMGRFPTAGHLVSWAKFAPGVKESAGKKKGKNATGHGNSYLARVLGNAAVAAGRSDTFLGERYRRIARRRGRKKAVVAIGRSLLVIIWHLLADPDARYTDLGSDFYATRISPERRKRGHIRQLEALGYKVTLEPAA

SEQ ID NO: 466967 - protein, 344 aa, unidentified
MQITTIGLDLAKSVFQVHGIDATGQVVVRKSLRRSQMLPFFAKLPPCLVGMEACGTSHYWARELIKLGHEVRLMPPAYVKPYVKRGKTDAADAEAVCEAVTRPTMRFVPVKSPEQQAALSMHRTRDLLVKQRTQLINMIRGLLAEFGVNIPKGLERALLMARQIVDGKAPEVPFEAAKIVGTLSQQALDTHVRLREIDRDLAVCLRGNDVARRLMTIPGIGPVGATALAASVTDPHQFRSGRQFAAWLGLTPLQKSSGGKERLGRISKMGDKYLRKLLIVGMTSLVRRARHNRATIDPRLADLLARKPTRVATVAMANKTARIIWAIMTRGETYRAGHRPALAA

SEQ ID NO: 466968 - protein, 376 aa, unidentified
MKESITRVGIDAHKKSHQVAIRYWGSEDLVELTVVNEPGALRRFVKRVLRESEVPVEMCYEAGPCGFSLKRQLEGYGAKCFVVAPSLIPVKPGERVKTNRRDAKKLVNLFEGGLLTMIAEPNEGEEAVRDLCRCREAVQKDLVRMKHRLEKFLMRRAMYYKQGEQWTERHWNWLKGLRFENAVDRVVFEQYLSQVEQQKERLKVLDQAMQDVSEEEPYRRPVGWLKCFHGIDTVTALSLVAELYGIERFESARELMAYLGLVISEQSSGDQRSRGGITKAGNRRVRRLLVECAWQYARGYGSPSKAVLARRKGQPQWVIEIAEKAQRRLTRRYWRLVQRGKEKKVAVVAVARELAGFLWSVLHAGVGLVEELKVAD

SEQ ID NO: 466969 - protein, 400 aa, unidentified
MPAFWVGIDSGKRAHHCVVIDQTGTVLLSKRVENDEIVLLDLIATIAEIAAGGEVCWATDLNAGGAALLIELLSAHTQQVLYIPGRIVHHAAATYRGDGKTDAKDARIIADQARMRTDLQPVRGADQISVDLRLLTARRTDLICDRVRAINRLRATLLEYFPALERAFDYSKKAPLILLGGYQTPEGIRRIDLTRLAGWLRKRGCRNSAKMAEKALMAANSQRTVLPTQTTGSALVIRLAEQISTLDEEIAATDAQITELFRQHDSADIILTMPGFGPVLAATFLANIGGNLEAFDSVDRLASVAGLAPVPRDSGRISGNLHRPRRFNRRLMRTCYLAALSSLKNSPASRTYYDRKRGEGKSHKQALIALARRRINVLWAMLRDHTIYQEPTPRIRAQAA

SEQ ID NO: 466970 - protein, 355 aa, unidentified
MNDEKYIGLDVHQATIVVAVMDSTGKLVMESILETEAATILQFFAGLRGTLSVTFEEGTWSVWLYDLLNPHVDKLVVCNPRKNALLKDGNKSDRIDARKLAELLRGNQLKPVYHGETGVRMLRELSRSYLTIVKDLSRVMNRLKAVYRSWAIPCAGRDVYYRRHRAQWLDKIREAGVRRRAERLYEQLDMLQHLRQQARRELLAESRKHAITAKLRQIPYLGPIRSALAVALIQTPHRFRSKRQLWAYSGLALETRISAEYRLVEGQVRRSKKLLSIRGLNKDHNHDLKGLFKGAATMGSVRPGPFQDFYQAALAKGIKPTMARLTLARKIAAITLTLWKKGENFDAEKLKSQAA

SEQ ID NO: 466971 - protein, 373 aa, unidentified
MEEKEIAMEIVNPQAAGVDIGSRSHWAAIGQKEDEVQEYGVFNEGLKAMAEWFREHGIRTVAMESTGTYWQSLYAVLLSEGFEVILCNGKFTKHAKGKKTDVKDCRWIQKLHSLGLLSGSFLPDKQTEQLHTYCRQRALLLDSSASASKKMQKYLRLLNLRLDVVVNDICGQTGMAIIKAICEGEKDAKKLASLRHYNCRKSQEEIAKALESNGREDYLFALRQELEMYEMFQAKIVQCDQEIAKILEQIIENDDQKRQHHIEAKPYKRVNKNAPAMKNFNQVAFQYFEGVDLMAIEGMSYGTVLAVMSEVGIEGIRRFKTAKHFASWLRLAPNNKISGGKILSSKVPKGSNRLKIALRNAANAIGNLKDSTT

SEQ ID NO: 466972 - protein, 395 aa, unidentified
MLYLAIDQHKHHLTINIRNEHGDVIQNGQVSTAHVDIDGFFVTFAKKARKHRGYMAIVEVCGFNDWLLEKLKKTRCSEIVVIQPDHSAVNKTDKRDAHSLGALLWNNRKRLQGGQRPNGIRRIFPADPADAQVRQLANFRQHLIKQRTKTINKIKGIMNKYNMAQDAPTEKHDTKKFRKWIATVQIPVVDRLEVDMHTQTWELHDKQINDVEAELVKRSEVRIADVFRLKAIPGISAMGAITLLSRIGDIKRFKNPDSLANYFGLTPGCHNTGGKHRIGGITKRGNAIARQVLNFAVIHITRKDTAMKEWHKKIKKRRGAKTARVAVMRRLATIVWHMLRWDKPYQFRYDSPVSAPKRDDLRSSKEVLGGISNSHHARKRGQGNTPLKCRGKTKA

SEQ ID NO: 466973 - protein, 338 aa, unidentified
MKKNYQTFVGIDVSKSKLDYCIASNPSFVQNQFGIIENNEKSIRSFISNLQKKNLTNENVLFCLENTGVYSMPICYWLQTNNFDYWVVPALQIKRSAGIKRGKSDKVDSKDIAMYAVSHLHQLALSVLPEKDFLELRVLLAEREKLVKSIKIFVSTSENKGFLPKEILKAVLQQNKKTIVLLKQQLMKLEKLIEELILEDQLLNQQFKLLQTVPGIGKQTAANLIVYTHAFSTFKNWRKFACYCGIAPFPYESGTTLKGKTRVNDLANKKLKSLLNLAALSAKKYDIEMNNYFERKVGEGKNKMLVLNAIRCKVVSRAFAVIQRNSPFVDLNKFKAAS

SEQ ID NO: 466974 - protein, 420 aa, unidentified
MDLLVERCAAIDVGKREVVACVRTPQPQGRGRRRQTRTFASFTGDLEAMADWFAIEGVTEVVMEATGSYWKPVWYVLEERPFELKLVNVRHVKMVPGRKSDVLDAEWLAELLEHGLLRGSFVPPPVIRDLRDLTRYRKRLIQTRTAECQRIQKTLEDAGIKLDSVASDVLGMSGRAMLAALAAGERDPQTLAELAKGKLRSKRSELRRALHGRFREHHALLIGLCLEHLDGLEASIGRLDEHVDELFAGHVSEADVPFSRARDHLDSITGVGKRAAECILAEIGVDMSRFPTAGHLASWAGMAPGTNITGGKRGASNTPKGDVWLRDILVECAWAAARTRDTYLAAQFWRIARKRGKKRAAVAVGHSILVICWHLLTSDTDYDELGGDYFTRRTDPERQRDHAVRQLLDLGYRVTLERVA

SEQ ID NO: 466975 - protein, 457 aa, unidentified
MPRKKAKSKSDRTLQMVHPNAAAIDVGATLLMAAVRADRTANPVRSFGTFTTDLHRLVDWFAECGVDTVAMESTSVYWIPIYELLDARGFAVFLVNARDAKHVPGRKTDVSDAQWLQRLHSYGLLRASFRPKGQFTQLRAYVRQRERLLEYAASHIQHMQKALTEMNLQLHHVVADITGATGLRIIRSILSGEHDPKTLACLRDYRCHASLETIEKALTGNYRAEHLFALEQALALYDAYHEKVSACDVRIEAVLKDLSIGRGHATGALTPSRRRTDQVNGLAFDVRSALFALLGKDITKIDGFGPYLSLKLVAECGDDLSAWPSAKHFTSWLGLAPNNKISGGKVLSARTRRSGSRSAALLRLAAVTVGRTDTALGAFYRRLSARIGKAKAVTATARKIAVLFYNAVRHGMEYVDPGASFYETRYRKRVVDNLHRRAKAFGFVLQPLEPTPDGAVS

SEQ ID NO: 466976 - protein, 349 aa, unidentified
MVADELDYVVGVDTHRDEHTLALVEAATGAVLAQQTVASNGRGYAQALRFAQQQVDAARVWAVEGAGHYGAGLARYLSERGETVLEVGRSPRGERRLSGKDDQLDAVRAARAALRSEPLPRPRSGEHREALRLLLVARRSAVDVRREALVQLRSVIVTAPERLRQELRGLPVQRLLDRCSRLRRSTTPTPDQVAARVVLRTLARRIEAATVEADELEREILVHVRALAPELLDEAGVGPIVAAQLIVAWSHPGRIRSEAAFARLAGVAPLPASSGQTSRHRLSRGGDRQLNRALHTIVLHRRQHDPATRDYIARRIAEGKSRRDATRLLKRYLARHLYRLLQNQEPLLA

SEQ ID NO: 466977 - protein, 354 aa, unidentified
MDSAKYIGMDVHKESISIAVMNHSGKIVMESVIETKASMILQFIGGLRGDLRMTFEEGTWAAWLYDLLKPHVTEVVVCNPRKTALLKDGSKSDRIDARKLAELLYMNKLNPVYHGEHGIRTLKELARSYLTVSKDLTRVMNRLKALYRSWGIPCAGTEVYSPRHRAEWLRKITEIGVRRRAEHYYQQLDSLRLVRQQVRRDLLVESKKHKPWKLLGQIPGIGPIWAALLIALIQTPHRFRTKRQLWTYSGLGLETHDSAQYRVLGGQLQHSKTVTIRGLNKNHNHDLKAIFKGAALRATIAAGPLHNFYEGLLAKGKKPTMARLTLARKIAAITLIIWKKEVRFDAEHLKPQAA

SEQ ID NO: 466978 - protein, 417 aa, unidentified
MKLLFIGDDWAEGHHDVAAQDDAGKTLARRRLPEGADGIARFHEMVGSCLGEDAEPDPARVIVVIETDRGPRVKALAAAGYRVYPANPGQAARHKETVANPGKKDDFFDAGCLADMGRTRRHQMRELAAGSDVAEAVKIAARAHQKLVRERTRHLLRMRPALREYFPAALEAYADLTLAGKDALELLAKAPNPESAARLTVTQVTAALKRAGRRGDLAQRARDIQAALRAPHLAQPDVIAEAHAASVQAAAAVITALNEQVKIMEAKVSGLFRRHPDAGLYLSQPGIGDITGARIPGEFGDAPGRYATAKARKNYAGTSPLTIQSGKKKTVHARYIRNRHLIDALPAQALTALSVSPGARGSYDDLRARETGHDDAMRRVASRLAGILHGCLKTGREYDEATAWSHRAGNPEATKAA

SEQ ID NO: 466979 - protein, 411 aa, unidentified
MDVIYERCCGLDIHKKVVVACVITPGADGQPRKQIRTFGTMTADLEALAQWLRDQAVTHVAMEATGVYWQPIYNLLEETFTLLLANARHIKAVPGRKTDVKDCEWIADLLRHGLLRGSFVPDRAQRELRELARYRTTLVRERSSEVNRLQKTLEGANIKLAAVASDVLGVSGRQILDELVAGVTDAAALAALAQGRLRDKTDQLQRALAGRFGPHQRFLVAQQLAHIDELDTRIAAVSAEIEARLRPFAPALERLDTIPGISRRGAEILLAELGPDLAPFRSAAQLASWAGLCPGNHQSAGKRISGKTRKGNPWLRALLVQAAHAVGRTPTYLGARYRRLAARKGGKRAAIAVAHTILRIVYALLTNQTAYVDLGVNYFDQRDRQAVERRAVRRLEGLGYTVTLEPKDPAA

SEQ ID NO: 466980 - protein, 344 aa, unidentified
MKHYAGLDVSVKETAVCIVDEAGKILRELKVPSHPEDLVVALSDPAWRLERIGLEAGPLSQWLFSGMAGAGLPVVCIETRHTKAFLKAQVNKSDRNDARGIAQMMRVNLFRPVHVKTLTSQKRRALLTARKILQDKALAIENDIRGLLRNFGLKVGIVGVGKFDERIRELVERMPELVEIMEPLLTARQKLRETFTALHRKLLAIVRDDGVCRRLMTIPGVGPVVSLAFCATIDVPARFKNSKAVGPSLGLTPVLNQSGESLRVGRVSLSGDEMMRALLYEAAQVMITRVQKWSWLKAWAVNVAKRRGLKKAIVALARRLAVIMHRIWVDGTVFRWDERSRAGD

SEQ ID NO: 466981 - protein, 350 aa, unidentified
MKEQNGSSRASVFGIDIGKNVFHVVGVDVGGQPVQKARFRRESLLQFFERTAPALIGMESCPGSQWLARKLIALGHRVRIIPAQFVKPYVKSNKNDIIDAEAIAEAVTRPTMRFVAVRSTEQVDLQALHRMRSQLVSSRTRLINQMRAFCLEYGIAMRQGAGAFKLDIRRVLSDEGNDLTTTMRRLLRDLVGDLEHLEKRIKAVTDEIDAVAAKDDAARRLISIPGIGTLGATALLSAIGDAGRFAKARDLAAWIGLVPRQHSTGGRSNLLGISKRGNNYLRRLIISGARSCYAHLDRERDRLGQWMDGLRTRMHPNKAIVAVAAKIARIAWVIITNPSALYERRDPRFA

SEQ ID NO: 466982 - protein, 361 aa, unidentified
MGGRREIELSLAPEAVMKLDPRRPRGINPNSRLSRPRPQRASSSHSQDRVTPMSESKSIGIDVAKDSLSVASSPAGLTLDVPNSPEGRRQLIKSLKEHVVSLVVLEASGGYERALAADLLEAGFKTVVVNPRQVRDFARGLGELAKTDPIDARVLARFAQVVQPAPRSAPSAQQAELAELVSRRRQLVDALTQESNRVEKVRLPQIRRSIEAMRHTIEKHLEKIDDEIAKIIEADESLASKDKLLRSTPGVGKGTSAMLLSHLPELGQLNRGQVAALVGVAPWDCASGKWTGRARIWGGRADVRAMLYMAALAAMRFNPAIRAFAERLKAKGKAFKIVITACMRKLLVMLNSMLRSKTLWR

SEQ ID NO: 466983 - protein, 307 aa, unidentified
MDIIIDKGCGLDVHKETVVACVMGSGIKKEIRTFSAMTGDLLRMKGWLTDLGITHVAMESTGPYWKPVFNILEDSFEVILANARHIKNVPGRKTDVKDSEWICKLLRSGLLTASFVPPQAIRDLRDLTRYRQKLIQAASAEKNRIQKVLEDANVKLSSVVSDTFGVSASRMIKAIMSGNFDTDSLAELAVGRLKGKKEKLKEALQGHFRDHHGFMIQASLDHIASLEKIIADLDRQINEKLKDYHRERELLASIPGVKEQGSSSILAEIGVDMNVFPSEGHLSAWAGMSPGNNESAGKKKWKDNPRQ

SEQ ID NO: 466984 - protein, 338 aa, unidentified
MKTYAGIDLHSSNNYIGIIDAKDKRLYSKRHDNRIQDILKVLGKFKASLQGVVVESTYNWYWLVDGLMDNGYKVHLANPCAIKAYDGLKYTDDKWDSFWLAHMLRLGILPEGYIYPKQQRTLRDLLRRRLMFVRQRTSHILSLQSMITRNRGLNFSGSQIKRFRDEFLEKLFSDYHLLFTAKRNMATIRFLDRIVSEIEIEVASQIKLKKEFISLLSTPGIGNILGLTIMLEVGDIHRFAKAGNYSSYCRCVESKKISNGKKKGENNQKNGNRYLAWAYVEAANHCMRNCVKAQKFFQRKMAKNNRVLATKALANKLTKATYFIMRDQVAYDSEKLFG

SEQ ID NO: 466985 - protein, 343 aa, unidentified
MQAVTTIGLDIAKSVFQVHGIDTEGKVLIRRQLKRRYVLAFFQKLSPCLVGIEACATSHHWSRELKALGHTVRLMPPAYVKPYVKRQKNDAADAEAICEAVTRANMRFVETKTPEQQSCLMLHRTRHLFIRQQTSVINAIRAHLAEFGIVAPVGRKGVELLLAVVTDTSDQRVPEVARACVAALGAQLRGLKAQILEFDRRIMAWHRSNETSRRLDEIPGVGPALATALVASVADPKAFRSGRNFSAWIGLVPKQHSSGGKDKLGSISKQGDRYLRSLFTAGALAVIRYAKLHGTKHRPWLTALLARKPTKVAAIALANKIARMAWAMMAKGERYKEPVALAA

SEQ ID NO: 466986 - protein, 307 aa, unidentified
MSEKIYFGVDVCKESLAFCGPGVAGQVPNNAPGQRRLLARLPKGAHLIIEASGGYERELVSVAQQSAVPLSVVNPRQVRDFARGVGRLAKTDPIDAEMLARFGAEVNPPPDAVPTAAEVALQELVSARQQLVEERTVLLQQQAQHLNSIVRRLDSARLKLLQRQIAQLELAIGSILEEHSALKQKVERLQQVKGVGLITAVTCVALCPELGLLSRRQTAALIGVAPYDDDSGARKGWRHIAGGRPRLRRALYMAAISAMRSNPILRRFYQQLRLRNKPPKVALVAVIRKLAILLNHLLRNPSFLPTS

SEQ ID NO: 466987 - protein, 343 aa, unidentified
MKLQALGIDLAKNVFHLVGLDCNGHVVIRKRCSRRQVLAFTANVQVQVIGMEACSGAHFLGRALREQGHEVRLMPAQYVKPYVQTNKSDYIDAEAIAEAVQRPRMRFVPIKTEEQLDLQALHRVRERWVMRRTAVVNQIRGLLLERGLTLAKGRRHLEQALPRILEDAELKLSGMFRALLAQLQLELEQLGVRIEQMDTEIQREACENEACQRLTAIPGVGPVTATALVGAIGNGSTFGRGRDLSAWMGIVPGEYSTGGKQKLLGISKRGNKYLRRLFVQGARSVLQHREKQVPALSHWLAGLLGRTHQNVVIVALANKLVRMAWAVLCKNECYRAPVLAATP

SEQ ID NO: 466988 - protein, 341 aa, unidentified
MGQTNTIGLDIAKRVFQVHGADASGHVVFRKRLVRAKLLAFFAAQPPCTVAMEACAGAHHWAREIGKLGHVARLIPPAYVKPFVKRQKNDTADAEAICEAAQRPSMRFVPVKSEAQQASGVVFRARELLVHQRTQCINALRGHLSEYGYVFPQGITHADAVIAHIEDPASCIPESARAILAVLVGTFQALEAQIHVLDAEITRRAKADPVARRLMTIPGIGPIAATAITALVPAPEGFRAGRDFAAWLGLVPLQRSTGGKQKLGAVSKMGERTIRRLLILGASAVVRWAGQRDTPAGSWLAGMLARKPKMLVTVALANKTARIVWALLVKGGIYRAPAPAA

SEQ ID NO: 466989 - protein, 495 aa, unidentified
MPNKASIYSDSNPQMVKLFEQAGHPAKVMCVALDYAKAQHTALICNGQGDLLKGAFAVDNTPAGATQLLDQVRQCATRKQIPPEQIFFGGEDCPSFAENFLRRLRQQEYLVVRVNAWEAKQQRGNRTASNDSLDLLGVARCCLKRGGQPVRDLPEAYANLRIATRDRDQLVRLATATSNRIHTYVDRLFPGFLSPQRSGLTPLCAASLDLMSQCFSAAEIRRRRTLGLWLARRGVSEPHAVAAQLKDLAQAALAPAPEQTVLLQRNLGHQVRLYRDVQESISGLDGELAYWLALTPGALLTSISGIGVTLAAGWMAELGPPAQWRAVRRVSAYAGVVPRTKQSGGLDQPPQTGHVQHRCNQRFKNVVLLAVGKVQQFGPEDLRREAAKLQAQGSHTEFGLAKRLVRLAKYLVSTGTIYRPKALLHPDTPKETLALYYQKAWEQLLPKWKTKADVKDVFAPQHPLGQWRQMVKELYALDLPLPAQRAARQPGASTP

SEQ ID NO: 466990 - protein, 369 aa, unidentified
MEKDTTYVGLDDSKRKIVAGILRPGDAQPELREIANDPRQIRRLFERLTREGPVAACYEAGVSGYDLYRQISALGVACAVMAPALTPRRPGQRIKTDRRDAAKLVRLFRAGELTAIHVPAEAEEAVRDLVRCRDDIRRDVLRWRHRVLKLLARHGRAYLAGKNWSQAHWRWVREQRFDLPPLQRAFEATLFALEQALARQAELDKEIQALATTAPYREPVGWLRCFRGIDTLSAMILVAEVVDFQRFRRPRELMAYLGLVPSEYSSGETQRRGALTKAGNSHARRVLVEAAWHYRHRPTIGRALASRSQGQPDEIVSHAWRAQQRLHRRYRHLVGHGKRTPVAVAAIARELVGFIWAALTRHESRHQAA

SEQ ID NO: 466991 - protein, 409 aa, unidentified
MNTLYVGIDVSSKSNVAYFMKPDGSRHSILTVDNNRIGAQKLVDRITSVLQTLDDPDVVIGMESTSVYGDNLMYFLRESGSLAKFKRRLHMLNPKQVKKFKDAYSDLPKNDPTDAFVIADNLRFGRVTKEVYMDDYRYQALKVLTRARFQLVQSLAREKQRFLNGLFIKFSGLVQENIFSDTFGAASMALIEEFESVDELAYMDTEELAAFISKKGKNHFENPEEVAEAVKRAAKNSYKPPKIIADSVNQQLAISMATIRLLQKQVKEYDKAIEKQLNVIPQTLTSIKGIGNVYAAGIIAETGDINRFTGQAALAKYAGLVWKKHQSGDFEAEDTALIKSGNRYLRYYLCEAANSLRRCDSEFKRFYNLKFKEVTKHQHKRALALTARKLVRLVYSLLKTNRLYIPSED

SEQ ID NO: 466992 - protein, 309 aa, unidentified
MKQRIVYIGVDVAKEYLDVAWQRQSRRFGNNKSGHAALVAWIKQSPTVVQLICEASGGYERGLLESLERNAVKVTLVQANRVRQYARAAGILAKTDKVDARVLAAFGAAMQPKPTVPASAKQKRLREYDAQRRHLSRILLAEQNRLAQLGCVQLRSLSRSLISKIKNQIATLDTSISDLIAQDQELRLKAQKLTSVIGVGARTAALVLAQLPELGQLNRRQTAALGGLALFNRDSGTLRGKRAIFGGRRALRSGLYMAALSAARRNHILSPFYQRLRAKGKPHKLALTAVMRKLLIVLNQILKPIPFPA

SEQ ID NO: 466993 - protein, 343 aa, unidentified
MDHFAGLDVSVKETSVCIVDDTGKIVREMKVASEPQALLAVLKNPTYHFKRIGLEAGPLSQWLYSALAEAGLPVICVETRHMRAVLKAQINKTDRNDARGIAQMMRVGLYRPVHVKTLRSQKLRMLLTHRKLLQSKAIALENDLRGTLRNFGLKVGIAGKIKFEARIKELLENLPDLADLVEPLLVVRRVLREQLGILQRRLLAIVRDDEVCRRLMTTPGVGPVVALTYRATVDVPARFRKSKSVGAVFGLTCAKYQSGEIDQSGRISRCGDEMMRVMLYEAAQSMLLRSTRWSWLKAWAMQIARRRGMKKAIVALARRLAVIMHRIWVDRTEFRWTREVAAV

SEQ ID NO: 466994 - protein, 369 aa, unidentified
MADRITYVGLDVHKESIVVAVAVGGLRGEVREYGRIANTPTALDRLLRKLGGDGTTLRFCYEAGPCGYGIQRRLSTGGHECVVVAPSLIPKRAGDRVKTDRRDAASLARLHRAGELTAVWVPDARHEAMRDLVRARLDAVHSLRRARQQLSGFLLRHGCHYGRPAWTRLHRRWLAGLKFEQAVHHIVLEDYIAAVEAAEARRNRLTAQIEAMLPDWTLAPVVAALQTMRGMALVNAATLIAELGDLSRFANPRQLMAYLGLVPSEHSSGASVKRGGITKAGNAAARRLLIEAAWSYRFPARLSRELLLRQERQPRLIRDIAWKGQLRLCGRYRRLARTGKPANIVTTAIARELSGFVWAIARQVTVTTD

SEQ ID NO: 466995 - protein, 371 aa, unidentified
MKSIIYIGMDVHKKTYSLCALLKETGEIIGETKIPADVSLIIKFIENAKKSVDSDDVQIKTGYEAGCLGYSLYWQLAAKDIECDILAPSTMHRSAKNKVVKNDRRDAKNIAANLANGTYKSVYVPTDEDVEIKEYIRMMHDFKIELKKVKQHINAFLLRFGHQYPGKSKWIPAHIKWLKELELSDMYREILDEYLSQLEILSEKIERFKHRLEELSQKETYNEKIGQLRCIKGIDTTAAMTMHAETSDFDRFPTANAFASYCGLTPGEDSSGESYHRLGITKQGNSMIRTTMVEAAQVLVRGTIGKKGKKVKSKQKDQDVKVIDYADKAVVRLQKKYHRMIFRGVKRNIAITAVARELACFVWGIETGHIS

SEQ ID NO: 466996 - protein, 315 aa, unidentified
MSKHNIVCAGIDTGKNKLDVAITRSDKATGFANDPHGHAGLVAWLRRHHIERVGIEASGGYERAVVAELRRNGLVVIVFQPIQVRAYAKFHLRRAKNDKIDAGLIAACTAATEKIHAPPDPRLVALADHQTLIDQIVDDVAKLKNRRESCRDECFRQLWNEEIARLQKMERAELKRLVAAIRQHDDLAQRLDLIASVDGVGLPTAVAILVRLPEIGRLSREQIAALAGLAPYDDDSGERRGDKHIAGGRERLRKTLYNATLAAAFHWNPQLIAFKDRLLAAGKLHKVMRVACARKLLIFINTVVARGTPWVSKPA

SEQ ID NO: 466997 - protein, 387 aa, unidentified
MAKQNDLSRCLVTLEQDATVIAVIEIGQSSWLVAGIVPGLERNPLKKLNPDQDALLQLLHRWRKEAVQAGCTIKRIAVAYEAGRDGFWLARWLRAREIEAYVIHPSSVPVSREHRRAKTDRLDTELLKRSFLGWLRGEPKHCSMAAIPTLDDEDAKRPGRERQSLVGQRTRIINRLKANLARLGIRDFRPNLARASSQLEALSTPEGVAVPANTLAELRRDMDHLRFVKQQIKEIETARAKRFAGAPNEERHAMVRLLARVVGVGIETADMLVQEVFSRNIRDRKALARYAGLTGAPDESGKKRRERGLAKAGNARVRRGMIELAWGHLVHQKDSALTAWYRKRTSDARGGTRKTMIVALARKLLIALWRLVTTGETPGGLLLRPAA

SEQ ID NO: 466998 - protein, 343 aa, unidentified
MDHFAGLDVSVKETSLCIVDDAGRIVREVKVASEPEALLAVLTNPAYCFKRIGLEAGLLSQWLFSALAEAGLPVICVETRHMRAALKAQINKTDRNDARGIAQMMRAGLYRPVHVKTSRSQKLRMLLTHRKLLQSKAIAIENDLRATLRNFGLKVGVVGTVKFEARIKQLVDNTPDLVVLVEPLLIVRRVLREQIGILHRRLLAIVREDAVCRRLMTVPGVGPVVALTYRATVDVPSRFRNSKAVGAVFGLTPSKHQSGESDHTGGISRCGDEMMRMMLYEAAHIMLVRSAKWSWLKAWAMKIARRRGLKKAIVALARRLAVIMHRIWVDGTEFRWTREVAAA

SEQ ID NO: 466999 - protein, 397 aa, unidentified
MIAVGIDVSKTKSTVAILNGDGSIRAKPFDVHHVADELQALVDYIKRTSEPPTILMEPTSHYHYPLLKAFQEAELPVCLINPYQMKKYGDTELRKAKTDKRDSLRIAQYALEKSYSLIPYTPQDQKYEDLRFLSRQYSQRISTLTAAKVQLLSLLDETMPGITTILPLKSRDPDNCVLLRFIKRFKSFDVIRKMGKTRFLDSYQVLVRKTKDRFVGSKGLAIYELALNSITTRGENPLSAMTQDQCVDLVSTAQKAADEINLQMRIIAETIPEYKVLRSMAGVGDRLGPIILGEIGDIRRFHSGKALNAYAGNDAPPYQSGQFESRNRHISKRGNPALRKACFEVMQALKLTKPQDDPVYLFLLKKEQEGKPYNVAKMAAVNKFLRIYYARAMELYK

SEQ ID NO: 467000 - protein, 310 aa, unidentified
MDVIIDKGCGLDVHKETVVACVMGEGIKKEIRTFSTMTEDLFRLKSWLSEKGITHVAMESTGPYWKPVFKVLEDSFEVILANARHIKNVPGRKTDVKDSEWICKLLRSGLLAASFVPPQAIRELRDLTRYRRKLTQSISAEKNRVQKVLEDANVKISSVVSDTFGVSASRMIESIMAGNLDTESISDLAVGKLRGKKEELKKALVGTFQEHHRFMIQVSLDHIGSLEKIIAGLDQEINRKLKDYHREFELLHTIPGVKEQGAASIIAEIGADMDIFPSEGHLSAWAGMSPGNNESAGKKKVERRPTAIRI

SEQ ID NO: 467001 - protein, 367 aa, unidentified
MQDAITWVGLDTHKATIQVAMLLPGGVAPLEWQVANEPAAVRRLARRIQRAAPGEVRSCYEAGVCGYTLQRQLHAAQVPCTVIAPALVPRKAGERVKTDRRDARKLAELLRAGLLTAVRPPTAGEEAARDLCRGREDLREDLLRARHRLGTFLLRRGLVWRATTWTQAHRRWLRHLTGAHAADQAVLSDYRLAVEQLEARLETVDAALAALAQEAPFRRPVGWLRCFRGIDTVTAITLVAELHDVRRFTSARALMAYVGMVPSEHSSGETRRQGGITKVGNSHVRRVVVEAAWHYRHPPAIGAALRRRRHDQPAAVIALADKALQRLHRRFARLTARGKARHKAVVAVGRELIGFVWAALTLTEAPT

SEQ ID NO: 467002 - protein, 446 aa, unidentified
MAKRGGRRRKGKKRRVEVLPVVHRRAAGIDIGSEMHYVAIPEDCCAEPVRSFPCFTEDLNRLADWLEDNGISTVAMESTGVYWIPLFQILERRGLEVRLVNARHVKNVPGRKSDVQDCQWLQTLHTYGLLSGSFRPEDAICVLRSYLRHRETLVRQSSAHVQRMQKALTQMNVQLHKVISDITGVTGLRIIDAIVAGERDRQKLAMLRDGRIRSSQETIAKSLEGDYREEHVFVLRQERELYALMQQKIAEVEQQIFSVIDSFESRLDANQEPVSTKGKYANLRRALHRMIGVDLTAIPGLDAMTVLVLISEIGLDMQRWLRVKQFASWLRLCPHNDITGGKVTRSRSLPGPHRAANALRMAAQAAGRTQTAIGGFYRRKKGALGAQKANKATAHKLARIVYHLLRTRSEYVETGAEAYEQAYRDRVVRNLKRRAHSLGYDLVEAA

SEQ ID NO: 467003 - protein, 330 aa, unidentified
MNTMKKNTAPVYVGMDVAKATLQVHLNGHQFEFKNNSKGHTQLFKKLATLTLPHVVCEATGGYERPVVEACHKAKILVSVLNPAHTLAASQAQGKRAKSDPCDAAALTDYGQRFHPEPTLAVPPATREITELTLWLKQLIDNRAVVKTQAEHHANSFVGQQHQALLDHYQSQIKTVEQKIKKLVHAHPPFQQRVDSLTQIQGVGFRTALLTLVFMPELGSMNRGGTAALAGLAPWTRDSGKMKGKRCIGGGRAQVRPVLYMAALSASRCNPVLAPFYRGLKKRGKLSKVALTAVMRKLLIHMNSELKKLAVKPGIEKPGTSAKTKKILAK

SEQ ID NO: 467004 - protein, 396 aa, unidentified
MISVGIDVSKGKSTVCIMKPCGEILESPFDIGHTADELDSLISLIKSFDEETRVVMEDTGHYHLPVATYLSSHNIFVCCVNALRMKKFCSQSIRRAKTDKIDSIKIASFGITYWNELVKAYPSNVIYDELKFLARQYYQVTGMLVKSKVNFSNLLDQVMPKINDVLSNQGENHKLTEFVNRYIHFQNILDMGERKFTSDYCKWAKKKGYRLNERKAAEIYALAQNGIPTLPNSQSVKIAVSEAVKLIHSIEESRNTILAQMQDLCNTLPEYSVVKEMDCIGDTLAPRIIAEIGDVRRFKNKHSLIAYAGIDAPPYQSGAFHASERHISKRGNSYLRKTGYEIMQSLIKHKPADNAVYDFIQKKRSEGKCGKEAMIAGLNKFLRVYYGKVMEFYSEH

SEQ ID NO: 467005 - protein, 316 aa, unidentified
MNMDYVGIDVSKQHLDLAVAGARVERLANSEAGLSVLVERLSALEHPHVVCEATGRYTRLLARWMGERSIAFSQVNPRRVRELARASGQRAKTDAIDAGMILRFASLMQPEPNPPASPHILELAELVRRRRQLVDMLAADKQRQTGAQSELVHASVTALAAFVSAQVKALDAAIAQAIAAEAELAQRAQLLCSIPGIGQTTAAVLVAELPELGRIGKKQIAALAGLAPFVRDSGQFRGQAHIAGGRLSVRCALYMATISAIRANPPVKAFYRHLREAGKPAKLAIVAAMRKLLVTANAIIATGKPWNASIKNNKHN

SEQ ID NO: 467006 - protein, 445 aa, unidentified
MAHANRLSRGDVRRNARLDRLRRVVSRDHAVLAVDLADDTQVVVVCDHDSRVLARRTWRCRPWQLDGALRWGLAVACRQGFAGVVVACEPTGHRWRVVVEQASRLGLEAVCVQPLLVGRAREAEDFTRDKSDDKDALLIARLTTQLHCYLPERPTAAWARLRHLGNRRVEQLALATAAQQRLRDLLECGWPAALEVARHPLDSSTWRAAMTVGRCDPARIRRLGFTRFARAVARELPRWGGRRRNLGVLRALYAAAGDDRGVEAQRAGALERAALVLTDFKQALAALAEVEGRMAKVLEELGLAELVTSIRGVSVVGAAAILAETGDPTRFDDAKAVVKHAGLCPRDNASGAFAGKTTISGRGRPLLRLAAWRAVWGALPHNPVFAARYAHLTSRQRNRLSDGQARTAVAAALLRQLWVVCVNRTPWELAVAGGTIRKEVTDPAA

SEQ ID NO: 467007 - protein, 333 aa, unidentified
MRRKIFIGCDVSKDTLDFVVRSSQSVLMQTQIENSQQAIRRFKLQLGDLVSDAILVCEYTGIYTSHLLMEWHNSGMDIALVTGTDVRRAFGTLRGKTDAMDAMRISEYALRFTDKLKCWTPPRKVITQLQHLTVLRDRLIKAQVQLKVPLQEARAFLDPSLVRSMEKYSAKPLAALKTQIAAIEETIDRLISEDAELSQLNARIQSVPGIGKVTATELLIRTNEFKSFTSAKQLACHAGVAPFPYTSGSSIQGKTRVSHKANKRMKTLLHMAAMNAVRNPGELQEYYQRKVHAGKNKMSALNAVRNKLIHRVFAVVRDGVIYQKNYQIKFAVT

SEQ ID NO: 467008 - protein, 410 aa, unidentified
METIVERCCGLDVHQATIVACLLVGRASEKPRKQVKTFRAMTQDLLALRDWLLSEGCTHVGMESTGVYWKPVHAVLEGAFQIVVGNAHHIRNVPGRKTDVKDSEWIADLLRHGLIAKSFVPPKPIRELRDLLRYRRKLVESRSAERNRLLKLLETANIKLASVATNVFGVSGMLMLNAILKDDSSPAQMAELAKGRMRDKIPDLKLALEGSVQEHHRFLLRLQLRRLKRTDEDLAELEQRIDERLGPYREQQALLVQIPGIDRILAAVMIAELGTDMTVFHSAKHLAAWAGVCPGNNESAGKRKSDRVRNGNVHLKTALVEAANAASRKKGSYLKDKFFRIKARRGPKRAAIAIAHKILIAAYHMLSTGSAYKDLGEPYLDRVARYRVTHQLVRRLERLGYDVHLIQKVA

SEQ ID NO: 467009 - protein, 372 aa, unidentified
MGHHTEVFVGIDTSKSRNAIAIADGGRGGEVRYLGEFPATEAAIRKLVAKLAAKCCQLTFCYEAGPTGYGLYRLLKSLGHDCLVVAPSLVPKKAGDRVKTNRRDAVSLAKLSRADELTAVLVPDERHEAMRDLSRARQAVKKDLQGKRQQISSLMLRLGRIYPGKTTWGPAHMRWLMSQKLEHREQRIVFEELLEGIRQESERMERLEDAIREVVPEWSLAEVVSALQAVRGIDLIAAVGVLAEIGDLSRFQNPRELMGYLGLVPTENSTGDQVKRGGITKAGNGRARRILVEAAWSYRYPPRVSRDKQPKVEAAPRVAREIAWKAQTRLCGRFRSLERKGKRRTVIVTAIARELSAFIWAINRELMPPRQA

SEQ ID NO: 467010 - protein, 384 aa, unidentified
MLLKKILKISAQCRNSNGYLTLCVVFSHESTSEYHANVRDYLVKNGYGVIELEAKHSKKFRALFNDRAKTDKIDKNILARELKFFYEKNIQKTIEDMSKNNSERNELKDLTRFRAYIVKERSKFKNKLKIHSFLLFPEIGDMFSNFFGKGAMWINKKYMTPEDILKAGEEQLAKELAENSNNVFGKNHAKKLIKAANNASGLSSGTDGLKITKGLIMDIIETFDKHIRFLDKEIKKRIADDEVAKVILSYPGAGMVLASTFIAETKGLKFKSEGDFMSFCGLCSNTKQSSKLEKDGRIVEGNKHIRMAFFQAANPCIRDKKGNPTIRDYYKKKLSEYEKTKYGKKKAKIASAAKLAGIIFAMVKKMQKYDPNYEAKMKAKVKQK

SEQ ID NO: 467011 - protein, 293 aa, unidentified
MNQNVVYVGIDVDDVSYHGSALDRHTGEVLDFRCRPTLKGLVGQLAKVNEYFGGARLKLCYEASYVGFSLQRDLQERSYECEVVAPSSIPRRAGKSVKTDRIDAADLAEFYANGLLTIVAEPDVEVEQDRDLLRSRQRLIQQQGDLRRHILSLLRRNGLHYKAECNSKTHWRTHHYGWLERTIEGCNGSLKVNLTLLFRQLKNLDEILAAYGEEVEALAVSPRYREPVKALTCYLFYEEGIKHLFALTMITEIGDVKRFAHPRQLVSWVGMDIREYASGGKSTRLGITRQGNR

SEQ ID NO: 467012 - protein, 429 aa, unidentified
MTKTYILKTQTVPADRSAVETYLAPPPPSKGKIIGLDCHPDTFTAAFFVGQTPHDARKIGSRENLSLDALLKWAAAELTPQDIILMEAGSNSFELCKRLGNLGLKACVLESCHVGKHAKTYADNDKMAAARIALVYLAGNAPCVWVPDEQSRERRELLHAYRKAVDEHTAATNSIKSYLNGRGLRLGKHSLDEKTTSQWILDQADWSVLQKNILAEHLANITESKERRKRLYRLIAAEIAVDPTMMRCMKVLGVGIVSAFALLAVIGDIGRFHSPEKLVAYIGLNPGQRQSGKGKDIRLGVGRRGRGDIRNLLIQGAHAIMRSGRNTPLGQWGWKLFARKGNRNVAVAAIARKLLVQVWHLLHGNPPLALESDTSFRIKLQKLAVALGSTLRTGIGLGKTLEDSVKTLISRCQTHAEPSASPCETPQPA

SEQ ID NO: 467013 - protein, 384 aa, unidentified
MKKFSKYVGLDTHKDTIAVSVADASGGKARYFGEVSTRPAAIKKLLKHLSPQGELVSYCYEAGPCGYTLYRQITQLGHECIVVAPSLIPRRPGDRVKTDRRDSEALARLHRAGELTAVWVPDEEQEAMRDLTRAREDMKLLERQSKQRLNAFLLRHGRHYEPGKSRWTLAHWRWLERIKFTQPVQQIVLQEYIDSIRHLQSRVLELEEEMARAVQAWRWAPVVEGLMALRGCRLITAMTVVAELGDISRFDSPRQLMAFLGLVPSESSSGPNRRRGGITKTGNGHVRRLLIESAWSYRFPARKTALLQRRAEHTSDAVQAIAWKAQKRLCARFRYLNDRGLRRVKISTAIARELSGFMWAIACEVMSQQPNPVASASIPAINSN

SEQ ID NO: 467014 - protein, 315 aa, unidentified
MTQTITTTAGIDTSKLKLDIAVCGRTERWKVANALPGWRALAANLAKVGVTRVGIEATGGYERGVVEHLRAAGLSVLVLQPIQVKAFGRVHLRRAKNDVLDAMLIAACAAAIDQPRIAPDPRLTELAEYLTFLEQTEEDIARFKTRLEHVDEPRLRRIVISDITRLKARRAAQIHDIAKRLRAHDDLARRLDLVLSIPGIGERTALALLIRMPELGQVSREEAAALAGLAPFDDDSGQHRGQRHIAGGRGRLRRSLFAAALPAAYRWNKALIALYARLKARGKAHNSALIACARKLLIYANTVVQRGTPWTEKAA

SEQ ID NO: 467015 - protein, 322 aa, unidentified
MTLLKGGVWLQHSRIDNVRYAISDFLQGLVSIKGFNKARTVVGMEPTGIYDRHLIQELDRIGMAYIIAGSAQIKSLLGNIRGKTDKLDSARIANFLFLTKDSLIPVQTRRNIIEELASLSTLRARLLAIQKTLRIPIKEDSQFILDYIAEQNRSFCARTVNVVADDLAIVEATIKKLWRSDERLNRLMTLILSVTSVGEITALQILITSNEFQTIRTAKQFACYSGIAPFPFQSGSSIRKRTRVSPIANRKMKALLHSCAVSAKKHVPELRAYYLRKTEVEGKHKMSVLNAIRCKLVSRVFTCVSQDRLYIRESSTPGEAKN

SEQ ID NO: 467016 - protein, 340 aa, unidentified
MTATTDHYLGIDVHKRQAQVAVLDDEGTVVEEIRVANADLDEVAERYAGSRAAIEAGSNYFTIYDRLDEELDVTLANPAKADWLENQKQKNDRKDAKNLARFLRLGEVPESYVPPEEYRRYRALARGRKKLVDKRSDFKNEVNSLLDQNGVTYDGSLWSNQGREFLRELTLDTASELLLEQWLEAIDEFTVKIKRMQQRIEEVATKVKEVETLMSAPGIAAFSGLLIHGEIGEVERFDRAAEVVSYAGLDPVIRESGDSRREGQISKEGNGYLRWILVQCANTAVHNAKDPYLSQFYWRLRNKRNKPHKVAIVATARKLLVALFNMLRNNEPYDPPEVSA

SEQ ID NO: 467017 - protein, 374 aa, unidentified
MSNSITYVAMDTHKKQHSIALYYPGQEEIVRFAVRNTAREITKMTKKVIRQAPGGVEFCYEAGVCGFVLKRRIEAHGCKCAVVAPSLIPRKPGDRVKTDRRDALKLLTMFKAGLLTEVHAPDKQQEAARELTRCRQAAQENLKRIRHQLLKFLTRHGYIYSEGGHWTIKHFKWLRSLEFEETLLANVFDDYFTEMQHCLQRLDSLDKQVEKLAKSKPYKKVVGLLRCFRGIDTLSAITIITEIFDFGRFSSPGELMSYLGLTCSEFSSGEKQKRGPITRAGNKRVRRILVEAAWHYRHPCNLNKALRDRRNGQPQWVIDIADRAGQRLRKRHRHLTNCGKMPCKVTVAIARELAGFIWSVFKEYEARKKVKRAA

SEQ ID NO: 467018 - protein, 488 aa, unidentified
MKRKRHNENGPDSGIEGDGIPALRRKVAGIDLGSTSHWVCAPTVDGLRREVEEFGATTPELERLAAWLKERNVESVAMESTGVYWIAPYEVLERHGLELVLVSTRAFAQVPGRRKTDRIDCQWIQRLHSCGLLRGSFRPAEQVSMLRTLVRDKANLEAEQADWLRRMQKSLDQMNVRVHRAVSDMQGTTGMAIMRAIVAGERNPAELAKLRKPGCRKSEEEIAKQLSGHWRQDHLFSLAQSLQMYDAIAERIDAYEKEILRRLGELERAECEDTQAPKLKNGNKAKMIRQRGEEGMRQAFYRMSGVDLTAVDGVGVGVVEVVLSEYGADPSRFPTEKHFVSHATLAPQKAVSGGKPLKKKKRGSASSRLSAALRSAALTLRHSQTALGAATYTVATSLNMQVTFLECVVLMQPVALVANLPISVGGWGVRETAMIALFGLIGVPASATLVLSIQLGLLSLIVALPGGLLWLALKSRAPSLSVASSSSP

SEQ ID NO: 467019 - protein, 341 aa, unidentified
MSIVGAFDVHRRQLTFEYLDTSSGELKRGRVVPADRQHLREWLARFAGQDDGHFALEGCTGWRYVVEELLAAGITPHLAEPAGTAALRGKKRHAKTDKTDTRHLRVHLMAGDLPECWIPPGHVLEARAVVRLYKDLLDERGAWHQRIAATLFHQGVPVIGSMATAEGRAAVEQVDLSPAGRQAVQAGLRQIDRLTGELDVLRRQLGMLSRHQPGCAALRATWFGVGPVTAVAIWAELGDVRRFGNSDDVVRHTGLDITVYSSDTKRAAGHLSRQGPPLLRWALYESAKCAARAAAPDHGYYAAVRDQRTAGLATLSVARKLARRCYHTLRELGEEALAPAA

SEQ ID NO: 467020 - protein, 349 aa, unidentified
MKIIGCDFHPGYQQIAVLDLATGETEEKALSHERKEEVRAFYAGLKGSVRVGIEASGQSQWFERMLAEFGHEVWIGDAAKIRASCERKQKTDRRDAELLLRLLAEDRFPRIWVPTAAERDGRQLLLHRHKLVQMRTQVKNQWQALALNQGVQRKWKLWSKAGRKQLESLPLLPWANRRRAELLQLFDQLEASLAELDRAVAEQAYARPEARRLMTHPGVGPVTALAFTLTMGPAERFQRGKQIASYLGLIPSEYSSGGGKQRLGHISKQGSPFLRGLLVEAAQSAVRHEPEMRRAYQRLAQRKCRALAKVAMARKLAVRLYWMLRLQVNYAQLIQGSHAGQPGTFRGRG

SEQ ID NO: 467021 - protein, 337 aa, unidentified
MIAVGVDTHKDTHVVSALDQLGQLLGELTIEASAVGYGELVAWTRALGDDIVIGIEGAGSYGAGLCEHLKRKGLRVFEVERPRRRERRAGKSDRIDALAAAKRVLAAEGLSTPRAGGIRRGLGALLAVQRACVGERTRLLNQLQALCVTAPPALRERIGRGGGEQLQRRIARMRARPAADAEERVVFELLRDLARRSRTLGELARRYERELAQLVRSLDATLLDEPGVGPISAAKLLVADPVRFKHEGAFARCNGTAPLPASSGKTIRHRLNRGGDRQLNNAIHTIALSRSLHHPETQAYLKRRMTEGKTKREAMRSLKRHLSRRLYKRLITVPLTP

SEQ ID NO: 467022 - protein, 405 aa, unidentified
MTNEASHDQVAGSVGGIDSHRDTIHVAVITGTGRPVEDREFPTTEPGYREAVTWLTSHGPLQAVGVEGTSSYGTGICAALTTAGVRVVEVNRTRAAERRKRGKTDPLDAYRAARSVLSGEADTDPKRASIEPLRALNVARRSAVKAQQAAWRQIGALLVNAPALLRDRLRGLTRPALLAVLVATRPGQVSDPDDADILFALRSLARRHRDLAEEITAVEERLHTRAAAANPALLAINGVGPVIGAQLLITAGDNPDRLRSSASFAALCGTAPIPVSSGRTDRHRLSRGGDRAANAALHHIVKVRMSHDPTTRAYRDTRLDRGWTNKAVLRALKRAVAREIYRALTGRCELPHYQDLRPARQAKNITLTQVAQHFAVWPTNISRIERGTQRDDTLATAYREWLRAA

SEQ ID NO: 467023 - protein, 407 aa, unidentified
MICVGIDVSKRKSTVCFMAPGDKIIRRPFDVKHTKEELQPLVDEIRVQAKYDEIKVVMESTGVYHLSIAYFLQQNGIFVSVVNALKVANFNKAENFRHTKTDSIDSTNIARYGIAYWAKLPQFDLNGDKYFLLKRLCDAYLNFSEERSRILLQPQSQLEQTMPGIFDLFGGFDINSGKDKLLDFLERYCHIEDIIAKSEAEFVASYREWAEEKGYRSNESKAATIYAQAKNGIPSIPNNPIVRETIMWYVGLLRRADEALMASLTRMEDIAKDLPEYELVGEMGGVGRVTRVALIAQIEDVRRFKNKHSLICFAGLTPSIHESGKFRASQNHIVKKGPARLRKVLYQVMMSLVMHKIPKDDAVYRFIKKKEAEGKYKKVAKVAGMAKFLRIYYGRVMHLYRDLGLAA

SEQ ID NO: 467024 - protein, 342 aa, unidentified
MAIVTVGIDLAKNIFAVHGVDKSGNAVLVKPKVSRAALPELIANLPPCTIGMEACSGAHYWARLFIQYGHDVKLMAPKFVSPYRLAGKAGKNDAADALAICEAVQRPHMRFVPVKDEEQQSMQCLHRTRQGFIEERTASYNRLRGLVSEFGLVASQSTEQLRKLAREHRENLPSWVNQCVDDLLSHIDSIELKIAGYDRILAKIAGRDSRSKNIMKLRGVGPTTASALIASIGSGHDFKNGRQLAAWLGLTPSQYSSGGKARLGKITKAGDAYLRTLLVQGARSVMIGVEHKQDPFSRWVCSLIHRRGYWRAAVAIAAKNARLCWASLNYGDDFKLYSSPNS

SEQ ID NO: 467025 - protein, 315 aa, unidentified
MEHYSASPSFVGIDVSKDRLDVHVRPSGQTFAVVRDGKALEQLVSDLRALAPTLIVLEATGGFEIAVAAALASAGLPLAVVNPRQIRDFARATGRLAKTDTLDAQIIALFAERIRPEPRPLADADSQNLAELIARRRQVVEMLGMETNRLHQARNPRVQRMLKATLKTLKAQLAELDRDIDDTIKRSPVWRAADDLLTSVPGVGGVTAHTLIADLPELGQLDRRRVAALVGVAPVNRDSGQMRGKRTIAGGRADVRSALYMATLSATRWNPIISKHYKSLVERGRPKKVALVACMRRLLGILNAIIRTKTPWQCA

SEQ ID NO: 467026 - protein, 410 aa, unidentified
MNAVGIDVSKGKSTIAVMRPFGEVVASPYDVAHTDSELSKLAKMLKSLKGETKVVMECTGSYHLPVAHTLHNAGLFVSTVNPVLVHGYGNNTIRKARNDRKDSVKIANYALSNWVDLPKEDTRHMLKTYSRQYSKYVKIKTMLTNNLISLCDQTFPGVNKLFTSPPRKRDGHEKWLDFTAYFWHCECVCSLSVKAFSERYRKWCKREGYYFSQDSANEIYEAASSHVSVIPKNDITKLLITQAVAQVTAVSETVAVIAAEMKRLASTLPEYSVVMEFYGVGEILGPQLMAEIGDIYRYPKKSSLVCFTGLEPVENQSGQFAGNEEISKQGAPHLRKTLFQVMDCILQNAPADNSIFKFLDRKRTEGKHYYSYMCAGSAKFLRIYYARVKQYLDNSKLTQRNNLLGSDSHS

SEQ ID NO: 467027 - protein, 343 aa, unidentified
MEYYVGLDVSLKQTSICVVSGTGSVVREGVVDSNPDAIAAFVRSKAPGAIRVGLETGPTSTWLWTELKRLGLPVICIDARHAKAVLKMQINKSDRNDAAGIARIMQTGWFKEVRVKDLHSHTVKALLASRALLVKIKRDLENQIRGLLKNVGLVIGRAKFNVFAVRAEELIEDRPELIPVVGPLLKARQAIEQQTEDLDRKVLRLTRNDAQVRRFMSVPGIGPITALCFKATIDDPTRFKRSRSVGAYVGLTTRRHASGEIDWTGRISKCGDTMLRSYLCEAAGVLLTRVPKWSALKAWGMRLAKRNGLRKATVAVARKLAVILHRMWIDGTEFNWSTKQAAA

SEQ ID NO: 467028 - protein, 402 aa, unidentified
MNPVIGLDISKEESHGQAFLERGKPYRGTFHFEHTREGLAKLLQAVQDLEHAARQRPLLILEATGHYQSPVVQFLEEHHYLYIVINPLISNRLRKSQLRKVKTDAADAYLLGELYYKEEFEPFKKSGVQLLNLRYLTRQYESLSKMCVQTKLQFQAVLDQVFPAYKGVFGAMYSGISLRFLTEFPTSYSVLQTEEETLNAKIKELLSTRRGRSEDWINERVKRLLDAAKQNPFEQTMYASHLINLKVLITLILQYQEHLAKLEQNIDALAEDIEEYNLIQSIPGIGHKIAATILSEIGEIDRFDHPKKLVVFAGIDPSVFASGKFTATRNRITKRGSRQLRYALVMAVQCGLIRSRNIRIKAFYDRKRAEGKPHKVALVACANKLVHWLHAILKSKKEFRLA

SEQ ID NO: 467029 - protein, 354 aa, unidentified
MIIIGCDYHPGFQQIAFVDTGTGELQERRLEHREEAERFYHDLVAQGMKVRVGIEASGHARWFERLLAELNFELLIGDAAEIRAKRVRKQKTDRQDAQHILRLLLEDRFPQIWVPNWENRDLRQLLWHRHRMVQARTRIMNQLQAVALNEGLRCKKRLWRERGREQLEAFRLAPWASRRRRDLLELLDRLTPTIAELTEAIEQEAEKCSEAQRLMTHPGVGALTALAFVLIMGRAERFQCGKQIACYLGLVPLEDSSGDRRRLGHITKQGNSLLRFLLVEAAQVTVRSDQEWRSKYFHLALRRGRKIAKVAMARRLAIRLYWMWRKGWDYEQLKKFGSHAGQPGNRHGVQLNAE

SEQ ID NO: 467030 - protein, 320 aa, unidentified
MIYIGIDISKDSFVAAYPTKSGYTTKTFNNDTKGVRQFIKSLPDESHCVMEATGNYSMLLLYLLQQAGILVSMENPQKIKHFSRAMMSVTKTDEIDAKLIAIYGEKMNPAPYKIPSESILLLKQKRTVLRQLKKHLAATINLQQSLAVLPKQDTTSKVAVEQTIKFLHKQISKMEEEITNLSNKEFKRQMDLLTSIKGIGNTLASALIVATGGFTYFTSAKQISRFLGLCPTYQQSGTSVNIKGHINRNGDTHLRGQLYVAAMASLRCNTTCKEMYDRLRANGKSGRVAIVAIANKLIRQAFAVVNNNQPYIDGYVSTFA

SEQ ID NO: 467031 - protein, 371 aa, unidentified
MLRPRQQGKLARGAKDEEHAMPHKLNSGIAVIGIDIGKNSFHVVGHDKRGAILLRQKWSRGQVEARLANLPPCLIGMEACVGAHHLSRKLRMLGHDARLMSAKYVRPYSKGQKNDFRDAEAITEAVQRPTMKFVATKTTEQLDLQALHRVRERLVSQRTGIINQIRAFLLERGVAVRQGLRFLRAELPRILAAPCDALSPRMLRVVEDLAGDWRRLDERIEGLSSEIEALARQDKGCERLMTVPGIGPIISSAMVAAIGTGDAFSKGRDFGAWLGLVPKQISTGDRTILGSISKRGNRYLRALFVQAAWVVLVKVGPKHWERYGLKSWIEAAKKRLHHNVLAVALANKLARIAWSVLAHGRTFETSKIQAA

SEQ ID NO: 467032 - protein, 381 aa, unidentified
MRNVCGLNVHKDNVFVCIDKEKGEKIQFKTGILTKDLDALRDTLVANDVTEIAMESTSVYWMPIWRFLENDFKLYLVNPYAIKQLPGRKSDIKDAEWIATCLRKELIRGSYVPDSTIQQLRQYNRRIFDINKQSVYIQNKIDAALQRCNIRIGNYISNVRAKSYCQIVDMLSEGKTSPELLIVKVHKRTVNKWGRETILAALEGVVNKTDCRILKQLKEELDMLRKHKIECLVMLREICMENYKEQLLDIQTIPGIGEQGAMQIIAETGVDMKAFITAAMLVGWAGLKPRNDESNGKFKSRSTTHGNKYLRKILIECAWGASRTQGCFFNKFSYHQTMVRKKNRQKVQVAIARKILVVIWNILEKGVVYNDVLEKNKTKDK

SEQ ID NO: 467033 - protein, 380 aa, unidentified
MNDHIAAFIAFDTSKSRNAVAIAEEGRTGEVRFFGEIDNTAEATAKLVRKLAAKYERVAFCYEAGPTGYGLYRQITDLGHECMVVAPSLIPKKPGDRVKTNRRDALGLAKQLRAGELTAVWVPDSRHEAMRDLTRARGAAVQDVRQKGQQVSAFLLRLGRHYAGKTAWTKAHLNWLASQQFEHPEQRIAFEELLLAVHQARDRVARLEEAIRLAVPEWSLAEVVQALIAMRGIDMVTATAFLAEIGDLTRFRTPRQLMAYLGLVPSEHSTGGTVVRGPITKAGNRRARRLLIESAWAYRHPPRVGKDKQAKVAAAPRAVREIAWKAQHRLYARYRALTRKGKLKTVAITAMARELAAFIWAISREIANTGGAAAQQGIRG

SEQ ID NO: 467034 - protein, 341 aa, unidentified
MDIAVLGIDLGKNSCSIVGLDLSGKVVLRRRMQRKTIVNMALKLSPCIIAMEACCGAHHLGRILAAQGHTVRLMSPEYVRPYVKAQKNDDRDAEAIAEASTRPTMRFVALKSEEQLDMQSLHRARDRVVAERTSLMNQLRALLLERGISVPQGRAKLKYRVTELLVQPCDDLSPRICILIEDMLTRWQALDDRIAAFDTEFAAEVKQNEAARRLTSIPGIGPLNATALVAAVGDARTFARGRDLAAWLGLVPRQATTGGKPRLLGITKRGSKYLRKMLIQGARAALPTLSRGSTLLGQWLRGLLARAHSNTVVVALAAKMARMVWALLRHGRTFEHRAITA

SEQ ID NO: 467035 - protein, 313 aa, unidentified
MKTSMVERYVGIDVSKTRLDLAFRGESLTYHFDNDSAGIKELAACLSTMNAAKIVVEASGGYEKKLMAQLGQSELPVALVNPLRVRQFARSLGHLAKTDRLDAQILAEYAFSANPRISRRNSEQEKRLVWLVGRRKQLAEMITAEKNRLHTADPEFVPRLQRHIQWLQAELDEHLAEIEQVLAEQPTWKSHQALLQSTKGVGLVTSSTLLAYLPELGHIPHRPLTALVGLAPFTRDSGQWRGKRYIYGGRAIVRSALYMACLSAIRYNPTIRNFYQRLLARGKPPKVALTACMRKMLIILNAMMRDQSAWNSA

SEQ ID NO: 467036 - protein, 352 aa, unidentified
MKILAMDLGKNKTVVCIYDQTSGKHKYQTVMTCPQQLHDLLVEHKPERVVFEICSAAGWVFDIVRCLGIEIQVANTNGQAWRWKNIRRKNDREDALKLAQLSAMNQLRTVHIPNRQVRQKRALIQYRQSLVARCVQAKNSIHSILDKEGLTMASGKSGWTKGSIEELKAMTLPMENCDGDNLWRGSLWVELEMLAKVTELIKEVESKLEEMAEDDRQVRILRTIPGVGPRLAEAVVAYMDEPGRFTSSKQVGCYAGLTPRQYQSGNSNRVGRISGQGNKVLRALLVEVSWLGLRHNEWMRRTYQRVLRGSNSRKKIAITAVARKLLIRCWAMLRDGTTWRRQDKVNVSNVAA

SEQ ID NO: 467037 - protein, 314 aa, unidentified
MSNETCVGIDVSKEKLDVAVGSSGEVWQVANDEAGHGQLRARLAAASPRLVVLEASGGYEAIVAGALWEAGFHVAVVNPRQVRDFARGMGKLAKTDQIDARVLALFGEKVPLEVRAPLDAEAKELQGMVLRRRQLVEMLTMEKNRRGLVAAGRARKSLDKHIAWLEEAVRRANDDIDQTVRKSPLWREQEDLLRSFKGIGPVSARTILVELPELGRLNRKKIAALVGVAPFNRDSGNFRGKRMIAGGRSHVRTVLYMAAVTAARSNPVIRALYQRLLAAGKAKKVALIACLRKLLTILSAMMRDNVRFAPGTRS

SEQ ID NO: 467038 - protein, 346 aa, unidentified
MTIVGCDFHPGWQQVAVFDSETGEIGELKLENGNGEAERFYRELSSPALIGFEACGNTQWFEDLLERLGHEVWMGDAAAIRASYVRKQKTDRRDAGHILKLLIENRFPRLWRPSARERDLRQLLIHRHKLVGIRARVKNGLQHLMLNRGVQMKRKLWSKAGQKALRALPLEGWAAQRRQDLLHLLSGLDPQIRQLDEAIERAAQENPRAQLLMTQPGVGAITALAYVLTLGDVSRFQRGKQVASYLGLIPSERSSSKRRRLGAISKQGNSFMRMLLVESAQTVNRLDEGFRKQYQHRCHRMAKGVAKVAAARRLAVRLFWMLRTNTAYPEIAHIESSPREGVVGES

SEQ ID NO: 467039 - protein, 324 aa, unidentified
MKDSNMTGSQANGLFWGVDVASEKLDLGCHGVANVLSFDNSATGIESLLSSVSAQPAALIVVEATGGYETPLVVQLAEAGLPVVLINPRQVRAFATAVGELAKTDAIDARIIARFAHDVRPELRPVPKENQRFFANLAARRRQLIALRTAEKNRRRQTNHCELVASIDAVLKVLEEQIVALEGQLAELIASNNQWRQRDRILRSVSGVAAATSHTLIADLPELGQLNHRQISKLVGVAPLNRDSGKFRGCRAIMGGRSTVRAALYMAAFNAIRCNPQIREFYTRLRNAGKCYKVAITACMRKLLTVLNAMVRDNNTWRKMPMTT

SEQ ID NO: 467040 - protein, 351 aa, unidentified
MLIVGCDYHPSVQQIAWLDTESGECGERRLLHSNGEAETFYRKLKEQGVSVRVGIEATGHARWFERLLAELEYELWVGDPAQIKAKRVRKQKYDQEDARLLLKLMMEDRFPRVWVPGVENRDLRQLLWHRHRLVQMRTRVMNQLQAVALNEGVRRKKALWSDAGRSQLESFRLGPWATRRRQDLLQLLDQLNSSIAPLTASVEQQAGQHPEAQRLMTHPGVGALTALAYVLIIGSPQRFRCGKQIGSYLGLIPCEDSSAGRQRLGHISKQGNSLLRFLLVEAAQAAVRSNADWRREFLHLAMRRQRQIAKVAMARKLGVRLYWMWRKGWDYETFLQFGSHVGQPEVGYGVK

SEQ ID NO: 467041 - protein, 376 aa, unidentified
MSKLLFVGLDVHAETIAVAVAEQGGEVRSVGGIANRLESVRKMVHKLGPVQHLRACYEAGPTGYVLYWQLTQLGVACEVIAPSLVPSKAGDRVKTDRRDAEKLARCHRAGELTAVCVPSAAQEALRDLVRAREAAKKDQLKARHRLGKFLLRHGRQRPEGIKAWTKKHREWIKSHVRFEEAALEVTLADYVEEVDHVATRIVKLEKAIDEAIRQAPPELRAVIEALQALRGVAQTTAASIVSEVGSLSRFPTAPQLMGYSGLVPSEHTSGNRVQRGGLTKTGNGHLRRVLVEAAWAYQHRPNVIGHLARRQKDLAISEEAKQIAWKAQQRLHKRYKAMAARGKNKNQIVAALGRELLGFIWAIGVRTEQQKLAKAA

SEQ ID NO: 467042 - protein, 406 aa, unidentified
MMTAVMIGVDPHKGSHTAVAIGADEVPAGLVRVRACAAQAERLLTWAKSWPERTWAVEGAAGLGHLLAQQLVAAGERVLDVQPKLAARVRLLAAGAVNKNDPNDARSVAIAALRSAACLPVRPDDHAAVLKIWAKRHRDLSRARTQVACRLHAVLCELVPGGLSTEICAAQAAAILDKAEPGGAVQQARLELAAEFTADLRRLDAQLRETRKKLAVAVRASGSTMTEVFGVGPVIAATVIGDVRDVSRFASRDRFAAYNGTAPIEVSSGNRKVHRLSLRGNRRLNHAIHMAAITQIRYKHSDGRAYYDKKIAEGKTPKEALRALKRQISDALYKHLKADAARAAAAGTQGPGGHAGNDSVASAAGSHPERQLFGQATPGPAPTLRPPVHQRKKPTSHARTKTARTT

SEQ ID NO: 467043 - protein, 351 aa, unidentified
MYINESLVQQYSQPKEVPMYYSGIDLHSDNCYITTIDDSGAVVKRQRIENNNDRVLDYFHSLPGPHQAVVESTTGWYWLNDLLTDHDIELILAHAKYLKAISYAKVKTDKIDSQTLALLLRQGLIPRAHKISRELRGLRDTMRIRLRLVQQRTACLLRLYSIHAKFNGDVPDPYRFQIAVLEHTRDTFTDQILALEKSLHPVLIPNDDIQRLLHIPGIGKLTAFTIYLEIDGIERFDSDKRFVSYCRLVPAADNSNRSVHHRSSKDGNKYLKIAFSDAAVHAVQYYPEYKRLFQKLARRANEPTAYAVIAKELAKIVYYVLKNKTPYKGLKGQPISRQKSQQWPRLASPLS

SEQ ID NO: 467044 - protein, 313 aa, unidentified
MFALGFDVAKDHHDVALTNKSGQLKQRWQIANTSSAVSELLTTIHLAHPKLTVGCEATGSYQQSLLQICLKFGIPCRLLNPLTTKQYTKSTIRGRKTDRDDALSIARLVLRGEGNLVTAASLSPARNYVRLATKVQQHIHALRLEQKYLSELTGTPAEDGFSLAIVALEQLTTDLRRQATTHIDPAVYQLLTSLVGIGPAIAVSLSAEIGDIHRFLGPKQLVAYAGLDPRVRQSGTVLNRNTRLTKRGSAELRHSLFLAANIARQHDPQLKAYYQKKRAEGRTYTEATVATARKVCYRVFAVLSRGTPYVKSA

SEQ ID NO: 467045 - protein, 349 aa, unidentified
MEQATTIGLDIAKHVFQLHGADAAGHVLFRKRITRVKLLSFLAAQPRCVVAMEACAGVHYWAREIAKLGHHVRLIAPAYVKPFIKRQKNDAADAEAICEAAQRPSMRFVPVKSEEQQANGIVFRARDLLVRQRTQCVNALRGHLMEYGYVFPKGIPHVETLVALVENPQSSLPDSVRVILKLLVDTFTALEAQIAVLDAEINQRSKSDPTARRLMTIPGVGPITSTAITALVPAAEGFPAGRDFAAWLGLTPLQKSTGGKQKLGAVSKRGERTIRRLLIIGASAVVQQASRRGAPRGSWLAQMLARKPKMLVTVALANKMARIIWALLVKGGTYRTPAWRRRLTTIART

SEQ ID NO: 467046 - protein, 357 aa, unidentified
MNKSKQLDFEGQDIFIGLDTHLKNWMVSIMVNESPFKTFSQDPRPETLRNYLAKNFPNANYHSAYEASFCGFKIHRDLLNLGIKNIVVNPADIPTTDKERKQKEDSRDSRKIAKQLSQKDLTAIYVPEIEIEGDRSFIRYRKTLTKEIARTKHRIKSQLYYFGIEIPTKFSEKSYWSKNFTSWLQEIDLPTESARMTLNGHLEMAEMLRKKQLSTNKEIKKLSEKKIYKENYNLLISVPGIGGLTAMIILTEIGDINRFKNLDKLCSFIGLVPMTNSTGENEKTGDITVRKNKILRKALVESSWIAIRNDPALILAYQKLIKRMESQKAIIRIAKKLVNRILYVLKNKKAYVQAVVK

SEQ ID NO: 467047 - protein, 355 aa, unidentified
MSQEKYIGMDVHQATISVAVMDAAGKLIMECLLETKASTIVEFIQGLQGTLSLTFEEGTSAAWLHDLLKPHVSRLVVCDPRKAALLKEGNKSDRIDARKLAELLRTNQLKPVYHEEHGIRGLKELGRSYLTITKDVTRVMNRIKALYRSWGIPCSGAGVYAPRHRAEWLAKLVEPGVRVRGEHLYQQLDSLQPLRLQARGELLRESHKHPAVKLLRQIPSIGPIRAALLVALLQTPHRFRTKRQLWAYSGFAVETHDSGEYRCVRGKLQRNRERITVRGLNDNHNKDLKNLFKSAAISASTRPGPLRDFYVARVEKGMRPTMARLTLARKIATITLTMWKKGVGFDPQNLYRQAA

SEQ ID NO: 467048 - protein, 334 aa, unidentified
MNYIGLDIHKKNTQACMKNEAGKVLLTGRFPSRPKDLNAFIEKVEEAGGPASFVIESTGFCIPVYDIIAGRGHQIKVAHPLKVKALTAGRAKTDKNDAEMLAELLRLNAIPESYIPPAELRELRALTRFRRSLVRNSTEIKNQIHAFLASRGIETPPEHRSPFSKKHQDWLRSLHLLQIDDLLDIYLLLLTKIEKVEGEIERSNQRKDDVELLKTIPGVGDVIANTLVAEICDIRRFSSPENLFSYAGMVSSIHQSGEKGWAGPITKQGNARIRHIVVEAAYSHVRCSKDSDLTRFFERKESEKGTKKAIVAMARKLLGVIYQMLKKREVYHAH

SEQ ID NO: 467049 - protein, 401 aa, unidentified
MKYIGIDIGKRFHVACILNESVSGNTFEKHIKFDNLFSGYKKFLSYLETNDVKKSESIIGLEATGHYWLTLFQKFKADGFVVYVLNPLQVQSFRNEKIRGSKTDALDCELIAKVLKFGVGKETAMPSEALFQLKQLARFRWDLVQKLSGIKLEMMSVLDTVFPEYETVFKGLFGKTSVALLSEYTMPDEIASLDIEKLTVLLERNSRKKFGRSHAEKIQQAAKETFGLRFGINAFSLELKLLLGQIKHLQKQKVQVEEHITKLVKKQKTTLLTIPGISYVTAGTILGETGGFYKKQDKDPRPLLAFAGLDPVLKQSGQFTGQTKMSKRGSAYLRYALMQAALVAANRDEGFKKIYQRYKGQGKHHRVALSHVAQKLTFVVHSVMRTNKAYIPLLEYNKKKA

SEQ ID NO: 467050 - protein, 403 aa, unidentified
MGFFAGIDWALEEHAICVIDESGRVHSRFQAAHSASGLAEMFTKLRRLAAPTALPIAIERPTGALVDALVQAGHPVVPIHPNAVKAARPRYAAAAGKSDPGDAYLLADLLRTDGHRLHALRPLSDESRALRALVRGRDDLVAHRTALANQLRALLESFWAGAAVIFRDVDSPIALAFLAQFPTPAHASKLGSKRLARFLTRNAYCGRRAPEDLLRRLRSAVVTDTGELEMEAKGDIVRSLVATLETVVIQLQKLTAAVEHAVTEHSDGPMITSFPRIGRVNAGQILAEIGDDRARFSSDDHLAAEAGVAPVTHQSGKHRGVVFRWACNKRLRQALICWADNSRRASPWANGVYEAARARGCDHPHAVRILARAWLRILWRCWMDRAPYDRELHNGARRLAMPA

SEQ ID NO: 467051 - protein, 345 aa, unidentified
MQITTIGLDIAKNVFQVHGIDASEQVVIRKQLRRGQVLGFFKALPPCLVGMEACATAHYWARELTKLGHQVRLMPAKDVKAYVKRNKNDAADAEAICEAVQRPTMRFVLVKTAEQQSRLMLHRTRDLLMRQRTQLINALRAHMAELGIVAAQGREGIGELLRIIASDRDARLPVDAHASLVVLATGVQAMQTMIGSIEKRIVAQHRSDEASKRLRSIPGIGIVGATAIAATIPDPKVFRSGRDFAAWIGLVPRQDSTGGKQKLGPISKQGDQYLRRILVVGAHAILKRARRQPEKYPWVTRLLGRKPFRVVAVALANKMARVAWALLAKGGTYRAPALAVAAQGA

SEQ ID NO: 467052 - protein, 389 aa, unidentified
MKIYVGIDIAKLNHFAAAISSDGEIILEPFKFTNDADGFQLLVSKLESFDKNSIIIGPPSTAHYGDNLVRYLVAEFYQVCVLNPIKTCQMRKNNVRKTKTDKVDTFVIAKTLMMQDDLRFITFFDLDMMDLKALGRFRQKTIKQRTRLKIQLTTYVDQVFPEIQYFFKSGLHQNAVYALLKEAPSPKEIASMHMTHLANLLKVNSHGHFTKEQAKELRVLAQKSVGANDSAISIQITQTIQQIELLDSQLEKIEAEMTDIMKFNDSVIMTIPGIGYINGGMILGEIGDIHRFSNPNKLLAFAGLDPSVYQSGNFQAKTTRMSKRGSRVLRYALVNAAWNVVRNNATFKAYYDAKRTEGRSHYNALGHCAGKLVRVIWKMLTDEVEFNLE

SEQ ID NO: 467053 - protein, 394 aa, unidentified
MRFIGIDIGSEKHFVAIVDEAGKPLRKPTPFAEDDAGYKQLRSLLGDPSDTTLVAMEATGHYWQNLFAFLHTAGFEVALLNPTRTARFAGEDLRRAKTDALDALGIARFAQQKRPAPTPLPDEVTLELRELVRLRDRLVQDLGDRARQVHRTLDLSFPEFTQHVRDVASAKATTLLMACPTGAAFQKADPNVLAELKYDGRHVIGLELAQTLCAAAKITVGRHHGAPYALQMRYACEDIATLRARLKKLDDDIKASLDRHEVGKLLTTIDGIGDNTAARMIASIDFSTFKSAAALAAYVGVAPLVNHSGKRQPLRGPACTMGDAELRAKLWMPTLQAVRRNAWLKPFYERLVAAGKPKKVAIVASMRKLLGAMVSVARTKTPFVPRLAAEAASG

SEQ ID NO: 467054 - protein, 323 aa, unidentified
MSMNPTAPLFNHIVAFEVSKAELVVHTLPADRQERIPNTAARVRRILLREQRANTRLGSGPMLVLCEATGGYEHHVLEQAHELNLNLHRAHGSSTRLFARLVGHKAKTDQIDAAMLAHYGRTQSLALYHPPSPHQQALRALRRRHDDMTTMLRMELNRTEQARSAAIKTSLHRHCRWLQTERDALQAQIDTLIAQSAELEGKASLIQSIKGVGPKTAAAVLAYLPEIGTITKAQAAGLAGLAPYANDSGSAQGKRHIAGGRSPLRASLYMAALVARYRNPKLRAFGLNLKARGKPNKLVLTAIMRKLIVIINAVIASGQPART

SEQ ID NO: 467055 - protein, 388 aa, unidentified
MTEVTTIGLDLAKTIFQVHGVNASGAVTMRRALRRSRVLAFFGKLPPCLVGIEACARAHYWAREIAKLGHDVRLIAPAYAKAYVRRNKNDAADAEAICEAVSRPSMRFVAIKTETQQAAAGVHRVREMLVKQRTMLINTLRGLMAEYGIVVAERPRHVDELVAILADPADERIPAPLHGGLLAIVETLRSLEHRIERIEKQIVSWGRDNATCRHLITIPGYGPILSTAMAAMVVNPAGFTSGRHFAASLGLVPRQDGTGGKVKLGPISKRGNGYLRRLLVSGAMAVLCGKRAKEDPWLAKLLETKERKVVACALANKMARVGWAVMMRQEDFRSRRHDQPCPDLNQPGAVLAAVKTAARACGGGLRPVLTATARGDTGDPGRDGETAR

SEQ ID NO: 467056 - protein, 351 aa, unidentified
MSHTLKAAIAVIGIDIGKNSFHIVGLDQRGAIVLRQKWSRGQVEARFANMPPCLIGMEACVGAHHLSRRLNALGHDARLMPARYVRPYSKGQKNDFRDAEAIAEAVQRPTMKFVATKTANQLDLQALHRVRERLVSQRTGIINQIRAFLLERGIAVRQGQRFLRMELPRILATPPEVLSPRMVQLIEGLASDWRRLDERIEALSGEIADLARRDAGCERLMSIPGIGPLISSAMVAAIGTGDGFSKGRDFAAWLGLVPKQISTGDRTILGKISKRGNRYLRVLFVQAAWVVLAKVKPTRWDGHGLKRWIEAAKKRLHHNVLAIALANKLARIAWSVLARGRAFEASRLQVA

SEQ ID NO: 467057 - protein, 399 aa, unidentified
MTASRLVVIGADTHLDTLHLAALDSTGKPLGDAQFPTRPVGYYVAVKWAQSFGAVHIAGVEGTSSYGAGLTRALQDAGIEVAEVIRADRAARRRQGKSDPLDAYAAARAALAGYGLAVPKDEHTHALRALLIARRGAVKARTAASNQIKAMLITAPAELQERYRRHTPTLLTRALARCRPTTQDDPTAVAVLSGCKALAQRIEFLDRQIKDLTAELDTLVTAINPGLRAAFGVGPDTAAQLMITAGTNPHRLRNQAAFAMLCGAAPIPASSGKTTRHRLSRGGDRAANNALHRIALVRMSNDPRTRAYVTRQLANGRSKKDILRLLKRAIAREMFRLLTQQCDIDSYSDLRPTRQTKNITLTALANHFGVWPTVISRLEHGLQRDDALAHNYRQWLNTA

SEQ ID NO: 467058 - protein, 345 aa, unidentified
MGVDIAKKTFDAVIYEQGTAKASASSYRHFSNDAEGFSGLLSWLTSETGFKTGALVVGMENTGLYGYALCRFLERERVDYCVFNPLALKRSLGLVRGKDDRVDAFRIARFTYQHRDCLRYSRLSGETVRKLKSLATERARLVRQLAANKALPQTTSPRKGEREQVGRALELAALIQTFIDRVEKDMEEAVKADVEVMTNYSLLTSIKGIGPVNAVAAIVSTDNFRAFDNPRQYACYIGVAPFPNTSGTSVRGGQRVSKLAMADIKAKITQAALSAITYDSEMAEYYSRKTGQGKHPSSVLNAVKFKLICRMFAVIRRKGKYISGAGQYRNVCAESKQCNIGLNVY

SEQ ID NO: 467059 - protein, 362 aa, unidentified
MTINAGVDLHKTQFTVFVKQSGNQFEQYSTEEDGYKKFLTRIQRWKKSGMTVRIGVESTGNTRYFKTRMEQAGAEVVVINTLKFKVVNESVKKTDRHDAATIAEFLEKDMLPESRLCSEESEQLRRLLKVRTTLVRTMVTVKNQIHALLTGLGMKDSRATLQSKRGRQKILDALRKADSELVVQPLFETIEQLEKSVKSIESELEKLTEGDRTVELLMTIPGCGKIGAWTIRAFTDDINRFASAKKYSAYAGLVPWVQNSNETVHHGKITKRGPEELRTALVQLVMGMRRCRSTVSWRLMERYTEMKRNKGSGKSIIATARKLSTIIWCMLSTGQEFDPSLMIDRQLIRKADSMRTTASQSA

SEQ ID NO: 467060 - protein, 333 aa, unidentified
MATTVSTPAGARVIGASPCVFFGVDVASSHLDICCYGASAVKRIANTPSAISCWLGSLPCGSTIAMESTGSYHRTLASDAFRAGFAVYLLNPRDVRSYARGLGARGKTDRLDAQVIARYAAHEHAQLRLWQPQPQAQQALDEVLRRRAVLVKCQQQLRMSAAGCPLVLATLEPLMQEFARTLKAFDLQIRAAVAAVDADQQDFECITSVPGIGVLSGAALLGVFRRLATARADAVIAFLGLDPRPMDSGHKVGLRRLSKRGPAEWRRLLFNAAMSGAATKAWKGCYEHERAKGLSRTAALNVMARKMVRVAFSLFKNHQRFDLALVSGRAVNA

SEQ ID NO: 467061 - protein, 364 aa, unidentified
MKEKKAETRYIGIDLGKRTYEMAIVGKGSKVKMSNGKTYTEGRQKLYRKLQPTDKVAIEAGSLAFIMAKEIEAAVGCQVYVLNPYRLSVIYKSMKKTDKEDALKLAHIIEDFQEERLPVVPVPSAKEMERRKILAGYRRVQQSRSREINRLHALFVNQGITTIVRKDLSTDEDRKTAIQILSGLDREEANYLVEILEQHEKRIEVLDKKVKEESKEDEVVQRLQSIPGVGPMVSFAFAAHVEAERFENAGQLSNYLGLVPRVYMSGDTVRYGSITKRGNSYLRALLVQAAWSLTRTKKGGKLKERFEYMTIQRSIGKKKSIVSIARRIAELMYVLMRDGTEYEYRPFIKNGEVVRDITGIKFCA

SEQ ID NO: 467062 - protein, 348 aa, unidentified
MKNKSFVGIDISKNVIDVSIFREDTNIKMFPHEVFNNTRKGFGDMCSWLKKSRVVFSQALFGMEFTGCYSLDLEKFLTSKNYSFCMLSTRIVKHHPMGTIDKRDKNDSAKIADFLYRYDGTECAKPYKLPSKAMQQLKQLVNERKFLVEQRTNFMNRMQMFETKEDSAMYESYIKKLNHDIEKIDQEECELMSKEEDVFDTFQNLLTIPGIGFVNATNIIAITRNFTAFDTARQYARYVGVAPCSHTSGTSVKWRARPSAHCNGQVKADLSMAALRAVEYDVEMQMFYNRKLGGRKDSDTKRKALNAVKFKLICRMFAIGKQKRKWEVLNTSDDRKNLHIEKSKASEL

SEQ ID NO: 467063 - protein, 334 aa, unidentified
MNYIGMDIHKQFTVAVAKDKEGNELAEERFDNHKCNFEKFLKDFNPEETKIVIESSSIWEYIYDLLEEMKYKVKLANPTKTRAIAEARIKTDHVDADTLCDLLRANLIAESYIPTKEIRNLRNIMRQRKAIVKGRTQIKNKIHAVLLMNGIKLPYKTLGKTAMKWIIDEINTTSIKSILVSYINLLEQYDFELEKLEERIIEIAIHNNEAKLLTTIYGIASVRALEIVSEIGDIKRFESYEKFCSYSGLVPRIRQSGNKIIFGRLVKQSSKSLKHVFVETSWNLIRPKENNKFREFYLKLSKKKGKQKAICAVARKLCCTVYAMLTKNQEFMLL

SEQ ID NO: 467064 - protein, 329 aa, unidentified
MVFLGIDVSKGRLDCALLAGEGGRPLGRRAFSNDAGGTERAASWASRVSGAAAADTHVILEATAAYHEPAARQLAALGMRVSVVNPAQVRSFAKGLGILGKTDRIDARLLARYGQLVRPKVWQPPAEAVADLQALVARLDDVEADLRREESRLEQARTRGCPGVVEQSLLESIAALKSRRRSLRSAIAAHTAAHDGLQADLERLLTIPAVGPKTATRMLALLRARGFESARQAAAYLGLVPVERQSGKSVRGRPRLSRAGNPRLRAALYMAAVVGIRRNPDLKAQYERLLKAGKCKMAALGAAMRKLVHLCFGVLKGGGDYRAGVATPA

SEQ ID NO: 467065 - protein, 317 aa, unidentified
MMATSPVFVGIDISKSRLDVVVIPPETSFSMPNEEAAIRKLVARLHKAKPHLILLEATGGYEHLVLAALREAQLPARFINPRQVRDFARSLGILAKTDKIDARVLALFAEKLRPEPRPLPDAAQQELKQLMTRKRQLGKMIQQEQNRLPLSPAPRVQDSIRKVIQALEGQLQALEQEIDDFFRQHPLWVAKEELLRSVPGVGPQTALSLVAWLWELGRLSRREIAALVGVAPFSWDSGAWRGRRSIRGGRPGIRRVLYMATVAALRCNQVIRTFYHRLLQQGKAKKLAIIACMRKLLTILNAMVKNQQPWQTQVLTP

SEQ ID NO: 467066 - protein, 355 aa, unidentified
MTSTKYIGLDVHKESISIAVLNSAGKVVMECVIETKASTILQFIHGLVGDVHLAFEEGTWASWLYDVLKPHVTELVVCNPRKNALLKEGSKSDRIDAHKLAELLYMSKLSSVYHGEHGLRMLKELSRSYLTITKDLGRVMNRLKALYRGWAIPCAGTQVYAPHYRSEWLAKIHEAGVRRRAELYYQQLDALRLVRQQARKELLAEARKHRATKLLRQIPGIGPLRAAHLVALMQTPHRFRTKRQLWNYSGLGLETHDSAQYRVVEGQLQRSKKPVTLRGLNDNHNHDLKDIFKGAAMRASTAAGSLRDFYEALLAKGRKPTMARLTLARKIAAITLIVWKKEVRFDANYLKQQAA

SEQ ID NO: 467067 - protein, 421 aa, unidentified
MTQPSHDTFAAFIGIDWADAKHDLCLQAAGTAKRERFQLEHTPEAIDAWVTTLRTRFNGHPVAVCLELDKGPLVSALRKYDFLVLFPINPLTLARYREAFTPSRAKDDPTDAELQLELLLTHRDKLQPLQPQSPTMRALAQLVEHRRRVVGDKVRITNRLTSTLKNYFPQVLHWFQEKDTRIFCDFLSRWPTLKAAQLARRSTLETFFRDHHVRTADVLATRLHAIKTATPLTTDEGVIAPNTLLVQTLVSQLRVTLDAIEAFDQAIAQRAQHHPDFPLFQALPGAGPVFASRLLVAFGEQRERYASAAARQKYAGIAPVTERSGKKAWVHWRLQCPKFLRQTFVEWTAESMRHSFWAQVSYQQQRDKGNTHQAAVRALAFKWIRILYRCWQERTPYDESTYLQALHRRGSLLIQHRAKAS

SEQ ID NO: 467068 - protein, 411 aa, unidentified
MSHEITWLFVYGSPRVIIFTSEVIFMVFVGIDVAKDKHDLYAVDSDGVVLCDNFTFANSAAGFASFLKQVSPWGKIKVGIEATGHYSSNLLSFLKAHDFEVVVFNPLSVSRLRSAASLRKTKTDKNDSRYIARLLLTGEANPYQSQSYNISVLKSMTRARFRLFQEIQPLKNRFRRLLHVLFPELQGSFSNLYGNTSLNLLSVLPSAKDIAECNILKLTKILSDFSHGRMKRSRAEQLKSLAQNSIAAYNYGDAFELKQTVKRIQFLASQMSEIEREIHSVMAELNSPITSIPGIGNLLGATILSEIGDIKNFDNPDKLLAFAGCEPSTYQSGKYTATNTPMVKHGSRYLRRALYCAADMAYVNSPSFRSYIDRKRAQGKHYFVAMSHGMKKLVRIIFAVLSRNIPFSEPA

SEQ ID NO: 467069 - protein, 339 aa, unidentified
MREYVGIDLHRRRSVVVCLNAEGERLWWRCIDNSPLALAEVIGEAGSEPEVVLEATFGWYWAADVIAEAGGRVHLAHPLGVKGFENRRVKNDLRDATLLADLLRMGRLPESWIPPHSVRELRELVRYRHKLSQLRSGLKSQIHGVLGKEGVIPELRWLWGPGGFEFLNQVQLGEAYGIRVTSLRDLIEVYDREIKGLDGRIHRRLRDDPGYRAIQELTGVGRVFAGVFCAEIGDVSRFSAPNKLCCWAGLTPRLRESDTKTIQGPITKQGSKLVRWAAIEAVARYRGGAPIKDTFWRVAERRGVNRAKVAAARKLLTLVFYGLRDGEIRCLAKDREQAA

SEQ ID NO: 467070 - protein, 375 aa, unidentified
MKEKVRFLGLDVHAETIAVAIAEPDGEVRSLGTIANREESIRKLIKKLGAPEHLRACYEAGPTGYVLYWQLTQLGVECAVVAPTLVPTKAGDRVKTDRRDALKLARSHRSDDLTAIWVPDGDSEALRDLVRTREAAKQDQLRARHRLSKFLLRTGRRPAVGMKAWTEPYMAWVRQVQFERPAQQATLQDYLHEVDHMAARVKRLEQAITEAVKLASPQVQEVVKGLQALRGIAEISAVTIVAELGNIARFDTPRQLMGYSGAVPSEDSSGKRKRQGSITKTGNAHLRRIVVEAAWSYRHRPAIGPRLRKRQEGVPEPIKEIAWKAQVRLSKRYARLAAAGKDQRKIITAVGRELLGFIWAIGVKVEAASKQPMAA

SEQ ID NO: 467071 - protein, 497 aa, unidentified
MVMRVLPFVGRSARRFAFEKSYSDLICAIFSRSGAPNRSQTDGVAAQRVDNYEYMASASSAGGHESLLALSVWINAMHRKRVHKHAFCVRKRHAVLTQIPRRLGRIKFKVHWLVTVCMLCIRVKASLLERLTNVRDFPDVARHWSAKIEVCVHVQSQPRRGSLVSNVTTVGIDLAKNVFSLHGVDARGVVVLRKTVSRARLASFVAQLPASVIGMEACSGAHEWARRFAQHGHTVKLMAPKFVVPYRKSGKNDGNDAAAICEAVSRPSMRFVPVKSVEQQTMLTLHRVRLGFVEERTATINRIRGLLAEFGVVLPQRAMEVRRGAAASLEQLPAAAARALSDLLAHVRVLDERVNEYECELEQHARRDERAQRIQSLSGVGPISASAIVASVADAHEFKNGRQFAAWLGLTPKQYSTGGKTRLGHITAHGDPYLRTLLIMGARSMLQTALRRTDRLARWALGVRARRGYHRACIAVAAKHARIIWAMLAKNEVLQLS

SEQ ID NO: 467072 - protein, 338 aa, unidentified
MSLYCGIDLHANNSYVVVADLDDEVVVGQRFPNDLGGILRALEPYREDLAGVAVESTFNWYWLVDGLRQAGHTVHLVHPLAAQQYQGLKYADDRSDARWLAKMLRLGILPTGWICPPEERAVRDLLRKRMQLGRQRVACRLSLRNLLERTTARRLNSNALKRLSPEDLSSWIEDEHVRLSMETTLAVVQTLEEQIELIEGVVLKEARRGPAFSVLQTIPGVGPILASTIQYETGELGRFAGVGAYASYCRLVRSERLTNQRRKGQGLRKNGNAYLSWAYHEAAHFAMRYQPSARKWYERKQSKTCALVAIRALAHKLARAAYFMMRDQVAYEPSRLFG

SEQ ID NO: 467073 - protein, 407 aa, unidentified
MELAALYKRVIGLDIHQAQITACALIEEPDGSARIEQRQFGAFKRDRRELAEWVASLRPDEVVMESTGIYWKSPYAALEARGIRAKVVNARHVKNVPGRKTDVGDAHWLATLARAGLLRGSFVPPAKLRELRLIARQRQKLVGQLASEKNRLHKVLTDSGVRLGVVVSDLHGHSARAMVKAIIDGQSPNEVLSHASRRLKASREELFDALQGDLTASHRFVLDELMHHIEEIEARIARFDTRLLAELESERNALALLQTIPGVDLIGAAMLLVEIGADMAVFGNPDRLASWVGICPGNNESAGKRQSGRLRKGNLYVRRLLCEFAHAASRTTSVFKSKFQSLLVRRGHKRAIIAIGHKILRTIFFMLQRREHYRDSATDYEALSVQRNAPRWIKSLTKFGFIKPASA

SEQ ID NO: 467074 - protein, 406 aa, unidentified
MYYVGIDVAKEKHYVCVLDENKEIACKPFWIYSDCLGLNELVKRLYELSLTCDDFILAVESTGAFSENIYEYLTDLDFKVMLLNSYQTAKYRDFITMKKVKNDSIDAYIIAELIATGKYKESHISSETYHTLKVLNRLKKSLDDKIKTIKREISTVMAIVNPEINNILPNIFTKTAIAIIKEYPTAIDLQSTTPKKLCKVFRNIKGNNFNEEKAKALIALSKDSIYLGRAKDARSLMITTNINILELIVQEKALLEHEIKILIEDNQDDNFSNGVENLKTIPGVADKTISAILGECGDLTRFDTAKSFIGYLGLYPTQYQSGNSLTIGRLAQRGIPIAKHALYMAAVASVLHNEQLRKIFRDKVSCGKSKKEALIIIAKKIATMIYSMFKHNTKYDPNRVLVSYRK

SEQ ID NO: 467075 - protein, 386 aa, unidentified
MATATMSRIEQDSLPQPTLSLAFELGQNTWKLGFTIGVAQPPRERTIPAGDVARLQQEITRAKQRFGLPEDARVVSCYEAGRDGFWLHRSLVAHGIQNHVIDSASIEVNRRQRRAKTDRLDVRKLLTMLLRHMAGERKVWSVVRVPSVEEEDRRQLHRELTTAKQDRTRVINRIKGLLAGHGVQLALEGDVDAQLDQVHQWDGSPLPSALRTRLKRAWQQVGFLTAHIQTLEAERRALLRRREDPVLDQVRQLFTLRGIGVNSAWLYVMEFFAWRDFQTPKQVGALAGLTPTPYQSGQSRRELGIAKAGNRHIRAMAIEIAWAWRRFQPDSALSQWYERRFGAGSARLRKLGIVALARKLLIALWRFVKTGVLPEGAVLKTAAPGR

SEQ ID NO: 467076 - protein, 412 aa, unidentified
MEYPPETLPAVPPGGVTCGIDWANDDHAVCVVDLAGTVVQRFTAQHTGEGLAGLVRRLRRAAVGEAAIERPDGTVVDTLLEAGFTVVVISPNQLKNLRGRYRSAGKDDRFDAFVLADTLRTDRARLRPLLPDSPATVTLRQACRARKDLVRHRVAVCNQLRAHLKGAFPGAVGLFCDLDSPISLAFLARFDCQDRAGWLSPRRLAAWLKGQGYCGRKDPAVLHARLAAAPRGATGDDGAAKAHITRALLAVLTSLVTQIKALDAQIAEQLALHADQHVFTSLPRSGRVRAARLLAEIGDCRARFPTPESLACLAGVAPSTRQSGKFRAVGFRWAADKQLRDAICDFAGDSIRANPWAADLYRRAIARGHDHPHAVRILARAWLFVIWHCWQAGTPYDPAQHRALQALIKQAA

SEQ ID NO: 467077 - protein, 345 aa, unidentified
MLEKAEVAVVGIDIGKNSFHVVGLSTRGEIAMRQKWSRSQVEVRLANMPPCLIGMEACVGAHHLSRRLKALGHEARLMPAKYVRPYSKGQKNDFRDAEAIAEAVQRPTMKFVATKTVEQLDLQALHRVRERLVSQRTGIINQIRAFLLERGIAVRQGQRFLRAELPDILAAPADVLWPQMARIVEGLAADWRHLDERIDQLSNEINAMARADVNCERLMSVPGIGPIISSAMVAAIGAGDAFSKGRDFGAWLGLVPRQMSTGDRTVLGPISRRGNRYLRVLFVQAAWVVLIRPGSWERYGLKSWIDSARKRLHRNVLAIALANKLARIAWSVLAQGRGFEASAVA

SEQ ID NO: 467078 - protein, 491 aa, unidentified
MDISRGLKVAQLLAGFPDGITLYVDRPFIPREYQCFSWLGTAPSVYLCNLRACWLLHRDESVPIIEGGMEVDTVPVAGIDVSKRFSDLCILSPENQVFSATRIYHDKTSMDRARDLLLKAQAEFGHAPVIVMESTSHYHLVLYQYFTKAGFEVLVINPLQSHALRNMNIRRIKNDRVDAKRLALLYRTTVLRPSLIPQDVVRGLRILCRQRSELLRDSTRYKNHLTALLDQIFPGFDRVFSKVSGKGSLAALSLCPTPQAVLSTELERLAEVISEASRKPKAYGVEKTQKIRDAALHASMIGIVSSGDAAAVATATAMLKAVQQTLDSLEEEIKSLAAKNAEIMKNVELLSSIPGIGFWISMVLVSEIGDFSAFHHPKQLAAYIGLDPSERQSGTFHGTRNKMSKRGSPHARAMLHMAVHNSVYSSKGRPPHNPVLAEYYARKCLSKPIKVAMGAAMHKLCNIIFAVLRNQKPFELRQPELHAASLGIKVA

SEQ ID NO: 467079 - protein, 439 aa, unidentified
MEKTATNQTVETVQTPPQDIVLWMGIDWADQKHCLATCLPNGSQRQLHWVEQKPQALDDFFLRWREKNPNGRIGVVLEQSRGALLYALLKYDFLRLFPINPRCSADFRDALRASGAKDDPCDAELICEFGCKHTEHLRELKLEDPATRQLILLSEQRRDIVDGQTALSNKLSDALKCYYPLALELFAEDIVAPIALAFLKRWPNWSAAKKAKESVLRAFFYAQNCRSEERIQLRLEAIKAAKPLTEDPALIGTMELLVGTLGKRLASVQQSIALYDARIAEVFATHSKRHVFASFPGAGKVLAPRLAAAFGTTEANFPSPTAMLCWSGVAPVKKQSGKTKIVSFRWARPVFLHQTFVEYARNSVKYSDWAQAFFQERVDKGWSKFRIYRALAFKWIRILWCCWKNNEEYNEAKYLQSLQKRGIKTYAGLAVSPTATPCE

SEQ ID NO: 467080 - protein, 340 aa, unidentified
MSEITTVGIDLAKNVLSVHGVDGHGKVVLRKTVTRGKLLELMAQLPACSVGMEACSGAHELARTLTSLGHDARIMAPKFIVPYRKSQKNDGNDAEAICEAVARPNMRFVPIKSAEQQAVLVVHRVRAELVAARVGLINQVRSLLTEFGIVLPQGRFNFRHTIGVALDDARLPVLARQVLNEVNARIRALDEDILAYDRRIEAMVRDSALMQRIVRVCGVGPITASAIVASVGDAKLFKNGRQFAAWLGLVPRQYSTGGRSILGRITKRGDVYLRTLLIHGARSALITLSRRTDRLSRWAAALTQRRGFKKACVAMAAKNARIIWALLAKGEDFRLERAAA

SEQ ID NO: 467081 - protein, 314 aa, unidentified
MSTEYFVGIDVSKDTLDVCVYPTQDTFRVPNSPDGIDELIKRLKPIELRLIVFEATGGYETLAVSTLAAAGLPVVVVNARQIRDFAKSIGRLAKTDSIDASVIARFASAVKPELRPLKDSPSQELTGLVTRRRQIVDMIVAETNRLKAATRRNQRDIQAHIRWLQKRLKQVDDEIKRNIKNGPLWHTRDQILQSAPGVGPATSAMLISCLPELGQLDRKKIACLTGVAPLNRDSGKYKGRRTIWGGRAQVRAALYMSALSAIRFNPIIRQFYQRLREAGKCFKVAIVACMRKLLAILNAMVRNQTMWRQSEINP

SEQ ID NO: 467082 - protein, 406 aa, unidentified
MNYLGIDVSKSTSRYVLLDNDGEKATKPFTLDNNSESFTQLLERLKELKLQPDNLLIGIEATGIWWENIYCFMTEQKFKVIVLNPHQTNKFREALRLKAKTDDIDAYVIAGLLRSGEYAASYIPEETIQILREIVKLRHQLVTNRQSFERQAQALLGLLFPEYEKTAIKNPFSVASLAILKAYPTAKHLAETKPKNIEKIVRHIKGNNFNIKEIQTLIETAQNSIYSGRAKDARGMNLNILLTHVETLHHSIAQLDKRIDDILSPQSPDDALSFPGANLLSIPGVGPKTLAAILSIVGSDGSAYPDGKNFIGYIGFFPQIYESGETRRDNIISKRGPSYIRRALYIAAVACLKHNAEFKSLYDRKVSQGKTAKQALIYVAKKLAHLCLSMLKSGEFYNPSRVFMPA

SEQ ID NO: 467083 - protein, 323 aa, unidentified
MNTLNEKNSTVYAGLDISKASLQLHLQNVHHVLDNHPEGHATLLKKIRAVGGVQIICEATGGYERGVVAALHAATQPVSVLNPARVRHFALAQGQRAKNDPIDSEVLTDYGDALRPEPTPPSEPARAELRALVQWRDQIKEQLARVRQTSEHGLPPYVARQQKKLVAHLEKQMADVEKECQKALARTPQIQEQVRRLEPLDAVGTITALSVLSHLPELGTLNRQEAAALAGLAPWVRQSGPWEGQRHIGGGRAAVRRALYMSAVVLARMKETTLGKYYARLRQAGKPAKVALTAVMRKLLLQMNRVLKEHTLEAQTKTKTQPA

SEQ ID NO: 467084 - protein, 322 aa, unidentified
MSPTHEFDLAAGHAGIDVCKERLDVHLLPKGAAFAVKNDPEGIDALVQRLLEARPELVVLEATGRYERPAATAIAAAGIAVAVVNPRQARDFAKATGRLAKTDKIDAEILARFAAAIEPSPSVLPDQEAQALQAILTRRRQLLLMLVSEKNRLQMAPEAVAKRIAAHIRWLEKELERIDRELDEAVQQSEVWRRNEQLLRSVPGVGPVLARTLLAELPELGTITHKRLSSLVGVAPFNRDSGKMRGKREVWGGRAPVRATLYMGALVATRYNPTLKEFYERLLAAGKPKKVALVACMRKLLSILNAMMRDRANWRCPHVLTP

SEQ ID NO: 467085 - protein, 333 aa, unidentified
MKQEKVAGIDVACKTLALAIRTGEQTGKVRELANTASGHQAVIKALKSAGVQRVCLEATGAYHLDLALALDAAGIALMVINPTAAKRFAQALMTRSKSDAVDAGVLAQFAQTMPFQPWQSPALPALELRACARRLAALVKARTQAKNQLHAASQTTSTPAIVLADLRLTIAQCADQIEQLRAGACALIDADAALHEVFTLLNSVTGIAAASAIQIMGEILVMPADMQAKQWVAQAGLDPRHATSGTSVNKKPHLSKAGNRYLRLALYMPALSAARHEKHVSGYYQHLIVDRGLKPIQAVCAVMRKLLHAIHGMLKARQPFDGSRFYALVETPA

SEQ ID NO: 467086 - protein, 355 aa, unidentified
MNDAKYIGMDVHTATISAAVRDSSGNLVMEATLETKAETILEFVHGLRGSLHVSFEEGTCAAWLHDLLKPHVTEVLVCDSRKNALLRVGNKNDREDARKLSELLFLNKLHPVYHGETGIRTLKELARSYLTITRDLTRVMNRLKAIYRGWGIACAGRQVYAPRYRAEWLAKITEVGVRRRAEIYYQQFDALAALRQEVRRELLAESRKHPAMRLLRQIPSIGPIRAALLIALMQTPHRFRTKRQLWAYCGLALRTYDSGEYHFVGGQLKRSKKAVTIRGLNKNHNHDLKNIFKGAATRAAATAGPLQNFYEARIANGMKPPMARLTLARKIAAITLLVWKKGVRFDAEQLKQQAA

SEQ ID NO: 467087 - protein, 482 aa, unidentified
MKKRNIYQNQSQELLSLFEQAANNAKVMCVPIDYAKKDHVVMFCNGYGDILRKPFSVKNSPQGVDFLTDQVIRSCRQRAISEKHVFFGGEEVGSFADNFVSTLRCQGWLVAGVNAHEAKTQRENLQASNDRLDLMGIAKTLLNRRANCSPAQSGIYLNMRTVVRHRRKLVDITTEVRNRIHAVVDRLFPGFLNESNSGISPFSKSSLWLMQERFSAPQIRRRRRSTLIEALRRLGTRKPECTADTLQQYATQVLKPPQEYVHMLQLSLAQHVKHFCCLQESIGQLEKEIAVNLAQTQGAFLTSVRGIGIVLAAGVSAEIGNPYEQKPLNNLVSYCGIIPRVKQTGGPQGETKTGKVAKRCNRILKDYAVQSASHLGLHGPADLMTDYKRRDASGQHADFGMTRRYLRMAMCLMRTSQIYLPSRLRKAQVQIEQRADYYLMNWPQLRDKWQKLGALETAFKADHPLGQWRKIVQQFYGIKLTL

SEQ ID NO: 467088 - protein, 391 aa, unidentified
MTKPKTKTVNDFSRCLDPLDMDATLIAVIEMSQSSWLVAGIVPGVEREPLKKLAIDEHALLSLMNRWRAEAEKQGHRITRIAVAFEAGHDGFWLARWLAAQGVEAHVIHASSVAVTREHRRAKTDRLDTELLKRAFLGWLRGERGHCKMVAVPTLAQEDAKRPSRERETLVGEASRIITRVKSAFVRLGIRGFNPKLKAAATRLETLRTPEDEPIPPNTLAALKRDLERHQIVKKQIREIEQTRLDVLKQAPEKGPHAMVLLLARVIGVGVETADMLVQEVLSRTMRDRRAVGRYAGLTGSPDESGAKRRDKGLARSGNARVRHGMIQLAWRFLLFQKDSALAQWYRQRTADAPSTRKTLIVALARKLLIALWRLAREGVVPEGVRMRPAA

SEQ ID NO: 467089 - protein, 326 aa, unidentified
MATTDQNSSRPALGIDIAKKTFDAALLQGAKLSVGHFDNDAKGFVKLSRWVDDQGVDRFHACMESTGVYWEPLAVHLHQAQQRVSVINPLRIHGFAKTELARNKTDREDAARIARFCHLHTPYPWQPLPAEKRKLRDLTRHLHAVKKAKHQHSNRLEGTPPEWLLQSMKRIIAHFDEEIKQIWTEIRAHIDRHPDLKRQRELLETIPAFGEITATLLLAELPDIERFTSARQVAAFAGVTPKHRHSVSSVRGRTQMSKMGQARIRCALYMPAIMARTHNPMAKALADRLAERGKCPMVIIGAMMRKLLHIACGVLKSGKPFDAQHA

SEQ ID NO: 467090 - protein, 375 aa, unidentified
MMIVGCDLHTRYQQIAMLDDQTGELTERRLEHEGGQARAFYAGLASPVRVGIEATGYTQWFERMLGELGQELWFGDAAQIRASAVRQQKTDQRDAALILDLLLTNRFPRIWVPSAAERDLRQLLWHRHKLVRMRTMVGNQLHALAMGQGVCRRAKLFTKKGRAELAGLGLGPWASRRREELLRLLDQLDPSIAELDRAVLEQARGRQDAVQLMTHPGIGPVNALAFVVTIGPVRRFRRSKQVVSYLGLNPSEHSSGGRQRLGAISKQGNTLVRWLLLEAAQHAARFDPQLRQDYQRLKIEWGGFGGYDRFFVGVNNANLASVAIYHALVPQFQQMIARHNGDLAAFYVEVKRLAALDKNARTKTLAGSTQSLKLF

SEQ ID NO: 467091 - protein, 347 aa, unidentified
MRFYTKQHPFYCGIDLHARTMYVCILDQAGETLLHRNMPATPEALLKAIAPYREQIVLAAECMFTWYWLADLCADHGIPFVLGHALYMKAIHGGKAKNDKIDSQKMAALLRGGMLPQAYVYPAEMRATRDLLRRRMHLARKRGELLAHVHNTNSQYNLPAISKKIAYKANRDGVAERFADPAVQKSIEVDLALITYYDELLRDLELTIIKTAKHHDAQTLYLLQTVPGIGKILSLVLLYEMHDIDRFPRVQDFASYCRLVKCAKESAGKRSGTSGSKIGNAHLKWAFSEAAVLFLRDNPAGQKLLTRLEKKHSKGKALTILAHKLARAVYYMLKRQTAFDLDTFLQG

SEQ ID NO: 467092 - protein, 327 aa, unidentified
MNLHTLGIDIAKLKFDVCLITTSGKLKHKVLPNTSAGFAQLSAWLTKHEVARAHACMEATGTYGEALAMHLHAAGHRVSVINPAAVKAFAGSRLSRTKTDKVDAALIARFCLAQQPPQWTPPALEVRDLQALVRRLAALIEMRVAEENRLEAGSVVAVVRTSVEEHVAYLKAEIKRTEQLIGTHLKTHPGLRQQHELLESIPGIGETTAALLLAEIVDITQYRNARQVAAYAGLVPRERRSGSSVRGRTRLSKIGNARLRKALYFPAITALRCSEFFQNWAQGLRERGKCKMSVIGAAMRKLIHLAYGVLKTGKAFDPEWGRKAKTA

SEQ ID NO: 467093 - protein, 318 aa, unidentified
MNTKVYIGIDIGKAQIDIAVHPSEKQWSFSNNEPGINEAVKNILEVSPALVVLEATGNLQVSLVAALAIAGITPAVVNPRQVRDFAKATGRLAKTDAIDARVIAHFAAAIHPEPRTLSDDQTQELKDIVARRRQVSDMLTAERNRLGSARKVVRPRIQAHITWLQKELEDIDGNLRRAIQESPIWREKDDLLQSVPGIGPVTSATILTQLPELGTLNRRQIAALVGVAPFNRDSGTMRGKRTIWGGRSHVRAVLYMATMVAARFNPVIRNFYERLCAVGKAKKVALTACMRKLLTILNAMLKHRASWNNNFSKVTVSC

SEQ ID NO: 467094 - protein, 371 aa, unidentified
MKSILSVGMDVHKNSFSLCAYDGYTGEIVSESTFASDVKLVIKFIETLKSRYENDVEIKCGYEAGCLGYSLYKSLTARGVDCVILAPTTMQVSAKNKMVKNDRMDALNIAKNLASGSYKSVYVPDEEDVEIKEYIRMIHDFKKELKRVKQEICAFVLRHGYQYDGKSKWTIRYMNWIRELEMSEIQRETLNEYIAEMENLNDKINRFMNRIDEMYQSERYHEKVSKLRCFKGIETFAAMTIQVETADFERFPSAKAYASYTGLTTGEHSSGDKNNRIGITKQGNTVIRKTLVECAQSLVKGNVYAKKSQGLKSRQKGMDVNIIAYADKATERLKKKYQKLIERNVPRNKAIVAVARELACFIWGMETGNIH

SEQ ID NO: 467095 - protein, 412 aa, unidentified
MKKHSNSAKQCESSPRVSVLQDSREVMSELVAKLAKQLDGERLPVAELQDEARNAARPNLNGLTVGVDLGDQWSSYCILDLSGETLAEGQFATRREEIREFFQGLAISRVVIEVGTHSAWVQEVIAGLGHEVLVANPRMMEGSKRRRRKNDRIDAGKLARLGRVDPKSLYPIRHRSSQVRADLLVLRARDALVASRTELINTVRALVKTMGARLCSCSSEAFSKKAEMEIPTEFRETLQPLMRLIARLNDEIKSYDQKIEQLASKKYKHTQLLRQVTGVGPITALAYVLTLETPLRFANSRDVGPYLGLVPKQEDSGDSQPQLGISKAGDQMLRKLLVGSAQYILGPFGPDTDLRRFGMKLCKRGGKNAKKREVVAVARKLAVLLHRLWVSGEVYVPLGHASFARTAQAVAA

SEQ ID NO: 467096 - protein, 317 aa, unidentified
MTPTTPSVYIGIDVAKATLQMHLQGRQSELENTPAAHRKLGAQLHALPGAHVVCEATGGYEQRLVQALQEAQVRVSVVNPGQVRAAAQAKGQRAKSDPIDAAQLTDYGQRYQPQPTPPVSAVQRELIQLTNWLKQLIDTRARAKVQSEHLDNSYVLKKHSLLIDFYDKQINDVETQIGQLMAQDPQLKARLECLDAIAGVGFRTAVVVLAHMPELGTLSRQAAGALAGLAPYDRDSGTIRGARCIAGGRAEIRQALYMACLNSIRNNPVLAAFFKQLTARGKPGKVALTAVMRKLVVYMNSLLKALPPVPTGTATKS

SEQ ID NO: 467097 - protein, 326 aa, unidentified
MKKINENKFVGIDISKKTFDVYCLDAKGQAIQCQLPQSSKGYRTLAGLINPDAICVMEATSTYHLPLAQWLYDHGIRVVVENPLKIKRFSQMHLQRHKTDKADAKMIYEYGTIILTKSIALWNPQSTRIQELQQCDSLSQRLNKELTALTNTHEALAQLSVVNAEVTRIVNSTIKQLKNALKQLDKQMQTLIKEHYCENYKLLMSIPGVGSKTSVMLICQTDNFTKFDNVKKFLSYIGMSPRTYESGTSVKGKGHISKVGNGRLRSLLYMCSWTAKRTNPQCVAVYEKMHSKGKPEKVIKIAIAHKLLRQVFGVIKHQQPFSTELA

SEQ ID NO: 467098 - protein, 490 aa, unidentified
MSQRKRPGTNAKASKAKPTKAKAIPQSTMRAPHDKPVVMTVLNVHAAGIDVHSDMHMVCVPADRVVPDGAVATEGMPANVRKFGANSCDLNAIADWLAACGVTTVAMESTGVYWIPLFELLEARGFEVYLVEPGQLAHCGARPKTDVLDVQWIQRLHTYGLLRPSFRPPEWILALRGYHRQRQMQVRYAASHVQHMQKALEQMNVKLSEVLADITGLTGRRIIEAILRGERDPLRLAALRDIQCHNDMATIAKALEGTWRVEHLFALKQAYDLYQFHHKQMAECDQRIEAELAKMPNRAADKPFVSKPRKGGRKPNNLTFAAGEPLFKALGVDLTEIEGIDVATALVILAEIGVDVSRFPTEKHFASWLGVSPRQYESNKTKRKRGPRKGKNRIAIALRMAAQGLAKTKSPLARFYKRIKSRIGGKGAITATAHKLACLVYRMLKYGREYVQQSMEAYERKIKEQLERSLRRKAAALGYELVAKPAPVPA

SEQ ID NO: 467099 - protein, 387 aa, unidentified
MPQPNDLSRSLVAFDQNSTIIAVVEMSHSSWLVGGMLPGIERQPRKKLEPSPERLLALLHRWRDEAVRAGRTITRIALAFEAGRDGFWLARWLAARGIEAHVIHASSVAVSREHRRAKTDRLDTELLKRGFLGWLRGERGHCSMARVPTLAEEDAKRPNRERDCLVGERTRIVNRIKSTLVRLGIRNFKPTLRKAAERLATVHTPEGTPLPPNTLAELQRDMARLGFVISQIREIEEARQKRLEQQHETGAHDMVGQLARIVGVGVETADLLVHELLSRPMRDRRAVARYAGLTGSPDESGARRREQGLARAGNARVRRSMIQLAWRFLMFQKESALALWYRARTADSRSGTRKTMIVALARKLIIALWRFVTTGEPLEGVVLRPAS

SEQ ID NO: 467100 - protein, 347 aa, unidentified
MRFYTQQHKHYCGIDLHARKMYVCIISNRGKVKVHKNIKTDPELFFELIFAYLDDLIVGVECVFCWYWLADFCAQHHIPFLLGHALYMKAIHGGKTKNDRIDSYKIASLLKGGNFPMAYSYPAKWRATRDLLRRRMYLSRRCSELVAHIQNTNTQYNLPAFKKKLSRKYNHDGVAERFKNPAVRKSVEVDLAVIQSLNQILKKLEWHIEKTARQHDYHTLYLLRSIPGIGQILALVILYEIHDIKRFPSVQDFSSYARLIKPVKESDGKWAGHTNKKIGNHHLKWAIKEAAILMLRDSHQAKYYVSKLTHRYNKGKALGIFTHKLGRAIFFMLKNKEAFDMKRFFAR

SEQ ID NO: 467101 - protein, 526 aa, unidentified
MAAHAQSQQHPYDEGMYSSDNLKNVTLDDGTRVVTSPQTNIKRPVCAGIDVHKSILMAAVCVTDKETLKAVFYVRQFTSANSDIRRMAEWLTGYGVRDVCMESTGKYWIPVYDILEQNGLHPTLTHPKYVKQAKGHKTDFRDAIHIANLFRMDLVVASFIPPADIRDLRELCRYRLKLTYTRTSEKNRYQNSMTISKVRLDSVFTDPFGKSATDIMSYLVRTDPENVSDDKILGFVRKGCKASSEEILDSIHGYEFLGVQRDKLQIISIHLEDINKCIAMIDQKLEYFRLKYSKVIQHLTTMVGISVESALYILGEIGTDMSVWRDSASLSSWAGLSPANNASARKNKSTKIGKGGHYLKPLLVQCALAAIKSTKKHPYFYNKYISLKKRRGHKKAIIAIARKMLVSIYHMIREDKDFQPIDYDKVVNRKQSPKELNLQNIIEFLGERGVDTNTIRIVEKQCSQGTMDQKKAATSAADKKEQKKKQPNHITEDTATKQKPAKRRGRPPKSRQTKAQPLAQPTDTTA

SEQ ID NO: 467102 - protein, 364 aa, unidentified
MEQITRGECGRVVVRVGVDLAKRVIQVHAVDAAGRLVTGRALARDRFIAWCAQLPGGCVVAMEASSSAHHWARKLCSLGLDARIIAAHLVKPYRKQGSSGKNDANDAAAICEAASRPSMHFVPIKSVEQQSMLCVHRLREGIKEERTACINRIRGLLAEFGLVFAQSPKVLRLALADTIEDASNEMGTLTRLTLQRAHAQWRELDEHLAWCDERIAEHTRTNEQVKTATTLLGVGPLTASAVVATVGDFRQFRNAAQFGAWIGLTPKQHSSGGKTRLGKITKRGDTYLRTLLIQAAKSAVLTAHRRSDRISNWLCTLRERSGWQIAAVALANKNARILWALMTKGEAFDANHLSIKPGMSSQQT

SEQ ID NO: 467103 - protein, 392 aa, unidentified
MRFIGIDIGSEQHVFAVVDEAGEVAVRPRRFEEAAAGYERLFEQLGPAEGSLVAMEATGHYWKNLFVVLASRGFEIALLNPLRTRRFAQEDLERTKTDAIDALGIARFAAQKRPAPTRLPDAATDELRELVRLRERLVQQFGDHVRQLHRLVDLGFPEFTRLVRTLDSELATALLREFPTAAAFAHVKPARVGRLRYDGHHQVGEQLAAALVETAKVSVGQHHGEAYRVQVRYLCEDLDTLRGRLRTLEGDIERKLEDHQVGKLLTTIDGIGPITAARIIAELGDPAEYRDGNAIAAYVGVVPGLKQSGKRTSMRAGLSPIGNARLRRALWMPTLTAVQRNPWLRAYYERLRARGKPAKVALIASMRKLLLAVHSVARTRQPFIPHIAEVTA

SEQ ID NO: 467104 - protein, 352 aa, unidentified
MSQKLDTSPAVIGIDIGKNSFHIVGQNQRGAIVLRQKWSRGQVEARLANLPRCRIGMEACVGAHHLSRTLKALGHDARLMPAKYVRPYSKGQKNDYRDAEAIAEAVQRPTMKFVATKTADQLDLQALHRVRERFVGQRTGIINQIRAFLLERGIAVRQGLRFLRAELPGILATRGDALSPRMLRLLEDLSADWRRLDARIEGLSSEIEALARQDKGCERLMTVPGIGPIISSAMVAAIGTGDAFSKGRDFGAWLGLVPKQLSTGDRTILGSISRRGNRYLRSLFVQAAWVVLVKVGPRHWDRYGLKAWIEAAKRRLHHNVLAIALANKLARIAWAVLHKGCAFEGIKTNEAA

SEQ ID NO: 467105 - protein, 343 aa, unidentified
MSIMILGIDLGKNSCCVVGVDATGAIVTSRTMRRQTLIDYVTKLPACIVAMEACCGAHHLGRLFTGRGHEVRLMSPEYVRPYIKAQKNDDRDAEGIAEAASRPTMRFVDLKSQEQLDIQTLHRVRSRLVAERTNLINQLRAILLERGVIFPAGRRKLELGVDSMLAEDVKLLSSRVQQLVRELRAEWQELDTKIGALNTELTQLARNDAATRRLTTIPGIGVLNATALVAAVGNASSFAKARDLGAWLGLVPRQYSTGGKPRLLGISKRGNTYLRTLLIHGARASLPSLSKSDTPTGRWLKAMMERGVHRNVMVVALANKLARIAWAVLRKETGFDRSCPAVA

SEQ ID NO: 467106 - protein, 402 aa, unidentified
MNAVGIDVSKSKSMVAIMRPFGEIVSTPFEIKHTASDIRSLVELINSVEGESRIVMEHTGRYYEVLAHQLSEANLFVSAINPKLIKDFDNDSLRKVKSDKADSVKIARYALDKWHNLKQYNVMDELRNQLKTMNRQFGFYMKHKTAMKNNLIGILDQTYPGVNTYFDSPARSDGSQKWVDFASTYWHVDCVRKMSLNAFIDHYQNWCKRKKYNFSQSKAEEIYGKAKELVPVLPKDAITKLIIKQAVDQLNSASTTVESLRTLMNETASKLPEYPVVMAMKGVGTSLGPQLMAEIGDVSRFTHKSAITAFAGVDPGVNESGTYEQKSVPTSKRGSSDLRKTLFQVMDVLIKTHPQDDPVYQFLDKKRAQGKPYYVYMTAGANKFLRIYYGRVKEYLSSLPES

SEQ ID NO: 467107 - protein, 326 aa, unidentified
MAVIGIDISKQKFDCLWLRDVRSLKVKTKVFANRPTGFAALIDWCCAQTGETVEQLQVFLEATGVYHEPLALYLHDQGVQVFVLNPARVREYARSLGIQGKTDKQDSLVLARYGATQPVRPWTPERREVRELKALIARHEALQNDLQREHNRREKATVSGSLGVLASIDNVVKALQQEAERVRQDIDDHIDRHDNLKRDRALLQSIDGIGEVLSRHLLSLLHSRDFSSARQCTAFVGLVPLPWQSGKTVEAPTRLSKAGPPCLRAKLYMGAVVAKGCNPDVKALYERLLARGKPRMSALGAAMRKLLQIAYGVLKTQRPYQPRQAL

SEQ ID NO: 467108 - protein, 347 aa, unidentified
MLALHQDRGVVIGVDTHNDTHTAAAVGATGAVLEHLTVPADPAGYRQLIAFGRRHDATLWAIEGTGSFGAGLTTALLSRCERIVEVDRPQRPARRGGVKSDEIDAVRAARQALAGVGLSEPRRRGDREAIRVLLATRAQAVTFRTRAISALHALVTGAPDGLRERLRTLPLGQLLHTCAGLRDSSRRSVEESATVLAMRSTARRALACQREAAELEVQLDRLVRRLAPELLDQLGIGPVVAGQVITSWSHHGRIRSEAAFAKLGGAAPIEASSGTITRHRLNRSGDRQLNRALHTIVLVRMRQDSATKDYVQRRLAQGKTIRDIKRCLKRYVARQLFRQLETLTLTT

SEQ ID NO: 467109 - protein, 355 aa, unidentified
MLNTKYIGMDIHKETISIAVLSAGGKSVMECVIETKASTILQFIQGLRGDFHVTFEEGTWAAWLYDLLKPHVTEVLVCDPRKNALLKEGSKSDKIDARKLAELLRLNHLKPVYHGEHGVRTLKELARSYLTITQDLTRVRNRLKALYRSWAIPCSGRQVYAPRHRSEWLGKISEAGVRRRAEHYYQQLDALRPLRQEVRRDLLTESQKHKAWKLLRQIPGIGAIRAALLIALMQTPHRFRTKRQLWTYSGLGLETHDSAQYCVVEGQLRRSKKPLMLRGLNQNHNHDLKAIFKGAALEASSGVGPFHDFYEALLAKGRKPTMARLTLARKIAAITLIVWKKEVSFDAKHLKQQAA

SEQ ID NO: 467110 - protein, 478 aa, unidentified
MTLEGNVQPENPPTAKFSKQLDIINPHCAGLDLHKDIIWACTAPFRDGIAPEVVTFPTHTEGLQQLVSHLKTRRVTTVAMESTGVYWLMPYLTLLDADLAPCLVNPSDVKNIKGRPKSDRADSVWICRLHTYGLLRASFIAPPKILNLRNLCSTREKLIVEAGSAIQRMNNELVKMNLRLDGVLTDIGGKSGMLVMEAIIRGERSPDALYALLASQIKDRGKEKIIPLLTGRYDEFSIFSLETWYSLHKSIQQNIERVNEKIYQLLQSLPKKASASNLPPVKKNYREDYLNFPHPLRPIFYEIFGHDLTQLPGVGADLLLTLVSTVGTDLSAWPDSKHFTSWLGLAPVNRESAGYRKSGKTKRTSNPLANAFKMAAMSAARTQTYLGENARRLRIRITPKKAKVATARKLAEIVFNIIRHDMPMHVKTMEEYEMRRKKREIQHFVKSLNKFSKDGELMPEVLEEIQRQNTNFTTTVAI

SEQ ID NO: 467111 - protein, 375 aa, unidentified
MNYNTVYVGMDVHKKSFSLCCYTNEKEQAEYPQKTAPHYSKVLNYLEAMRFHYGDDVLFICGYEAGCLGYTLYHELMDHNVKCILLAPTTIPQPTSRKKVKTDKRDAALIARCLAHHDYSPVHIPSEKDEQVKEYIRMRNDHKIALKKVKQQISAFCLRHGYRYDATVNQWTQAHLKWLRALKPEGLYLDILMEYLSTYDQLTDKIERMDRRIEELAGEPQYREGVKKLSCFLGIKIQTALSTMVEVGDFKRFSSAQRFAAYLGLVPGERSSSESQNRLGITKAGNSHIRTLLVEAAQSYTRGRVGFKSKALKERQYGNPADVIAYADKANERFRRKYYTMVLTKGKKVNVVKTAIARELACFIWGMMVGNLTER

SEQ ID NO: 467112 - protein, 359 aa, unidentified
MDAHKKDLFIAMLVGDHTTPVTWQLANEPKAVRRLVRKFERDAPGPVRVFYEAGPCGYALQRQVTTSRVSCDVVAPALIPRKPGERVKTNRRDARKLAELGRAGVLTAVQPPTPEDEAVRDLARARDDAREDLQRCRHRLGKLLLRRGLHHHGRNWTRAHREWIRSITWIHAAERTVVDDYLLAIDHTEARLLELDARLSEIAEREPYRGPVGWLRCFRGIDTLTAMLILAELHDFRRFASAPALMAYLGLVPGEDSSGEKHRRGRITRTGNALVRRLLVETAWHYQHRPSVGVALARRRKGQPGRVIAIADKAQQRLCRRFRRLAEHHKPAPKIAVAIARELAGFLWAALQPAPVAVK

SEQ ID NO: 467113 - protein, 358 aa, unidentified
MTRMTQSAPLDQGNPDIVLGVDTHKDVHVAAVVTAAGVFVESRSFPTTAQGYDQLLDWARTLGHLSQAGVECTGSYGAALSRYLHGQGITVFEVNQPDKATRRRRGKSDIVDAESAARAVITGRATATAKAGDGPVEMLRLFKMAKASAIKSRAQAINQLKAVLVATDPELRESLAGLSNPKLIRACSGLDSSASGTAGAAVPTLKLLARRIQHLTEEIEDLTTRIRDVITQHNPKLLGCYGVGPDTAATLLIAAGDNPERLRSEASFAALCGVSPVEASSGKTQRRRLNRGGNRQANSALYTIVLARLRWDTRTRGYIDRRVSEGKTRREALRCLKRYVAREIHRLITRTTTHVLAA

SEQ ID NO: 467114 - protein, 360 aa, unidentified
MQAQRKELNFEGQNIYVGMDVHLKSWTVCIMTEHLEHKMFTQPPQAEALYKYLTRNFPGATYHSVYESGFCGFWAHRRLKALGINSIVTNAADVPTGQKERIQKDDSVDSRKLARSLRSGDLEAIYVPEESTLEERSLLRMQSTLVKDMTRFKQRIKSFLYFFGIPYPERFSKSKSHWSKNFLNWLKEEVLLCEESGNQTLNLMIKEVEEQRELLLLVLRQIKQLTDKDKYSSNVKLLKTVPGIGLLTAMHILTEMETVERFENTDHFAAYVGLVPNRHNSGDVKNDGEMTFRGQAMLKKCIVESSWIAARKDPALSFAYNVYVARMNPNKAIVRIARKLLNRIYFVLKNKKEYVVCIVK

SEQ ID NO: 467115 - protein, 384 aa, unidentified
MEQSIIYVGLDVHKDTIAVALAEAGERARERGLRGEVREHGKIPNTPAALKALSVKLAGKNRALRFCYEAGPCGYGIQRHLSAIGHECAVVAPSLIPRKPGDRIKTDRRDAINLAKLHRAGELTPVWVPDPAHEAIRDLVRARQAAVRTLRQARQQLSGFLLRHGHHYHRPAWTLLHRRWLATLKFDQANHHIVLEDCIAAIEAATARRDRLEAHIEAALPEWSLAPVVQALQALRGVGLVAAATLMAELGDITRFSNPRQLMAYLGLVPSEHSSGRTRRQGGITKAGNGAARRMLIEAAWSYRFPARISREQLLRQERLAQPIRDIAWKAQERLCRRYRKLARAGKLPTVITAAIARELVGFIWSIAKQVQSTAGQRQDEVSK

SEQ ID NO: 467116 - protein, 425 aa, unidentified
MFAESSDDEQIIQRVAALDIGKAEIVCCVRLPGPDGQRRVQEVSTHSTMVPSLCELANRLVGLGVQRVVMEASSDYWRPPFYLFEAHGLEPWLVNAKDVKHLPGRPKTDRLDAVWLCKVAERQMLRPSFVPPGEIRRLRDLTRYRIDLVNVRTAEKNRVDKLLEDACLKLSVVASDIFGVSGRAMMAALIAGERDPRKLAELARARMRVKIPQLVEAFAGLKLGTFDDHHRFLLSRMLARIDAVNTDIAAVDIQIEDHLAPFADAAARLEQIPGIGPTAAAVIIAEIGIDMTRFPTPAHLASWAKFAPGINSSAGKTKGNGTTGHGNRYLARTLGEAVVCIGRTNTFLGARYRRLARRRGKKKAIVAVGRSLLMIIWHLLADPEADFRELGADHYDHHVNTHAKQRNYVRQLEALGYRVTLEPAA

SEQ ID NO: 467117 - protein, 340 aa, unidentified
MNATTYGLDIAKQVFQMYWVDAQTGEIANRRFRRDELISFLALRPGGRVALEACGSAHWWARKIKALGHEVVLLHPKFIRPFVQTNKTDAADARAIWTAVHQPGMRSVAAKTEDQQAMLALHRMRSLLIKFRTMQVNQIRGLLYEFGMSFRAGRVAGLTEIRARMAELEDALPPAMISSLQDQLKRIDAIEQDIDQLEKKICAWHKQEAACRAIAEVPGIGKLTATALVATIGDVKMFRSGREFASFLGLVPRQTGTGGKIRLGSISRRGDPYLRTLLIHGARSVMSRAKVPTAWQKAIQARRPANVAAVALANKMARTAWAILAHGSTYDKHYVSERPA

SEQ ID NO: 467118 - protein, 345 aa, unidentified
MEVLIGVDPHKAAHAVAAIDESGELLEQATFSSGRHGLRALLRWAKRFEQRRWAIEGAGGLGRTLAQYLVEGGESVVDVPAKLSARVRVLSTGGGRKNDLLDAVYTAVAAHQSKRLRRVDEEDLVAVLRMLTERRDDLVKARTRAMNHLHALLRDLLPGGMARKVSTARAAEILRRVRPRSTAGRARKRLASELLGDLRRLDRQLDGLDGRIAEAVEETSTSLVEIYGLGPVLAAKILGRVGDVSRFPTKGHFASHAGAAPVEASSGEVVRHRLSRGGDRQLNYALHMIAICQIAQDTRGCAYYRRKKAEGKSGKEALRCLKRRICDAVFQKLRSDLRATSTAAA

SEQ ID NO: 467119 - protein, 417 aa, unidentified
MEVVHARCAGIDVSKRDAKVCIRIAGAGRRGGARETVTTWGSVTGQVLALRDHLLDQRVTCVVMEATGDYWKPFYYLLEDASFEVLLVNARHVKNLPGRKTDVSDAAWLAQLGAHGLVRGSFVPPEPIRQLRDLTRTRTALTRVRAQEIQRLEKLLEDAGIKLSAVATDISGVSGRAMLEALIAGERDPATLAELAKRRLRHKIPELTEALTGRFGEHHAFLARTHLDLIDAHTRALAGLTDRIEAALEPFRPVRDLLVTVPGISTGVADVIIAETGADMTRFSTPEHLASWAGTCPGSNESAGRIKSTKTRPANPYLKGALGVAALSAVRARNTYLAAKYRRIAVRRGPQKALVAVEHCMLTAIWHMLTNGVPYAELGGDFYIRHNPDKIKSRAIEQLRQLGYAVTLGPLPSAVPG

SEQ ID NO: 467120 - protein, 309 aa, unidentified
MVEHTLFLGLDVHKKTISVATVEDRAGAEVRFYGTIENTPDALRKLSKKLSHAGQHLHACYEAGPCGYNVQRHLTRLGHRCDVVAPSLIPRKSGERVKTDRRDAMMLAQTLRAGQLTEVWVPDQAHEAMRDLVRLRSQAMRDLRKTRQHLLSFLLRHERLSPYGHWTKMHRRWLGELKFAHPAQHLALEEMLQRIQRAEELCDRLKQAIGELVPQWSLAPVVQALQALRGVSLITAAVLVAEIGNFQRFDSPRQLMAYLGLNPSEHSSGATVRRGAITKTGNGLARTSLVEAAWTYRFPARSPRSSAIG

SEQ ID NO: 467121 - protein, 349 aa, unidentified
MKGSAVTCTTFGVDIGKSLFHVCGCDDSGKPVLRKKLNRKTVIEFFVNAPEAVVGMEACPGSQWLARKLIAQGHDARIMAAQFVKPYLKNQKNDANDAEAIAEAVQRPTMRFVGVKHLDQVDTQALHRVRDRLVRQQTQIISQTRALCLEYGITIPTGVPAFWRDMPRILEDADNDLTPRMRRLVATLWDDVRHVQKRLKVMSDEIKSIAAHDETARRLMSIPGIGALSATAIVSAVSNPADFKRGRDLAAWIGLVPRQHSTGGQPKLLGISKRGNPYLRKLLIHGARAVKLHLNREKDRLGPWLNNAEQRMHPNKVTVALANKIARVAWVILTTPGETYDKGAINSIA

SEQ ID NO: 467122 - protein, 345 aa, unidentified
MRSMTYVGLDVHKKTIAYCVKTRGGKLIGEGEIRATRPDLDAWSSRLRRPWTGAMEATLFTGWIYDHLKPKAASLKVAHPAMLKAIAASKKKNDRVDASKIADLLRCDLLPECHMASREIRQQRRVLRYRNLIVSEATRMKNKIAGLLMECGVPYSKERLHGKGYFGDLLAGLGQEAPPSVKQLLALSRSNLELFDGLQKGLIKKLAEDQPLRERMERLRRIKGVGEILALTWILEVGDPWRFSRIGQAISYCGLCSAQDSSAGQEKRGPISKQRNKHLQRILIEAAKLAPRYNEQLAVVHRRELARGNRNRATLAVARKLVAYLLAADKSQQPFEPRTAEEQKP

SEQ ID NO: 467123 - protein, 318 aa, unidentified
MNNQKTTTTHQNTQTLIAIDVSKDSLEVKTQSSSFSLENSQRGFKALLRKVSPKTALLVVFEATGGYERALAEFLHKRQIALSIINPRLLRAFAISEGIKAKTDPIDAEMIYRFARSKALRITAAPSADQRELSDLLDRRNHLSEFIAREHNRIHKALSKTMLASLRRSIKALEKEMALIEKLIRALVKASPQLTKHCRIITAVKGLGDISAWTLLAQLPEISSLSRNQLVALAGVAPFNNDSGKFSGKRSIYGGRAKIRRVLFMAAKSAARFNPVIRPYVEGLLVRGKPYKCAITAAIRKLLIHVHSLLKNSELSPC

SEQ ID NO: 467124 - protein, 419 aa, unidentified
MTASMTQHFVAYVGIDWADTKHDICVQAGDGNHREFDCIPHKVDRIDEWAKALHQRLGGPIAVAVELAKGPIVSALLKYDFLVLFPINPSTLARYRLAFKPSRAKDDPSDAELALDMLLRHPEQFTALKPQSVAMRSLLSLIEQRRDLVNDKTRFTNRLSSTLKQYYPQALEWFEQRDTLLFCDFLARWPTLLSAKRARKTTLEAFFYSHNGRRAALIQTRVASIRAASALTDDAGIIEPCRLHVLALVEQLRTVLMVIDRFDTEIERVASALPDYALFHSLPGAGQHLAPRLLAAFGEQRERFHGADELQKYSGIAPVTERSGKKSWVHWRWQCPTFLRQTFVEWAGQTINKSFWAGAYYRQQRAKGSSYQAAVRALAFKWIRILYRCWQTRTPYDETTYLNALRKRGSPLLKTLDLS

SEQ ID NO: 467125 - protein, 344 aa, unidentified
MEHYAGIDVSLEYSSVCVVDASGKIVREGKVASEPDALIGWLGSLGYEQSRIGLEAGPLSQWLFAAMRKAGLAVELLETRHVHKAFEAMPVKSDRNDARGIAQLMRLGWFRPVHCKSIAAQEIRAMLTARKLVQSKLLDIENSLRGILRGFGLKVGKIAPTNFAGRIEALVKGHPNLQTIGEALLRARAVLLAEFNGFEKRVRAMSRLHAQAKLLMSTPAVGPIISLTFACAIDDPTRFTSSKQAGPHFGLTPKKYQSGETDYTGRISKLGDAPAREALYEAAHIMLTKPIKGCSALKSWAVRIARRAGMNKAKVALARKLAVIMLRMLKDNLPFNPAAKPAAA

SEQ ID NO: 467126 - protein, 340 aa, unidentified
MALYAGMDLHSRNTFVGVIDRNFQRVFEKRVPNDLSLIIGRLEPFGSELEGIVIESTCNWYWLVDGLMDAGFSKVHLANPAAIKQYDGLKHTDDRHDAFWLAHLLALDILPEGYIYPKEDRPVRDLLRKRSFLVKHRTAHILSLQSMLEREKGYKLSGNEIKTLQAEDIARILSEEHLVLSAQANRASIEFFGHHIKRIEKVVRNRVKLRTSFECLLTVPGIGDILALTIMLEVGDRARFARVGNFSSYARCVSSQRLSDGKKTGQGNRKNGNRYLAWAFVEASHHARRYNERFRSYYQRECAKTNQAVATKAVCNKLARACYYIIRDQVPFREEALFCS

SEQ ID NO: 467127 - protein, 367 aa, unidentified
MKKVSTAVVRQSRNICPPKLTIGLDLGDRNSWYCVLNEAGQIQLEQGVRTNAKALREVFGKMPRSRIALETGTHSPWISRLLSELGHEVIVAHARKVRLIGESRKKDDRLDAQTLARLARIDPELLSPVKHRSAQAQADLTVVRARAGLVRARTALVNTARSLAKSYGGRLRGCNVRNMNPEKAEGLSPELQSALEPLLAEIESLSERISEYNDRIDALAQHSYPQVALLKQIKGVGTLIALTFLLTLEDPHRFRKSRDVGCYLGLQPGRRNSGQSEPQMHISKEGDPYLRTLLVQGAQHILGPFGVDCDLRRWGLKLAERGGKSGKKRAIIATARKLAVLLHHLWVSGEVYEPLHNSSRTTFAAAA

SEQ ID NO: 467128 - protein, 369 aa, unidentified
MEQNTTVIGLDVSKKTLVTGVLPPDMERVTESKGIPNDPQAIKREVQRLAAKGPLIFVYEAGPCGYEIYRQIARMGYRCAIVAPGLIPTRPTDRVKTDRRDAEKLARLYRAGELTEIRIPTCEEEAARDLVRAREDVLADRLRARHRLSKFLLRQGRVFGPAKAWGVVHRIWLKAQRFEWKPLQQTFEACVRSCEEAQARLDTLGSQVEDLAQREPYRTPVRYLRCLKGVDTLSALTIVVEVQDFQRFETAAAFMSFTGLVGSEHSSGDKIWRGSITKAGNAHLRRVLVESAWCNRHGQVVSRELALRRRGCPAPVLQIARRAQDRLHRKYWRLTSRGKLHSVTITAVARELAGFVWAIGRQVPCRVAA

SEQ ID NO: 467129 - protein, 349 aa, unidentified
MIIIGCDFHSRSQQIAMLDTETGEVVERRLEHENGEGKRFYEGLKEPALVGIESTGYALWFAELLAELGHELVVGEAAKIRAKEPRKQKHDRRDAQLILDLLVRGDFPQIWLPRAEERDVRVLLEHRHQLVALRTRAKNGLQALALNYGLRRRSRLWSAAGQEELQKLPLREGMARRREDLSRLLQQLGAWIKQLDQRIEEEVRRREDAQRLMTHPGVGPLTALGTVLVLGPVERFPDAKHVASYVGLIPREDSSGGRQRFGHLTKQGNRLLRFLLVEAAQIASRYDPGLRRVYRRLAFRKGLPSAKAAVARKLAIRLYIMLRDQIDYAEFCRRGSHAGMLANEPMVCK

SEQ ID NO: 467130 - protein, 415 aa, unidentified
MALKIVYKICCGIDVHKTFVVACIASTDNKGITSYESHRFSTYTSGLKDLLQWLLTRNCKDVCMESTGKYWIPVYNILESDCSIVLAHPKYVKAIRGKKTDKKDAKWIADLFKHDLVAGSFMPPADIRQLRDLMRYRFKLTCFKSSEKNRLQNCLTVSNIQLGNVVSDTFGKSAQAILDKLLENPADTSFDLEPLVYKSLKKKLPELRDAIDGYITPEQAGKLKVIKAHYENLESRKAELEELILALAAPYQQELTILQTAPGISSEFTAIGIISEIGTNMEAFPSAKHLCSWAGLTPTNNESAGKKKSVRVSKAGCYIKPLLVQCANAVVKSTKHPEMRNRYLRLKKRRGHKKAIIAIARMLLTALYHMLKNGENYNAELYQKSDLLPVDREITVEQALMIARNQGYKIKSATA

SEQ ID NO: 467131 - protein, 370 aa, unidentified
MKSIIYVGMDVHKASFTISCFSVTTQETFATVKISPDAKAIKKYLDGVSLSRSEECEFVCGYEAGCLGYTLYHQLTAMNIRCVIMAPTTILRNSKRIKTDRIDAENLARCLAYGGYKSVYIPTAQDEAVRDYLRMRDDHKLMLKKIKQQINAFCLKHNKIYPGNKSKWTQAHVKWLNALEFDGYLQDAFNEYMITYRELADKVERLESQIEQLAELEEYRDKVKKLICIKGIKTHTALSLIVETGDFSRFQSAERYASYIGLVPGEHSSSEDQKRLGITKAGNRHMRMLLIEAAQCYSRGVPAKKSKDLKSRQKGASPEVIAYADKASIRLRRKYIRMELVNKKKANVAKTAVARELACFIWGMMTDNIA

SEQ ID NO: 467132 - protein, 407 aa, unidentified
MEKVNPRCAGLDIHKDSVYACVRIDGKTSIEKFGTKVPELLRLSDWLASVDVTIVAMESTGVYWRPIWNMLEDRFQLMLVNAQHIKTVPGRKTDVKDCEWIAQLLEHGLLKASFVPLRPQRELRDLTRQRTQLLGDRARVVNRIQKTLEGANIKLASVATDITGKSGRAILDALAVGKLTPEQMAELVSKRMEAKKPALREALSGRMTDHHRFMLKQLLGQIDDVDRMIEAFDQRIEEVMSPLELEGVKKLDAIPGFDVRTGQNVLAEIGTDMGRFPTPEHLASWAGICPGNNESAGKRKSGRTRKANNWLKAALTQAAWGASRTRRSYYCSKHQRIAARRGSKRASIAVAHSLLITVHCLLSDPKPYEDLGANYFDNAKTPQQKADQMIRKLKRMGYIVEVKLAAA

SEQ ID NO: 467133 - protein, 365 aa, unidentified
MTALHTREQVRPDGPAAAVGTTRIWVGVDTHQQTHHVGVIDQNQTRVANQEFPATEAGYRDLVQYVTSLGTVVAFGVESTGSYGAGLTRHLLVEGHEVYEVNRPEKATRVSEGKSDPIDAYSAATQVLTRKAQGRPKMTSGIVEALRALKIPRDGAVKDRTRAYSQLRDLITTAPAPIHDELIGLSSKKRVARLLRIRPDLTQLHDPLHATRHALQTLARRIRALDQEVTAADKQIAKLVNQACPTLLAMRQVGPQIASQLVITAGENIDRMRSEATYAKLTGVAPLPASSGKTNRHRLNRGGDRQANSALYLLAVGRMKNHPETIAYVQKRQAQGMPKTEIIRCLKRYLARTTYQALRTDLMTT

SEQ ID NO: 467134 - protein, 322 aa, unidentified
MEAQAKFVGIDVSKARLDVGVWPGAESFSLSNDERGIAQLVERVRRFAPQAVVLEATGGLESVAAGELLAAELKVAVVNPRQVREFARSLGRLAKTDRLDALVLAQFAQSADSNGRLASMRTLDPAQAELKALVARRRQLMQMLVAETNRRERAPKIIRKSVVQSIKGLKRAIAMVEQQVAEVIANSPVQRAKAKLLRAVPGVGPELTAGLLADLPELGELGRRAIASLVGVAPHAHESGSFHGRRMIWGGRAHVRTKLYMAALSAVRFNPLLRAHYDALLERGKARKLALVACMRKLLLILNAMLRDQQPWRPPLELQHSR

SEQ ID NO: 467135 - protein, 362 aa, unidentified
MVRHIFVGIDLGDKNSVARIAVEGEKSERFGFVNNRSGRARLFRDVKKRSQDAGNAKIVMAYEASSCGFVLSDEAEALGIKCWVLAPTKMEKSVEQRQHKNDDRDAHDVLEKLRGHVLAGNRLPRVWVPDVQTRDDRELVRTRLDLTEKQTQIKAQIRMLIKRHGLEKPSGLGAGWTIGYRRWLQALTESEQLLGWSTRQALDSLLRQLQFLEAEIDRVQKPLEELANEPRHQPIIEELRQEAGVGLLTAMVYRTEIGQAGRFSRGRQVGKFMGLTPTSHESGQQNDRKGHISRQGPPRLRKVLCQASWVHVSHDAQAGRMYQQLVSRNPKKKKIALVAVMRRLAVRLWHRMRKIELQLAQA

SEQ ID NO: 467136 - protein, 359 aa, unidentified
MQYVGIDYHKRYSVLCATDERGQELKRRRINGNSASGFAQFFSELGEESKVVMEACWNWGWLYDLLAKIDQVEEVVLAHPYKTRLIAEAQIKTDRIDAQMLAKLLRGDLIAHSHAPSAGTRARKHLLRQRLFWVRLRTMLRNRIHAVLDRQHDLERPQLKNFFSRRGQTWLEEVRLPCAEDQPLLKQNLEVAELLEQKIKQLDRTIGQSQSQEEKLLESIPGIGPLFSSVIATEIDGIARFNSPAKLAAYAGVVPTTHASGGRVFNGRLLWQCNKWLRWALIEASWSAIQFSGYFGSIYRCARARGKNKNIAITMVAHRMVKIIWLLLTEKRPYTETLPDRSEDGMTVVVRRKAPALAS

SEQ ID NO: 467137 - protein, 344 aa, unidentified
MNSSKSVRRMGIDLGKNTFHLWGVDDAEEVVLRRKLKRGRLLQELANLPPCLVGMEACGGAHHWAREIGKLGHEVRLITPQFVKPYVKSNKNDFNDAEGICEAVGRPNMRFVGIKSIEQQNLLAVHRIRQGAMKARTAQVNQIRGLLAEYGIVVAKGIGQMRRVLPTILEDAENRLSDLFRELLAELYDQLRQLDERISDYDRRINALFGTQEACRRIEAVEGVGPLSATAVVATFGDGRQFNNARQFSAALGLVPRQHSTGDKTKLLGISKRGDRYIRTLLIHGARAVVNAVLSQDKGDARSRWIKRLVTERGVNRAAVALANKNARIIWALLSRDTSYRVAA

SEQ ID NO: 467138 - protein, 344 aa, unidentified
MKKNLFFIGLDISKADFAASIYKTPGQSIITKEAIPNNPEGFDLLLLWLKEHHIDKTNSHICMEATGVYSQAIAYYLLFAGFPVSVEPPLKVKRAFDPVGHKTDPVDSKQIAEYAYRFQDELTSWQPKDEILEKIRQLLSVREQFTKQKVALKNAIQAYSKQHVQVILIKKAHQETLAQIEKQIARIDKELSKLIKQDPQILQKASSLRSIPGYGMLLAAHLLVITENFTKIQQHKRLASFVGIVPYQHQSGTSVFKRAKIRHFGPGPSRKLLRLAAQSVATHDVTFRGYYLRKLAQGKAKSLVLNNIANKLLKVACAMVRNNTRYIKEHRSIHPMYLKSLKSA

SEQ ID NO: 467139 - protein, 362 aa, unidentified
MSTELEEVPMRIVVALDVHRRQITYKTLDRESGEVCRGRIVPATRVAVREWLDQFVGCEAEFALEGTTGWRFVVEEIERAGHGAHLADPAETAAKRGRKRRAKTDSADCDLQLRLLCAGELPESWIPPAHILELRTRVRMRKTLIDQRTAWQQRLQAQLFHQGVPAGLRPRTRAGREALAQAELSPAGRELVALALRTIDMIDRELVALDRALRSFARRQPACRALIANLYGVGAISATAILAELGDCRRFASSDAAVRHSGLDVTVYQSDNKRSAGHLSHEGPELLRWALFEAAHQSARRSSPDHDYYLQVAARIDHNRACLSVARKLCRRAHHLLRELGDAALAPVEREPQSEEAIQAAA

SEQ ID NO: 467140 - protein, 386 aa, unidentified
MKRNDLSRSLVAFDQAGTMVAVVELSFRSWLVAGLVPGLTRQPLKKLGPDAQALLTLLRRWQGEATKAGSTINRIVVAFEAGRDGFWLARWLRARGIEAYVIHPTSIPVSREHRRAKTDRLDTGLLMRAVLGWLRGEPKHCSMAAIPTIAEEDARRPNREHQTLVQERTRIVNRMKATLIRFGIRTFNVKLRKASDRLAVLRSPEDEPLPPNTGAELRRDMARLQLIRDQIKVIEEARLQQLKHAPRKGTHPMLLMLAEIIGVGVETADMLVHEVLSRKLRDQRAVARYGGLTGAPDESGTKRREKGLARAGNARVRRGMIQLAWRWLTHQKNSELAQWYQTRTTGAKPAARKTMIVALARKLLIALWRYVTTGEMPAGVTLHPAT

SEQ ID NO: 467141 - protein, 400 aa, unidentified
MLSIGIDVSKGKSTVCGMKPGGEIVYAPFEVQHTRKGMSELVSLLRSSGEEVRAVLESTGSYHCPVVAALLENGIFVSVVNSLRMKRFCSQSIRKVKTDRIDAMQIALYGLAYWQELQPARLPEDTYRELQLLARQYYQMTSMLIKAKVDFNALCDQVLPGMQELMSDHAGRHKLSDFVLRYHHTTHILEMGETRFRKDYCKWAEKKGYRNCERMAVLIFATAQNGIPVLPNAPSTQIVITEAIRVLHTVEASRDAILTQMQALAKTLPEYSLVREMPCIGDTLAPRLIAEIGDVRRFHSKRALIAYAGIDAPPYQSGKFCANNRHISKRGNRYLRKTGYEVMQSYVMHKPANDPIFTFIEKKRGEGKSGKLAMVAGLNKFLRVYYGKVTELYRSLPAIE

SEQ ID NO: 467142 - protein, 409 aa, unidentified
MDVVYRCCCGIDVHKQKVVACVIKNGRRSLREFNTHTAALRELCDWLLEVGCEQIAMESTGVYWKPLYNLFEITDLSAIVVNAQHMKALPGRKTDIKDAEWIADLLRHGLLKPSFVPGKEQRELRDVVRYRKSLTEERARELNRFAKMLQGANIKLDSVVSSLFGKSSRKLLQLVLSGAIINEQTVAPLVTKGLKADLETLVLMLDGIVSPVLRMLLSSILNHIDDMSRRIEALDTFVAEQMREVSAAIDALCKIPGIATTSAQIIIAEIGTDMSRFPSAAHLCSWAGVCPGNRESAGKRSSGKTNRGNQILKSTLASCSKSVSRTNTFFAAQYQRLSARRGKNRASIAVAHSMLIAIYHVLQGADYQELGADHYNRFNRERKINSHLHRLRELGWTPDGSLIAPGCAW

SEQ ID NO: 467143 - protein, 365 aa, unidentified
MGAALHGVRWPPDLVRGARRPLPLRQQPLVSLGTACCSVTHDRTVARLSIAWTRQVTVTDLICGVDVCSAALDVRLGRDGATRRFTNDGAGITELIAFCKEHQVGLVAIEATGGYERLAFAMLWSAGLATAIVNPRAVRRFAEAMGFLEKTDRIDSGIIAWFAEVKRIAPRQPDGAAQRQLAALVTRLRQLTELRTAQDNQRRLVTEPAALASFAELLSLIARQIKAIGEQIGKLIATDPLWHKLDLAWREIKGVADRTVARLMAELPEIGTLSSKAVSKLAGLAPIARDSGKLSGNRSVRGGRSGIRSILFVVAELVRRHNPDFAAFHRRLTLAGKPKKVIRIALAHKLLVRLNAKARDVRAQL

SEQ ID NO: 467144 - protein, 371 aa, unidentified
MKKGTTRYLGLDVHKATVTVALAEDGSQPVVYGTIANDPSSVRKLVRQLGREAKLVVAYEAGPTGYALHRQLLELGAECTVVAPALIPRRPGDRVKTDTRDALTLARLLRSGDLTPVWVPGEEDEALRDLVRARFDAKADVLRAKHRLSKFLLRRGIQVPPGTKAWTARYQAWLNQLSFPQAAAQVVFDDYRATVRATEDRIRRLDTELRSCAQDSRQAALIAALQTLRGIGFLSAVTIAAESGDIRRFANAPRYMSFTGLTSSEYSSGQSHHRGAITHAGNAYLRHVLVQAAHNARHAPNCSRELQQRQAGLPSDLVALAWRAQLRLHQRYRHLVGRLGRPKAVTAVARELAGFVWAVGQRMAEQEVSPA

SEQ ID NO: 467145 - protein, 400 aa, unidentified
MVEATTHVGLDVHKQSISVALLLPGSVKAVQWEMRNEAGEVRRLVRRLRRDAGGSAVLCAYEAGPCGYVLQRQLAREGVACQVVAASLIPRKPGDRIKTDRRDARKLAELLRAGLLTEVRPPSEAEEALRDLCRCREDARADLMRARHRLGKMLLRRDLRYVEGRPWTDQHRSWLWSLKLEHATERMVLEDYLLAVEQVSTRLATLDAQLKEVADQEPYRERVGWLRCLRGIDTITALSVLAELHGFERFAKPRQLMAYLGLVPSESSSGASVHRGAITKTGNRHLRRLLTEAAHHCRHRPGVGAALRRRRAGQPAAVIALADRAQQRLHRRYSRLLLGRGLPVQKTVVACARELTGFVWALLYLQPRQLISPGDVAPPRRRPGSSPTARGLRAAAEKTR

SEQ ID NO: 467146 - protein, 410 aa, unidentified
MRVFGLDVHRTFAEVAIWEDGRVRLAGRIDLTRERVQIFADSLAPTDDVVLEATGNTHAIVRMLAGHARRVVISNPLRTRAIAEAKVKTDKIDASVLAQLHAAGFLPEVWMPDEQTEELRRQVARRAQLVRHRTRLKNQIHSILHRNLVPRCPATDLFGQKGRGWLSQQPLPADERAAVDSLVRALDFTGEDLLAIDRVLAQIALGQADARRLMTIPGVDMAVALGVVAAVGDITRFRSPQKLVSYLGLNPRVRQSGLHPAHHGRITKQGRAHARGMLVEAAWAAAKTPGPLRAFFLRVRGRRGEQIAAVAAARKPAVLVWYLLTKKKDYAWARPSLTERKRRTLELRAGQPSRRGQRGPTHTYNVKELRAREREIGVQAEEAYQALVAHWRPQRPASKRSTGATKEARH

SEQ ID NO: 467147 - protein, 420 aa, unidentified
MPNIEIGVDFMVKENFIYVGIDLHKETHTAVMIDCYNQKLGEITFPNRPADFPKLVTKVKKCNTDAKEVVYGLENAYGYGRALAVWLIDKGYFVKDVNTAISHRQAKHRGAMYRKSDSDDAEAIALATLNMLDKLPDACPNDAYWSLGQLVHRRDNIMKQRTRLVNQLHEQLCIAYPSYKSFFNDISRPTALYFWEHYPSKKYLKGKSVEDLRAELVPVSHNKCSTKTCEKILDAVASDKVKNNAYQDARDMVTLSIVSDLQHYGSQLTEVDKMLEQMYKMLGCTLTTIPGVNVITAVKILAEIGDIKRFSNANKLAQFAGIAPLHLSSSGKGKDVATKQGNRRLQATIYFLAIQMVQVSSKGTPRNSVVRAYYEKRKAEGKTSQQALICISRRLISIIYGMLKHGTEYRMPVVESAGEK

SEQ ID NO: 467148 - protein, 408 aa, unidentified
MNPLYVGIDVSSKSNVVYFMLPDGSKHSNFSVANSHTGSSQLVKRILSAMTSCSLDTVLIGLEATSVYGDNLVYFLREDAALARFNSKIHVLNPKQVSKFKEAYNDLPKNDLIDSFVIADCLRFGRINKEVYIGDYRYKALQNLTRARYFAVFNLIKEKQRFMNILFKKYSTMTQEKVFSDTFSTTALAVYDEFESAEALADMDLHELTAFIMEKGKNRFPNPNAVAKSIQKAARSSYRLPKTVNDSVNQVLSISITSIKALEAQIKEFDKAIAAQMELLPNVLISIPGIVPVFSAGIMAEIGDINRFHNQAQLAKYAGLAWKQHQSGDFEAQTTRLINSGNRFLKYYLCEAAFSLVRCDKEYSAFYHLKYKEVNRYQHKRALALTARKFVRLVFRLLKDNRLYTSAE

SEQ ID NO: 467149 - protein, 339 aa, unidentified
MNHNSVVGLDIAKNIFHLYSLGADGKALKKKLKRAELLGYFANIPVSLIGIEACGGAHYWARELSKLGHDVVLLHARYVKGFVVGNKNDFNDAQAIHEAVLRPNKRVVRVKTEAQQDMQMLHNIRQDLVDKRTALVNQLRGLLMERGIVIAKGINSVRRELPFILEDADNGLTTLSRELLAEQYQQLKALDKTIKEQDQRIGRLCQQNRQSQRFLAVPGIGIITASLIAADLGDGKGYASSRDYAASLGLVPRQHSSGDKQHYLGISKRGNRRLRTLLIHGARSVLKVCQRKTDKLSRWLQALIERRGFNKAAVALANKNARILWAMASHDKDYQKQAA

SEQ ID NO: 467150 - protein, 385 aa, unidentified
MPGNALIPTEYDIFAGLDVDRKSISVTFTSHQGFIRSLRMPYRVEHLVHYVGKHFADQRVVFAYEAGPTGYGLYDGLVAHAYPCLIAAPAMIPRAPGQRVKTNRLDSRALSENLRGGQLQSIHVPSPVYRELRHLTQLRDTVVSQAVATKQRIKSLLLFEGLAFPPAPAGRQWSLRVQAQLRTLPCAPTVRFKLDQLLDTLAFAEQQVRQTTRQIRRFCQTEPELARCIQYLLTVSGIGWIVASQLLARIGDWRELNNIRQLAAFLGVVPTEHSTGEGAHRGAITRTGDARLRAKLIQAAWAAIRHDAELRHFFRAVCQRHPPDRGPRIAIVAVARKLSVRIAVVLRQQRPFVVRDQVPSAPVTQEETVPQGTTRRQAEPGEASP

SEQ ID NO: 467151 - protein, 340 aa, unidentified
MKFIGMDTHSRTSTFVVLGKNGRVLQRARVASTEKELLGFVRSVKGEKKLTFEEGVMSQWLYLLLKEEVDELVVCQPREKEGPKTDEIDAGEIADLLRVGRLKAVFHDDTDLMHLRTLVSGYGDVIQEITRTKNRYKALYRQVAISTDVPSFYTSTDMLDLLGTDVRRYVACTLFEQLGLLEEQRRGYLERFEANARKYKPIKLLTSIPGIGPVRANLIVAVMVTPHRFQDKYHLNSYAGLTKHERVSDGKLYGKKRAHGPVMLKYAFKSAALTSLKTDTEFRRKYDAMRSAGKDDRAARGAVARKVAATVLGVWKSGRKYSDRHMEVTRRRSRDCHSGA

SEQ ID NO: 467152 - protein, 313 aa, unidentified
MKEEKTFIGIDVSKEKLDVGVRPQVDFMTFANTEDGISLMTDFVKSKQPELIVLEATGGLEMAALRSLVVARLPAVCVNPRQVRDFAKAMGVLAKTDKIDAHVIARFADSVRPEIRPLKTEETEMLDAFNTRRSQIIIMLTAEKNRLTTASKWTKKDVEKSIKGLEKALAKINREVENLIKKSPHWRHMDKILQSVPSVGPVMSLTILADLPEIGTMNRRQIAALVGVAPLNRDSGKYKGRRAIWGGRARIRSVLYMCVISGICHNPKIKAFYNRLISYGKKHKVAITACMRKLMIILNTMIKNDTCWNESCC

SEQ ID NO: 467153 - protein, 316 aa, unidentified
MSIEPVRQHIGVDISKSTLDAHMYPEGRTITVPNDKNGFRQLLNWMAGCHLKQLLYEPTGQYHVAFEKFFLKAEIPLGKVNPRQARRFADALGVSAKTDSIDAGLIAKYGAMISVRRVSDRTIKFNEMKELQSARRALVKDRTRASNRSSARIAPLLRRQARERIEQIDRHMKAIDEALRSLVRDDEFLKERFDILRTIPGIGETTAIMLLTEMPELGFIDHKAAASLAGLAPIARDSGTFRGKRYIQGGRAHLRQALYMPTLVGIRHNPEFSAKYQMMVATGKAPKLAITAIMRKLIVLANSLLRDSRNWVPNRA

SEQ ID NO: 467154 - protein, 361 aa, unidentified
MNTQTTALPKLFIGIDIHKKQWTVHLRTDICEHRGFTMPPSPDALFQYVSHHFTGHEIHVAFEIGCCGFWAAREMLSYGWQVMVVNPGDVKHGDKYRYQKTDTIDSRHLSRELQKEELQGIYVPTEEQEQLLSLLRQRNHITKLLRKEKSLIKASLLYSGIRIPEQYDNPNWSHAFLGWLKGLVWRYPTGKESLLSKLRLLEILHKEYLGVANLLRAWCRKHHPKDYYLLKSIPGIGGYLAAAILAELGDLRRFTNERQLSNYIGLVPGIHQSDDTNKPIGLTPRSRSLLRSYIIEAAWIALRRNPALQVYYRKHVGKNSKAVIVKVAHKLVRAMLSVIKNEKPYQINYAAVKQMVVGAEK

SEQ ID NO: 467155 - protein, 324 aa, unidentified
MQGKEPSKQETSQITAGVDVSKGWLDAHVLPADERLRVPNAAVGIAKLKRWLVRRNVDLVAVEATGRWHRLLCRGLHASHIPVAVTDPYRVRQFAKAQGIAAKTDQIDACVLARFAMVMAPPVRGPVPQVLEALQELVTARQSAVAEQTALKNQQCAAESAFLKRQLARRVLRLKADIKAIERESLKHIAADPQLARRFAILTSIPSIGPVVAITLMACLSELGALGQKQIGSLAGLAPVADDSGQRRGRRSIWGGRAIVRTMLYLAAVTASRSNDDMKAFYNRLTLTKPPKVALLAIARKLALLANTLIANDRLWLATPPASA

SEQ ID NO: 467156 - protein, 347 aa, unidentified
MRFYNRQHRHYCGIDLHVKTMYVCILDAAGQVLVHRNVKSKPEAFLEIVAPYREDLVVAAECMFTWYWLADLCAAQDITFVLGHALAMKAIHGGKAKNDKIDSHKIASLLRGGLVPQSYVYPAAMRPTRDLIRRRLHLVRKRGQLLAHIQNTRAQYQLPEFGRRLAYPANRDGVSAQFAEPSVRKSIEVDLALIDQYDTLIVDLELTIVREAKRHDADAFHRLRSVPGIGKVLALTILYEIHDVTRFDRVQEFASYARLVKCVHQSAGKKLGTGGAKMGNVHLKWAFSEAAVLFLRHTKDGKKLLAGIEKKHGKGKALSILAHKIGRAVFYMLARRTVFSMERFLAA

SEQ ID NO: 467157 - protein, 346 aa, unidentified
MEHYVGLDVSLKLTAICIVDRTGKIEREGVVASDPETIAAFVKSHAPHVARVGVETGATSTWLWTELNQMGLPVICIDARHAKAALKMQINKSDRNDAVGIARIMQCGWYKEVRVKDLDSHALKALLVSRALLVKIKRDIENQIRGLLKNFGLVIGQAKMNVFSVRAAELAEARPELTVAVEPLLRAREAIGRQIADLDGKVMRLARNDAQVRRFMTAPGVGPITALCFLATIDDPSRFKRSRSVGAYAGLTTRRYASGEIDWTGRISKCGDKMLRTYLYEAANVLLTRVAKWSALKAWGVRLAKRSGIRKAKVAVARKLAVILHRMWIEGTEFNWSSKEAANQPA

SEQ ID NO: 467158 - protein, 319 aa, unidentified
MAQNDRVVVGIDVAKDKVDACIRALALRQTFTSTVQGHRKLVRWLRKHRVNKAVMEASGGYERVWARVLREAGIEVRIVDPKRVRSFALSAGRLAKNDAIDAEMIAWFAETFREAPSQAHDAAREELQALVKARLSLIDSRMRLVSQSEHAAPGPVLKAHGHILKSLASEIAKLEAAISVKIKSTPDFAERAEIIESVPGFAKTSSANLVAGIPELGQVSDGIAAALIGVAPYDDDSGKRRGERHIKGGRRWVRNAIYMPCVGAATQNNPVMQAYYQRLIAKGKEPKVAIVACMRKLIVILNTMIARRQKWDPNRYALN

SEQ ID NO: 467159 - protein, 430 aa, unidentified
MAPINGECMMDKERSWFVGIDWAAQEHVVSLYDGAGNKIGQRKFSHGGTGLTDMIAWLLKASGGEPGEIHVGIETPHGPIVEALLERRFNVYSINPKQLDRFRDRFTVAGAKDDSRDADVLSDSLRTDMRAFRKLSIADPLIVELREWSRIDEELKVEHGRLTNRLKHQLWRYYPQMLELADDVGANWFLDLFEAVPTPEKAANVREKTIARILKNHRIRRFDAAHVLAELCKPALAVAPGTIEAATAHIRSLIGRIRIINGQLADAGQQLDRLCKKLSEPVADEDGEAAPGQKPEQRDAAILDSLPGVARTVLATLLAEAPDTLQRRDYHALRALCGSAPVTRRSGKSRMVVRRYACNHRLRNATYHWAQNAIQHDHTSRAKYDALRARGHGHARALRSIIDRLLSVACAMLDSGTLFDPEFASKRATG

SEQ ID NO: 467160 - protein, 553 aa, unidentified
MEIETRFTSCLRHYSNGSLGGEQASRCFESRFQTPDVSSESFEQRDALCFQNESSDVVWSLTTRLYYKAFAEAKPCLLLYTRMEWKGETMNPSTPSPMEFAAFVALDWADQKHAWALRSPGQRRVQHGELENTPEAMEVWASELEQRFGGQPVAVALEQPRGAVVAVLSKYAHLVLFPVHPNTLAHYRQSFYPSGAKSDPSDAELLLELLVQHRDRLRPLKPDTVETRLLQFLVEDRRRLVDDRTRYSNRLTACLKQVFPQVLQWFDEVSSPLVGDLLERWPSLTELQRARPDTLRHFFQQHNCRDQARIEQRLGALALAVPATHDPALLEAGALAIRSLVPLIVELREAIARYEERIEEVAQAHPEFSIMDSFPGAGPVLAPRLIAALGTDRSRFQSAQELQCYTGIAPVLEASGQQRWVHCRWACPKFVRQTIHEWAQHSMAKCDWAREYYQAQRSRGKSHHTAVRALGFKWLRVLFRCWQDRTPYQEQIYLEALARHASRYAAGAARPPAHPPTPEAAAAASAAQPATASAVQLQWESVAGFLKLGVVSP

SEQ ID NO: 467161 - protein, 343 aa, unidentified
MFYAGIDLHKQSITVCVVNEARKLEKRKRLMCANEAAIVAFFKEVIQELGPFRAVVEATASYEWLIKLIEPLADKVILAHPGKLRVIAESTRKSDRLDAQVLAEFLSRDMVPASYRPTPRQRDHRGLVRQRSSIQRRITSVKNRMRRIMSNYNADRPDLFRKAGQEYVSSYPLSAADRICMNQLTSEWLFFLQQLKSANQALVDFAGTAPIREQHQRELLQSIPGVGFVITEVVLSEIADIDRFDSQKQVVAYAGLAPGQRESAGKMKELHIEKAGSRYLRWALVEAAWQLVYRVPRWKTIYERLKKRLKAKKAIVAIARRLLGMMVAIMKSGEPFTATHQPA

SEQ ID NO: 467162 - protein, 527 aa, unidentified
MATLLFAQQPLAYARGSEQSRDRQGVPMALRAADSDESRIERCGMLSYSVGGRGRFRSGSVEAVREYGLEHAGEPINVRRDPGRGSGSTKRCVTTICVFSASTPETTMNRIIAGIDVHKRILVVAVGTVSGATAEDGSEQAEPIRFANRQFGTTTAELLHLVAWLREHGVQEAVMESTAQYWKPVWLALEGHFRLSLAQAWSNRAPRGRKGDFRDAQRLVRRHVAGELTLSFVPDSEQRQIRTVTRRRTQLTRDRVRIHNQVESLLEETRIKLSSVVTDLLGSSGLRILTALSQGETDPGKLAAMGDARLQCPPEELADALTGSVSEIHRRLLQQHLAHLALIEAQMEELALLAADALRQHSEAVMRLAKIPGIRVLSAQQIVAEAGPRATAFPSAAQFSSWIGVCPGREESAGENHSSRCAKGNTYLRRALCQGAQAAVRTKNSYFQRKFQRLMPKLGYAKAIWAIARHLSVVIWKILHDGAQYEERGLPSTPQAMKRRVQRLTQQLRALGYSVEKKPLTPEVVRA

SEQ ID NO: 467163 - protein, 471 aa, unidentified
MATRQEVKTEAKPNRKQRREQQRRIWTDNPGLDVVHPDAAGIDIGNSEHYVAIAPGKSEAPVRKFSCFTHDLREVAQYLKAHGIRSVAMQSTGVYWIPLYDVLEEEGFEVYLVNARDTRNLPGRKSDVQESQWLLKLHTYGLLRNSFRPNSEIRVLRTYWRQRGEHIHTAGECVQRMQKSLTQMNLQLANVISDIMGVTGQKILRAILAGERDANKLAEMRHERIQASREEIAASLTGNWRPELLFALKQEIDRYDFCQRQIAECDQKIHQHLGTLPARAKEMGSAVEPSPQKRKRAGGNSPSFGLDQELVRITGVDFTRIDGINVMTAQTILSEVGLDMSKWETEAHFASWLGLCPNNSVTGGKVLRRGTRKIVNRAATAFRIAASTLRRSNSYLGAQFRRFRTRLGAPKAITAMAHKLAVLFYRMLHYGQEYVDRGQQFYQDKYRQQQIAFLNRQAAPLGMVVTPAVSV

SEQ ID NO: 467164 - protein, 400 aa, unidentified
MNAVGIDVSKGKSMVAIMRPFGEIVSAPFEIKHTASDINSLVELINSVEGESRIVMEHTGRYYEVLAHQLSEANLFVSAINPKLIKDFDNDSLRKVKSDKADAIKIARYALDKWQNLKQYNVMDELRNQLKTMNRQFGFYMKHKTAMKNNLIGILDQTYPGVNTYFDSPARSDGSQKWVDFASTYWHVDCVRKMSLNAFIDHYQNWCKRKKYNFSQSKAEEIYGKAKELVPVLPKDDITKLIIKQAVNQLNSASTTVESLRTLMNETASKLPEYPIVMAMKGVGASLGPQLMAEIGDVSRFTHKGAITAFAGVDPGVNESGSYEQKSVPTSKRGSSILRKTLFQVMDVLIKTHPQDDPVYQFIDKKRAQGKPYYVYMTAGANKFLRIYYCLLYTSPSPRD

SEQ ID NO: 467165 - protein, 339 aa, unidentified
MKVSTLGIDLAKNVFQLHGVGCNGQTVLKKKLTRDKFLPFLMQLEPCLIGMEACASSHHFARVLRQYGHEVKLIPPQYVKPYVKTNKTDAADAEAICEAVARPNMRFVQIKTAEQQAILVLHTERNILIRERTACANSMRAILAEFGIIMPRTLSQLYKKIPEILEEYDNELSPFVRCSVARQLEHLQSVEDQITLIEQELSRWAKTQPACQRVMKVPGVGLMTATYLVASVGNGQQFHSAKQFAAWLGLVPRKFSSGGKQRLGRISKRGDRYFRYLLVHGARAVAAVIERHKDNMPWLYRLLNKKAYNVAVVAQANKTARILWSMLVHHTEYRTLSVV

SEQ ID NO: 467166 - protein, 377 aa, unidentified
MGKHTRHVGLDVHAATIAVAVADASGEDRSVGTIPNRPESVRKLMKKLGPAECLRVCYEAGPCGYVLYWQLVGMGIHCDVIAPTLVPVRSGDRVKTDRRDALKLARSYRSGDLTPVWVPDAEHEALRDLVRGREAAKKDQLRARHRLGKLLLRRGRRPPEGVHNWTQKHLQWVKSQRFEHASHEAVFVDYVHEVEHAAERVERLEKAITAAVESAPERMRVVIQALQCLRGVKLVTATTVVAEVGDFTRFPHPRQLMGYSGAVSSENSSGGKVWRGPITKAGNTHLRRVVGEASWSYRSRPSLYADLRKRQDGHSEEIKAISWKAQHRLHKRYCRIVSRGKPKQKAVTAVARELLGFMWAIAKQCELELSKNRQFAA

SEQ ID NO: 467167 - protein, 369 aa, unidentified
MDYYAGIDVSLEYSTVCVVDGSGQIVREDKVASEPEVLIAWFSSLGYRLTRIGLEAGPLSQWLYAAMKQAGLAVELLETRHVRDAFKAMPVKSDRNDARGIAQLMRLGWFRPVHCKSIGAQEVRAELTARKLIESKLQDVENSLRGILRGFGLKVGKATSRGFAARVRELVKGHPTLETIAEALLCVHETLRREFIGFEKRVRSGARTHEGAKLLMSAPGVGAIVSLTYAAAIDDPARFKSSKKAGSHFGLTPKKYQSGETDRTGRISKIGDASVRAALYQAAHVILTRPVKGCAELKGWAMRIANRAGHQKAKVALARKLAVIMHRMLADGKPFNPNAKAERMAAKSAKTTTKAVALLAQRQTMAAAV

SEQ ID NO: 467168 - protein, 360 aa, unidentified
MQAKTFVALDVHVSGTVAAVLDRESGELSRRRLPGASEEVASFVAGLPRPVRATYEAGPTGFALARRLEASGVDCLVCAPGLIPRGPSDRVKTDQRDAERLVRLLVAGELHRVAVPSLEAEALRDLVRAREDLRGDLMRARHRLAKLLLRHDVRFDGPERNWTQAHLRWLSSVCFERAGTQRAFEDYRGGVEALLVRRGQLERDIAELLPDSPYAQTARRLMCLRGIDILSAAGLCAEIGDFARFRHPEQIMSYLGVVPSEHSSGAQRRLGPITKSGSQHARRLLVEAAWHYRRAPGVSTNLRRRQAEADPKILALSWKAQRRLHHVWSRMESRGKRRTIIAVAAARELTGFCWAVATTD

SEQ ID NO: 467169 - protein, 351 aa, unidentified
MHYVGVDYHKKYSYIVVKDEQGRRVHKGMVNNTREEFQRFLEPYQPGKAVLEATRNWGLIYDWLEQILDDVALAHPLKVRAIAEARIKTDNISADILADLLRADLLPKAYVPDKETREHKNILRQRMFFVRIQTMVKNRVHAILDRHPEILSQAPDVSDVFGATGMEWLRGVVLPGEDNRLLTSELELLEVLKQKICQSDGVVKELGKGDKKAKLLRSIPGLGPFFSVLVAKEIDDISRFKCDKKLCAYAGLVPSTHASGGKVFHGRITKQGNKWLRWAVVEAVPHAIKSDPDLHAYYERIRMKKGNNAAKLAAARRLLTIIYRVLSQQRFYEKRINNSRRNLAPAALVTS

SEQ ID NO: 467170 - protein, 319 aa, unidentified
MSDPQSTPLVTYVGIDVAKGSVEVCVRAQNRWFTPRDPSHLIQELAGVEAPFVVLEATGGYERPWVAALLDAGIAVAVVNPRRVRDFAKALGYLAKTDHIDAGVIAEYGQVTQPRPMAQMPAKQAELQDLVNRRRQVVSMRTMEQNRLGTAGTRAARRSIELLLKALERELKRLEEAIAALVESDDDWRDKARLLQEVPGVGPVTGRTLVAEVPELGHLNRQEIAALVGLAPYNRDSGKHSGKRFISGGRAHVRSVLYMAGLTASRHNPVIRAFAERLKAAGKPAKVWITACARKLLIILNTIVQTNTPWRSERCLQGA

SEQ ID NO: 467171 - protein, 362 aa, unidentified
MKSTTVAVDLAKSVFQLAVADASWKVIESHRLTRSQFERWFHNRDVSLVVMEACGSAHHWARHLTGLGIEVKLLPAKYVRAYVKRNKTDAADAAALLEALRASDIEPVRIKSIEQQALQGLHRTRSLWMSTRTSRINALRGFCREFGLVIPQGARTGVEAMARLLADPGSAIPELIRGSMKLLVEEIRLLEARVAQLEKELTALAQQSPACKELLSVPGIGLLTATAMVAATGGEVSHYRDARHFASWFGLTPQEHSSGSTRHLGRISKRGDRYLRMLLTHGARAVLRAASVARLASKQIDGLKDWALKVQGRTNHNKAACALANKLARICYAVLKHHEPYGSQTKREESRKINRTAYAVAS

SEQ ID NO: 467172 - protein, 316 aa, unidentified
MVGIDVASTHVDVACLGATLPTELTHISNDTEGHVVLADVLAKLQPGLVLMEATGGYETALACTLQAVGLRVAVINPRMARDFARAMQRLAKTDRIDAATLAEFAAVLAQRPDCERFVRPLSDPAQQDLAALVTRRRQLVAMRLSERQRLRLARPVTRPSIQALLEAIACQLNDVDAKMLSHVEQHRAVMSKLLQDVAGVGRVAATTLIAELPELGHLNRRQIYALVGVAPYAKDSGSIRGRRRIAGGRFEVRRALYMATLTATRCNPTVGAFYERLVAAGKLKKVALIACMRKLITHLNAIARNHLNAQNQPLIA

SEQ ID NO: 467173 - protein, 408 aa, unidentified
MNPLYVGIDVSSKSNVVYLMLPDGKKHSNFSVPNSQDGSTQMIKRILSVLTSHSLDTVIIGLEATSVYGDNLVYFLREDAILAPYNRKIHVLNPKQVKKFKDSYNDLPKNDYIDSFIIADCLRFGRINNEVYVSDYRYKALQNLTRARFYAVQNLTKEKQRFINVLFKKYSTMTQEKVFSNTFSTTAFAVYQEIESAEALANMDLQELTDFIIEKGKNRFPDPDAVAKAIQKAARSSYRLPKTINDSVNQVLSISITSMKALEAQIKEFDKAIEAEMQLLPNVLTSIPGIGPVISAGIIAEIGDINRFPNQAKLGKYAGLAWKQHQSGDFDSEHTRLIQSGNRFLKYYLYEGAFSLVRCDTEYSNFYHSKYKEVNRFQHKRALALTARKFTRLVFRLLKDNRLYRAAE

SEQ ID NO: 467174 - protein, 317 aa, unidentified
MTVVGIDVAKQTLAIDAILPDGKRRQKHCANSAAGHADLVRWLGRQATGPIAIGLEATGGYQEAVAIALHDAGFAVSVLNPSAIAAYGHSQLRRAKTDPADAALIADYMRTQSPPAWTPPPVEARQLQALVRRLDALLDMRTQESNRLELAAPIVRPSITATVAHLDTQIATVKRQIADHINQHPTLRHQRDLIQSIPGIGETTAALVLGELLDITRFSSARQLAAFTGLVPHIRASGTSVRGRGALSKLGSSRLRKALYFPALTAVRYNPILTRFAARLRAAGKPKMVIVAAVMRKLVHQIYGVLRSGRVFNPAHA

SEQ ID NO: 467175 - protein, 344 aa, unidentified
MNAIKVIGIDLAKNVFQVCVWMADGSVASNRKISRQKLLDTVRTFSPGTLIAMEACATSHYWGRTLQAMGFIIRLVPTQHVNAFSHHQKNDANDALAIGETACRPGLHFVPVKTVEQQDIKALRSARQLMVEQRTALANQIRAFLAEEGVIVPAGIQKLQQYLPEILEEESHELSSVRRRLLQTLGEDLRDLNIRIHEMDNEIAALSRQQSGYHHRLTIPGVGPLIAAAFVSEVSAPQFANGRQLSAWCGLVPRQHSSGGKNRLSSLSKNGNRHLRTLIIHGARAVMRCVQNRDDCLGEWLRKLIARCGFMKATIVLANKLTLIIWRVLRDEVDFNMQKAFTIN

SEQ ID NO: 467176 - protein, 417 aa, unidentified
MRRMLERCAALDVYQKGVTGCARIFKAGGEIEELIVEFSTMAADLLALRDWLTELGVTHVAMEATGVYWKPVYYALEDDFELLLVNAAHVKNVPGRKTDTLDAQWLCQLLECGLLRASFVPPKPIRALRDLTRYRKSLIKDRQQEANRLHKVLEDAGIKLAVVASDVLGVSGRQMLDALLSGTRDPEVLAELARGRMRAKLPALRQALAGNLKPHHALIITHILAHLDYLDETIAALTAEIEQRLTPFAHKAENLCTIPGVAARASHVILAELGPDMSRFASDRHAASWAAICPGNDESAGKRRSGKTRKGNPYLRTVLIESANAAARTKNTYLRAQYQQIKRRRGHKKAIAAVAHSILIAAYHILKDDVPYHDLGGDYFTRRADPVRLAQRLVAQLERLGHSVTLDTSTAPMLSAA

SEQ ID NO: 467177 - protein, 407 aa, unidentified
MEVIIERACGMDIHKDSITACIMTPEGKVIQTFSTKTVFLLKLIDWIKEHGCTHVAMESTGVFWKPIVNILEAESIEFLVVNAQHIKAVPGRKTDVKDAEWIAKLLRHGLLKASFIPDRTQRELRELVRYRRSMIEERARQHNRIQKVLEGANIKLGSVVSDVMGVSSLDMLRAIAEGENDPEKLAGFARRSMKKKKAELELALRGYIQPHQRLMIKTILTHIDFLTAQIELLNQEVTCRLSTHQEDIERLDSIPGIATRMAEQILAEIGTDVEKQFPSAAHLCSWAGLVPGHNESAGKRKSSAMKKGNKYLKSALIEAAHSVRGSKTYLGALYRRTAARKGKKRAGISVAHAILRIAYYLLTRKEMYVDLGEDYFDKQKEQSIIRYSIRRLESLGYNVTITELGVS

SEQ ID NO: 467178 - protein, 484 aa, unidentified
MGVAKQQKQRKQRRTERQSEPGGWHLMNRQQRREVMRKIQAQDLSLEVVHPDAAGIDIGNESHYVAVPSTRDNAPVRRFGCTTAELRQLAGWLKQCGIRTVALQSTGVYWIAVYDILEEAGLEVYLVNARETKNLPGRKSDVQESQWLMKLHTYGLLRNSFRPSGEIRKLRTYWRQRNDLVQAAGRHIQRMQKALTQMNIQLANVLSDISGKSGQAIIHAILKEERDPYKLAAMCDVHVKAGEEEVARALEGNWQEDLLFMLQQELDGYEFCQKQIAECDERLYKYLQHRPDRSAGATLPKEHRKGRREKKKNKPQFDLRKQLFCMTGTDLTRIDGIDVLTAMTVISEAGWDMSKWPTEDHFVGWLRLCPDNRVSGDRVIGKGRLPTNNRVNVALRMAAQSLRETNTYLGAQFRRLRRRLEAPVAIKAMAAKLARLIYRMLRFGMQFVDQGAEVYEAAHRQREIHNLKRRAAHLGFQIVEEPAA

SEQ ID NO: 467179 - protein, 418 aa, unidentified
MEPNRFRHYIGIDWATEAHRICLLDHNGQLVARTSIPHSGAGLGQLLEWLASHGVEPAFAAVAIETPRGAVVETLVERHYTVFAINPKQLARFRDRYTSAGAKDDDRDAWVLASALRTDEVAFQRVAVDPAELIQLRELHRTADELREEVQRLTSRLREQFIRYYPQMLALYPSPDQPVIWDLLELAPLPATAQQLTLPQVEAVLRKRRIRRLTAGQVLEQLRATPLTLANGAAAAASEHALILVAQLRVIHELRKQTLKRLTSIVTKMRQTTTASGAPSDAAIIASLPGAGVLTTAALLSESSRAVAERDGPALRAYAGVAPVTQQSGKSLKVSMRYACNNHLRNAFYHFAMGSLRDPVARRHYDELRAKGHSHARALRGVADRWVTVLVAMLRSGTLYDATRRKACQAADAQEAAA

SEQ ID NO: 467180 - protein, 332 aa, unidentified
MGIVVALDVHRNQITYKLLDRDTGEVRRGRVAPAARVDVRAWLAQFAGHEVEFALEGTTGWRFVVEEIERAGYRAHLADPAETAAKRGRKRRAKTDNADCDLQLRLLLAGELPESWIPPAHILELRARVRMRKTLIDQRTAWLQRVQAQLFQQGVPAGLRLRSEVGRQALAAADLSPAGRELVELGLRMIDALDQELVPLTRELGVFARRQAGCRALIASLYGVGPVSATAILAELGDARRFSSSDDAVRHAGLDVTVHQSDSKRAPGHLPSRARSIALGALRSGALWRPRRLARPRLLPPGRRADRPHPRLPLACAQALSARLPRPPRTGR

SEQ ID NO: 467181 - protein, 323 aa, unidentified
MTLVVGIDIAKRTFDLATLQPNGKHRTKSKLSNDQAGFAVFEDWLQRHAEPGAWIVMEATGIYHEALAEHFHALGYRIAVLNPAQIARYAQSQLQRSKTDKLDAKLIATYGQRHLDHLRAWQPEPLSLRQLRALTRHLEDLQALRQMELNRLDVSRENVKDSIQAIVQRLNEQIEWTLKQIKQHIDDDPDLRGKRDLLVSIDGIADKTAALILAELGEIERFTHSRAVTAFAGLDPRLQESGAFYGRTRISRTGSARLRSALYLPAVVAMTYNPAIKAQVERLRARGKKGKQTVCAAMRKLLSIAYGVLKSGKPFDPALAIAH

SEQ ID NO: 467182 - protein, 342 aa, unidentified
MEHYAGIDVSLECSSVCVVEANGKILREAKVASEPEALIAWFRSSGFDLERIGLEAGPLSQWLFAAMREAGLAVELLETRHVRKAFEAMPVKSDRNDARGIAQLMRLGWFRPVHCKSMSAQETRTLLTARKLVQSKLRDVENSLRGILRGFGLKVGKTTELRFAGRIEELVVGHPHLQAIAKALLAVRAVLRKEFAAFERQVRKMARSDARARLLMSTPAVGPIVSLTYVSAIDDPGRFKSSKQAGAHFGLTPKKHQSGETDYTGRISKIGDASVRTALYEAAHVMLTKPLKGCSQLKSWAMRIARRAGMSKAKVALARRLAVIMHRMLADGTPFNAAAPTA

SEQ ID NO: 467183 - protein, 377 aa, unidentified
MDTMYERCCGLDIHKKTIEACFRSGKKKTHMSFGTTSVELRKLTMWLVENDCQSVAMESTGSYWKPIFNILELSGTDMKIIVVNARHMKNVPGRKTDVNDAEWIAELLQYGLLRPSFIPDREQRELRELSRYRKSLVGERAREINRLQKMLEGGNIKLTSVVSEVTGYSSRRLLDRLLRNDEPMTEDVISGLVHTSLAGKSKELETALDGLLSELQKELLIKVLDHIDDMSRRIADLDDFCRKQMKKYEDALDKLDEIPGIARRTAETILIETGLDMSRFPTAKHFARWAGLAPGNNESAGKRSSGRTTKGNPTLKSTLIQSAKVAARKKNSFFKARYQKIAAKRGANRASVAVAHSMLIAIYHILKSGEKRRKTTT

SEQ ID NO: 467184 - protein, 377 aa, unidentified
MREKLRFLGLDVHAETIAVAVAEPDGEVRSLGTIANREDSIRKLIRKLGPPEHLRACYEAGPTGFVLYWQLTQLGVECAVVAPSLVPKKPGDRVKTDRRDALKLARSHRSGDLTAVWVPDEDSAALRDLVRQREAAKQDQLRARHRLTKFLLRTGQRAPLGLKAWTERYMRWLAQVRYMQPAQEVTLRDCMNEVEHMSARVKRLEEAILEVVKLAPQAMQELIRGLQALRGVAHISAVTIASELGNISCRFESARKLMGYCGVFPSEDSSGKRIRRGGITKAGNAHLRRIVVESAWSYRHLPRVGEKLRKRQQGIPAEITEIAWKAQNRLHKRYMALTMAGKDQRKVMTAVARELLGFIWAIGIKVEAMACKQQMAV

SEQ ID NO: 467185 - protein, 423 aa, unidentified
MKFKQHEAQNQRIERITSHHLVVGIDIAKETQVARAVTYRGIELGKPCPFKNDAYGFQKLLTWIKSIQKQHKKTGVIIGMEPTGHYWLNLAWWLLEQRFEVVTVNPYHVKSNKENRDNSPTKSDLKDALVIADMVKNGYYSPLRLPTGNYQALRVLMSDREFVIKQFISIQNQIHRWLDIWFPEYHRVFKDWSCKTSLVTLRLFPLPSELKILSPDEIYARWKPHMKRRASKSFATALVEQAQQSIAQNVAPEQVKRSLLFLLDQYERLSTQLTQLEQEAISLMKEIPQAQSLLTIPGIGKITVAGILAETGDLSMYRHGQQVLRLAGLHLGEDSSGKHKGQIRITKRGRSGLRKFLYLAVLHLVVNNEEFRSLHHHYTRTKRMKKVHSIIKLCGKLARILVGIVRHEQTYIPEKVVTATTAA

SEQ ID NO: 467186 - protein, 332 aa, unidentified
MMAQNDCVVVGIDVAKDKVDASIRSLSQRQTFPSTTEGRRTLIRWLRKHKVGKAAMEASGGYERDWAKALREARIEVRIVDPKRVRSFARSAGRLAKNDAIDAEMIAWFAETFGEAPSQAYDAARDKLVQIVRARQSLLDLQTSLQNRGEHAAPEVVQKMQARLLKTIALEVAKLEAAITAMIKATPHLAELAEIIESVPGLGKITSAGLVAAMPELGQVSNNIAAALLGVAPYDDDSGQRRGDRHIKGGRRKVRNLFYMACLGAATRHNPMLKAFYDRLIAKGKKPKVALTACMRKLICILNTMIARREKWDATRYKMTDPARLPPSACPA

SEQ ID NO: 467187 - protein, 323 aa, unidentified
MNTLDFLGIDIAKKTFNVALLRNDKLRHKKFENSPEGFKQLDSWLVKQGIIEIHACLEATGSYSEGLALHLHQAGHKVSLVNPARIKAFGQSELRRNKTDRADATLIARFCSMHRPAAWVPPPAEIRELQALVRHLDDLIGTRTQLGNRFTDGPKFKSVLESLKTLIEAVDVEIKLTRKKIREHIDQHPGLKEDCELLETIPGIGEKTATTLLAEIEHLRHYKHARQAAAYAGLSPRLRESGTSGKRSRLSKTGNSKVRKALFMPAISAKQHNPVLRQFSERLARRGKPKMAIIGAVMRKLLHLAFGVLKTRKPFDPNHPVTA

SEQ ID NO: 467188 - protein, 415 aa, unidentified
MSDFKRWYAGVDWGSQSHCTFLTDDQGGKLGQKFFKHGGEGLAEMADWLMKTSGAENAAQVFVAIEVPHGPVVEALIERGFCVHAINPKQMDRFRDRFSMSGAKDDSRDAEVMASSLRTDPRCFRKLAVADPIMVELREWSRIAEELGVERNRLANRLREQLWRYFPALLELEGDCGAEWLLDFLVLAPTPAKAARLREARIGELLKQRRIRRLDAAAILKAVRATPPKLSPGTVEAASAHVASIIPRLRLVNRQIGEADRKIGALIESLMAGSESEPGQTKQHDAAILASWPGVGRTVLATLLAEAWEPLQRRDYPALRSLTGVAPVTKRSGKSCVVMRRQACDNRLANALYHWARVAVQHDPRCRAKYAELRSRGHSHGRALRSVADRNLNIACAMLRNGTMYDPNLKTKNVA

SEQ ID NO: 467189 - protein, 309 aa, unidentified
MDNEIIIDKGCGLDVHKETVVACVMGSGIKKEIRTFSTKTNDLLRLKVWLSGLGITHIAMESAGPYWKPVFNVLEDGFTLILANARHIKNVPGRKTDVKDSEWICRLLRSGLLSASFVPPQAIRELRDLTRYRRKLTQSLSAEKNRIQKVLEDANVKISSVLSDTFGASGSQMIEAIMEGKLNEAEIADLAKGKLKSKKEEIREALVGYFQDHHRFMIKASLEHIKYLEKLISDLDQETKKKLARYQKEYELLQTIPGVKEQGATAIIAEIGADMDVFPSEGHLSSWAGMSPGNNESAGKKKWKDNPRQ

SEQ ID NO: 467190 - protein, 342 aa, unidentified
MDHFAGLDVAVKETSVCIVDDTGRIIREVKVASEPEALLQVLKNPAYHFKRIGLEAGPMSQWLYSALAEAGLPVICVETRHMRAVLKAQINKTDRNDARGIAQMMRVGLYRPVHVKTLRSQKLRMLLTHRKLLQSKAIAIDNDLRGTLRNFGLKVGVVGTVKFEARIKELVENIHDLAVLVEPLLVVRRVLREQLVIQHRRLLATVRDDEVCRRLMTVPGVGPVVSLTYRATVDVPARFHKSKSVGAVFGLTCAKYQSGEVEWSGRISRCGDEMMRVMLYEAAQSMLRSKKWSWLKAWAMQIARRRGMKKAIVALARRLAVIMHRIWVDGTEFRWTREVAAA

SEQ ID NO: 467191 - protein, 367 aa, unidentified
MTKDTLYIGLDTDKKWIDVAVAEPLPGGEVRYFGKIANDPAALDRVLKRLGKEARELVVCYEAGPCGYGIYRRLTGKPGVTCQVIAPSLTPRRAGVRVKTNRRDSLTLAKLLRAEELTAIWVPDAAHEAMRDLIRARGAAVSDLTRCRQRLGGFLLRQEIGYGGKPWSKKHRLWLGRLEFSAPAHRLMFTELLEALDQTQARLDRLAGHIEELWPTWSLAWLVEALQALRGYRLINAATVVAEIGDPRRFDSPRQLMGFLGLVPSERSTGDRQRRGALTKTGNGRARKALIEAAWTYTRPAKMPKAEAARQPAEVRAIADKARHRLSARYRRLRARGKLAQVAVAAVARESLGFIWAIAQAAGPRRR

SEQ ID NO: 467192 - protein, 460 aa, unidentified
MNHKQRREVMRKIQSEDLSLEVVHPDAAGIDIGNESHYVAVPPTRDSQTVRRFGCTTAELKAMADWLKQCKIRTIALQSTGVYWVSVYDILEEAGFEVYLVNARETKNLPGRKTDVQESQWLMKLHTYGLLRNSFRPSQEIRTMRTYWRQRHDLVRTAGRHIQRMQKALTQMNIQLANVLSDVSGMTGQAIVKAILAGERDAYELAALRNWRVKASEEEIAHSLEGNWQEEQLFVLQQEQDGYEFCLKQMAECDQRLQQYLQQQQDRSQGASLPEEKRKERLRKKKKGNTPQFDLRPELFRMSGTDLTQIDGIDVTTAMTILSEAGWDMSKWRTEHHFVSWLRLCPDNRISGGKIIGKGRLPTNNRVTNALRMAASTLRLSNTYLGAQFRRLRTKLGPPVAIKAMAAKLARLIYRMLRYGMPFIDRGADFYETQHRKLQINYLKRKAANLGFQIIEAPAA

SEQ ID NO: 467193 - protein, 344 aa, unidentified
MITIGIDPHKSSHTAVAVDAAGHQLAQRRFVVNAGTVRQLMRWCETWPERRFAVEGARGLGRSLAQQLAAAGEKVVDVPSTLSARARLLATGGDRKTDAADALHVAQVALFRQDLRTVEPEDQSTILRLLTERHDDLVNERTRIINRLHAVLRDLLPGGAPTRLSAEKAAALMKGIRPATATDSCRRDLARDLLADLRRVDRQVRDNEAQMRDALAAARPALTALPGLGTVIAAKLLGHVGDVARFPTEHHFASYTGTAPLDASSGKNTRHRLNTGGNRALNSVLHMVAVCQIRDGGRGQEYYLRKIAEGKTPAEARRALKRRLSNVVYRTLKRDRRKALPTAA

SEQ ID NO: 467194 - protein, 339 aa, unidentified
MTVKTVGLDLAKDVFQVHGISENGRVIFNKAIRRAKMLTFFETLSPCTVGMEACGSAHHWGRELRKLGHEVRLMPAAYVKPYVKRGKTDAADAEAICEAVRRPSMRFVEIKSADQQAFLAVHRSRDLVVRQRTQVVNMIRSILREFGHVLPTGVEAVNQFSKRQMDGDQLEMPELATGILGTLCYQLLGLNARIEGYTRLIKQHALLDASCRRLTKIPGIGPITASAMVATIGDGSQFKTGRDLAAWLGLTPLNKSSGGKERLGKITKMGDRYLRKLLVVGMTSRALQARNHPERADRWTANILAQKPFRLATIAMANKSARVIWAVLSKGQQYRQPVA

SEQ ID NO: 467195 - protein, 453 aa, unidentified
MGKRFSLDNTLSIGIDPHRETLEAVGIRFPEEILLSGTFDNTPAGHRELLAKAKELASKHDLKLVFGLEESGNYGYKLARYLVKQGCQVKEVNPRMTNRQRDFYGQDKTDRLDALSAAAIVLRAYERLPDVTPIQEATEATRELSRYREQLVKEQTANLNRLHSLLANQYPAYKTFFSQVNGATALAFWATYPTPGHLSGVTIDELADFLYQKSNHRLGREASRNKAQHILGSCHWENVSEPDLLTKAQAQIIKDLAQRLLQLRESIQTVESRLKETISATGQQLETFHGLGTVLAGIFIGETLSTARFDHDKDKFASYSGTAPATRGSGKHTRQVTNRWCNRRLKDAFNQLALSAARFEPLSEEYYQGLLEQGMDPSEAKKRLMRRLSDIIFAMMRDKTPYDPAIHRRKQERKAWQPLAGGMSLPLSPLSVGQVYHTGEALSNGLQLEHHPV

SEQ ID NO: 467196 - protein, 387 aa, unidentified
MKIIGCDFHPSWQQVAWLDAETGETGECKLVNGDGEAERFYRALAEPALVGVEACGNSQWFLEMLQRLGHEAWIGDAAQIRASYVRKQKTDKRDAAHILRLLVEGRFPRIWVPSAGQRDVRQLLIHRHKLVEIRTRVKNGLQHLAMNRGMQKKSTLWSVAGQKALRELPLQGWAGRRRQDLLALLKSLDQQIGELDQAVEEEAQRDKMAQLLRTQPGVGPITALAFVVTMGDVTRFRRGKQVASYLGLIPRERSSGGRQRLGAISKQGNRFVRTLLVEAVHNVTRLDESFRKTYQQRCHRMAKGGGGTQVGGTTLLDAAHQHRVSGDRSHREQPAGAPGQSVSTDSIETLIGRSRLPYETGGSHRRIMVAVQGRIDGWWNEVSFTAN

SEQ ID NO: 467197 - protein, 368 aa, unidentified
MIERVHGIDRHKSFSTISVLNRQGEEVQFLGACREFGKYVEGLGPTDAVVLEASTGSFWWADQIEAKGAKCFVVDPRKFRIIKDSWNKTDKHDARNLAKALWVHVVTGEFGIPTVHKPAAVVRELRRLFAQYCLLNRQIATHKNNAQAIFVDNGVELKKELKCRLFAPESGLEMLKEMNISAASRVCLELTLQVLWKVAEAKERLAAEILLAGEPLKSQVELLISIKGVTPLIALAFLADVADVRRFRTLRKMNAYLGLVPRASNSGGKERPGHITRESRKLTRTILTQCVHHVAASSVSLDHYYRELREKRGTGRARIAVIRKLCGMMRRMLLSGEQYRWMDQGLYEKKLRQYERVLKRVKEERSAA

SEQ ID NO: 467198 - protein, 445 aa, unidentified
MYSLFFMEPYRKEHIMHNKNYISVGIDVGSAFSFMTILAPDETVILKPFKITHNNKDSLERAVSEIKKAEELYSLESRTFLEFTGIYHFPLFCYLVDCGFNASIINPIITHSTKNGNIRKVKNDKIDSKGIAKLGLSKDVPVSQFPEKLVLELRSLTRKYYDLTDERSAHINKLKGDLHTVFPQYLDIFCDVTGKTSTMILRQYGTPDKILRGHKKTMIEKISKASRKGLAKASERYEKLCAAANAAKTFGCQIDSIYFNISLTLDLVEKLDSALDSILNRIRQLITFNKNEKFIQQIKLLNTIPGVGFLTAVTIMCEIGDFSAFRNPKQLFAYFGLDPEVNESGKFVGTQLHMSKRGSRIARRAIFAVALASIRTKRNGEGINPYLRKYYELKSVQKPKMVAIGAVMHKVCNVVFAVLRDKKAFELRSPEEHCKQYQRAALAAA

SEQ ID NO: 467199 - protein, 313 aa, unidentified
MATYIGIDVSKERLDVAARPSGEGWAVDNDDGGIHDLVSKLRSLEVELVVLEATGGLQARSAAAIAAAGLPVAVVNPRQVRDFAKASGRLAKTDALDAQALAHFGEAMKPEPRELPDAQAEELGAMLARRRQVVRMLTAEKNRLHRVASPALRSRIEAHIAWLEGQIGELDQELDRAIRESPVWREKDELLQSAKGVGRVLSTTLLAELPELGTLGRKEIAALAGVAPLCRDSGKLRGRRSVWGGRARVRAALYMGALTARRSNPVIKALYERLVAGGKPKKVALVACMHKLLIILNAMLRDGVRWDERPATP

SEQ ID NO: 467200 - protein, 429 aa, unidentified
MNCTQNKKIEQVKETTMIVGIDVGSEKHYFRAFNWRGIELTRKPVAFSNSMEGFNSFYNTIVELMQKSELKEALVGIEPTGHYWFDLGQFMGEKNIKFVMVNPHHVHKTKELDDNSPSKNDRKDPRVIAGLVRDGRYFYSYMPTGAYAELRNASNRRFVLVEEQTRAKNRLQKWIAVYFPEYKGIYTHIDAKGGMLVLKKAPTPEEIVRLGVEGIIKIWKDAKLRGNGHKKAMLILAAAMRSIGLKAGLTEARMEIQDLIEDYELQTKRLERVNDLIKGLCQQVRYADKLLEIKGIGITTVAGFIAEVGDITRFDSTKELQKLAGLELVADSSGKHNGKTKISKRGRKRLRYLLFEAAISVVGKNEEFKEIHRYYTTREKNPLKKMQSLIVVACKLIRVFHAILTKGIRYDASKMLKDIRHPGEQLKAA

SEQ ID NO: 467201 - protein, 477 aa, unidentified
MKKTRGDNLQARGAKPKRRRRNKGMCLEDRPVLEPNAAGIDVGAREMFVAVPPGRDENPVRVFATFTEDLERLTDWLEQCGVTTVALESTGVYWIPIFEILEQRGIRPCLVNARHMKNVPGRRTDWHECQWLQFLHSVGLLRAAFRPGQDICAVRTILRHRNELVAAASQHVQHMHKALTQMNLQIHHVISDITGLTGLAIVDAILAGQRNGAELAKLRDPHIKADTETIRKSLEGNWRPEHLFTLRQSRDLYRIYQQQIVNCDLEIEKMLQEFEPRTDPTERPLPPDRKRNRAGSKRRKKNGHPHPEFDLRTETYKLFGVDVTQIPGLEENALPLFSEVGRDMSRWPTAAHFVSWLALCPDNDISGGKLLWRGARRVKNRAGHLFRMAAYSLHHSLTPLGDYLRRMKAKLGPKAATMATAHKIAVIFYIMVKNQVEYDETLWATRDAQREKRLEAKLKRQAKQLGYELVPIEPKAA

SEQ ID NO: 467202 - protein, 378 aa, unidentified
MSNCTRYLGLDVHAETITAAIAEGRGRIRSLGKFPNRPEAVRKLTEKLGGAKNLKVCYEAGPTGYALYWQLTKLGVDCEVIAPSLIPKKAGDRVKTDRRDAEKLAQSYQAGDLTPVWVPTPEHEALRDLVRQRAAAKADESRAKHRLVKHLLRRGLREPNECRAWTHPWWRWVQSLKFDHEAQQVAFADCIAEVLHMGERLARLDQAIDRLVASAPPHMQAVIEALQALRGVAKLTAVTIVTEVGTFQRFRRATEMMGYTGLVPSEYSSGEREAKGRITHTGNAHLRHVLGEAAWHARHRPWLNLRLKKLLPTLPAGVAEIAWKAQERLHRKFTRMTYCRKHAGKVATAVARELVGFIWAIGTLVESQQIANNKTRAA

SEQ ID NO: 467203 - protein, 334 aa, unidentified
MENVALIGIALGKHSFNLHCQDKSGKALQRKKFTRTNLMQFLATCPSTVVVMEACAGAHFMARRISDIGHEAKLISPQFVRPFVKSNKNDFVDAEAICEAASRPSMWFVQPRTEVQQAMRALHRVRESLIRDKVKTTNQINGFLLEFGISLPAGDTVIKRLPLVLVEHEIPEYLSRLLMKLHAHYLYLVEQITELESELNQSIKTDDATQRIMTIPGVGPITASLLSSQLGDGKQFSCSRDFAASTGLVPRQYSTGGKSTLLGISKRGDKNLRRLLVQCARSFMMRLEHQQGRLAEWVREQLSKKHSNVVACALANKLARIAWAITTNHNAYQA

SEQ ID NO: 467204 - protein, 394 aa, unidentified
MRRDTKVLAELVGKLKEKLDPKKVAATSAGKEHQRGELRPNLDRLTVGVDLGDQWSNYCILGLEGETLAEGQLRTTQEDIAEFFQALNAARVVFEMGTHSPWVQEVICGCGHEVLVANPRLMEGSKRRKRKNDRIDANKLARLGRVDPQSLHPMQHRSREVRQDLVVLRARDALVAARTELINATRGLVKSMGSRLPKCSSPSFAQNVEETVPVELRDALLPLVRMAAALSDCIQGYDEKIEKLGREKYGHTALLRQVKGVGPITSLAYVLTLENPDRFVKSRDVGPYLGLIPKQEDSGASQPQLGISKAGDTMMRRLLVGSAHYILGPFGPDTDLRRYGLRLCERGGKNAKKRAAVAVARKLAVLLHCLWVSGEVYEPLRQGMSATMTPAAAA

SEQ ID NO: 467205 - protein, 307 aa, unidentified
MFVGIDVAKDRLDVHVRPAGEAFTVARDGEGIEELVGRLSKIGPALVVLEATGGFETIVAAGLGAAGLPVAVVNPRQIRDFARATARLAKTDALDAAVIAHFAEAVNPPVRPLADEQSRLLGELMARRRQLIEMIGAESNRRRMLTVRRTLKSVDRVLVTLKAQLEQIDDDIDTAVRGTPAWREAEDLLVSVPGIGPRIARTLIAELPELGRLGRRQIASLTGVAPFNRDSGTLRGRRTIAGGRPVVRAALYMSVLVSIRRKLPLALTYHRLRAAGKPAKVAIVACMRKLVTILNAILRDKKPWLAA

SEQ ID NO: 467206 - protein, 372 aa, unidentified
MNYNTVYVGMDVHKESFTLCSCKYEDEKASHYQRTPASYKNVLRYLAFLRTIYGEDTRFVCGYEAGCLGYSLYHQLENFNVECVILAPTTMLEQRSKRRIKTDKRDAEIIAKSLAQHNYRPVHIPTKMDNQTKEFIRMRDDHKAELKKIKQQILAFCLRQGYQYDGSGNWTAKHVKWLRSLKTEGLYKEILDEYLLTYTILTDKLNRLDQRIEELASKEEYKESVSKLTCFLGIKIHTALSVIVEVGDFQRFVSARKFAGYLGLVPGQHSSGDDRNGLGITKAGNTHVRRLLVESAQSYTRGKIGYKSRVLRSRQAGNSPQIINYADRANERLRRRYYQMVLKDGKKYNIAKTAIARELACFIWGMMTDNIY

SEQ ID NO: 467207 - protein, 344 aa, unidentified
MEYFAGIDVSLRSCALCIVDGKGTVLLERELPCEVRAITEWLGTFPHPIERVGFEAGTMSQHLFFGLKAAGFDVVCMEAHQVNAALSAMRNKTDKNDARGIAQVLRTGWFRPVHMKSREAHGVRALLSTRKALLKKTVDLANEVRGLLKIFGIRLPMTVKHGSFDGVVRPLIEMDEVLVHALVPLLDARVVLYEHFLELDRRVKRAASQDEVCMRMMTVPGVGPIASLTFKAAVDDPTRFKRSRIVGAHFGLTPRRYQSGEHDNPGRISKAGDRDVRATLYAAANALLMRTMAGSQIKSWGMRLMRTKGRRRAVVAVARKLAVLLHRMWVDGTEFRQDQVGGEA

SEQ ID NO: 467208 - protein, 422 aa, unidentified
MLEETHDTEELIARVAALDIGKAELVCCVRVPSAQGSGKRAQEVRTYPTMTRSLLVLADRLRQLGVTRVVMEATSDYWRSPFYLLEAHGFEVWLVNARDVKHLPGRPKTDKLDAVWLCKVAERQMLRPSFVPPPPIRMLRDLTRYRADLVAARTADKNRVEKLLEDAQIKLSVVASDIFGVSGRDMLAALIAGERDPKVLAQLARRRLRAKLSLLEEAFHGRFSDHHAFLLQTMLSRIDQASADIAALDAKIDQEIAPFAPAVDQLDEIIGVGRTAAQVIIAEIGVEMGRFPTPGHLVSWARFAPGVKESAGKKKGKATTGHGNPYLARVLGEAAVAAGRTNTFLGERYRRIARRRGAKRAMVAVGRSILIIIWHLLSDPTARFHDLGPGFYDTRSNADRRKRNHVRQLEALGYKVTLQPAA

SEQ ID NO: 467209 - protein, 346 aa, unidentified
MKILALDLSKFKSVGCVYEAESGDHRYRRVNTTAQALHDLLVEVEPDRVVIEVSSVSGWVSDLVRALGIELQVVNTNGEAWRWRSVKQKHDQADALKLARLSAMNQLDLVHVPAPEIRQWRAVIKYRQHLVGRRTDIKNHVRELLVREGVILPRGRKCWSQEGCAALEEMCRSWEEVEIAELWRGELQSELQQLQVIQERLREVEAKLETLAAADDRVGLLRTIPGVGPRLAEAMVTLIDDPHRFKRGRDVGAYLGLVPRQYQSGEMNRLCRITKRGSKLLRSLLVEVSWVSLRHNPWLRSLYERMNRGSKTRKKIAIVAVARHLAIYCWAMLRDGTTWRQPCPTQ

SEQ ID NO: 467210 - protein, 329 aa, unidentified
MKDLLEISCGLDIHKEKIVACILTGPLGKPTHSEIREFTTLIPDMLALRDWIISENCHHIAMESTGIYWIPIYEILEDAFSGDITLLVVNARHMKNVPGKKTDMRDSEWISTLLRAGLLNASFIPEKRIREFRDLNRYRKSIIRDITSQKNRVEKFLQSSGFRLSSFISDIFGASGRNIILHLMEHGQIDKMSLDSYLKTKTRKRIDEILMSVKGTLSEHQKSFLKILMCHYDSMKEHLIEIETHLQEDMLPFALQIEQLNTIYGISTTASCAIIAEIGTDMKPFKTAEHICSWAGLCPGNNESAGKRESTSITKGNPYIKVCFVRLPG

SEQ ID NO: 467211 - protein, 374 aa, unidentified
MSDHSEAFVAFDTSKLRNAVAIADPGRAGEVRFLGEIENTGTATAKLVKKLAAKYQRLTFCYEAGPTGYGLYRQIKSLGHECVVVAPSLIPKKPGDRVKTNRRDAVNLAKLLRAGELTAVWVPNRHHEAMRDLTRTREVAVMDLRTKRQQISAFLLRQGLHYPGKTTWTKAHTSWLASQKLEYREQRLAFEEMMLATRQAQERLERLEQAIRTAVPDWSLAEVVTALMAMRGIDLISAAGFLAEIGDLSRFRTPSELMAYLGLVPSEDSTGDKIKRGPITKAGNRRARRILVESAWSYQHPPRVGKEKQEKVAAAPRAVQEIAWKAQCRLSGRYRALIRRGKLKTVAVTAVARELAGFIWAIGREVTTARAAAK

SEQ ID NO: 467212 - protein, 341 aa, unidentified
MGARNYFVGVDLHRNQFTYCVRYSNGEEKVGKEPIENLERFARRLGNYASVAVEATGNTWMFCQVLKKYAGRLVVVNPNQFKVISHSVKKTDKNDAKVLAEFLEKDLLPEVRMKDKLQAKVASLTQTREKLVQLRTVLKNKINNLFASRFINLKREELSSEKGLLKVLSYHFDGISDVELRVMVDQIRSLNKSIEELDKAISDDGSQMDGFDNLTSVKGIGAKGASTLLSVIGNVNDFRSAKQLAAYIGIVPRVSDSNETSHHGRITKLGSKIARTTLVQCSLIAKRYNPYLHAFHERIKARRGGAKANIALARKFLEIIYRILKYKLVFEDFTAFKLKTT

SEQ ID NO: 467213 - protein, 355 aa, unidentified
MERYLGLDVHAASCTLAVISEKGRKLRDFPVETNGQALVEAIRMIPGHKHLVFEEGLQSAWLYETLSPHVDEIVVAGVTESRGSKSDKRDAYGLAEKLRVGNLDKEVFKAPRQFSKLRELSRTHVTLVGDSVRAQSRIKSLYRARGIWVTGENVDSVRQRKQWQEQLSPHVQVRATRLYDHLDFLLEQRKQAEADLLREAKKHAIVRILETAPGFGPIRAARLVPVVITPHRFRTKRQFWSYCGLGVVTRSSSDWLQTADGTWIKARVPQTRGLSQAYNHVLKSIFKGAATTVIIQRNKDPMHARYERLLDGGTKPTLAKLSLARMIAATVLRMWKDEEEYDPGRGGASTATREG

SEQ ID NO: 467214 - protein, 348 aa, unidentified
MVADELDYVVGVDTHRDEHVLAVVVAPVGAVVARRAVAANRRGYAQALRFADSYASGRRVWAVEGAGHYGAALARYLSSRSETVLEAGRSPRHERRLQGKDDGLDAVRAARAALGHELASPRAGQRREALRLLLVARRSAVDVRREALVQLRSVIVTSPDRLRDELRRLPVQRLLDRCSRLRRSKTATPDELAVRLVLRTLARRIEAATVEATELEREILAHVRALAPQLLDEPGVGPIVAAQLIVAWSHHGRVRSEAAFARLAGVAPVPASSGQTTRHRLSRGGDRQLNRALHTVILHRRQHDPATKEYIARRVAEGKSRRDATRLLKRYLARHLYRVLDQRTPLIA

SEQ ID NO: 467215 - protein, 391 aa, unidentified
MIYIGIDVAKDKHDCFITNSDGEVLFKAFTITNNLDGFNDLYQKIETVMKDITKVKVGLEATGHYSYNLLGYLIDKGLPTYVINPLHTNLYRKSLSLRQTKTDKVDARTIASILMSDVNLKSYSDISYHNEELKSLTRYRFDKVKERAKLKTSVSRLVCILFPELEKLVPTLHMASVYALLSEFPSAKHVATAHLTRLTNLLSESSKGRYGKDTAITFRDSARASIGSNMPAKSLELKHTIKLIQELDSEIDEIENEIKIIMDEINSPILSIPGINYRMGAMIIAEIGDFNRFDSPDKILAYAGFSPSTYQSGQLDGAYAHMEKRGSRYLRYALYNATKYVCHWDPTFAAYLAKKRAEGKHYNVAISHAVKKLVRVIYHLEKTKQQYIKAA

SEQ ID NO: 467216 - protein, 333 aa, unidentified
MVDGTKGSHRKEGTTKMSENNINAAGIDTGKAKLDVALAGGKARLQIDNAPSGWRKLATWLKRHNIDRIGIEASGGYERGVVAYLREKGFIVILFQPLQIRAYAGFRLQRAKNDRIDADLIAACTAATTTVRQAPDPRFQAFCEHLTLIEQIEEDIVRAKTRLEGFRDDRHREILASEIKRFKAWRTAELKRLLDALRCHNDLANRLTLIESVPGIGSRTALALLIRMPELGSLSREEAAALAGLAPYDDDSGKHQGLRHIAGGRERLRRSLFAAALPAAFQWNPSLVALYARLTAAGKSHKVALIACARKLLIFANTVVARGTPWTEHHATA

SEQ ID NO: 467217 - protein, 331 aa, unidentified
MDEVRRFVGIDVAKVALDVFIGSVGAAFSVANDEVGIRELLRQLEPADFVILEATGGLETPVASALAAAGIAVAIVNPRQVRDFARATGRLAKTDRLDAEVLARFGEAVRPEARRLADEQGQALEALVNRRRQLVEMLTAEKNRRARAPKVLHRSLDEHIRWLQRRLSGFDDELGELIRNTPLWRERDELLRSVPGVGKVLSSTLLAQLPELGMLNRKQIAALAGLAPFNRDSGSLRGSRCIWGGRAQVRRVLYMATVAGVRSNPTIRTFYLRLRANGKHAKPALVACMRKFLVILNAMLHHKTHWQTPALTSPTSTLSPLLGAVSEHGCC

SEQ ID NO: 467218 - protein, 411 aa, unidentified
MHNRQNYLYVGVDLHKEHHTAVIINCWQEKLGEIQFDNKPSAFSKFLLEVETYVSDGLSVVFGLEDVGGYGRALAKYLVDHEQVVKEVNPALSFLERKSQVMIQKNDSWDAECVARILVNKFEQLPNVNPNDLFWSIQQLVSRRNALVKAQSALKNQLHIQLNHHYPSYKKFFSELDGKTALAFWEQYPSPSCLEGTNIKRLTTFLLDVSNNTCSVKKASEILRLVKEDGQTMKEYQEMRNFLVRSIVREIEFKKKEMKYIERELKQLVNLLDYQLETMPGIELVTASALIAEIGDVRRFPNANKLARFAGIAPVYFGSGGKGKTHKSKQGNRALHALFYNLSVQQVQVAKGSKLPRNPVFHAYYQKKLKEGKTKGQALVCIMRRLVNIVYGMMKYKTAYELPVVEEKEVV

SEQ ID NO: 467219 - protein, 421 aa, unidentified
MKTITMHNDRTRVGQPETRWDIAVDVGQKALDWYGEAADKAHQGHIANRSEAILACLEQLKAEALQMGFSGVRIICEPTGGYERRLLRAARQLGCATALVNGEAVNKMQVVESNDTGKSDTKDPRTILLLAKWNKTLTDRPLTDEWLLLRELNARYDRLERDSTRCKNRIHKLLVSVFPDLSFKKDWLFDSRSAQAVVELYGLNAAAMIADGRERCTSKLRRRHIGPKTIGRLWADAERTILIPADPAWLELIADDVRALFAELVALRTRRQATREHMITLVERLHARGATRLQAHPDLISPFMLARVLAETGPLHDFSDFRQLWRYGGLNLRPHQSGAMKGQPRQAKRGRARLRHVLAQAILKRVVHGQLYGEYYHRKRDAGMCGGKAMTAVARKFLKLLFGLEHSKTAFDPQRVFQSAA

SEQ ID NO: 467220 - protein, 384 aa, unidentified
MNKHSMIFIGLDTHKEFHEVAYCEEQRGATPVHYGRIPSSKVSVKKLLRQFESKYPGATLHVVYEAGPCGYWIYRLITSLGHCCYVVAPSLIPKKPGERIKTDRRDALKLVRSLKSEDLTPIYVPEPEDEAVRDLSRAREAAMKDLKEGKYQLKALLLRNNIRYEGTANWSKKHLRWLTELILPHPAQQIVLQEQLQTIEERIRRLERLDNELTHHVHQWRYYPVVKAIQAMRGVRLLVAVGVVAELGDLHRFDHPRKLMAYLGLVPSEQSSGGKRHLGAITKAGNGRARRLLIEGAHSYRYSANVSTELQLRQEGLPKDIVDIAWKAQLRLCKRYQRMSKKGKHYNLIITAIAREMAAYIWAIAKEVVLTPVNPKLRLSRVPA

SEQ ID NO: 467221 - protein, 335 aa, unidentified
MTITTIGLDTSKTWFQVHCVDADGRTVLRRKLARSKVLSFFANIPSCLVGLEACGGSHFWARELAKLGHDARLMPARYVRAYVKTNKHDAADAEACCEAVQRPGMRFAPVKTEEQQSMLMIHRARDLLVRQRTAAVNALRGHLAEFGIVAAKGTAKAHELMRLAGDDERLPPTAREALGYIVAQIHDIESRLKIFEQRILSLAKEDEVCRRLMTVQSIGPYIATAIAATVGDPRNFASGRHFAAWLGLTPKQHSTGGKEKLGGISKRGDSYIRRLLIHGARATVARVRSGQIRSVWLSGLLSRRHFNVATVAWANKTARVAWAVMSTEQAYRRAA

SEQ ID NO: 467222 - protein, 381 aa, unidentified
MPLQQLSPVVDGVDGPLRHRCARMRLLKSQTREPSVNQIIRIGMDTSKHIFQLHGVDAAEQAVLRKRLRRKEVLAFFAKLPPTVIGMEACGAAHYWGRELRKLGHEVKLMAPQHVKAYVKRNKNDGRDAEGTCEAMGRPTMQFVPVKTEEQQAALMLAGVRQQLIARRTQLSNAIRGYAAEFGVTAAKGLDKIEPLLARIAQDESLPALARELFAIEGREYAQVQAELKAIEAKLMAWHRANAASRRLAQIPGVGPIGATALVMKTPDPRAFPSGRHFAAWLGLTPKDHSTAGKTRLGKITRAGDEVLRSLLVAGATAVIQQVRRGRGRPSPWLVALLKRKPPKLAAVALANKIARIAWKLMTTGESYDGARMPGASALAA

SEQ ID NO: 467223 - protein, 339 aa, unidentified
MKLYGAIDLHSNNNVTVLIDEQDQVVYQKRLPNDLALIAQQLSGYQDALQGIVVESTFNWYWLVDGLMDQGHRVHLANTAAIQQYEGLKYTDDHSDARWLAHILRLGVLPEGYIYPKEERAVRDLLRKRSQMVRQRTTNLLSIQNLITRNTGSSIRSNRIKTLDTEQVDELLPNPDLALAVKANLAMINCANGQIDILERTVIDRIKLREEFSFLKTVPGIGQILALTIMLETAEIKRFPTVGDYASYCRCVGSQKLSNGKKKGSGNTKNGNKYLAWAFVEAANFAVRYSSRIKSFYQRKKAKSHGVVAIKAVAHKLCRACYCIMKDRVPFDVAKAFAG

SEQ ID NO: 467224 - protein, 457 aa, unidentified
MRKRGKRTVGIEEAHPFAGMSKVNPNAAGVDIGAVEIVACVAGDESTQIVKAFGNYTVDLQAIGRWLKEHNIKTVAMESTGVYWIPLFEELERQGFECLLISSRSLRRVPGRKSDITDAQWIQTLHNYGLLESSFRPQGELVALRTMLRHRGQLLEHRAPHIQHIQKALLQMNVQLSQALSDVTGETGQAIIRAIVAGERDPQKLAALRDRNCKKSEEEIGKALTGTWREEHLFIVKQSLEMYDFYTKQIEACDAEIDRMYALTRPDWKEDDLPPLPRKKRNSHSKNAPQNTGDIRKHLKRISGVDISVVDGFGVSLAQTVIMEVGTDMSKFPDEKHFCSWLGLAPKHEISGAKVLKNKTLKTKNRAGQAFRMAAHSVKKADCVFGALYRRLRARLGPAQATVATAHAIARVIYRMLKYQVEYEPLSVNEYEKKYEEQQIKYMKKKAAKLGFQLVPA

SEQ ID NO: 467225 - protein, 419 aa, unidentified
MAKKKNSPVVEILHPNCCGLDVHKESISACLHTVDENGRDEFEIREFGAFTKDLFELKKWLVGSGCPIVAMESTGVYWRPVHNVLEGSMEVILVNARHLKNVPGRKTDISDCRWLAGLLRHGLLKASFIPEKQVREWRELDRLRKSHTDTVGDYKRRVHKLFETANIKIDSVVSDLFGVTGRNLIALLGDEKAELSVENIEKCARGSLKSKVKELCYSLAGFFGDHHRFQLRGMMRIISDLESEIISITERLRELMKPHEELMRRLDEVPGINETAAQAVLGNIGTTLKEFASDRNLNSWAGICPGNNESAGKRKSGRNSVRSHPFKKTMVEIAWAAIKKKSSHYREKYYRLKSRMGPKKAIVAIANRITKAVYRIVKHAESYKELGKGYLNEKDRRRKIDNLRRHAKKLGYSLVPSQA

SEQ ID NO: 467226 - protein, 422 aa, unidentified
MKKRAYKTTDVKKVNVDRLQKKVEGHAIVFSVDVAKTDFVACIMTSSKEVLVTLKWKHPSESLVLLELILRDLRWHSLEVVMEPSGTYGDSLRAQFLGHGIDVYRVSPKRSHDASEVYDGVPSMHDAKASAIIGYLHLEGYSEPWPMADENHRTLNAMIRTMNMYDEAYFRNINRLEALTMRYWPELSGILSLQSATLLELLIQFGGPEQVALHQDEAATFMKKIGGVQLKEEKIQAVLASASSTLGVKSIEAERCQIQELCGEIRRQQKYRRRAQLRVEAQTQTVACVNAMSPILGKVTATVIYLALGDLNKHAGAGSVVKALGLNLKERSSGKHQGQLRITKRGSGLARMYLYMAVLRLIHRNSIVNAWYTAKVARDGGKKMKAIVAIMRKIAGALWHVGRGATFDASLLFDTQRFAING

SEQ ID NO: 467227 - protein, 343 aa, unidentified
MQITTIGLDLAKNWFQVHGVDANGQVVVRKRLWRSGVIAYFRSLEPCLVGMEACATAHYWARELAALGHTVKLMPPAYVKAYVKRNKNDAADAEAICEAVTRPSMRFVPVKNAEQQSVLMLHRARSLLVRQRTMLVNALRAHMAEFGIIAPQGLRHVEILTKTIAHEQKQLPELARSILQTIVEQLNGTMARIREIEVSIARWHQQNRVSRSLATVPGVGIMGASAVAATVADPSLFRSGREFAAWLGMTPRQNSSGGKEHLGRTSKRGDKYIRSLLIAGAMAVLRHARNRPTRDGEWVRALLARKPTKVAAVALANKTARIVWAVMMRGDGYRATEVFGQPA

SEQ ID NO: 467228 - protein, 430 aa, unidentified
MTDFHPTPSDAALVAIDIAKVRNEVLIEFPDRKRRKRLSVLNIREDHDRFIETLRSYDYSVVVGFEATGNYHRAIAWRLLDAGFDVRLIPSVGLARTREALHNGWDKNDPKDAQVMLHMLKIGATQHYHDPIAAGINDIQELSKTHEMVSNAKTQIWHRLLTHYLPLYFPEAELFKGKSRSEWFLAFLDMFPTPASITSLEKEAFIEAAWDVVGRKVSKRRVIADIYEIASSSIALPVSLDSPAIGMFRMVLAEARGLIRQRDQIEKHAECMLAQNPDYIRLRQIPGIGPINALTVLAEAGDIRRFKHHRQFLKFCGLDLATYQSGQFRGQSKLSKFGNARLRRTFWMAGQIAIRQRENAFRDKYERYIAKDRDNPHLKRKALSAIAAKMARVTHAIIKSGTDYRPFFERAMPSGRTSLCMGRGGAKATS

SEQ ID NO: 467229 - protein, 321 aa, unidentified
MKIKNLVGVDTHKDSLACFCNGKFKEFKTNKVGFKQAINWAKSSHWAIEGAYCFGQAFSNFLIKNGCEVYEINPLLTKSWRTALKVASPKNDFGDAKVISIFANMDNMNKVSFETIKLKEKLTTRKSLIKQKTQITNHLKMLFYTRGEELPFKALDTQKAINWMLEQDDVIVKTNGKILESIKAGIKSLEEEIEKEMPEPAKALTKMEGISTITACTIYAETKGKLTRKEQFASYCGVAPIDCSSGQTTRRRNNKGGNRVLNSIFYSLSIAQKRYNEKAKAYYEKKLSEGKSPRHARKCLARQLTNIVFKTLKDATEKRKP

SEQ ID NO: 467230 - protein, 343 aa, unidentified
MEQLTIGCDLGDRWTQICVLAGGGEIVEEARVRTTPAGFRRYFSERPTARAVIEVGTHSPWVADLLAELEHDVVVANPRVVRLIYANRNKHDRLDAEALARVGRIDPNLLSPVRHRGRQSRADLALIRARDELVQTRSALVNHVRGVVKSAGERLAACETAAFHRKVRETIPPSLRPALNPVLVVLEQLTEQIRHYERLIEDRAERAYPETSRLTQVHGVGSLTALAFVLTLGDADRFEKSRTVGAFLGLARRQRQSGESDPALGITKHGDRYLRRLLVGSAQRVLGPFGQDSDLRRWGLEIAKRGGRGGKRRAVVAVARKLSVLLHRLWISGEEYVPIGYTG

SEQ ID NO: 467231 - protein, 347 aa, unidentified
MRFYSGQHRHYCGIDLHVKTMYVCILDAAGQVLVHRNVKSTPEAFLEIVAPYRDDLVVAAECMFTWYWLADVCAVEAIPFVLGHALAMKAIHGGKAKNDKIDSRKIAGLLRGGLLPQAYVYPAAMRSTRDLLRRRLHLVRKRGQLLAHIQNTRAQYQIPEFGRRLAYPANRTGVSELFTDPSVRKSIDVDLALLERYDTLITDLELTIVREAKRHDGDAFHRLRSVPGIGKVLALTILYEIHDIARFDRVQEFASYARLVKCAHQSAGKTLGSGGAKMGNVHLKWAFSEAAVLFLRHASGGKRLLSAIEKKHGKGKALSILAHKIGRAVFFMLSRRTVFSMEKFRAA

SEQ ID NO: 467232 - protein, 327 aa, unidentified
MIQSVVGIDVSKDTLDVVLLKEETNAYASFSNNPVGFGKLARWLISQGAGQVHACLEATGQYGDGVAEYLYQAGHMVSVVNPARIKRYGDSKLHRNKTDKADAALIAEFCRKEHPALWTPLPAYLKQLRQMVRRLEDLQANYQQEHNRLSSGISDTWVVEDITDHLKELSKRIKALQKAIFQVIADTAELKEQFDLLLTIPGIGKLTAARLLAEMGDIACFEDAPQLAAYAGLNPKGFRSGSSVHKKTRISKEGRALLRHILYMPAIVACKHNPIIHTFCDRLAQRGLPKMAIVAAAMRKLLHLVFGILKHKQPFDPNYLLQPSFTS

SEQ ID NO: 467233 - protein, 396 aa, unidentified
MLYLGIDIGKNTHVASLIDDNAKLLFKAFSFCNTTEGGESLISKLVSHVPSISEVEIGMEATGHYWLSLYSFLVGKGYVIHVVNPIQTDGWRKGTEIRKRKTDIIDSVLIAELIRYGDFLETSLADENTMSLRNLTRFRHYLVASIGDLKRKAICVLDQVFPEYQSVFSNVFGQTSKELLLQLQSPDDFQSISAEKLEDILKSITFKKFAQNKISTISELAANSFGLSFCRDSFSLQLKLLLEQIKFIEAQVADVEAEIRRLLEKINSPITTIPGIGPINGATILGEIGDISRFSTPAKLVAYAGIDASVSQSGMYQSTNNKMSKRGSPYLRKALFQAALVASNCDPTFKAFYQKKRMEGKHHLTAVGAVARKLCYTIHVILKNNCPYQVQTTSQD

SEQ ID NO: 467234 - protein, 429 aa, unidentified
MRTESTPGARGPVFCGVDTHADSHWLCVLDWRGRRVLSRRFPADAAGYEALAGAIAAAGEPACVAMEGTSSYGAGLTRRLASLGMPVREALSPARTQRRRPGQGKCDESDAERAARAAMSGSKLGTPKSQDGWVDGVRCMLAARSGAVKARTSAINTARSLLTTAPEGLRSRFRGMGGPRLMEELPSVRAEGALGAALGALADLWAAARDAALDMERAIEASLEENCPALLAMYGCGPVSAAKLAVAAGDNPGRLRSEASFAAICGACPIPASSGKTVRHRLNRGGDRQANSALHEIARQRVMRDPETAEYAERARARGKSDREVMRCLKRYVAREAYRALMRPHEIRRPEDASELVAARRAAKVSQVRAASILGTSEKYISMLERGQRELKPIRRAYEAWVEAGLPLDWDRQAFEAERKMDSKKHLAK

SEQ ID NO: 467235 - protein, 319 aa, unidentified
MTSTPVFVGLDVAKTTLDVALRPSGEQWSVPNDEAGVAALVDRLRPLSATLVVCEATGGFERAAIAMLAAAGLPVVVANPRQIRDFARATGQLAKTDQIDAAILALFAERVRPAPRALPSDAAQLLDALLTRRRQLLEMLVAEKNRLGFAPRPLHQGIQQHIRWLERQLDDVTKDLADQIERSPVWRAKDDLLQSVPGVGPIVSAVLLAELPELGALTHKQLATLAGVAPLARDSGTLRGKRMVWGGRAGVRTALYLAALCGRRWNPQLRVFYERLLAAGKPKKVALIACARKLLTILNAMLRDNTSWAAPAPAIQHSC

SEQ ID NO: 467236 - protein, 405 aa, unidentified
MAKLFVGLDWSETHHDVFIEDDDGRRVDSGRLPEGVEGVARFHAMVADRVDNPAEVIVATETDRGLFIGSLIAAGYTVMAVNPMSTSRYRERHSTSGAKSDPGDAKVLADLARTDYHNHRPVAGDTDLVNSIKVLTRAHQSLIWTRQRQTNQLRSTLREFYPGALNAFSDLTHGDALEVLRVAPTPELGRRLSISKIRSALRRGGRQRRLDDRAAEIQQALRADQLAAPDLITESMGSVVTALVGVISELNTQISGLEADLADRFDQHPDTKIIRSLPGLGMTLGARVLAEFGDDPNRYADAKSRKNYAGTSPITRASGKHRVVLARYARNKHLADACYLWAFASITVSPGARAFYDNRRERGDTHNRALRALGNRLVGILHGCLRHHTSYDEHTAWAHRHDLAA

SEQ ID NO: 467237 - protein, 352 aa, unidentified
MAKIDFDELMSIGIDIGKDTFHIVGFNPSGQRVLRKQIKRLALVATFEKLPRCIVGMEACLSAHFVSRTLREMGFEPRIIPAIHVKPFNKGQKNDYNDAEAIAEAALRPNLKAVSEKTQDQLDLQALHRVRSRLVSRRTATINQIRAFLIEQGITVRKGLRALKNSFEAILQERKDEISPRMRSILIGLYGDWMWLDDRINTVSQDIEEISRTEENCVNVMTMPGIGPMISTAMVAAIGEGEAFDRGRDFAAWVGLVPRQYSTGGRTILGRISKRGSRYLRMLFVQAAKIIMMRPHRWPDFSFGEWLARASERMHRNKAAVALANKLARMAWSILRHKTAFDAPRDEVAIGV

SEQ ID NO: 467238 - protein, 344 aa, unidentified
MIGIDIGKNSFHVVGLDKRGAIVLRQKWSRGQVETRLANMPPCLIGMEACVGAHHLSRKLKGLGHDARLMPAKYVRPYSKGQKNDFRDAEAIAEAVQRPTMRFVATKTAEQLDLQALHRVRERLVSQRTGVINQIRAFLLERGVAVRQGLRFLRAELPDLLATRTEALSPRMTRVIEDLAGDWRRLDERIESLSTEIAALAHQDAACNRLMTVPGVGPIISSAMVAAIGTGDVFSKGRDFGAWLGLVPKQISTGDRTILGKISRRGNRYLRVLFVQAAWVVLIRPKSWERYGLKPWIEAAKKRLHHNVLAIALANKLARIAWAVLNKERNFECNSMDKMASRPA

SEQ ID NO: 467239 - protein, 312 aa, unidentified
MTEISIGIDISKDHLDAHRLPDGAAGQFANSKAGLTRLIRWIGVADVARVVFEPTGRYHRDLERRLGEAGYPLAKVNPRQARRFAEALGVRAKTDRADAAMLARMGAALALQPQPVKSEILHELNDLQVARRALVKDRTAAKNRAKALRLPLLKRQNAARLKRIEADLAQIDGAITAMIMAEPELGARHEILISIAGISGVTAAAMITLMPELGALDQKQAASLAGLAPVTRQSGNWRGKAFIQGGRTALREALYMPALVACRFNPDLKAKYIQLIAAGKPPKVAIVAIMRKLLILANALIRDNRKWTPNAP

SEQ ID NO: 467240 - protein, 342 aa, unidentified
MKIIRVGVDLAKNVFQVHGVDRNEKPVWKRKLKRDEWIRVMLEKVEPGCVIGMEACGGAHHWARKLEAHGYSVKLIAPQFVKPYVKSNKNDARDAEAICEAMSRPNMRFVKIKTVAQQDVQAVHRVRAGLMEQRIAKANQIRGLVSEYGLVAPIQVSHLRAAIPCWLEDAENGLTGRFRRLLNGLWADLLSLDQRLKELDREIAEIAAADPVAQRLQQLCGVGPLTATALLATVGDASQFANGRQMAVSLGLTPRQNSSGGKEKLLGISKRGDPYVRSLLVHGARSVRLAKDKEDRLSQWVMRIANAHHPNVAVVAMANKTARIAWAMIRNGSNYQPELAAD

SEQ ID NO: 467241 - protein, 368 aa, unidentified
MNDLIRIGVDTSKSVFQLHGVNAAEQPVLRKKLRRRQFIEFFEKLPATRVGIEACGASHHWGRELSALGHEVVLLPPQRVKPYVERNKNDAADAEAICEAMSRPRMSFVPVKTAEQQAALMLVGVRDQLVGRRTQLSNAIRGYAAEFGLVAAKGTNKIEPLLVRIASDENLPPLAKDLFATLGNEYVRLKPELRKIEAKLMAWHRGNELSRRLAEIPSVGPLGATLSVMKVGNPHAFRSGRDFSAWLGMTPKDHSTAGKVRLGTITRAGDEALRSVLVAGATSVIQQVRKGRGHPSPWLVALVKRKPPKLAAVALANKTARTIWKLMVSGERYNPQRARQRFVPPTDSLAPGERRQGQAACGGDLRSA

SEQ ID NO: 467242 - protein, 354 aa, unidentified
MTQTFNAAVSVVGIDIGKSSFHVVGQDERGAIVVRQKWSRGQVEARFANMPPCLVGMEACVGAHHLSRKLKSLGHNARLMPAKYVRPYSKGQKNDFRDAEAIAEAVQRPTMKFVATKTADQLDLQALHRVRERLVSQRTGIINQIRAFLLERGIAVRQGQRFLRAELPRILTTPPEVLSPRMVRIVEDLTGDWRRLDERVERLSDEIEAIARQDAGCERLMSVPGIGPIISSAMVAAIGAGDVFTRGRDFAAWLGLVPKQKSTGDRTILGKISRRGNRYLRVLFVQAAWVVLIKPKIWERHGLKPWIEAARKRLHHNVLAIALANKLARIAWSVLARGRAFEARKMDQAANQSA

SEQ ID NO: 467243 - protein, 337 aa, unidentified
MTSENSFIGIDVGASELAVVTRKMGKSASVSVFQNTVAEHQKLIQKILKMGDCIVCLEATGTYSMDIAIALFDAEIPVMVINPKVSHNFAKVLAKHSKTDSVDGDTLAQYAERMPFISWVRPTNEAMALRVFSRRVRALTDQKTVAKNQAHALSFIAMTPTAVMKDLQLSVAQLEKRILALNKAALKHIDAFDALKNAFALLIGVTGIAQTSAIALLGELLLLPSGLHHTQWVKFAGLDPKHFRSGTSVDKKARISKAGNHYIRAALYMPALSAKQHDPYVKAFFDHLIEMGKTPMQAVCAVMRKLLHALHGMLTNNQPFDNTRFYAKPSENNSVST

SEQ ID NO: 467244 - protein, 372 aa, unidentified
MDTMYERCCGLDIHKKTIEACFRSGKKKTHMSFGTTSAELRKLTMWLVENDCQSVAMESTGSYWKPIFNILELSGTDMEIIVVNARHMKNVPGRKTDVHDAEWIAELLQYGLLRPSFIPDREQRELRELSRYRKSLVGERAREINRLQKMLEGGNIKLTSVVSEVTGYSSRRLLDRLLRSDEPMTEEVISELVHTSLVGKSKELGIALDGLLSELQKELLIKVLDHIDDMSRRIADLDDFCRKQMKKYEDALDKLDEIPGIARRTAETILIETGLDMSRFPTAKHFARWAGLAPGNNESAGKRSSGRTTKGNPTLKSTLIQSAKVAARKKDSFFKARYQKIAARRGANRASVAVAHSMLIAIYHILKSGERF

SEQ ID NO: 467245 - protein, 354 aa, unidentified
MKRTTKYVALDVHQATTAASVREGNGRVIARTLLPTEEGAILEFFRGMRGAIHVAFEEGTQAQWLHGLLSQRVDRVVVCDRRGERRQGNRNDELDADELSELLRRGALRAVYHGDGRRAVLKELTRNYENLVEDSTRVMLRLKALFRARGIKTPGQRVYHPRERARWLAKLPDRGARLRAETLYAELDVLRTLRPRAKAAMLAEARRDPAWTVLQTIPFMGPVRVALLLATMQTPWRFRTKRNLWAYAGLAVVTHSSADYTIVAGRPVRRHRAPLTRGLNRNHNRILKDVFKGAASAAASRPGPLQDWYHSVLERGVREELARVTLARKLAAITLRLWKKGERFDPTKLTKPAR

SEQ ID NO: 467246 - protein, 401 aa, unidentified
MNPVIGLDVSKGESHAQAFSDRGSPYGKTFRFEHNLEGLASFLRFTQNLESFTGQRPAIVLEATGHYHSPVIQFLDDHQYLYIVINPLISHQAKKMNLRKVKTDVADAYQLGEMFFKEELEPYKKRGQYLMNLRYLTRQHESLTEMYVQVKLQFQAVLDQVFPEYHGVFGDLYSKVSLRFLAQYPTSQSVLAMSEENVTASIQRLVGHVSSNRWSLERAQKLMAAAERNPFRETAFPSHLISLELFVNLLLQYQEHLAKLDKSIEILAEELLEYDLIQSIPGIGTKIAATILAEIGEIDRFDHPKKLVAFAGIDPSVFSSGKFTATRNKITKRGSRRLRTALYQAVRCGLKGSRNKKIRAYYDKKRSEGKLFKVAVIACVNRLIHWIYAILTKKEPFRLTE

SEQ ID NO: 467247 - protein, 344 aa, unidentified
MTPHPLIKTVPESQPALFAGIDVGAEELILVIRKNGKSVDPQKFANPPADRARLVKKLVKLPGLIVCLEATGIYHFDLALALHDAGVLLRVINPKASHNFAKVLMKNSKTDAVDADTLAEYAARMDFVAWTRPTNEKLALRSFARRINALTGQKAAAKNHLHALAASQETPKAVLKDAKLAITQLEKRIDQMTAQALLLIAKHPELNRVLTLLTGIKGIAETSAIALMGELLLLPPGLSHREWVKFAGLDPKAFDSGKSVHKKTRMSKAGNRHIRSALYMPALSAKTHDAHVSAFFQHLIANGKKPLQAVCAVMRKLLHAIHGMLKNDTPFDNTRFYAIPVAAN

SEQ ID NO: 467248 - protein, 466 aa, unidentified
MENNYILYVGMDVSKGKADAAILKVSDRRSVKPKFLRKKLSFKFVKSEVASFLETVRSYSDVNCTSICFALEVTGIYSTNVYDYIKANLYENESIKFLNTDFVNQWRIAHNIAKSDPLDAQTISTIIGTDLDVQYVNDNVFENKNGYQDLKALVHRHYQIKKIYSQEINRLIAQCDCLFPELQYVFEPKSAAFIAVLSSYPTTHDIINASRVEVFDVVYEATKHRCSMDKVDKLFELCQDTLVPDDISSYGKSIILDLVENIKNIKGQLKSIERYIKDIASLNPAYKLLLTITGCGPITAATVIAETGNIRRFKNADCFVSYSGTSPRNKRSGTSVETMGKISKKGSRYLRHAIYMIAEFARRHNPVLKHQFERIKNGNKKRHKLANIAIANKIARYIYSIMKNKSSFVILHDHIMRLPEETRDTFFNSISLDFPKNTRKQIYQYSDINGELHRFVYIKTDEMIPA

SEQ ID NO: 467249 - protein, 401 aa, unidentified
MDPHLCIGIDVGCKAHRVGIATPDGSILEEFDISHTDAGFQEFFRRVEQRRHQLALPVAVAMEGYNGYARPLDRLVQEKGYRLFNVNNLKLARFKEVFPGAAKTDPIDARKILELFRLKDQLPMAKDAIQEVVSVPLVNEKLKRLSRRRRRLVIEKTRVLNRMQADLQAVCPELLAATNDADNLWFLRLLTFREDLRQLARLRCVTIRQIPGIGETFSRIIQDWQRKARFSNEVEYVGPMIIQDARRILELRQQINTLDEDMETLADQSEIARRLSTIPGFGKTSIAELAGEIGTMQRFAAETSLALYFGMCPLTHQSGQICRVRIPRQVNTRCKAAMMTATAHHYRCVPQSQVYYDRKRAEGKTHNQAVRALGRHMVRVIWAMLRDQRDYEPREDVHPMT

SEQ ID NO: 467250 - protein, 342 aa, unidentified
MEKLSIIGLDLAKRSFQAHGAHAGGGVAFRKKLSREKVLAFLGEQSRCVVAMEACGSAHYWGRAIGDLGHEVRLIPPAYVKPFVKRQKNDAADAEAICEAASRPTMRFVEVKTQEQQARAMLFRTRELLVRQRTQLINALRGNLAEHGVVAPQGPANIKELAQAVEEEKTSLPLLVVELSRVFLEQIDGLSTKIGELGKATVHEAARSATSQRLQTMPGVGPITAMAIETFAPPMAVFKRGRDFAAWLGLVPRQHSTGGKQVLGKTSKMGQRDIRRLLIIGAMAVVRWASRKGARDGTWLQRMLARKPRMLVAIALANKMARSIWAMLTKNEDYRAPAAAEI

SEQ ID NO: 467251 - protein, 343 aa, unidentified
MEYYAGIDVSLEWSSVCIVDATGKIVAETKVTSEPEALIGWLRSLPFALSRIGLEAGPLSQWLFAGLEANGLAAELLETRHVRAAFRSMPVKTDKKDARGIAQLMRLGWFRPVHCKSLAAQETRALLTARKLLQTKRHDVEMSVRGVLRGFGLKVGPTTPRSFEGRVRELVDGHPTLVMVADALLAARAELLRRFKDLEKQILAVGRADQRVRRLMTVPGVGNLVALTFTSAIDDSGRFRSSRQVGAYFGLTPSRYQSGETDVTGRISKIGDHGVRTALYEAANVMLTRPLKGSSLKDWALAVARRAGPRKAKVALARKLAVILHRMLVDGTTFVPRPTPMAK

SEQ ID NO: 467252 - protein, 320 aa, unidentified
MTTFDSHVIVGVDVAKDEIVVYRRDLEKTQVIANEGLALKKWLRSLPTDSAIAIEATNIYHIETVELAYSMGHRIFVVDPGKLSKYRDSLGKRAKTDASDAALLARYLAHEGGALRLWSPPPEVYNELKKLLHRRAKLVSIQVTLRQSWGNNTDLQHEFGAVIDSLKALDHAIQEQMKNALNKAGLMPQIKRCEGIEGVGFLTATAFLTAFMRGEFENSDAYIAFLGLDLCVRDSGKKSGRRRLTKKGDPEIRRLGHNASMAACRTVTWKPFYQRHLESGKARTQALVILTRKLARVAFSLMKNQTDYRPNSMFGDLPQT

SEQ ID NO: 467253 - protein, 472 aa, unidentified
MRGYAQTTGPTRKTRKQEGPAGLDVVHPNAAGIDVGSGEMWVCVPAGRAPERVRRFGTVTSQLQAIADWLHACGVETVAMESTGVYWIALFQILESRGFAVYLVNARHVKNVPGRRKTDRLDCQWLQKLHACGLLRASFRPTDRVCALRSLLRQRDTLIRMASRHIQHMQKALREMNVLLDQVTTDITGTTGMRIIDAILGGCRDYAQMARLRDPRLHASEEQIAEALRGDYRPEHLFVLKQALAAYRFVWEQIQQLDAEVEQTLNALVQHAGKSAVALPEAGLTGCEKRRGNAPDYDVQTYLYRLTGVDLTRIPGLAAAAIQSLISETGVDMSRWPTEKHFASWLGLAPDPKISGGQIIGQTRRHVQSRAARVLRVGAMTLRRSPTWLGAFYRRIKARAGGAMAITATAHKLAVIYYTMLRTNQEYRALSAIDYEQRFQERMLRNLKRRAKQCGFELVAVAPSGPVVNSAN

SEQ ID NO: 467254 - protein, 415 aa, unidentified
MDLLFTHCAGLDVHKKTIVACVLLSRPEGMQRSIKHFATTMAGLETLDAWLAGLAVTHVAMESTGVYWKPVFNVLSSHLEVWIVNARDMKQVPGRKTDVCDAEWICKLMSFGLLKRSYIPVVEQRDLRDLTRYRRRLVEERTSASNRLEKILEDSNIKLSAVVSKLQGVSARAMIEALIAGETDTAKIADLAKASLRSKIPELEAALVGQIREHHRFMWRELLYHWDELNVRIAAINERIAEHTAPHEQLIQRLSTIPGISRWTAEVILAEIGPDVTHFATAHHLASWACLCPGNNISAKKRRTGKMRRGQNWLRPALVEAAWATSHTKTYFGSQFHRLRARRGDKRAAVAVAHSILIVVYHLLANPEAVYTELGADYFTKRNAEQEQRRAIRKLETLGYTVNLTPVPAASAAPG

SEQ ID NO: 467255 - protein, 420 aa, unidentified
MLKPETTPPFVACIGLDWGDQSHAVALQPVQGKTESCTLVNSPEVLHTWLQELAQRFEGRPVALAVETSRGPLIHVFSAYPWLTVYPIHPATSARYRSAFKPSGAKDDQPDALLLLELVLCHQAKLRPLQLQDTATRKLGALVELRRDLVDRRTQALNQLTSLLKSYYPQALELAGKDLSTALALDFLTRWPDLLALKTARPASLKSFYYRHCVRSEELVAQRLALVQKARALTTDEAVLEPALLHLQALVAQLRVFLKHVALLEKQIHSLFQSHEEAYLFRDLPGAGAALKPRLLVAFGQDRTLYPDPASFQKLSGVAPVIEKSGHQSWTHWRWQASRFLRQTLIEWAGQTVIYSTWAAAYYKAMKAKGKRHHIILRALAFKWIRILWKCWQTRIPYDEARYLKQLAARKSPLAVKINP

SEQ ID NO: 467256 - protein, 386 aa, unidentified
MQASNRSTPIANDLSTIFVAIELSRKSWLVTMHSPDKDRMSRHKVESGDHAGLLALIERIRERAARALGAAPAVVSCYEAGYDGFWLHRLLLAAGITNHVFDPASIMVDQRARRAKTDRIDGEQMLRTLMAYCRGEPRVVRVVRVPSPEQEDARRASRERDRLVKEQTAHTTRIKALLRLLGMAVGNPHRRDWLSWLSAQRDWQGQAVPPRIKAELEREHARLMLVRQQLDALAPVRAGAELTAAAAEMAQRSDLLLRLKSLGPVFATTLTNEAFYKDFRNRREVASYFGLTPSPWQSGATDREQGISKAGNRRAREKTIELAWLWLRHQPDSALTQWFRQRTLNASKRIKRIAIVALARKLIVALWRFLTTGLVPAGAVLKAAKA

SEQ ID NO: 467257 - protein, 343 aa, unidentified
MQAVTTIGLDIAKSVFQVHGVDAHGNVVVRRQLRRRQVLAFFKKLPACLVGVEACATSHHWSRELQALGHTVRLMPPAYVKPYLKRQKNDAADAEAICEAVVRPSMRFVETKTPEQQSCLMLHRTRHLFVRQQTAVINAIRAHLAEFGIVAPVGRNGVEELLDVVADPDDDRVPEVARECLAALSAQLRMLKAQILEFDRRILAWHRSNATSKRLDEIPGVGPVLATALVASVANPKAFRSGRDFSAWVGLVPKQNSSGGKEKLGSITKRGDRYLRSLFTAGALAVIRYAKIHGTKHRPWLTALLARRPTKVAAIALANKIARMAWAMMAKGERYREPVALAA

SEQ ID NO: 467258 - protein, 347 aa, unidentified
MLHVGLDLSRTRLDVHVMDEAGAPVAVTTAAPDAGGLASLAHRVGGFGQPVRAAIESMYGARFVHDQLELRGWSVEIADAVKVKGFAPLACKTDKIDAWVLAELSRRDLVPAIWLPTPGIRAERERARWRLHLVRHRTALKNRIHATLLAFGHPCPVSDLFGTAGRRLLEGLALPEPWATDVTAALELIDILGGQIDDCEAALRRAGAEHRYVPLLMTTPGIGWVLGYTIAAEIGDIGRFSTPKKLVGYTGLCPAVDQSGGHDWRGELAKNGPKYLRWALIEAATHAARHPAYAGRYQRTKTRLGKQRGAKVARVDIARKLAEAIWWMLTTNKPFAPAGAPRTPLAA

SEQ ID NO: 467259 - protein, 413 aa, unidentified
MIIQVIYKRFCGLDVHKEMVVACVMIREKDKAQKEIRTFRTMTSDLLVLYDWLLAHGVTHVAMESTGFYWKPIFNLLEGSFEVLLVNANHIKAVPGRKTDVKDCEWIADLLSHGLLKGSFIPPEPVRDLPDLTRYRKSLMDERIREINRLQKLLESANIKLSSVASDILGVSGKAMLEALVSGNTSPEILADLARGKLRKKLSLLRDALQGRFRAHHQFMLAQILSHLDFLDEAIEQISKEVENRIVPFLKEIELLKTIPGVDQKTAELIVAKIGVDMNRFPTHRHLASWAGLCPGNNESAGKRKSGKTRKGDRWLKRGLIESSWAISRTNNTYLSALYHRMARRRGKKKAVVAVAHAKLVTIYHMLKHKLPYHELGADYFDRLNITYIKNHFVNRLERLGYKVILEPSQIAA

SEQ ID NO: 467260 - protein, 347 aa, unidentified
MLADQVDYVVGVDPHRDSHALAIVHVLSGAVAFETTIAASSQGYAESLQLVDAQAPGRRAFAVEGSGSFGAGLTRFLTSRGERVLEVSRLRRERRSGGKTDALDAVRAARSVLGQERPATPRAGGERQALQALVAAREGAVNAKCAGLAQIRDLLITTPEPLRSELRPLTQAPLLRRLAATRPEGRRDPELRGSMLALRSVARRVLQLQAEERELGRQIEALTRKLAPQLLDQPGVGPHAAAQLVLSWSHPGRIRSEAAFARLAGTAPIPASSGQTVRYRLDRSGDRKLNRALHLILVTRKRTHPPTRAYIERRIREGKTRREATRCLKRYLARNLYRLLEHPPMPA

SEQ ID NO: 467261 - protein, 451 aa, unidentified
MPQPILAVGVDPAKRLHRAVAVLFPDEVVLDVELPNAFDAVANLDLRLCELANQHGADLVYGLEDHRRYGRLFCQVLTERGRDVRVVNPLWTNRQRAFYGQGKDDAIDGRSIAAVVLRRHHQLPLASDFGEVAQAIREAERSLQDLSKVGTQLVNRLHLQLSDTYTAAYEEYFGKLKSPLALRFFRRFPLPQDLVGHNVEMLASLLLDLAGGKVGPHKGGNRLIAMRSKAQAILETSGAMRASPRTLALELKAELIRQLCDELLANHDRIIRLERMLREQLLPATKQTITTITGISTILAATIIGETGSISRFRSPAAFAVYNGTAPARNSTGGRDRHKARRDCNHRLKRAFYLAARAAVLHDPIAKAYHQSCKSRGLSYVEALKRVARRMSDVVYALLKSGKAYDRSIIEHAIERRLEQAAHAARSHAKQSLVHSRPRKSNSPLSQRQVM

SEQ ID NO: 467262 - protein, 345 aa, unidentified
MNHCGLDVAMKSSYVYVTDEKGTKLTSGEVETEREALKRRLTPYLRGGLRVAVEAGNQTAWIHDLLVEMGAEVIVVNPTKVKLIAESRKKTDKIDAKILCELLRLDALPHPVHMPGKEAREVRGLLVARRQLVNARTKLVNVVRGLVKQEGIRLAAAELLSTMGWERLLQRTFRSTHLRPVIESYAQNVKTLTESIRKLEKELAAREAKDERAQRLQTMPAVGRIGSMTLLAAVDRIERFPSARKLVGYSGLAPTVRASGDRVEYGSISREGRSELRGVWVQIAHLVARDRSPEAKPLRGWYLKVAKRRGVKTAMVALARKLLVIAYHMLTKGKDYDPRLLRKAG

SEQ ID NO: 467263 - protein, 437 aa, unidentified
MHEVEDEPLFAERVAGIDIAKAEVMVTIRVPVDTGSGRRQQETRSFRATRKDLLHLADWLRSWGVTRAGMEATGDYWKPVYFLLEQEGFDCQLYHAAQVKVLPGRPKTDKLDSVWLAKITERGALPSSFVPPEPIRRLRTCTRYRRHLTQARTAEKQRCEKLLEDAHLKLSTVITDIHGVSGRDMLTAIIAGERNPTVLAQMARTRMRGKIRQLEEALDCSFFTAEHAFALAMMLANIDHLTAQISELSARIDALCEPYLHQISQLDAVPGFGIITAQDIIAEIGTDMTVFPTAGHLASWARRCPQVTSSAGKRKGSNATGRGNPYIGAALGEAAVNAGRTSTFLGAKYRRLVKRMPKKKAQGAVSRTQLIITHALLSDPDAVYTDLGTGYYEQRDNIRRQVHNHVRAIERNGYKVTLEPIDPDPTDPGTLPVGKAS

SEQ ID NO: 467264 - protein, 367 aa, unidentified
MESVVYVGMDVHKESVAIAVLRDSHREAEVVRTIRNERRYIARFFQRLKEKESVILSCYEAGPTGFALYRQLEEMEITCYVAAPSLLPRKPGDRIKTDNRDALMLAKALRNQELVPIHIPEKSDEAVRDSLRMVDDMRKDAKRHKQRLLQFLLRLGFKYDSGKSSWTGAHRTWMKRLHFEQENHQWVFQEYYSAVCEAEEKIERLNEKIEELSAEKRYQQRVSQLRCFKGVDTLTALTFVAEIGDFRRFGTAQKFMAYLGLVPSEYSSGEKRRVGGITKAGNSRLRRLLIESSWHYRSYQPSKRLTQRRRGQPPEVVCYANKAGRRLSRKYSKMIYRGVPSQKTVTAVARELAGFIWGMMVGKIELA

SEQ ID NO: 467265 - protein, 354 aa, unidentified
MRSTAETGLVVGAGTHRDTHTAALCDRAGQSLAVQQFIADPGGYAAALAWARQEAGEAGLAWAIEGTRHYGLGLARYLTAAGELVEEIDASKHAGKRRNGKSDAIDAVRAAREMLARPAAAQMRADGDREALRLLMCDRDNAVASAKTARTLLTSVIVTAPAAVREQLRHIPRDRRASVCASLTSPPGVDRQTRVLYQTLARLGQRITTLARTAADLEKQISTLVEDMTPGLVAAEAGLGALTAAQLLLSYSHHGRIRSEAAFGMLSGTAPVPVSSGRTDRHRLNRLGDRQLNRALQVIAVARMRSHPPTQAYVQRRLAEGKTLREIRRCIKRYLARHLYRALRNQPGLELPTA

SEQ ID NO: 467266 - protein, 349 aa, unidentified
MKHYAGMDVSLEETAVAVVDEAGKVVRDLKVASEPAALIEYFRGCGLALERIGLEAGPLSQWLCAGLRAAGLQVVCLEARLVKAALSAQKNKTDRNDARGIAQIVRTGWYQEVHIKSQRAQEVRVLLTNRRMLLNQRKDIDNELRGVLRNFGLKVGKTGQGKGKFEARIRELLSQAPSLRAMMVPMLAVRKVLINEYERLHRMLLSIVRADGTCKRMMTTPSVGPVTALAYVSGVDDPGRFQSSQAVGAHFGMTPRKYQSGEMDFNGRISKCGDQLVRTALYEAAGTLLTRVKKPSSLREWGLRVAKNRGMGKAKIAVARRLAVILHRMWVDGTEFEAKTSVQAVALVA

SEQ ID NO: 467267 - protein, 356 aa, unidentified
MKQVKTLSFAGQDIYCGIDVHKKDWSICIRDNERELRCFSQPPHPAILADHLKRNYPQANFHAVYEAGFCGYWIQQALSQQGISCIITHAADVPTTDKDRRQKTDRVDCRKLAQALKERSIRAIYIPSQQIIEDRSLVRGREQLVQDQTRYKNRILSWLHFFGITIPEGYKKSTHFSKRFISWLEHLPIHENAKSSLQAKLGALQGIRNQLLLANRSLRKLAQSEKYQKKVELLRSIPGIGITNAIIFLTELDNINRFKTFDQLSSYAGLKPDIYSSSDTTIIKGITHRCNLLLRESLVESAWKAVAKDPALLMAYKEYKKRMHYNNAIIRITKKLLRRICYVLLHQSPYVTGIVG

SEQ ID NO: 467268 - protein, 459 aa, unidentified
MNRKQRREMQRKIQSQDLNLEVVHPDAAGIDIGNEVHYVAVPPNRSGEAVRRFGCTTAELRAMADWLKQCGIRTVAMQSTGVYWIAVFDILEEAGLEVYLVNARETKNLPGRKSDVQESQWLMKLHTYGLLRNSFRPPQEIRTLRTYWRQRSDLVRAAGRHIQRMQKALTQMNIQLANVLSDISGKSGQAIIKAILQGERDAGELAALCNGRVQASQEEVAGSLEGNWQDDLLFVLQQEQDGYEFCQTQMAECDRHLEQCLQQRADRSQGASLPVEKRKERRKKKKGNKPQFELRVALFRMAGTDLTRIDSVDVMTAMTILSEVGWDMSKWKTEDHFVSWLRLCPDNRISGDKIIGKGRLPTNNRVTIALKIAASTLRISQTYLGAQFRRLRTKLGSPVAIKAMAAKLARLIYRMLRFGMQYVDQGAEFYEAQHRKLQISHLKRKASQLGFQIIEASAA

SEQ ID NO: 467269 - protein, 414 aa, unidentified
MAEEETISWFAGVDWGSERHQVCLLDARGTTVGEREFAHSGEGLAELGNWLLSMASGASTVAVAIEVPHGPVVDALIDRGFVVYAINPKQLDRLRDRFSVAGAKDDRRDAYVQADGLRTDRRLFRRLQVVDPRLIELRAWSRLAEELRAERVRLSNRVHHQLWRYYPQMQKLTNDLAAPWFLELWAIASTPAKAGRLRKSTVERLLKLHRIRRMDAETVLRILREPAIRVAEGVAEAASIHMRSLVARLRIVNRELREAERKLDELCTAISEIEQTSGEGLQRRDVAILRSMPGIGRINLGTLLSEASGPLSRRDYEGLRTLSGAAPVTKRSGKSLIVVRRYAAHVRLRDTVYHWARVATQRDPKCRARYTALRKRGHSHGRALRGVADRLIALACLLLQRQTLFDPYFGRPTT

SEQ ID NO: 467270 - protein, 352 aa, unidentified
MTVTIVETRVQTRAITGGVDTHAEVHVAAALDPVGGLLGVAEFPASPAGYAQLLGWLRGFGTVCLVGIEGTGSYGAGLTRHITAAGVRVVEVDRADRQDRRRQGKSDPLDAVSAARAAQSGRARGAPKGRDGQVEAIRALMVAKRTARAERVQTINQARALVLTGPDDIRARFAGHATDALVAELAALRPRPGSMVRYHTLLSLRELGKRTQFLDGQLERLDGFIVPLVTARAPGLLALYGVGPHIAAMLLIAAGDHPERLRSEAAWAHLCAAAPIPASSGKVNRHRLNPHGDRQANHALWQIVITRMSSHPATRAYVARRTKEGLSKKEIIRCLKRYVAREVYPHLRSGAG

SEQ ID NO: 467271 - protein, 366 aa, unidentified
MIHPCVSSRNRQLQGRFTVKILAIDLGKSSSVACIYRVEGGTHEFRRLPTRAVEIGRVVDACRPDRVLIASCSLAGWVCDLLASTGVEIQVANTAAAAWRWSNTKRKTDRDDALRLAQMSALGQLPQVAVPPRPIRQWRALIRYRHHLVQRRTQIRNRIRALFDREGLSLPNGALCWTEAGIAMLQVQARSLDDVEMPELWRGEFECELMALRAIEELIVQVRKKLDGIEQQQEKCRLLRTIPGVGPRLAEIVVAVLNDPQRFRSSKQVACYVGLTPRQYQSGDRDRHGRISCEGNSLLRAMLVEVSWVSLRYNSWARTIYERVRRGSPARKKIAIIAVARRLLVRCWAMLRDGTTWKTPLASSIG

SEQ ID NO: 467272 - protein, 389 aa, unidentified
MKIYVGIDIAKLNHFAAAISSDGEIIIEPFKFSNDADGFQLLVSKLESFDKNSLIIGLESTAHYGDNLVRYLVTELYQVCVLNPIKTCQMRKNNVRKTKTDKVDTYGIAKTLMMQDNLRFVSFFDLDMMDLKALGRFRQKTIKQRTRLKIQLTTYVDQVFPEIQYFFKSGLHQHAVYALLKEAPSPKEIASMHMTHLANLLKVNSHGHFTKEQAKELRVLAQKSVGANDSAISIQITQTIQQIELLDSQLEKIEAEMTDIMKFNDSVIMTIPGIGYINGGMILGEIGDIHRFSNPNKLLAFAGLDPSVYQSGNFQAKTTRMSKRGSRVLRYALVNAAWNVVRNNATFKAYYDAKRAEGRSHYNALGHCSGKLVRVIWKMLTDNVEFNLK

SEQ ID NO: 467273 - protein, 346 aa, unidentified
MEVYVGMDVHRKRSQVAVLDQHGGQVLNRNLPNDPAELVPVLGRLAPGTPVAFEAAYGWGWLVDLLDELGLEPHLVHPTRCKAIASARLKDDKVDARTLAHLLRTDLLPEAWIAPPAVRDQRALLRHRVALVQFATAARNRVHAVLADRGIRVEQRLWSANGRAWLAAMDLPAVQRAIIDDCLTLIDAIDPIVARLERELRVRAKPDPRVTALQVLPGIGQITAMTLVAEIGDIGRFPTARKLCAWAGLTPTVRNSDRKVRHGHITKQGSSAVRWVLSEAAQRAKTQPPFARFYAQTAARRGTQIATVAVARKLLARCFHILKEADTTTTTGEGRPAGCARESACA

SEQ ID NO: 467274 - protein, 391 aa, unidentified
MFYIGIDIAKKNHEASIIDSSGKSLSKSISFPNSTKGIEKFNNFISEFGVTTNNCIIGMEATGHYWISLFSYIIDLGFTCYVINPIQSDAFRKMYVRQTKNDSVDSFIIAQIMRFGEFSISNFSDENTFALRNLTRYRFALVDECSDWKRKLVAILDQVFPEYSSLFSNIYGVSSKELLSKYPLPEDMLSIPAEELGNLLCKCSKGRLGINKAEEIQSCARETFGIKFAKRSFSFQIKQIISQISFLEEQLKEIEIEISYLLEDICPIITTITGIGSVLGASIVSEIGNISRFERANQLVAYAGLDTRIKQSGDFSATNTKLSKRGSPYLRRSIWLAATVAAFKDPALSIYYQGLRARGKAHGTAIGAVARKLTNIIFAVLRDQKPYTPNI

SEQ ID NO: 467275 - protein, 339 aa, unidentified
MELKRVGMDLAKRVFQVHGVDAGERPVARKALSRAQMRQFFQTLAPTLIGMEACGSAHYWARELAAMGHVVKLIPPQFVKPYVKGNKNDANDAEAICEAVSRPNMRFVTVKSADQQAMQSVHRVRERVVKARTALVNEIRGLLAEFGLFIDTQGVAAVRKALPGFLEDGENGLPGTFRELLSGLYDELLAMETRVAALNRQLTAHADVDDRVRQVQQVPGIGPVSASAVLASVGDAKQFQSGRDFAAWLGLVPSQHSSGGKSRLGGISKRGDVYLRTLLIHGARACVTASEGKSDRRSRWIQDLMTRRNKNIATVALANKNARILWAMLSRHEEYRAAA

SEQ ID NO: 467276 - protein, 313 aa, unidentified
MSQNNTNILYVGLDVAKLSLQLHLVDRFHTLSNDAKGHAQLLKRLRVHPNAQVVCEATGGYEQPVVRALQAAGVAVSILEAGRVRYFARAQGQRAKTDPIDAAVLSAYGQTFQPLATPAPSPQQQQLADWSQRRHQLVRLVVIERNHAEHYSDAFRRRQSRQLCRLLEKQIEQCDKAIANLIAQDAPLAHKANRLQAIPGVGPVVAATVLAEMPELGTLNNQTAAALAGVAPYNRDSGQQKAIRSISGGSRAVRCALYMATLNAMRYDRILKDFYQRLLAAGKKPLVAMTACMRKLIILMNRLLKNVHFQLAH

SEQ ID NO: 467277 - protein, 340 aa, unidentified
MNKLSRIGIDLAKNVFQCHGVDRQGQVVWKRRLTRNKWLKFLMEVAHKDCEIGMEACGGAHHWARVLQAHGYTVKLIPPQFVKPYVKSNKNDANDAEAICEAMSRPHMRFVKVKTIEQQDIQAIHRVRSSLIQQRTALANRLRGLVSEYGIVAPQSLAALKRAIPGWLEEADNGLTMRFRKLLHDLWNELIHLEQRIAGLDDEITQLANSDPVAKRLQQLRGVGPLVATALIATVGNGEQYRKGKQMAAALGLTPRQHSSGNKERLLGISKRGDVYLRTILIHGARAVVSQAKHKDDPLSRWVTDIAKRKHTNVAAVALANKTVRMAWAMMQTNTDYLPA

SEQ ID NO: 467278 - protein, 301 aa, unidentified
MTNIAEPCDIYAGVDTHADTHHAAVIDQNGKHLADAQFPTTPAGYVALTAFILMYGILVRVGIEGTSSYGAGLTRHLTSFGHHVIEVIRPNRQLRRMSGKSDPIDAYAAAKTALTETKQPTPKSGDGTVEQIRYLFAARRSAIKARTAAQVQLKSLLVTAPSLLRERFRNVTDAALVADLADFDIRPYPEHQGIVIALRALARRHRYISTEIHTLDQELETLTKHTNPALTAAHGVGTVTAAQLLITAGDNSDRLRSEAAFAALCGVSPIPASSGKTTRHRLNRAETGTQTPHFTGSRSYG

SEQ ID NO: 467279 - protein, 377 aa, unidentified
MPSVSERPEAPTAIQTHLAASFVSLELSRSIWLITSLSPASGEKMSKHSVRAGDVAALLARFSELKRKASERTGKSFPIVVIQEAGLDGFWLHRVLQSEGVESHVVDPSSIATSRRRRRAKTDRIDGEALLRALLAYKRGEPRVCAMVKAPTPEEEDRRRLCRERKVLIAERVKHVNRVKGLLFSQGISGYELTTGDGRPLPVHLKTQIRRELDRLELLLYQIKEAETERDALHAAPQPAAPAPAGRMLLEFKGIGAELAAVLWLEALFRHFDNRRQLASYAGLAPTPWQSGSVDHEQGVSKAGNPRLRTSLIQLAWLWLRHQPQSALTLWFKERVSGNGGHFKKSTIVALARKLLVALWKYVTAGVVIDGAVMKDA

SEQ ID NO: 467280 - protein, 383 aa, unidentified
MTQALGTVIDYERTLILAIELSNTSWVLAAQIPGLPGVKATRSIDPTPEALMAAIENYRARAEKAGRNVDRVIAVYEAGWSGFWLVRWLAKHGVEEAHVIQPSSVPVDRRARRAKSDGIDAELLLRTLLAWLRGEPRVCSMVPIPAEADEDARRRVRERAELISERVGLVNRIGAVLATLGAGEYNPLRRDRRQRLDELQTALGDSLPTNAHAKIARMLDRLELLLIQITELEQSRDAVLEDESPDRASSMIQQLAKLRGIGVQSATVLVREGFVREFANGKALGSYAGLTATPYSSGGIEREQGIGKAGNARLRTVMVELAWLWQRYQPGSAQVRWFRERGGTGRRVRKVMVVALARKLLIALWRFATQGVVPEGAVMKPAS

SEQ ID NO: 467281 - protein, 342 aa, unidentified
MEFFAGIDLGKRRSQIKVLNQDRKVVEELKVDNDPKEFFRIFKKYKGKIDVACEAWSNAFWVWDTLAPIVRRFSIGHTSKIRWIAEARIKTDKIDAGILAELLRADLFPAIAIPPKRIRELRELIRGVIRLRRQALRYRNQVHGLLGRHGIPYKRSEVQDTKLGELVRSVELPRPARLAADALLRLEAATREEIRQLQVELQKELKGEEEINKQISLLESIPGIGFFSAALLVLELWDVTRFSDAKHLASYIGFVPGTHQTGETLWHGSMTRQGNVLVRWILVQDTWIAIHNHWFFGRMYDRYKKRKGNTRAVVPVARALLKTIHPIKRKLWSGELVSGLSH

SEQ ID NO: 467282 - protein, 410 aa, unidentified
MQLLYARCAGLDVHKKTIVACVMITLLTGQVHKEVRTFATTTAGLLALADWLSSHEVTHVAIESTGVYWRPVFNILEASCTVILVNAQHIKAVPGRKTDVRDSEWLAELLRHGLLRASFIPPQPIRDLRDLVRYRKTLVYERSQEVNRLHKLLETANVKLTSVVSDVMGKSGRAMLDALLEGVSDPEALAELARGSLRGKLPQLREALEGRVDAHHRVLLHHLLEHIAFLEQSLHELTGEIEQRLSSYEKAIERIVQIPGLQRLTVSTILAEIGDDMSRFPSARHISSWAGVAPGNKQTGGKRMQAPTTKGNTHLRAALAEAVWALSHTKDNYLSAQYHRLARRIGKKKAIVAVSHSLLVIIYHMLRDQTDYRDLGSTYFETLDKERLRTSAVRRLESLGYSVTLEEVSA

SEQ ID NO: 467283 - protein, 410 aa, unidentified
MDLYCGIDWATAHHDVAVVDTDGRVVARGRVGNDAAGFAQLLTLLAEVGDGPEHPIPVAIETDRGLWVAALRATGRVIYPINPLAASRYRSRYAVSGAKSDATDAVLLANIIRTDPDAHRSLPADTELAQAIRMLARAQQDAVGARQQIGNQIRDLLKDFYPAALAAFAELPSGGLARADARTILAAAPTPAAAAKLTPVRLRRLLAKAGRRRNLDRDVERLRTVFTDTYLHQPPVVENAMGIQLTALLRQFEAACAAADELAEAAIAHFEQHPDAAIITSFPGLGKLTGARVLAEIGDDRTRFADARGLKAFAGSAPITRASGKKTIVLHRHIKNRRLAAVGPIWALASLRASTGARRHFDARRANGDWNRQAQRHLFNKFLGQLHHCLQTGQPYDEHRAFPPPHTLAA

SEQ ID NO: 467284 - protein, 328 aa, unidentified
MGVDVHKATYTVTCVCQRQMVKTATVPAEPARCAESLSRWFPEAIRSSAYEAGFSGFVLHRARTTAGLTNLVVHPASVAVAANDRVKTDRRDSKRLAIDLADGRLRGIAVPTEAEELARLLPRTRAQIVEHRATITRQIKAKLHQFGLIPPASRRLMRSRYVREITTWPLPPELCASLTLFADQWRFATRQLLELRRLLRAQATALAALETVYRSAPGIGEVVARTFATALGDMTRLTNERGLFNYTDLTPSEYSSGAAIRRGHISRQGASRLRHVLVETAWRALPRDPALQEIFDRIAATRGKQRAIVAMARRLIGRIRACFRHGTL

SEQ ID NO: 467285 - protein, 320 aa, unidentified
MIPATAVIGIDVSRDWLDGFCVSSGQHFRLPNTAEGHVQLLAWIQQLPDAVRIGFEATGGQEWALWAYLVAAGIEAVQLAPAQIKAFARSRGTRAKTGRIDAVLIAGFMQFRPEAGRILPHGNLRILRALTTRRAQIVDMRKRLAAQICAREKQGVADDLQELDSTLKAVLDGQVSEIEQRIERVITQEESLAKKARLLRSIPGIGPVSAAMLIAEMPQLGRMTAGEAAAMTGLAPVSHDSGARRGRRTIAGGRRSLRHVLFQAALAAACHNPLLKPLATRMKESGKPHKLIIIAGARRLVVTANAVLKTATPWQTGKAA

SEQ ID NO: 467286 - protein, 315 aa, unidentified
MEQPPSAPIFVGIDVSKDRLDVHVRPSGEAFAVVRDGEGLERLVADLRGRDVALVVLEATGGFEMTVAAALAGAGLPLAVINPRQIRDFARATGRLAKTDALDAEVIALFAERIRPEPRPIAGPDAQALAELVARRRQLVEMIGMEKNRARQARGKRVQRSLAAILKALEAQLASLDRDIDGVVRGSPVWRAAEELLTSVPGVGDVTARTLIAELPELGALDRRRIAALVGVAPVNRDSGQWRGHRAIAGGRVAVRNTLFMATLTAIRWNPAIRDHYARLVAAGRPKKLAIVACIRHLLTILNAILRTKTPWQNA

SEQ ID NO: 467287 - protein, 397 aa, unidentified
MYIVGIDIAKRKHEAAVIDGEGAVIIKPFSFTNNCSGYNRLLAMLTKAKLPLDEVSFAMEATGHYWLALFTRLQKEGFRVQVINPVQTNSIRSFYIRQAKTDPRDALLIAEVIRFGHFSESTLHPENIYELRELCRGRHAIVSMQADVKRKVVALLDQVFPEYETAFTNLFGDTSMAILQTCPTPKELSEMPLEELCHLIEVSSHKRFRMAKAQELQELARNSFGFAMAGDVFSTMIRLYAKHLDFLKQQVREMDRKIAEIMETLDTPITTITGIGPTLGAYILSEIGDINRFSSAAKLAAYAGIDPTMRQSGEYNGVRNRMSKRGSPYLRHAIWLAASSAVLHDPALKLYFQKKRDEGKPYMASVGHACRKMVSIIYAVMRDNKAYTPYIPNEISA

SEQ ID NO: 467288 - protein, 416 aa, unidentified
MNAVGIDVSSRKSTVAVLRPLGEVVCLPFDVTHDIAGLASLAEKLKAIDGETRVVMEHTGRYYEAVAKALHEAGFFVCAVNPLLIKEYGANSLRRVKTDKADAIKIARYALDNWADLRDFTPMDAIRYDLKTLNRQFQLASKQRTASANNLIALLEQSFPGIRKCFDSPVRSDGTQKWVDFAHSFWHVDCVRKQPFPAFCERYRKWCKRHAYFFKLRNAEKVYALAKSAVVLTPKSKVVKVLVQEAANQLSSISRSVEVYRAEMDRLAAMLPEYPVVMAMYGVGKSYGPQLMAEIGDVRRFERKQALVAFAGIDPMPNQSGDKNVRSNKSSKRGSPYLRKTLFNVIRTYLQCAPQNEPVFQFLNRKRAEGKPFYVYMLAAANKFLRRYYAKLRDYFASLDTLQPVAPIPTILKATL

SEQ ID NO: 467289 - protein, 348 aa, unidentified
MAIIADTFDHIVGVDTHARTHTYCVLRARSGAVIDTATFPASAAGINRALAWVARRAPGTVFAAVEGTSSYGATLTAALTARGIPVGEVRPQPRSAHAYAGTSDPLDAEAAARWVLGKEGSRVPKPRDAGDRAALRVLLSARSLIDHQRTANRNALTALLRTVDLGVDARSSLTDKQVAVIASWRNIRCAKVVQFVARAEAKRLATSVVEQTRQLRHNHTQLAEVAERLAPGLQEGPGVGPVTAAILICAYSHHGRVRSEAAFAALGGIAPLPASSGNTTRHRLSRSGDRQLNRAIDIIVRTRMSFDPATRDYLRRGLATGKTNREIRRNLKRYVCRSMFRQLQATMT

SEQ ID NO: 467290 - protein, 358 aa, unidentified
MAGKVTETAVVGGVDTHKDLHVAAVVDQNNKVLGTQFFSTTRQGYRQMLAWMTSFGALKRIGVECTGTYGSGLLRYLQNAGLEVLEVTAPDRMERRKRGKSDTIDAECAAHAAFSGIRTVTPKTRNGMIESLRVLKTCRKTARSARRVALQIIHSNIISAPDELREQLRNMTRMQLIRTLGSWRPDASEYRNVTNVYRISLKSLARRYLELHDEIADLDVMIAAIVDELAPELIKRNAIGYESASQLLITAGDNPQRLRSESGFAALCGVSPVPVSSGKTNRYRLNRGGDRAANSALHIIAIGRLRTDDKTKEYVARRVAEGHTKMEAIRCLKRYISREVYTLLRNQNRQINSIPITA

SEQ ID NO: 467291 - protein, 353 aa, unidentified
MENIIAFDSHKRYTLASVETKDGRIITEQRIPHRPGNIVEFLSGYRQGCPVAVETIGNWYWIVDEIEQAGMQPKLVHARKAKLMLGSINKTDKLDVRGLNKLQRTGTLPTVWIPPGDLRDKRELPRTRMVFAGQRTRLKNRIHSVLAKYGLQDQFEDITDIFGRKGRERLRQCMRQLPPQTRYTTGGLLHQLDLIEGQISRIEKRMMQVFDRTPEVELLMTMPGIGFILAVVISLEVGDVSRFGSAERLAGYSGTTPRVKSSGDKTRYGPLRSDVNQYLKWAFSEAGNSVAVNQRNCPYRHVSLLYNRMRSRRGHSTAIGAVARHLAEATYWILQKREPYCERVQSEVSPTGA

SEQ ID NO: 467292 - protein, 352 aa, unidentified
MKKTSAEVVIGAIGVDLGDRRSQVCVLDERGEVVDEDSIATTWSAFEDRFAGLARCRIVLETGTHSNWVHDVLVKHGHEVIVANARKVRAISANERKSDRLDARMLARLGRMDVQLLQPVHVRRSQIRLDLMSLRARAELVELRTALVNSIHGLAKSAGHRLAKRSSASLHKQPLHPSLEEILRPLMDALEHMSRKISDYDQQLEAIARQRYPQCKLLQQVAGVGPVTALYFVLVIDDPKRFARPRDVGAYFGLVSRRDQSGSRDPELAISKAGDRMGRTLLVQCAHHILGRFGKDSDLRRFGQKLAARGGTRAKKRAVVATARKLGVVLLALLRSGEVYEPLKNCEPAKAA

SEQ ID NO: 467293 - protein, 412 aa, unidentified
MAKLKIVYPICCGMDVHRDFVIACVATTNNQGVTSYSSKRFSTFSSDLRNLRDWCKDVCMESTGKYWFPVHNILEETCNVVVSHPKFVKAIKGKKTDKKDAQWIADLFKHDLVRGSFIPPEDIRQLRDLCRYWCKLTSYNTGEKNRAQNCLTVSNLKLDSVFSDVFGKSASAIVSHMLENPGEPFDVSPFVHGRCKTPITEIQAAVDGSFNEFQAEKLKIIREHMGDLEKLKLLLESQILTLAEPYIHQIDLLCTVPGISDPMTAIRIIAEIGVDMTQFESSKHLCSWAGITPQNNESAGKKKTTRIGKAGQYIKPLLIQCACAASNPRSTKQPEILQKFQQLKKRRGTKKARVAIARRLLTAIYQILLKDEAYSPYAIPATESVPEQRVLSHEQAFALLRSKGFIIQDSHS

SEQ ID NO: 467294 - protein, 354 aa, unidentified
MCNKSTPIVATMGIDIGKNSFHVVGLDERGAIVVRQKLSRGQIEARLANMAPCLIGMEACVGAHHLSRKLQAQGHDARLIPAKYVRPYSKGQKNDFRDAEAIAEAVQRPTMKFVATKTVDQLDLQALHRVRERLVSQRTGIINQIRAFLLERGVAVRQGLRFLQRELPGILATRSDVLSPRMMHVIEDLAGDWHRLDERIEGLSTEIAALADQDPACERLMTVPGIGPIISSAMVAAIGNGSVFSKGRDFGAWLGLVPKQISTGDRTILGKVSKRGNRYLRVLFVQAAWVVLIWPQSWERYGLKSWIEAAKKRLHRNVLAIALANKLARIAWAVLNKERNFECLRTRAMSSQPA

SEQ ID NO: 467295 - protein, 297 aa, unidentified
MRDSRTRYVGLDVHQESIAVAYAREARDAEVVCWGRLGTRQRDSDKRIRTLTSKTQQLVFVYEAGPCGYGLSRDLSRKHLRCGVVAPSLVPTKAGDRGKTDRRDATQLARLLRSGDLTAVDVPTGADAAIRDLARARAEAIRDRQAAKNRLTAFLLRQDLRYEGRATWGPAHRRWLAAVVCPTPAQPIVFQEDGRAVAAHDARRQRLETARREPVQGWRLAPVVQARQARRGGQCTVAVTRVAERGDRTRFEHPRPLMSDLGLTPREYSRGDRRRPGTMTTAGHTCARRALLAGAWA

SEQ ID NO: 467296 - protein, 337 aa, unidentified
MDYFAGLDISMDETHVCVVDRDGEVVYENKTASTAQAIAVELAKAPSCRRIVFETGRMAPILFHGLSRLGLPVVCIESRQAYQALKSLATHKTDRNDARGLAHLARTGFFKPVHVKSLPAHALRSLITARKKLVGQRVTLENQIRGLAVVFGIRLPRALTAAFVNQALKASEGITGLSAAMRGLIAARAAVMTAVAAIDADMRRMTRASAACRRLMTIPGVGQLTALAFVAAIDDPSRIRRSRDVGAYLGLVPRRYQSGEVDYVGGISKCGDRRVRTLLYEAANVMLTRYKGQLKLKDWAFAIARRSSMRKARIALARRLAIIMHAMLRDGTEFVPA

SEQ ID NO: 467297 - protein, 425 aa, unidentified
MNDDVMIAVDPHKASNTAAVLDPVTKTVIEAARFANTADGYAQLTVFAGRWSQRRWAVEGCFGAGRSLAQRLVADGERVLDVPAKLAARVRVYSRGHGRKTDRDDAVSVGLAALDGTGILPVASDDATVSLRLLCDRREELTAQRTQAACRLHRLLAELTPGGMRRELSANKAQALLARIRPADDVAAVRVHIARDHLADIRALDARIKYLGGQIAALVDASGTGLTGLFGVGPVIAGRILAEVGDVARFATKDAFASYNGTAPIDASSGEQVRHRLSRAGNRRINHALHMMAVTQIRYPATPGRLYYERKRREGKTPKEALRCLKRRLSDLVYYQLLADQRGTIGTCGSPTTPRPTRSTSTSPAIRSRQAAPPPRPAPRPAPKGSSRSTGKTASSSASRSSTPAQGSAPTSSTKPKSTVKTGAS

SEQ ID NO: 467298 - protein, 414 aa, unidentified
MAKNDRIVVGGVDTHKDVHVAAVVDDIGRILGTSAFPTTARGLAELHAWMRSFGDVARVGVEGTGAYGAGLARHLGGEGVEVVEVNRPNRQMRRRRGKSDTVDAEAAARAALNGEATVAPKAQVGVVESIRVHRVAFVSARSHRTQVALQIRDLIVTAPPELRAVLGPLATEERVARCARFRLMGDPADPSVGVKSALRSLARRHEALTIEMAELEATLDRLTAVANPALRGAKGVGTDVAAILLTAAGDNPGRLRHEAAFAAMCGVSPIQASSGKTQRHRLNRSGNRQANHALWRIVNVRLTCDPASKAYLERRTAEGKSRREIVRCLKRYVAREIFRLLVVPEAVPDGADLRTARIARGLSQTPVATALNTSVNAISRLERSRIFDTELARRYESFLASISENEPHAVPAAA

SEQ ID NO: 467299 - protein, 368 aa, unidentified
MKQQTSCATETHNKSSKTIDYTGKTIHVGIDVHLKDWQIASVNETVVLGNHRMEGKVENVVTHLQKKFPGATFKCVYESSAWGFKLQRQLVARGMECIVVHAADVSGSDKERKRKTDKVDAVKLARYHAAGLLQGIYVPDEELQKQRNLVRFRCKLTRDLTRSRNRLKSLLKYQGIETPKQFGKARWSRNFLTWVEQEAQKDIVLKDTLLFMLAEVKFLRQLLLEVERKLRTLMNSEKYNDSIKLLMGVPGIGRTIAILWLLEIGDVRRFENIDRLNAYVGFCPDTNSSGEIQHDRGISSRRHNQLRVSLIQAAWQAIRTDPAMLETYQQLIKRMKGTQAIVRIARKLVRRIRAIQLNAIPYQKGVVG

SEQ ID NO: 467300 - protein, 451 aa, unidentified
MAQTTARKLISYKSTRFCRMASHCRLSKYYLWRHAVFKILRKNCCGLDVHKTWIFACIAITDASGRTDYKEKRFSSFTRGLRDLADWLASYGCREVCMESTGKYWIPVFNILEETCWVTLAHPKYTKPQKGNKTDRKDAKWICDLFMCEMIKPSFIPPLDIRNLRDLVRYRSKLTNCLTGEKNRAQNCLTVSNLKLDDVFSDVFGKSASSITKYILKHPGEQFDVKPFVHKSCKHSIEEIQAAVDGSISREQATKLQECLKHIDEIRIHKGNIEFEILRLATPYERLLELIRSVPGFAANPMTAIAVISEIGVDMSVFDTAKHLVSWAGCCPRNDQSGGKCKSNRISRAGVYLKPLLVQVANAIVKSDKYPEFKERYRRIKSRRGHKKAIIAICRMLLTAIWNILSKMEPYSAEGYLVNHGKKSMVITQAQGLHLLRLRGYVIMDDALCSA

SEQ ID NO: 467301 - protein, 371 aa, unidentified
MTNVIHIGIDVHKDSFSLCSFSFSTKRPFGQTKIASKASLVIKYVQRLQKEQPESEVLCGYEAGPTGFGLYRELEKTGIPCVLMAPTSLPKAPGNRVKTDRLDAQGLAQHLAWGTYSAVHIPTSENEAVKDYTRMRNARVLALKKAKQNLLSFLLRTGRTFTEGKSYWTQIHFNWLRKQEFIDPLTQETFKEYLQEVFDQQEKVDRYNSQIEEIANQDEYRERVSRLRCFRGIETHTALSLVAEIGDFSRFASPAQFSSFLGLVPSEESSGQREKRGGITKAGNTRLRVLLIEGAKASLRSGVYVKKPKRLQARQKGNDAQVIAYADRANRRLHRVYSSLTSRGVHNNKATVAVARELCCFIWGMMNNKIQ

SEQ ID NO: 467302 - protein, 280 aa, unidentified
MKQVTTYVGVDAHKKNLFIAMLVGTHQTPMTWQVANEPQAVRRLVRKLEREAPGPVRMCYEAGPCGYALQRQVTTSRVSCQVIAPALIPRKPGERIKTNRRDARKLAELLRAGLLTEVRPPTLAEAAVRDLGRARADAREDLQRCRHRLGKWLLRRGLHFSGRNWTQAHRRWIDALAWAQPTERVVVDDYLLAIDHLDARLIELDARLTDIAQTEPYREPVGWLRCFRGIDTLTAILILAELHDFRRFQSPRALMAYLGLVPGEDSTGEACDSQSDGFCE

SEQ ID NO: 467303 - protein, 314 aa, unidentified
MTENTSERFAGVDIAKHSLELHIEGQPVLHLTYDDAGIQEACSRFRAAAPTLIVMEATGGLETRLATELGALGLPVAVVNPRQVRDFAKASGRLAKTDRVDAQVLSAFARAIRPQARPLKEDEVRELDALVTRRRQLIGIRVQETLRLGTASRLQAKSLKEHIAWLDRRIARLDIDLTAKLRQSAAWRAKEDLLKSIPGVGQVTCTTLLAKCPELGQLNRREIASLVGLAPLSHDSGRHRGKRFVWGGRAEVRAVLYMATMSAMRSNPLIQSFVKRLKQAGKPAKVVIVACMRKLLTIMNAMIKHNAPWNPNLA

SEQ ID NO: 467304 - protein, 386 aa, unidentified
MATPAARRIEQDSFPGPTLYLAFALGKNTWKLGFTIGVAQPPRERMIPAGEVERLQQEIARAKQRFGLPEEACVMSCYEAGRDGFWLHRSLVAHGIQNHVIDSASIEVKRRQRRAKTDRLDVRKLLTMLLRHSAGEKKVWSVVRVPSVEEADRRQLHRALTTAKQDRTRMMNRIQGLLAGHGVQLVLQGDVEAQLDQTHQWDGAPLPSALRSRLKRAWQQVGFLTAHMQTLEAERRALLRHRTDPIIAQVRQLFTLRGIGINSAWLYIMAFFAWRAFQTAKQVGALAGLTPTPYQSGQSRRELGIAKAGNRHIRAMAIEIAWAWRRFQPDSALSQWYERRFGAGSARLRKLGIVALARKLLIALWRFVKTGVLPEGAVLKTAPPRP

SEQ ID NO: 467305 - protein, 337 aa, unidentified
MSEISILAIDLAKGSFQVCGVTADGAVVFNRSVSRPRLYHLLAEQAHCVVAMEACATSHHWGRVAQSYGHEARLIPAAYVKPFVKRQKNDRADAEAIAEAASRPSMRFVAVKSAEKQGRAVAFRTHQCFVRQRTQLINALRGHLAEFGLVAPKGPASLKLLEQALAHSATDLPAPVREMAVLYLDQIGRLTELIEQLADELERASKTEDELRRLCTVPGVGPVTAGAIAAFAPDLSTFESGRNFAAWLGLVPRQRSTGGKARLGAVSKMGQCDIRKLLIVGAMSVIRWVVRKGGSANRWLANLVARKPRMVAAVALANKMARMIWAMTTKQENYRMA

SEQ ID NO: 467306 - protein, 420 aa, unidentified
MFAKDFPRRPMRRCYGASGERGIFSAGHKPMERPMPKPNDCSRSVTAFEQNSTLIAVIEMSLSSWLVAGVVPGIERHPLKKLETDEDALLKLLLRWRDEAVKAGHKIERIAIAFEAGRDGFWLARWLRARGIEAYVIHPASVAVSREHRRAKTDRLDTELLKRVFLGWLRGEPDHCSMSAIPTLEQEDAKRPNRERQNLVGQRTRIVNRMKACLIRFGIRNFKPTLRKAPEGLEALRAPEGAPLPPNTRAEMRRDMARLRFVQDQIKEIEATRLQQLEQAPAEGPHAMIRLLARVTGVGIETADMLVNEILARNLRDQKAVARYAGLTGSPDESGKRSREKGLSRAGNARVRRGMIQLAWRFLIFQKESALAQWYRVATTDARSAIRKTMIVALARKLLIALWRMVTIGEMPGGVAMRAT

SEQ ID NO: 467307 - protein, 333 aa, unidentified
MNASMMQRAEARFNHVVAFDVAKATLSVHILPSGESLSLSNSASAIRRLLNREQKRNTKLGLGAMLVVCEATGGYEKLVLDTAMAMGIDCHRAHGSSVKAYARFRGQHAKSDPIDAALIAQYGRQKPDLRLYQPPRQEDSALRELMGRRADLKHMIGAEQSRLEHVTLDAVRKSLNTHLKALQGQLDAIEREIETLTNRDETLSARAELMQTLAGIGPVTAHTILAFMPEIGHIPGPAAASLAGLAPYDRDSGKDHRRRHILAGRGQIRTCLYMAAQAAIRSHPHFRDFATRLIQKGKPFKVAVTATMRKLIVILSAMLKANEPWKHAAKACV

SEQ ID NO: 467308 - protein, 350 aa, unidentified
MYFAGLDAHLKYVTVAVLDRLGTLVLETTVPTREPERLLAVLAPFRPLEVVVETCPFWPWLYDLLVPAGIKFYLAHAKRLRAIATAPQKNDRVDARLLARMLLSGLIPEAYPRPGDQRELLRLLRHRTTLVRYRTRLAGRIHSQLHQQRLLLPREKLLRQATRGWLRETAWPRLTTEQQAIVTTHLELIDQLTPLIQALERRIATAAGANPTAALLATIPGIGPYRSLLLAAELSPLTRFPRVEHLASYAGLAPVTRSSGGHTRHGSIPEGANRWVRGALVSAIPSHVRSAPNSPVTRAYAQLTARLGWRVARVAAARKLLRIVYVMLRRGEAWRSEPVVGADVRDEVHA

SEQ ID NO: 467309 - protein, 347 aa, unidentified
MRFVGIDIGKMKCRAAIMDQGGSILDEFTFTNNHEGIESLASRLSIDDRVVMESTGSVWLNLYNHLDEKHIHVSLANPLKTKAIASAKIKSDKVDARILAHLLRSNLVAESYVPAKPLREVRALIRHRVGIVKIRTMVKNQVHSIVDTHGLTCSYSDMFGKGGLEWLRSLQLPSLDRLILDNHLTHLESLNQQTGRVNEEIHNKACEDEDVRLLLSLTGIDVYTALLIRSEIGNIDRFPDYKKLVSWAGLAPSLHQSGNVEYHGNITKQGSKMLRWIMVEAARVAVNHDTRMRSFYERVKHRRGSQKAIIAVANKMLKIIWFMLTRREPYESRNMKRYQQKLNSITT

SEQ ID NO: 467310 - protein, 358 aa, unidentified
MVDKVTKAAVVGGVDTHKDLHVAAVVDQNNKVLGTQYFSTTRQGYRQMLAWMTSFGTLKRIGVECTGTYGSGLLRYFQNAGLEVLEVTAPDRMERRKRGKSDTIDAECAAHATFSGIRTVTPKTRDGMIESLRVLKTCRKTAISARRVALQIIHSNIISAPDELREQLRNMTRMQLIRTLGSWRPDASEYRNVTNVYRISLKSLARRYLELHDEIADLDVMIAAIVDELAPELIKRNAIGYESASQLLITAGDNPQRLRSESGFAALCGVSPVPVSSGKTNRYRLNRGGDRAANSALHIIAIGRLRTDAKTKEYVARRVAEGHTKMEAIRCLKRYISREVYTLLRNQNRRINSIPITA

SEQ ID NO: 467311 - protein, 407 aa, unidentified
MAITCGVDWAEDHHDIVVMDDRGTVLKGRRIDAGVGGYADLLALIAEHGGSAADTPVALETDKNLLVLALRAAGFTVYPINPRAVARYRERHYQAGKKSDHGDASVLADILRTDRHQHRPLPATSDHGLTIKALARQHQEAIWALHQTTSRLRSMLLEFYPQALKAFPNLNHKAALTILAAAPTPTAAQRLTNRRVVALLHRCGRRNDPDLVERILSELKAPALRQPPPVEEALGLAAKTLIDILTQMHAAVASLNDALAEQFSQHTLAPVLTSAPGLGTVLAARILAEVGDDPHRFKTPASLRAFAGTAPVTRASGRSSYVKARKVRNKRLGDACHWWAFSMLTKSPGARAHYDHRRAVGDTHNAALRNLANKLLGRLWWCLQNQQPWDESAAWPATSPHARTAAA

SEQ ID NO: 467312 - protein, 368 aa, unidentified
MEKGTTYVGLDVHKRAIAISVRWPGGREAEQRTIPNEPRAVARWIRKMKREIPGPIHCAYEAGPCGYGLQRQLQAEGIGCQVIAPSLIPRKPGERIKTDRRDARKLAELLEGALLTEVHPPTPQAEAVRDLCRAREDAKEDQTRARHRLGKFLLRRGLHWGRKNWTLAHQQWLRGLRLDHPAEQATFDAYCTALDQAQERLRAIEVDLGSWASQEPYTRPVGWLRCFHGIDTTTAMTLVTELHDFRRFRRPRKLMAYLGLVPSEHSSGDRTLRGGITKAGNGHARRVLVECAWHYRHPARVGAVLRKRREGQPKRVIAIADRAHQRLSRRYRRLVARGKPHNKVVVAIARELVGFLWATLAVEEVVQG

SEQ ID NO: 467313 - protein, 338 aa, unidentified
MKLYGAIDLHSNNNVTVVIDEQDKVVYEKRLPNDLAIIAHQLSAYQSSLEGIVVESTYNWYWLVDGLMDKGHRLHLANTAAIQQYEGLKYTDDHSDARWLAHILRLGVLPQGHIYPKEERAVRDLLRKRGQLVRQRTANLLSIQNLITRNTGSSMNSNRIKTLEPQQVDELLADRDLALAVKATVAMVQCAKGQIEILERTVRDRVKLRPEFCFLKTVPGIGQTLALTIMLETGDIGRFADVGNYASYCRCVGSQKISNGKKKGKGNTKNGNKYLSWAFVEAANFAIRFSARIKSFHQRKKAKSHGVLALKAVAHKLCRACYYIMKNGVAFDVTKAFA

SEQ ID NO: 467314 - protein, 333 aa, unidentified
MIRKGAEGSTVVLGRHAMLGIDVSKDTLVATLVDPITRKPRWTKSFPNTEAGIRKLLARVPAAVSLVLEPTGRYGLLVVQLAQAAGRTVLMADPKAAAHYLKSLSPRAKTDRIDSVGLALFAIGRALRPYPVKSAPLEEVDQLLSARKGIADAISRLKQQWRELPHAAGPLQQALEALAQQQAELERQIATRTKSEPALARVAELDRVHGIGLITATTAASRLSARGFARVEQWVAYIGLDVGIRESGKRKGERGLTKQGDAELRRLFYLCAKSTVTRPTSPFAAQYQRELKKGMKKTAALCAVARKLAKVVWALFEHGGRYEPSRVYAASPA

SEQ ID NO: 467315 - protein, 347 aa, unidentified
MPYHAEEEVKVFAGIDVSAVELSVALLRSKGDEETAATFTNTRSGHKALLAYLLRGNQRVRVCLEVTGNYSLDLALTLQAHCQIEINVVNPRRARRFAESLGERSKTDPVDAHVLCEYALRMPWVPWQPPSSTALHLRAVMRAVEDLNSILTQEKNREHALAASEALPSLVLRELKRHQRYLQSRLERLRREALRLVARDPKLVRRFQLMQTTPGIGENSALQILGELAVLPDMLDARQWVAFSGLDPRRFKSGTSVEQRPRISRAGSRHLRRALYMPALVALRHDPYLGSFYQHLLKVGKARFQAFVAVMRKLLHALFAMFRSDQPYDGSRLCPLELTNKPVASHG

SEQ ID NO: 467316 - protein, 335 aa, unidentified
MQIYGIDLAKEKFDVSFFDLTSKKVSNQPSHKVVKNNFKSIGRFLETLPSDAVLVAEHTGVYGDTLLKCCMDSNVKIAFVGGYVIHRYRATPDRAKTDVLDCALLRDFGERYPDKLKYKTFPEEALYELRQLARHREMLVEQRKQLITADKSEDCRPIRSLAVKRSMDRIKEMLDTEIAETEKEMLKVINGHVSIRHNYELVKSVDGVGLITAVELLVKTENFTKITTARQYAAYAGTAPYEKSSGKMDKGAHISKIGNRRSKTLLYICAESARLHNKEIKLYYERRTLIDKKPRHYVLNAIANKLLRIIFTLVEKGEYYDANFIRQDPRVVKYN

SEQ ID NO: 467317 - protein, 328 aa, unidentified
MYSIGLDISKATIDIYIPINNLNHKIDNNSKSVKSFYSKLKKLYKNDIENIVFVFEPTGSYSNLLKKFCSENSIKCFIVNPKKSINFAKAVGQRNKSDIQDAVMLSKMIVTALEEEIKVPSINDVTEELHELIAYYKFLLKQRTQNKNHLEAISVKNPTSIISKTIKQEIKSLSLKIDKIINEMKSILKKDKKLYEAFTNISTIQGVGDISAIVLLHHFIKYPNTNQKEIVSLAGLDPISKSSGTSIQSKAKISKAGSKLCRSTLFMAVMVAVRFNDELKEYYEQLKNRGKHTTVCQIAVMRKIIIIAHSLYKNNEQYSAEKYNKFAA

SEQ ID NO: 467318 - protein, 340 aa, unidentified
MSLPVMGCDPHLDTVTAAVVDANGGELMVVTVPNTRPGWDQLVAACFDYQVGVVGVEGASGYGRCLSQTLTGAGLQVREIPTRLTAATRRVDGAGKSDPGDARTIARAAARGEGSGWVDKPELETIRVLFNRRDMLVTTQTADINQLRALLVEVDPQAAAGLARLRSKSQFLTLAETRFDGDIHRQTVARLIRQVATDCAHRWEQIRSLERDIKQAMPPAGTALTNIQGAGTIVAAQLLAELAGSGGLDTPAKLAGWAGTAPLDASSGRQQRHRLNRGGNRGANRAIHTIVITQIQRGGKAADYVDRRTSEGKTRREAIRAAKRQITRHIWKILHAHDLT

SEQ ID NO: 467319 - protein, 433 aa, unidentified
MQDVQDEPLFAERVAGLDIAKAEVEVTLRVPSDTTAGRRQQETRTYGTTRRELDSLADWLHCWAVTRAGMEATGEYWKPVFFLLESRGFDCQLYNAGQVKALPGRPKTDRADSIWLAKITERGSVASSFVPPEPVRRLRTHTRYRRHLTQARTAEKQRVEKLLEDGHLKLSSVISDIHGVSGRAMLEALAAGQRDAKALAQLARGTMRGKIRRLEEALDCSFFTAEHAAVLAMMLAAIDCYTAQIEALTARIETLTEPYLRQVEQLDQIDGIGAICAQDIIAEIGADMTLFRTASHLVSWARWSPQVKQSAGKRKGSNATGRGNPYLGAALGEAVICAGRTQSYLGAKYRRLARRMPKKKALVATGNSMLTIVHTLLSDPAARYQDLGADYYEQRMHARRQARNHVRSLERLGYKVTIQAINPDTGELLAPTG

SEQ ID NO: 467320 - protein, 342 aa, unidentified
MFVGMDLHKNYLQIAVMDKNGKILQNSRIDNNLKHINRFFESINSKEKPVVVMESSSVWYNIYRHLSEERKLDVVLSNPIKTRAIASAKIKTDKLDAVKLADLLRGGYIAECYIPNRRIMNLRELVRHRAALVRMRTKLKNKIHSIVLMKGITTISSTSNHYHSFTQPYIEKLLEINDYRITSYIHLMKSLDTEIKDISKEILSIAKEDENAKLLMTIPGIGHYSALLIVSEIGDINRFPDSYHLCSYAGLVPSTHSSGGVTYHGSITKTGSKYLRWILLECVHVHIRTNKHSNITRFYERLVNRKGSSIAAVAAAAKLLKVAFWIMKEKREYQNHELQLRR

SEQ ID NO: 467321 - protein, 339 aa, unidentified
MKLYTGIDLHSNNSVLVLLDETDKVVYERRLPNQLPAILAELAPYKKDIQAIAVESTYNWYWLVDGLMEEGYEVKLVNTAAVKVYEGLKYTGDEHDARHLAHLLRLGILPTGHIHPKEERAVRDLLRKRGQLVRYRTMQILSIQGTVSRNVGHGISADEIRKLDDTAIDRLCGGDAVRALAIKSNLATLRCLDAQIEEVEAMALRNAKLRPEFRKLLTVAGIWNILGMTIMYEAGDMGRFAKVGHFASYARCVGSSRWSNGKKKGEGNRKNGNKYLGWAFIEAAHYAVRYNERIRKFYQRKQAKTNKIVAAKAVAHKLARACYHVLKEQKPFDETRAFA

SEQ ID NO: 467322 - protein, 358 aa, unidentified
MQSNKKSFKGQKIFVGIDVHAKTWAVETLTESGFTKRHAQEASAKVLFDFLSKNFPDGEYHAVYESGFSGFSTYYQLKEYGIHCVVVHAADVPSTQYEQVMKTDKIDAGKLARALRKGDIKPIYIRERENLDDRAVVRLRKTIQKQLSGYKTRVKHLLHTNGVKLPARFDKPGTHWSRAFINWLKDEVVLLSSTRLSLDLLVNQVESIRKNLLEATRVMRILAATDKYKANYELLLSIPGIGFNVAMCLLTEIYDFKRFGNENCFAHYLGLVPTCHDTGDKHSTGGKTFRGNKLLGPMIIEACWVAIHKDYGLSQAYCSYKQKMKPQLAIVKVARKMSNIIFSVIKNGKKYEPYKWEE

SEQ ID NO: 467323 - protein, 399 aa, unidentified
MISVGIDVSKDKSTVCILAPYGSIMKKPYIVEHTKESINELVLLLHSLHEETKIVMESTEIYHLPVLKQLLSHNLFVSVINPLIMNKYANTNIRPGKTDKKDSITIANYGIDNWYKLQSYNEKDTRYEQLRLLSRQYNQYISMRVKCKLGLLNLLEQTMPQISTLIENDSQDIKRDKLNGFVKKYWHYDNITKFSQQQFITNYNQWAKKEGYRTSQSKAEKIYALANSKIPTLSSQDPSTKMLILEAIRMYREINTSTDMILTQMKNIAKTLVEYDILISMKGIGEKLAPRFIAEVGDVRRFHNASALIAYAGIDAPAYQSGQFYGTNRRISKRGSRSLRKVGYEIMASFTRQKPIENDIYIYIKKKESEGKPKKVAKVAGLNKFLRIYYAKVRDVNHV

SEQ ID NO: 467324 - protein, 463 aa, unidentified
MRKAHQMLKAAESQTSLAPIHPNAAAVDIHDGSHFVGVPPGRDSEGLDIREFPAFTADLRRIVEWLRECKVEHVAMESTGVYWIPLFELLEAEGFEVSLVDPRQARNLPGRKTDVADVRWYQELHTYGLLKAAFRPENEVCVLRSYMRQRAMLITSAAEHAQHMQKALTQMNVKLTQVVSDILGVTGLRIIRAILKGARDPQELAKLRDERCHCSRQEIALALEGNYRPEHVFALRQAVELYDFYQVKLQECDQQIEAQLKSFDDQSGGQTLPPRPSNKKPGGNSPQFDLRARLFAMSGVDLTSIDGVDALTAAKVVAETGIDMSHFPGEKHFCAWLGLCPGSHISAGKRHGGRMRPCKNKAATALRIAAQSLYNSKTALGAFLRRMKQRLGPQGGITATAHKLARIIYAMLKRKLPRYQDLGAEYYEKRYRARVTANLKRRAKELGFTLVPLADATPVPGAI

SEQ ID NO: 467325 - protein, 354 aa, unidentified
MEEAAAVVAFVGIDAHSEHCSLKAVGRQGESLLTAEVVTEERRLRAAVRKLPRPVWAMVESSSLAPLLKEWLDPVVERVIVCETRENRWIARSEDKSDPADADRLARLLRMGEFKPVHVPDRAGQERRELVRLYQKSVRDVTRLKNRLKAKYREHGVAVKGDKVYTVRHRASYARQVKQPAVRAMLAVMYEQLDGAEAARVKIWGQLFARLRTLPAYRLLKTIPGVGSRLGAMLAAGIDDPERFAGPKRKRKLWKYSGLGVRSQWSSNPEQARVSGSPSGNRMMKYAALSAATNAIRGKNRFSRHYAEMIEKGIDPAMAKRTVARQILATALSMLKSGAVYREPEPGAKPGGGG

SEQ ID NO: 467326 - protein, 367 aa, unidentified
MKKVSTAATKQSRNISQQRLTIGLDLGDRNSCYCVLDEAGRIQLEQRVRTTAKALQEVFGAMPRSRVALEIGTHSPWISRLLSKLGHEVIVANARKVRLIGENRKKDDRLDAQTLARLARIDPQLLCPVKHRSAQAQADVMMIRARARLVRVRTGLVNAARGLAKSYGERLLGCNVRNLNAEKAEGLSPELQRALEPLLSAIEEVSERICEYNDRIEALAQTSYPQVELLKQIKGVGTLIALTFLLTLEDPHRFGKSRDVGCYLGLQPGRRQSGKSDPQMHITKEGDPYLRTLLVQAAQHILGPFGIDCDLRRWGLKLAERGGRNGKKRAIVATARKLAVLLHHLWVSGEVYEPLHHRSPMTSAAAA

SEQ ID NO: 467327 - protein, 355 aa, unidentified
MNSEKYIGLEVHQATISVAVLDSTGKLVMESILETKAATILEFLTGLRGTLSVTFEEGTWAAWLYDLLKPHVAKLVVCNPRKNALLKDGNKSDRIDAHKLAELLYLNKLSSVYHGETGVRMLRELARSYLTIVKDLTRVMCRLKAVYRSWAIPCAGRDVYYSRHRTEWLGKIKEAGVRRRAERLYQQLDMLQHLRQQARRELLAESRKHAITVKLRQIPSLGPIRSALAVALIQTPHRFRTKRQLWAYSGLALETRTSAEYLYVKGGLRRSKKQISIRGLNKDHNHDLKGLFKGAATRASVLPGPFQDFYQRSLAKGIKPTLARLTLARKIAAITLTLWKKGETFDPDKLKSQAA

SEQ ID NO: 467328 - protein, 277 aa, unidentified
MLKIFQVCILLEDYSIQSNRKINRTKLLNSLRKLPSGTLVAMEACGSSHYWARTFINLGLKVKLIPAQHLKPFVANQKNDSNDALAICEAAFRPGIFFVPIKSVEQQDIKSLRCVRSRLIKNRTVTSNQIRSLAGEYGITFPVGRLKLKPSLFYVLEDATNSLTFVLRPLFKRLYDDMSLMDQNIDAIDNEIKSLCQLHPRYKALLSIPGFGSIVAASFMSKVGTGEQFKNGRQLSAWCGLVPTQFSSGEKIRLGSITKNGYSELRVLFIYYDLNYK

SEQ ID NO: 467329 - protein, 386 aa, unidentified
MPQSNDLSRCLIPFSQDETLVAVVEMSKTSWLVAGMIPGVARHPLKKLVPDEKALFELLERWRDEAVKAGKIITRITVAYEAGRDGFWLARWLRARGFEVYVVHSSSVAVTREHRRAKTDRLDCEMLKRVFIGWLRGERDHCRMVAIATQTQEDAKRPNRERENLVGECTRIVGRLKAGLARLGIRSFNPKLRNAAERLESLRTPEDVPVPANTLCELRRDMARLRFVKDQIKQIERARVRQLEQAPEQGPQQMVRLLARVLGIGIETADMLVHEILSRNLRDRRAVARYAGLTGSPDESGQKRREKGLSRAGNARVRRGMIQLAWRFLMFQKTSALAQWYRVRTKDAGGAVRKTLIVALARKLLISLWRFVTTGEVPVGVTLRVA

SEQ ID NO: 467330 - protein, 366 aa, unidentified
MQKISTVQTSRKSIFNVHRLTIGLDLGDRSSSYCVLEEAGEVLLEQKLPTTPEAMKQIFGRMAQCRIAMETGKHSPWVSRVLAALGHEVIVAHAQKVRLIVKSRRKDDRLDARTLARLARIDPELLSPVQHRSAQAQLHLTEIRARAGLVSARTALVNAARGLVKSYDERLRKCGTQQFRRETTSGLSAGLREALEPLLQEVESLNERIQEYDLRIERMAKEMYPQTALLKQVKGVGDLIATTYVLTIEDPHRFRKSRDAGCFVGLQPGRRNSGESEPQMHISKEGDEYLRTLLVQGAHYILGPFGEDSDLRRWGQKLAERGGKNAKKRAVVAVARKLAVLLHRLWVSGEVYEPLRNSQKEVPVAA

SEQ ID NO: 467331 - protein, 349 aa, unidentified
MTVYCGVDFHARMQTVSWMNSEDGEIKQKELNHCADDIRGFYRQFTGEVIVGIEAGGYSSWFEDMLERMGCVVWVGESSEIRRLAGRRQKNDKRDAAHILELMVSGKFPRVHRQSPESREVLGQLRYRHRLVKIRTMSTNCLKAIAIGAGLSEKKQLTTRKGRSKLENAGLSEVLSEQSKKWLELIDDVTKKIETVEGWLEQRAEGDQRVERLRTHPGIGLLTGLALVHTLEPVERFATTRKVAAYVGLDPMEDSSAEKKRFGKVSKAGSRLLRFLLVEAGQTAAKRDPQLKSFYRRVRDRRKSGKAKVAVARKLAVRSFIMLRDQIDYTEFLRRGVEARSSRKCTSTD

SEQ ID NO: 467332 - protein, 364 aa, unidentified
MKRKVYVGMDVHKETIQIAYLTSNTKEMVKEQQIKHNEVHIKKFINKLKTEWNEIHCCYEAGVTGYPLYRYLKSLGVNCILVAPGKIPRQSSDKIKTDKRDAIKLARLLRSGDLESIHVPSEEDEAVRDYLRSRDSLRLDLGRNRQRLMKFLLRKGNVYSTTKYWTVSHYKWLNNLHFENEILHETFNDYYSRVRVQEENLKAMDQKIQEIAKSEAFRERVGILRCFRGVDYLTAMFLLSEVNDFRRFKTAGSFMSFLGLVPGEYSSGSKRKQTGITKTGSPGLRRILTEAAWQHRFPGTGSKIVAARRTGQPALVVALAEKASLRLHKKFRNLQLRGKTPQVMITAVSRELSGFLWAAMNLVA

SEQ ID NO: 467333 - protein, 391 aa, unidentified
MVCVGIDVAKDKHDCCILDSDGMVRADCFTIPNNMDGFKQLLQTIRNCTKKSDKIKVGLEATGHYSYNILGFLLDNDLAVYVMNPLHTNLYRKSLSLRKTKTDRVDARTIATMLLSDVDLKSYTDTAYHNEELKSLTRYRFDKVRERAKLKQSVSRLVTILFPELEKLVPSLHIASVYSLISEYPGAKQVSEVHLTKLTNLLTTASKGRYGKDKAIQIRDAAKTSIGSVMPAKSLELKHTIKLIKELTSEIDEIEDSIQQIMDELHPPLLSIPGMGIHSAAMILGEIGDFSNFESPDKILAYAGCSPSTYQSGKLTNCYAHMEKRGSRYLRYALYNATKYVCYWNPVFAKYLAKKRAEGKHYNVALSHAMKKLVRLIYALQKSGKAYLTAA

SEQ ID NO: 467334 - protein, 374 aa, unidentified
MNESSTLFVGLDVHKDSIDIATAEASRDGEIRHVGTIGGGLAALDKALRRLISRGHPLHVVYEAGPCGYVIWRHLHAQGLHCEVVAPSSIARPSGDRVKTDRRDALLLARLARSGDLAAVRVPDGADEAVRDLVRAREDAVREQRNARHRLKALLLRNGIAYAGRSSWTAAHLRWLSTLVLAHPAQQIAFQEYLHSITECTARIARLEQALRDALPTWHLSAVVRALQAMRGVQLIAAMTLVAELQDFLRFDSPRQLMAYVGLVPSEHSSGPKRRQGSITKAGNSAARRMLVEIAWHYQHSPRVSPVIAARHEGLPPSITDIAWKAQLRLHAKFKRLLARRVLKNKAVVAVARELAGFVWAIGQEVQRSGSASH

SEQ ID NO: 467335 - protein, 330 aa, unidentified
MTNAKVRESTSPPLEFVGVDVAQQAFEWALHGVRGTHRAGNDAHGFETLREALQGCHLGLIVLEATGGLERALAGYLLRHGLPVAVVNPRAAREFARSMGHLAKTDAIDAVALAHLAQTLAAKADQAGVRLTLPSAEVELLQALVARRVQLLSMRTAEKNRLGGAVRVLHKSIEAVIKTLDKQIAKLDRDIDAHLERHFTAQRQRFDAIKGLGLTTCAVVLAFMPELGTISGARAAKLAGLAPLNNDSGKDRGKRHIWGGRSIVRSALHMATLSAVRFNPVLKAFYDRLLAAGKPKKVALTACSHKLLRILNAMARTGQPWNERLHAITP

SEQ ID NO: 467336 - protein, 274 aa, unidentified
MFIDELKNIIIDATLIEHNKNEFDNLFNSIKNYSNLIVVMESTSIYHLPVENYFRSKGIDTVVMNPKLVKQFKDTLNKSKTDKLDCFKIARCYLGTIDNFYYKNDEYFMYNPLARQYWSLFEGQTRLKNRYKQLIEIVFPEFNLVFNDLYDDLDLNFIHDFPHPILFVNTRFDDKYQFVSFLGIDSVTSQSGISAYHGAISKTGCKFGRTILFNVVTIILQISAHANTSNSIYLFFRKKQSEGKHHYKCIIACETKLYKIIYKLCSSNCLYENK

SEQ ID NO: 467337 - protein, 364 aa, unidentified
MKKVSTRAAAQSRNISQQKLTIGLDLGDRNSWYRVVDEAGQIQLEQRVRTNAKALQEVFGAMPRSRIALEIGTHSPWISRLLSELGHEAIVANACKVRLIGESRKKDDRLDAQTLARLARIDPGLLYPVKHRSAQAQADLMMIRARAGLVRARTGLVNTARGLAKSYGERLRGCNVRNMNPEKTEGLSPELQRAREPLLAGIEAVSERIREYNERIEQLAQQSCPQTALLKQVKGVGALTYMLTLEGPHRFGKSLDLGCYLGLQPGRRNSGQREPQLHISKEGDPYLRTLLVQGAQHILGPFGIDCDLRRWGLKLGERGGKSGKKRAIVATARKLAVLLHHLWVSGEAYEPLHNSRRTTVAAAA

SEQ ID NO: 467338 - protein, 433 aa, unidentified
MVEDSRDEPAQVVARVCAIDIGKTGLVACVRVPHPTNPGRRVQEVREYATVMPALLALADWLRVERVELVVMEATSAYWKPVFYLLEAEGFTCWLLNAKHVKNVPGRPKTDRLDAIWPALVAERGMCRPSLVHPKPIRRLRDLTRYRRSLVREQTREKQRLEKILEDAQIKLDSVISDLHGVSGRQMLQAMIDGQRNPTILAELARGVMRRKIPQLREALTGHFDDHHAFICATMLRRIDTLTADITELDTRIEELIAPHTDAVNTLDEITGVGLRSAQEIIAELGVDMTVFPTAAHLVSWAKFSPIDATSAGRHKGNSTGKGNPWLAATLGEVVAGTSRTNTFLGERYRRLARRRGKKRAIVALGNSILTIVWHLLSDPNTHYQDLGPDYYESKISQRRRQRDLIRQLEHLTGQKVTLQPPTELPTELPTAA

SEQ ID NO: 467339 - protein, 371 aa, unidentified
MKKHSTFVGMDVHKNSISIALAHEGRQGEVRSYGRIDGSLYALDKVIRKLVSTGNRLHFVYEAGPCGYPIYRHLTAQGFDCMVVAPSRIPKKSGDRIKNDRRDAIQLARLHRAGELSAVYVPNDEDEAFRDLTRAREDAKSDEKKSKQRLSAFLLRHGYRYTGRTSWSKAHMRWLSGIKMPHRAQQIVFQEYINTLSQCQKRVQRLTEQIQQLLPQWRMFPVAQALQSLRGVSLIVAVTTVAEIGDLSRFQSPVELMNYIGLVPSENSSGEKTRRGSITKAGNGHVRRVWVEAAWAYQYRARVSRALLKRQEGLPEHIRDIAWKAQLRLCSRYRHLWARGKARQVIVTAIARELCGFMWAIANETQVPVAE

SEQ ID NO: 467340 - protein, 400 aa, unidentified
MLSIGIDVSKGKSTVCGMKPGGEIVYTPFEVQHTREGMSELVSLLRSSGEEVRAVLESTGSYHCPVVAALLENGIFVSVVNSLRMKRFCSQSIRKVKTDRIDAMQIALYGLAYWQELQPTKLPEDTYRELQLLARQYYQMTSLLIKAKVDFNAICDQVLPGMQELMNDHAGRHKLSDFVLRYRHTTHILEMGETRFRKDYCKWAEKKGYRNCERMAALIFATAQNGIPVLPNAPSTQIVITEAIRVLHTVEASRDAILTQMQALAKTLPEYSLVREMPCIGDTLAPRLIAEIGDVRRFHSKRALIAYAGIDAPPYQSGKFSANNRHISKRGNRYLRKTGYEVMQSYVMHKPANDPIFTFIEKKRGEGKSGKLAMVAGLNKFLRVYYGKVTELYRSLPAIE

SEQ ID NO: 467341 - protein, 359 aa, unidentified
MLNDSTTFLGLDLGDKHSHLAILDQGGEMIEETRLPTAQAAFHRKFSTLSACRVAMEVGAQSRWVSHLLKELGHEVLVANARKLRAIYANPRKDDRTDAETLARLARLDPSLLSPIHHRSPKAQADLAVIRSRDALVRSRTLLINHVRGIVKSFGDRLPSCSANYFAKKVASDIPEPLQPALMPILETIASLTQQIRAYDRQIKSLCEIKYPETKLLRNVSGVGPLTALAYTLTLEDPQRFPKSRDVGPAIGLVPKRDQSGGRDPQLRITKTGNIFLRRLLVSSAQYILGPFGPDCELRRWGLRLAERGGKNAKKRAVVAVARKLAVLLHHLWKNGEVYDPFYHTQKEETGSAVLPTAA

SEQ ID NO: 467342 - protein, 339 aa, unidentified
MELYAGLDLHSRNTYIGIMDKAFNRVFKKRVPNHLEHILQTLAPFRDQIKGFVVESTFNWYWLVDGLMDAGYSSAHLANPSAIKQYEGLKHSDDQHDAFFLAQLLILGILPQGYIYPKMDRPVRDLARKRMFLVQHKTAHILSLQSLIQRCCAMKVRANDMRHLTVKELEAWLEEEYLVLSAQANLDSINFLKQKIQGLEKAIRKKVKLKKAFHHLKTVPGIGDILALTIMLEVGDIKRFSKVGNFTSYCRCVPSRRLSDGKIKGYGNRKNGNRYLSWAFTEAAQLGRRHNERFRRYYNRKVAQANTSLATKALGNKLARICYYIMRDQVPFREELFCH

SEQ ID NO: 467343 - protein, 315 aa, unidentified
MRNCIGIDVSKGSFDVFVLEKNKALVMTNDSEGICKCVELCQKIQPELIVMEATGGYEALLASTLQAKGFPVAVVNPRRIRDFAKAVGQMAKTDKLDAQIIARFAATLEPMPHELIDSNSRKLKALMSRRKQLVEMHTAECNRKEHAIDIEVTRSIEAIVNAIESQLSNVEKELDSWIQQMPELKQKAEYLQSIPGIGKTTAHMLVIELPELGVFNRRQIAALVGVAPINRDSGVFRGKRMTGGGRRHVRARLFMPTLVATQFNPVLRKYYRTLVDAQGKCKMVALTASMRKLLCIMNAMLKNEQYWQPNLIENA

SEQ ID NO: 467344 - protein, 331 aa, unidentified
MHSSSAPSSDWLAGAAVLGLDVAKATVQGELRLADGRKVGLHFANNAAGFAQLARCLAQHHATKVCVGLEATGPYSQPLAHCLHGQGHRVSLLNPRRVKDYARSAGARNKTDALDAGLIADFMLAHQPSAWTPPTPAVAQLRALVRRREQLSLLLQGEKNRLEGVDASVRASIQRLVAALASEKARLEKLITQQIRADRALARHHELLTTINGIGALTAAILLAEMAGPDQVQRARQAAAHAGLAPRREESGTSVRRRKGLGNEGNRHLRKALYMPALVAIKYNPPLRAFAQRLSAAGKPKMAIVCAVMRKLIHVAFGVLKHQQPFNPSLA

SEQ ID NO: 467345 - protein, 458 aa, unidentified
MKIKSIYPARNSSQLREVLGKYSPGELLYAPIDVAKYNHKACAVNFFGDILTPAFEFSNNAHGVKFFISKITEAARNAKAKKIFIGLEATGHYHQNLTLHLKSLGYEVAVINPFDSWKERLNKSSKTDKIDLGSIAKSLISRKFSSSTVPEGVYYNLQRATRTRRKFVNRRTSSKNIITGLLDNLFPGLWDKEDTIFSDRWGKASLSVLEHYPTPQMVLRLGEKRLTRFLKKGTTKLGEKTARKIISAAKVALTRSPYEQTMDILALRSHLQAYRLYEEIIFHLEKEIAYLLVQTPGTYLLSVPGISVTYAAEVTAEIGDISRFAYANQIISLAGTCSKKDQTGEHDPQNLPISKKGNKFLRTVLNQAGLSLNTWCPDFNAYYSRKVEEKKGRCGIARTATGNKFARLAFALMKHESLYHPHSFNTLVQDPGNYYLLSLWRNTEEVKGFLFREDPSSE

SEQ ID NO: 467346 - protein, 391 aa, unidentified
MIYVGIDVAKDKHDCFITNSDSEVLFKAFTIFNNLDGFNDLYQKIESVMDDVTKVKVGLEATGHYSYNLLGYLIDKGLPTYVINPLHTNLYRKSLSLRQTKTDKVDARTIASMLMSDVNLKSYSDISYHNEELKSLTRYRFDKVKERAKLKTSVSRLVCILFPELEKLVPTLHITSVYALLSEFPGAKHIATAHLTRLTNLLSEASKGRYGKDTAITFRDSARASIGSNMPAKSLELKHPIKLIQELDSEIDEIENEIKIIMDEINSPILSIPGINYRMGAMIIAEIGDFNRFDSPDKILAYAGFSPSTYQSGQLDGAYAHMEKRGSRYLRYALYNATKYVCHWNPTFAAYLAKKRAEGKHYNVAISHAVKKLVRVIYHLEKTKQQYIKAA

SEQ ID NO: 467347 - protein, 296 aa, unidentified
MPKIQWTNLPEAIRKHLLLRLKEFDVSLVVMEATGGYEAQLACALQAAGYQVAVVNPRQARDFAKSMGYLAKTDRIDAAALSEFAQAIDGHPQRARFVHPLPDPEREQLAALVTRRRQLVEMRTAERNRLCLGHRSARKSIEAVIKVLQRQLDDIEAQMARHVKEHHADLAALLSSAKGIGDSSVATLIGELPELGRLTNRQIAKLVGVAPLNRDSGAQRGKRTIFGGRAALRSALYMPTWAAIRYNPAIRAFYQRLIAAGKPKKVALVACMRKLLVILNAMVKSGKHWDNSIYNA

SEQ ID NO: 467348 - protein, 339 aa, unidentified
MTIQSEKIVPELQSLFAGIDVGAEELILLIRKNATSYKAQKFTNTPADRARLVKKLVNLPGIVVCLEATGVYHFDLSIALHDAGVALMVVNPKSSHNFAKVLMKNSKTDAVDAETLAQYAERMDFVAWARPSDEKIALRSFARRIDALTRQKAAAKNQLHALSASKKNPKAVLRDVNLSISQLEKRIDCLSKEALVLIKKHADLERVFKLLTSVKGIAQTSAIALMGELLLLPQGLSHREWVKFAGLDPRAFDSGKSVHKKTRISKAGNRHIRSALYMPALSAKQHDPYVKAYFQHLVDNGKLPLQALCAVMRKLLHAIHGMLKYDKQFDNTRFYAIPA

SEQ ID NO: 467349 - protein, 354 aa, unidentified
MKRTTKYVALDVHQATTVASVREESGRVIARSVLPTDGSAITEFVRGMRGAVHVAFEEGTQAQWLHDLLTPLVHRVVVCDRRGAPQHGNKGDQVDADQLSELLRRGGLRAVYHGSAHHATLKELTRTYRNLVEDATRVMLRLKALFRARAIATAGTKVYQARGRAAWLAQLADPGAKFRAEVLYAQLDRLRALRPTTKAAMVAEARRNPAWPVLRAIPFLGPVRVALLLATMQTPWRFRTKRHLWAYAGLAVVTRSSADYRLVAGQPVRRRRAPLTRGLNRNHNRVLKDVFKGAATAATARPGPLQEFYSSLIARGLRPELARVTLTRKLAALALRLWKKGERYDPTKLTTPAR

SEQ ID NO: 467350 - protein, 329 aa, unidentified
MSQCTPALRGSQSGDTYWGVDVASQKLDLACYGQDQLRSFANDQEGIAQVVQILRHQPVDRIVVEATGGYENPLVTQLVAAGLPVVVINPRQARDYARALGIPAKTDALDARVLARFAHDVRPELRQFPSENERFFADLVTRRRQLVDLRTAELNRRQQIARPELTASIEAVLTVLNQQLAEVERQLARLIQDNLHWKAKDKLLQSVKGVGPATSRALIAELPELGTLTRRQIAKLAGVAPLNRDSGKFRGKQVIGHGRSSVRTSLYMAAFNAKRSNAQIRAFYQRLRAAGKPFKLAMTACMRKLLSVLNAILHTNTPWRNPLLTPENS

SEQ ID NO: 467351 - protein, 337 aa, unidentified
MNNYIGIDVAKATLQVYIPKNDLDIEIKNSDNGLKSLYSKLKKQYKKEIDSIVFVYESTGSYSTYLEQFSESKNIKCFKVGAYQSASFSKVVKNRSKTDIVDARMLSNMHIIATDEDIKIPLRDVKAHQIRSYIKYYQSLVKEEIRSKNYLEAATFNLEDKFVLNQVKKKIKTIQKEQVDIISKIMEIINSNIKYKKAYENITSIKGIGKKSGIILLYLFLRYPKASRQHITALCGLDPIQRTSGTSVQHKERISKQGLSLVRAILFMPTMVAIQHNEEMKLIYDRLVDRGKPKSLAQIAVMRKIILLAHSLYKNDEIYDEHRYLKFTQIKEVNNVK

SEQ ID NO: 467352 - protein, 396 aa, unidentified
MPRIWAGVDIGKEHHHCVVIDDNGERLLSRRVRNDETELLTLIADVLAIDAGVVWAVDLNCGGAALLIGLLINHAQDLVYITGLKVHRAAGTYRGEGKTDARDAFVIADQARVRRDLGPLRAGDEIAVDLRTLTNRRTDLVCDRTRQINRIRHQLLEYFPALERSLDLSRKGHLLLLTGYQTPDSIRRLGEQRLAQWLRHRKARNADTVAHLAVEAAAAQHTTLPGQQLAAAMVERLAKGVIALNTEIAEIDAMIEERFRRHRHAEVMLTLPGFGPTLAAEFLAATGGEMSAFGSVDRLAGYAGLAPVPRDSGRVHGNLRRPRRYHRGLLRSCYLAAMASLPACPTSKAYYQRKRAEGKRHEQALLCLARRRLNVLWAMLRDDSGYHASPPIPAAA

SEQ ID NO: 467353 - protein, 315 aa, unidentified
MSPPATPSRFIGCDVGKTTIVAFDTASGRTYTIANEPQALFDFAASLDPTCFVVCEATGGYERDLLAALLAAGVPAHRADARKVKAFIRSFGTLGKSDAIDASALTRYGRDRYAELPLWSAREPERLRLQALVLARRDLVKDRLAYANRRAAPAAEPVHAYLEALVESFDAQIKAIEADIDALCARCEPIAKAVKTLVAIQGVGQKTASALIALMPELGSLPRRQAAALAGLAPHPNQSGQTDAYRRTRGGRPEVKRVLFMAALSARKHNPNLKAFYERLVQAGKKPLVAITAIMRKLVVIANAKLKTANALQVS

SEQ ID NO: 467354 - protein, 416 aa, unidentified
MEVLHARCAGLDVHKDTVVAGIRIADGGPAKTEVRTFDTTTPGLLALSAWLAEQSVTHVAMEATGIYWRPVWHVLSDGEVTLILANAAHVKNVPGRKTDVADAVWLADLLAHGLIRPSFVPEAATQEMRALLRTRKQLVREQASHVQRLQKTLEDANIKLSSVLTNIMGKSGRAIIEALIEKQTNPEGLLALVQKGVKAPPEKIKAALTGRVTDRHRFLLRLHLRQIDALDAALADIDAEVDRGLDPFRQAVTLLRSIPGVSDLTAQVIVSEIGTDMSRFPTAGHLVSWAGLCPRNDESAGKRRSNRLRKGAPWLKTTLVQCAWAGARKKACYLQAQFQRLRSRRGPKKAICAVAASILTAAYHMLRDGTFYHDLGPDHFRRTSPETHAKRLAQQIAKLGFTCTIAPASTAEEVSI

SEQ ID NO: 467355 - protein, 354 aa, unidentified
MEDYDGRQVVGMDLHRRRSVLVRMTEDGRRLGTVRITNSPAELRREIARAGKGPRVVLEATYGWYWAADVLAAAGAEVHLAHPLGVKAFTYRRVKNDVRDSADLADLLRMGRLPEAWIAPHEVRELRELTRYRAKLVRLRTSCKDQVHGVLAKLGIPVTCSDIFGAAGSAWLDGLRLPQPYAGKVTSLRHLAGEFTAEIDMLGEVIADLLAGHRGYQVIQQLPGIGPVLAAVIAAEIGDITRFKNPGQLCSWAGLTPRHRESDTKVARGHVSKQGSRLLRWALIEAIQRIPKDSVIGAVKDGIITRRGKEARNIAKVAAARRLLTLVFYGMRDHQIRCLARPAGPAAAAPARAA

SEQ ID NO: 467356 - protein, 384 aa, unidentified
MKNVSKALEPVKDTMAKRAVGKKKAVTAKGGRRTRPDLARETIGIDLGDKVSRYAILDVAGELVEEGSFRNEVSSMEKHFGGDTKPARIAMEVGTQSAWIERELKRMGHEVIVANARELAWITASDTKNDRSDAEKLARLARADLRLLKPVDHRTAEQQAELNVIRARDALVRARTLLVNAARGLAKGFGFRLPPAITSLFGTHASKLVPEILKPALSKLLAQIDAVTASIHEYDRQIMALAGQHKEVVFVQSIPGVGPLTALTFALTLGSAKRFEHSRDVGAFLGLRPKQRQSGDRDPQLHISRAGDKYVRKLLNQCSHHILGRFGKESALRQWGMMIAQRGGKSGLKRAITAVARKLAVLMHRLWQKAEIFQPFPGAVSKAA

SEQ ID NO: 467357 - protein, 422 aa, unidentified
MPNVQSTQSPSVLVAIDIAKLRHDVLIEAPGWKRRKRLVLLNTAVEFRRLADYLHSLHMPVHIVFEATGNYHRPLAHFLLSQGFHLELIPSLAVARTREAMHNSWDKNDPKDAQVLLHLLRTGVTQRYHDPLVNHTHDFQELSLTYAQVSMEKTRMQHRLLTHYLPLYFPEIERHYHASRSLWLLEFLQAFPTPATITALDREQFVQSAWPIIGRKVAKRRLLEDIYHRAQSSIGLPVEEESEAVAMFRVLLKEMSRLCKLRQELEQRADGYLGDNDDFRRLKQIPGIGPILALTILAEAGDLRRFRHHRQFLKFCGLDLATQQSGQFRGATKLSKYGNGRLRCALWMAATIAVKQRENSFRDKFERYIRKDPLSADRKRMAYVAVAGKMARVVYGIIKSGTEYRCFHEVAAPSGRAVSIGP

SEQ ID NO: 467358 - protein, 391 aa, unidentified
MINIGIDVGKFKHCATVLDDSTGEVLIKPFFLTNDRKGFDLLYSKTKQFIRRKHSVGMEDTGHYMINLTNYLLDKKFTVKYINPRATCLRRKELGVSAKNDRKDALLIAEMLSEKRFWRSISVRSIENSKFRDITRLYHQLQEQQNQDMNRLQRALDIVFPEVNLLSWTRYSKAYMKFLSTYPSASSIAFEDIRNLRKALKTEGKGRQSKVTAEEIRELAKCSVGEDNISIDLEVTSIIAIINTREEQIRILGKKIEEFSHKLNSPIISIPGISHISGMTILAEIGDINHFQNTGNLISFAGMDPLVYQSGKYDAAHMPISKHGSRYMRKALYQAVFTVCKYSPTFHAYYTKKRNQGKSHRCAQGHCARKLLRVIYKLLSTNSLYNQNHIH

SEQ ID NO: 467359 - protein, 313 aa, unidentified
MAELYVGVDVSKRTLDVVWLEPEKVVRQFDNHPAGIALLVKELTGRKVHTVVLEATGGYETAAANALAAAGLPVAVVNPKQVRDYAKATGQLAKTDRLDALVLAGFGRDLKPPIRPLPAEDQRELAELLDRRLQLVQMRSQEMARLATVMPVAKPSIKDHIKWLDERIDQLDIDLTARLRQSEVWKVKADLLKGVPGVGKVTMFTLLARLPELGQLSRAKVAALVGVAPFADDSGKRKGHRYIRGGRAEVRNALYMATFSARQHNPVIRAMFERLTAAGKPYKVAMTACMRKLLTILNAMLKRNQPWQPPVAT

SEQ ID NO: 467360 - protein, 342 aa, unidentified
MDHFAGLDVSVKETSVCIVDDTGRIVREVKVESEPEALLAVLKNPGYHFKRIGLEAGPLSQWLFSALAEVELPVLCVETRHMRAVLKAQINKTDRNDARGMAQMMRVGLYRPVHVKTLRSQKLRMLLIHRKLLQSKAIAIENDLRGTLRNFGLKVGMVGTVKFEARIKELVENVPDLAVLVEPLLVVRRSLREQFVILHRRLLAIVRDDEVCRRLITTPGVGPVVALTYRATVDVPARFRKSKAVGAVFGLTCSKYQSGEIDWSGRISRCGDEMMRVMLYEAAQSMMHSKKWSWLKAWAMQIARRRGMKKAIVALARRLAVIMHRIWVDGTEFRWTREVVAA

SEQ ID NO: 467361 - protein, 340 aa, unidentified
MNIKRIGLDLAKNVFQIHGVDHHEKVVLRKTLRRAHMMTFFSGLSPCLIGIEACGSSHYWARELTRMGHTVRIIPPKLVKPYLKGNKNDVNDAAAICEAISRPGMRFVALKSEAQQTLQAEHRVRARIIRERTALCNEIRGLLSEFGLVLPVGINHVRKILPEILSQQEQWNDRFIRLLCELSEEMQMLDERISRHDRRLQQAARDDIRIKRLMEIEGFGPIVASALVAAVGDAKQFKNGREMSAFIGLVPRQHSSGGKERLGHISKRGDSYLRTLLIHGARAVLRFSAGKTDRRSRWLQSVAERRNNNIAVVALANKNIRIAWAILSCSEEYRGVENAA

SEQ ID NO: 467362 - protein, 343 aa, unidentified
MEQYAGIDVSLELSSVCIVDAQGKIVKEAKVASEPEALVTFFETLGFAVKRIGLEAGPLSQWLHAGLKRAGFEAVLLETRHVKAALSAMTVKTDRKDARGIAQLIRMGWFRPVHAKSMGSQEVRALLVARKQLLGRLIDVELSIRGILRGFGLKVGPVTRKNFEARIRELVTGQATLERITTAMLSARAALKVEYTKLHKAVLTIVRAVCRRLMTVPSVGPLVAITYKSAIDDRHRIAQSKAAGALFGLTPKKYQSGEKDVTGGITRAGDEMVRTALYEAANVLLSRITRFSKLKRWGMDVAKRRGSKRAKVALARKLAVILHRMWVDGTTYRWAEAAEPIAA

SEQ ID NO: 467363 - protein, 425 aa, unidentified
MEVIHRRCSGLDVHKETVVACVRLVLDGKITREVRRFETTTSGLLLLLAWLTEMGCTHVAMEATGVYWKPVWNILSDGDFELVLANAAHIKNVPGRKTDVSDAAWIADLLAHGLIRSSFVPEQEIQELRELLRTRKQLTRQQSRHILRLQKTLEGANIKLDSVITDIVGKSGRAMIQALIGGETDPVKLAALADRRIKASAQELREALRGRVTDHQRFLLHLHLQHIDFADSAIQDIDRNVSALIARMDQEVEAGQTRATFQSLILLLMTIPGIDVLSARIILSEIGRDMGRFSTAGHLLSWAGLCPRNDESAGKRRSTRLRKGAPWLKTLLVQCAQAAARKKGSYFNAQFLRLRGRRGPKKATCAVAASLLTTIYHMLKDGTQFQDLGANHFDRRSKDVRAKRLVAQLANLGFDAKLTPFAQAA

SEQ ID NO: 467364 - protein, 465 aa, unidentified
MKHHRRHPSPKPRTSPAALERLHPHAAGIDCGAAEHFVAVPPDRDATPVRSFATFTGDLHRLADWLTACRVTHVAMEATGVYWIPIFEILDARGFQVVLVNARHVKNLPGRKSDVSDCEWLRDLHILGLLRGSFRPADGIVALRGYLRHRATLIECAGALVQRMQKALVQMNVQLPLVVSDITGVTGLRILRDIVAGHRDPAHLAQHRDYRCHASEAEIVAALTGNYRPEHVFVLQQNLELFDAYQQQLAACDTAIEAALAQLTAAAAPPTTALPPARRRQKPRDNEPRFDLRTPLHQLTGADLSQIDGIGPYNALRLISEIGTDMSRWPTEKHFTSWLTLAPHNKISGGRLLSSRTPPSANRAAAILRLAVMNAGRTQTALGAFYRRLAFRVGKAKAITATARKLAILIYRTLKDGLVYADPGADTYNAHHRTHVLRRLRQRAQNLGFGLINLSTGEVVDATVS

SEQ ID NO: 467365 - protein, 343 aa, unidentified
MQIRSVGIDLGKTTFHLVALGDNGKVLLKKKFTQKQLIAFTANMQTCLIGMEACSGSHFLGRALRAQGHDVKLIPAQFVKPFVKSNKNDFIDAEAIAEAVDRENMRFVPIKTDDQLDLQALHRVRDRLMARRTSLINQIRAFLLERGIVFAKSPIRLREALPEVLENVNENLTPRMRNLVAMLWSEWKDLELQIVQMNDEVERIASSDAACRRLRQIPGIGPLVATAIVASIGNGAAFRKGREFAAWMGVVPREHSTGGKQKLLGISKRGNKYLRRLFVQGARSVLQQRHKQAPGLRDWLAQLLERTHQNVVVVALANKLVRMAWAVLCKNERYRAPVLAVTT

SEQ ID NO: 467366 - protein, 319 aa, unidentified
MDYIGVDVSKQDISVFDYKGLSTFKNEKGLKDLRFYIKKQFKSYDDIAIIFESTGVYSDYLKEFCSIHKIKACIVNPKKSSNFAKAIGNRSKTDKIDANMLYRFKDIISQKDILIPETNKTADRLSSYLTSYEFISKKVTSISNHIEALKHKSDTPKDILRMFEKELKYAKEMQNKIMLKMEEFIENNKGLKKDYENLLTITGIGKISAIALSTLFTTYKDTNRSQITALAGLDPIRKESGTSVNKRRKISKSGNKMFRKILYFPMLTAIRYNKKIKKFYDRLVENHKPKKLALIAAMRKMILIAHAIYKNKTVFCDDL

SEQ ID NO: 467367 - protein, 337 aa, unidentified
MKYSGIDLHSNNSLVTVTDETDRVVAEKRLPNELSTILAFLSPWRGELAGVVVESTYNWYWLVDGLQAAGYKVHLAHCTAIKKYDGLKHSGDEADARHLAHLLRLGILPTGTILPPAQRAVRDLAKKRMQLVRSRTTHILAVENITARELGARISSNQVKRLTAEVIDQMPIAADVALAIKANLAVVTAVSAQIELLEKRLQESVKAGSDYGLVSSIPGIGRVLATTILLETGPIDRFASPGNFASYARCVDSQHTSNGKKKGEGNTKNGNKYLAWAFIEAAHFAMRYCAEAKRFYERKKAKTNNVVAIKALAHKLARACFHMLKERKPFDVTRCFA

SEQ ID NO: 467368 - protein, 422 aa, unidentified
MEGVVYPRSIGLDIHQKMIVCCFTAVQADRTIIKETAEFETFKRGLKALASWCRERVPDVVLMESTGIYWKAPYAYLERAGIVPAVVNARHIKNLEGKKTDMADAEWLAVVASAGMFCRSYVPKEAYRNMRVLSRHVLGVTRSRQQYKNRISKILADAGARLNVVFSDISGVNAQRCVKGLIAGMNPEDIAAALDCSHLKATREDIAAAMECDLTPAHLAALEALLEIVDFLTKQIDKGRKALLDMLPEGDREMLMILQTIPGIQETAALELLVELGGDNLEPFANADRLASWVGLCSGNKESGGKRRPAHTRKGNMYLRRILCEIAHAAVKTKGSTFQSKYKSLRIRKGAGKTIVAIACKIIKLVYTLVKKREGYRDPHIDYEKMRLQKNPKRHIQNLFKLEDWKIRAVNTKTGEVLESTH

SEQ ID NO: 467369 - protein, 358 aa, unidentified
MQNKVKTISFQGQNIYIGIDAHLKSWKITIMLDHSIYKTFSQDPGAGILYDYLRRNFPGGNYYSAYEAGFCGFSIHRELEKYGIKNIVVNAADIPTTDKERKQKEDKRDSRKIANSLRNQELEAIYVPNRDMEELRSLVRYRKTLVKDIGRNKSRAKSFLHYYGIHIPTELDSASQHWSARFTTWLKSVETTTACGGFVLSEIISTTEHLRLRLLKVERQLREISKSGTLAKTIKLLRSIPGIGLIVSMTLLTELGDVKRFSRLDNLCSFVGLVPTTKSSSDKEKTGNITPRSNKILRNSIVESAWVAIGHDPSLALRYNELCKRMKPSEAIIRIAKKLLNRINYVLKNEKEYVYSII

SEQ ID NO: 467370 - protein, 402 aa, unidentified
MTAPARPAPVVVGGSDTHADTVHVAAISTLGREVADREFPTTAAGYRAAVAFLTSHGPVDQVGIEGTSSYGAGLARAVTNAGLQVIEVNRPSRADRRRQGKSDPLDAYHAARAVLSGQATSDPKDQSTEAIRSLHNTRRSAVKARTAATNQITAMLITAQDGIRSKYRALQGQPLITALAKCRTAVVDPVDAAVLTALKALAHRHQFLTAQAEELSTLIDALVTTANPALRAAFGVGPDTAAQLLITAGANPDRLRSEASFAALCGVSPVPASSGKTTRHRLSRGGDRHANNALYRIALSRMAHEPRTKQYVARHVAAGRSTKEILRMLKRAIAREIHRLLTHKVALPEYADLRPARQAKNITVTAAANAFNIWPTVISRIERGLQRDDDLANRYRTWLQAA

SEQ ID NO: 467371 - protein, 488 aa, unidentified
MEATYRRCCGIDVHKKSVMVCVLPPAGERKGEPRKRKFRTYTRDLKQLRAWLKNCKVTEIAMESTGQYWRPIWNLLEGHFEKLLLVNPQHIKGLNGYKTDPKDARWIADLLESDKLKGSWVPPRDIRELRDLTRQRVHVMEDQNRVKNRIEQLCQTGNIKVSSVASDLFGVSGRRMLKAIVEGKRDPGWMADYARGTLRGKKRELELALNGSFTDSQRWLLDKQLQHLEWLEKQVQGLEQEIERRVACQEEPMRRLMTIPGIDRKTAWTLVAELGVDMSVFADGQHLASWAGLCPANRESGGKRMSGRTRKANSYVRRAMCQSAWAASHTKRTWLHSFFRRIQVRKGAPKAVMALAHHMLVVVYNVLKRNEEYVELGGDYHDQRNKPKLVSRLVERLTRLGYHVDLKPVESHSSEQPNPVADLVPDLPSEQPQEMAAIAKDTPAVAESTAPRKPKRGRPCKCIERGIICKHGSSIKVNSLKERAHNGS

SEQ ID NO: 467372 - protein, 371 aa, unidentified
MNTVIHIGIDVHKDSYSLSAFNFSSNRNFGQSRIDSKSNLVIKYVERLRKEHQGCEFVCGYEAGPTGFGLYRDLERAGIPCVIMAPTTLPKASGNRVKNDRLDAQELARHLAFGTYSAVQVPTVQDEAVKNFTRLRNTRKESLKKAKQNLLSFLLRMGRTFSEGKSYWTLLHFKWLKGQKFDDMVDQETFDEYLQEVHDQQEKVERYNQRIEELAERDEYREKVAKLCCFRGIETHTALSLVSEIGDFSRFATAQQFSAFLGLVPSEESSGQRERRGTITKAGNTRLRMLLIEGAKSTLRASAFGKKSKRLLARQKGNDAEVIAYADRANRRLHRVYGRLTTRGVHHNKATVAVARELSCFVWGMMNNRID

SEQ ID NO: 467373 - protein, 320 aa, unidentified
MQTSKVYTGIDVSKAALDVAVYGKVERHSFTNDEQGISQLVSWFKGLNPEMVVMEATGGLETPLVAALGVAGVPVAVVNPRQVRDFAKSIGRLAKTDALDAEVIAHFGAVADLKPRPLPDAMTRELAAVLARRRQVLEMLTAERNRLGTALSHVTERIRVHILWLEEELDKLNNDLSHIIRESPAWREKDDLLRSVPGVGPVLSTTLLADLPELGTLNRRQIAALVGVAPFNRDSGMLRGRRTVWGGRADVRGALYMGTLVATRYNPVIRRFYQHLCASGKMKKVALVACMRKFITILNAILRHHTPWSEPVFQLIGPCS

SEQ ID NO: 467374 - protein, 372 aa, unidentified
MDYTTFVGMDVHKDTITVAVAKEGNTEPVLLGTIPNRPDSLLKLLKQLAVTGNRLLFCYEAGPCGYGIYRFLKERNFSCIVVAPSLVPVRVGDRVKTDRRDAKKLARLLRSGELTPVWVPDEEHEALRDLVRAREDAYKDLQRKRHQLSKFLLRTGKRPPVGINPWTVKHRCWLDTVKYELHAQQLVLQEYRHAVDQAQERLKRLEQELIELGCKSVHAPVIAALRALRGIDYVSAITLVAEIGDFRRFDNAAKLMSYAGLVPCESSSGPRSRRGSITKTGNSHVRRIIVESAWHYLRAPNVGCTLRKRQEGVPESIKEISWRAQNRLNSKFRKLLARGKSRQTAVVAVARELLGFIWSVALQAKIEYEKAA

SEQ ID NO: 467375 - protein, 343 aa, unidentified
MMKISTIGLDLAKNVFQVHGVDASGAVAVRRQLRRAAVEKFFAQLPPCLVGMEACGSAHHWARVISRYGHEVRLMPPAYVKPYVKRNKNDGRDAEGVCEAVARPTMRFVPVKSIAQQATLAVHGTRALLVRQRTMAANALRGALSELGIVAPQGYEGLRELMARLEEPSDEIPEMMRGALLVLAKHWQALDADERMLEQQIAKAARCDRDARRLMEVPSVGPIIASTVLAKVPDAKLFRSGRDFAAWIGLTGKDHGTGGKHRPGRISKQGDRVLRALLISGASAHLRQQKARGVADPWLRDLLARRPYKVAMVAFAAKTARIIWAMLVKGEHYRDRASVSAAA

SEQ ID NO: 467376 - protein, 311 aa, unidentified
MPAKLSPTYVGLDISKDQLDYCLGETEGRCAYSVEGRAELIRKLRGLPEPRVVCEASGGYEKLIVAELLEAGIEVCVVQPGRVRAYAYAEGLMAKTDRIDARLLRRFGEKINPRLSAPIDAATTTLRELLEHRRQLTTQLVEVSGRRPLAGPTLGKLLAKQQQFLEKQLTKVERLIQQHIDQDPDLKQKSSRLQQIQGVGPVLAATVLAYVPELGQLEAPQIAALFGVAPYPEDSGLARGPRHVRGGRAQVRHVLYMAAIAASRFNPVLAVFYQRLRAKGKPAKVCFVAVMRKMACLMNKVIKDPHFVLAS

SEQ ID NO: 467377 - protein, 394 aa, unidentified
MRFAGIDIAAETHVVAVVSENHEVLVKPTPFAEDAAGYQKLFAALSTPTNMLIAMEATGHYWKNLFAALAAAGYTVALLNPLRTHRFAGEELERTKTDAIDALGIARFAAEKHPPPTLLPDAATEELRELVRLRERLLQDFGDRVRQLHRLVDLGFPEFTRYVHSLSSELASAILHDYPTAAAFRGVAVKRLAALRYDGRHKVGAELASALIEAAHRSVGHHHGPAYRVQVRYACEDLDLLRRRLRELDHDIADKLGEHEVGMLLTTIDGIGPSTAARLIAELGDPAHFRAGSALSAYVGVIPGLKQSGKRHPSRAALTPVGNARLRAALWMPTLTAVRRNPWLRAHYQRLLARGKLPKVALVACMHKLLLAVYSVAKHRQPFIPKLATEPHRV

SEQ ID NO: 467378 - protein, 317 aa, unidentified
MHQLNTEDVGIDISKAKFDVSFPDRSKSVVYKNTPAGRKKLIATLMKLQPIRVCLEATGGWENRLVACLHQHKFPVSVVNPRLIRDFARAKNQLAKTDEIDARIIREYAEVMDPRLTPPLTEAQQKMREFTSRREQTSKMIIQEKNRLETIVDQDVIKMIEQSIAFHKEQLRLIEKELKALIDADEESRKRSKILQSVPGIASITATLLISDLPELGSLNRKQISRLVGVAPTNRDSGTMRGRRTIGGGRVRIRNGLYMPTVVALRHNPIISAFYKRLVKNGKPKMVALVAAMRKLLIILNTMVKEGKQWEANVRNS

SEQ ID NO: 467379 - protein, 376 aa, unidentified
MTRIIKIGMDVHKDSFTLCAMEPKFGGKDIIFSTVKIGADVDLVIDYIKKLKEKLQDSNLDIECGYEAGCLGYVPYAELKARGVKCIILAPTTMMAPQGKRVKTDARDALMIAQCLSYGGYKAVHIPTDQDAAVSGYLRMRDDHKSALKKIKQQILSFALYNGLRCEANNWTQLHLQFLRHCQCNPIVRETLDDYLRTYDYLNNRIDEMNQRIHELCQDKAYSENVKKLQCLIGIKEQTALALITEVGDFTRFDKGNTLGAYLGLAPGEQSSGAKTVRTGISKAGNRFVRKLLTESAQGICKGRIGYKSKDLKSRQQGNSKEVIDYADHANEYMRRKYYRLMRKGKKHNIAVSAIARDLSCFVWGLMTDNISIARD

SEQ ID NO: 467380 - protein, 411 aa, unidentified
MDVVYRRCAGLDVHKQSISACVMISGPGEEPASVEKRTFGTYTSELVELQHWLKGCGVTHVVMESTGVYWLPVWGLLEGTFALMLVNPQHFRAVPGRKTDQKDCEWLAQLLQYGLLRGSFVPPQEIRELRELTRYRVKLLGQRNQVHNRIEKLLQQANVKLSSVATDILGVTGRNILAALLGGNEDAKSLADCAKGTLRRKKDQLAQALQAKLTIHQRFMLREFLDDLKFVEGKIARLEETIQERISPHEEVLNRLNTIPGVNRLTASTLIAELGVEMQQFPDAMHLASWAGLCPGDCESAGKRKNTRTRKGNPHVRRVLCQAAWAAAHTKHSYPAALFYRIASRAGRNKALIAVARHLIVIAYHLIREPVVYRDLGENYFDALHAERTKRRLVKRLEHLGHQVTLSRRQP

SEQ ID NO: 467381 - protein, 404 aa, unidentified
MWYVGLDWADTHHDVEVQDEAGKRVGARRFAHSHGGLNELKAFLLGIAASPEELACIVETNHGLLITFLLEAGIPVYPVNPKSANQLRKAAGAKTDRIDAHLLAKLGRFDLAELRRMAPDSPTVQELKTLTRDQDALIQTQTRLVNQLTACLKEYYPAALHLFAKVQQHSTLLFLQAYPTPQAALAASIEQITATLRTGKHTNPRRAAPKIVEELHRPQLVASEVIVRAKSRLMLSLVKQLLVVIEEIAKYDKAISTLFLTHNDQELWSSLPGAGKRLAPRLLAEWGADRSRYADATSVQALAATAPVPFESGNYAKAHKRFACLKPLRNALHQFAWQSTLQEDWALAYYQRKRAEGKTHSMAVRALANVWVRIIYRMWISKTCYQTATFEAAKLAHAPRQHVA

SEQ ID NO: 467382 - protein, 369 aa, unidentified
MVERRVWVGFDVGADELAACAKCDEGLPIAEALLPATIEGVISFLDGCGQPEHVTIGLEAGSTGIHLTRKLRDHGYRVHVFDTRQASKFLAIRANKTDPNDASGLSDLVRLGMGVVSEVTVKGIECQLLRSKLMLRQKLIQHRMAGEGAIRSAFRLNGGKLDKCYSATSLRRNVLAEINNIREREGFDLSDDIVPVLDICEATRRHLEKIDRALMHMAKDHPICSRFLTIPGVGPITALSFYSSVEDPARFKRNGDVGAYLGLVPRLKQSGTSSVRWGISKMGNSMTRTHLVSAAAAMMRQKGEVGPLRAWADNLRERSNYRRVTTALARKLAVVMLSMWKSGQSFKFSTNIISEPKSEAEGPITKPAA

SEQ ID NO: 467383 - protein, 417 aa, unidentified
MEDNPSASPCRYIALDIHKYYSVVAGVDREGKEILSVCRVEHVDLENWAIKHLLPIDRVVIESTTNAWHVYDLLEPLVGEVLVANPIKVKQIACARVKTDKKDTFILARLLAANLVPTVWVPPKHVRELRQLISHRRRMAGMHTQVVNRMHSVAHRHHLNHPKGKDFQPKNTLWQRDASLSRLEKMQLELDMETREHLEKQIGRMTRELGRMSHEEPWASDMLYLMQIPGCGVVTGMTILAAIGDITRFETPKALASYSGLVPGLEQSGVKLRGKGITKEGRRELRWVMVEIAWRAVKADPHWKKYFESLQKRMHKNQAIVAIARHLLTMVWYVLTRHEPYSHYTPERIAYKYLTWAWALDKEQRQGMTRPQFARHYLMRLGIGDELERVALNPKFPYRLASTEEVLALRPELLPPE

SEQ ID NO: 467384 - protein, 452 aa, unidentified
MQEQNNALVPIKAVAGIDAAVTAVHHIAVREIYADGTEQLTRFTAAPTLAGLAALSRRLAAVPIPVHAVVEPTSMTWLALTLAVERAGGQMAMVGARHSARLRGAIMGKNKSDLIDSEVLTHAGEIFDPPTLALPSPVQLALRRAVVRRHGAVIDANRTWRRLMSLSRWAFPDVWIAFAGSEATALAVLERWPDLRSLASAREGTLTAVVAAHTRDVADTPARAAAIKSAAKGWAQFWEGHLELDGLAVDVSEHLHDLREARERVDRFTAHSSHWWEQLWGDDPLVLSLPGVGPATGPCIRAYFGDGSGFENAKKAANYVGITPSNWSSGTMHQTRRAISKEGPAPLRLAFYQSASVARSMDPQLAAFYHRLMTESGHCHTQAVIAVARKLAERTWKTLTTGEPYQLRDLEGKPITRRAAKELITSKYTVSTVQRAKARSHTTEAKRARLTR

SEQ ID NO: 467385 - protein, 388 aa, unidentified
MQGIANRLEAQSAIRSDLGAIFVSMELSRSIWLITSLSPGGGEKMSKHSVPAGDIGALLARFSETKQKALARTGRSFPIIVIQEAGLDGFWIHRALESEGIESHVVDPASIATSRRRRRAKTDSIDGEALLRALLAYKRGEPRVCAMVKAPTPKQEDSRRLCRERKVLTNERVLHVNRVKGLLFSQGVSGYEPLRRDRRQRLDELRTGDGRPLPVHLKAQICRELDRLELLIEQIKAVEAERDAMLAPQQVAAPEPTAMLLAIKGVGPEFAAVLWSEGLFRHFNNRRQVASYAGLAPTPWQSGSVDREQGVSKAGNPRLRTTLIQLAWLWLRHQPQSALALWFEERVRRNGGRLKKTTIVALARKLLVALWKYVTAGVIIEGAVIMAA

SEQ ID NO: 467386 - protein, 293 aa, unidentified
MKLYSAIDLHSTNNVTVVIDEQDRVVYQKRLPNDLALILKELSVYQSELQGIVVESTYNWYWLVDGLMEQGYRVHLANTAAIQQYEGLKYTDDHSDARWLAHLLRLAVLPEGYIYPRADRPVRDLLSKRSQMVRQRTTNLLSIQNLLTRNTGSSLSANRVKGLDAQQVDELLPDRDLALAVKANLSVLSSADEQAQLLEQTVMQRVKLRPQFCFLKSVLGIGEILALTIMLETGDIRRFASVGNYASYCRCVGSQKISNSKKKGQGQHQERQQVSGLGVCRSGPLRHPLQRQD

SEQ ID NO: 467387 - protein, 334 aa, unidentified
MQNVALIGIDLGKHSFHIHCQDKSGNALLRKKFTRTKLMQFLATCPSSVVVMEACAGAHFMARRISDIGHEAKLISPQFVRPFVKSNKNDFIDAEAICEAASRPSMRFVQPRTETQQAMRALHRVRESLIRDKVKTTNQIHGFLLEFGISLPTGDAAIKRLSLVLAEHEVPEYLSRLLMKLHAHYLYLIEQITELESELNQSIKADATAQRIMTIPGVGPMTASLLSSQLGDGKQFSCSRDFAASTGLVPRQYSTGGKSTLLGISKRGNKNLRRLLVQCARSFMMRLEHQQGRLAEWVRKQLDNKHSNIVACALANKLARIARAITALQKEYQG

SEQ ID NO: 467388 - protein, 343 aa, unidentified
MSVIIGVDPHRATHTAVAISSSEHELGRKKVRSGAHQAEQLLDWAASFETRTWAIEFAGGLGYLLAQQLVAAGETVVDVPATLASRVRVLATGRSNKNDPNDAVSVGVAALRSPGLRRVEAAGHSEVLRLLAKRNTDIGNHRTRVVCRMHALLAELAGGGISKEINASDVDRFLATFVPATPVERARYGLAVELLEDIRRLDAQLKASHQRIRVAVRASGTSVTDLFGVGPIIAAELIGYTGDVCRFRNRDQFAAYNGTAPVEFSSGGRIVHRLSERGNRQLNHAIHMAAICQLRQPHSDGRAYFERKVAEGKTNKEAIRALKRQISNAVYRHLVADAHHTAR

SEQ ID NO: 467389 - protein, 348 aa, unidentified
MNTLHYIGFDVHKKTISFCVKTAAGEIVEEGVVAAQRAGLRQWAAARPQTWRGAMEATLFSGWIYDTLQPYSEQLEMAHPAKMKAISAGKKKSDTLDARTIADLVRCNLLPACYVAPPRIRELRRLLRYRSLVVSEAVRMKNKMAGLLMETGALYVKEKLHRKKYFASLLEDLEEVPQSVIDLLRLSRGALEMFESTQKRLVRELLADSELAERVERLMTIPAVGEITALTWALEVGDPQRFHSNSDAMSYCGLTAALKSSAGKQQRGPISKQRNRWLQTTLIEAAKLAPRWNPQLAALHARELERGHRNRATLAVARKLVAYLLAVDKSRQPFQVRLPSEGPTQKAA

SEQ ID NO: 467390 - protein, 349 aa, unidentified
MYYVGVDYHKRYSVATVLNSDGAMLARQRLDNRLEAFRELLEPYDKAEVEAVVEATRSWGIPVDILEQLAGRVILANPGEVKLIAKGRIKTDKVDSLALAKLLRVGWIPEAYLRPRDNREHQLILRVRCFLVQLRTRVKNRIHDLIDRQDEPIREMATSFSDLFGKKGTAWLKGLGLSHPCGTLLCRLLAAYDALDAQVRQSDRLVAELFAADDDCKLLKKTPGIGVFFAVLIKTEVGAIERFSSSARFCSYAGVVPSTESSGGKVWHGRIIKQSNRWLRWALVEAVIPATVADAGLRAHYEYYRRTKGSKVAKVVTARRLGCIVYRVLKERKPYYEQPVQSHGYRQAG

SEQ ID NO: 467391 - protein, 332 aa, unidentified
MYLGIDVHKRYAQVAVMDEAGEIVEEVRVENANLDDLAQRYAGAQAAIEATSNYYHIYDTLSEHLDVTVAHPKELNQIADTDKKTDRVDAKELARMVRLNSVPESYVPTDEIREARALVRGRQSLVEHRTEYANKVHGLLSDHGISEEVKPLTQEGREFLRELSLPTPRKSVLESYLEVIETLTDEIQNLEETIEERAGSLKETPLLMTIPGVSYYTALTIYAELGEINRFDGDKEVVSYVGLNPVIRESGDSRIEGELSKRGSGRARWLLVQAAHTAVHTCNDEYLSRFYERLASRKNSQKAIVATVRKMLVSMYHMLDRGEVYDPPGVSA

SEQ ID NO: 467392 - protein, 366 aa, unidentified
MKKISTMQVFSNEILKEQKLTIGMDLGDRWSFYCILDEAGKIMLEQKLPTTPEAMKQTFGKIPRSLIAMETGTHSPWVSRLLTELGHEVIVAHAQKVELITKSNRKDDRHDARTLPRLARIDPELLGPVRHRSAQAQIHLTVIRARAELVGARTALVNAARGLVKPFGERLPKCGTQQVSRELGAGLSAELRDVLEPLLREIESLNERIKEYDERMEKIAKEVYPEVSLLKQVKGVGTQIALTYVLTIEDPHRFLKSRVVGCFLGLRPGRRNSGESEPQKGISKEGDRYLRTMMVQGAHYILGPFGEDSDLRRWGLKLAERGGKNAKKRAVVAVARKLAVLLHRLWVSGEVYEPLRNSQKAMRAVA

SEQ ID NO: 467393 - protein, 403 aa, unidentified
MNMKHLFVGIDISKDKFDAAICDWKGRSVFGPKEYAQDQTGMEQLKTDIEIYSKEMRTDILLGCESTGIYHLPLVEFCDRNGLKIRVFNAIELKKYHKSRVRKTRNDSIDAMTIAKAMVIEGDFPDEFKISPEVKTLRQLTRVRTRIADQISTIKRRIDKDLDIICRGYTKLFSNIMYPSSIAVMKKCIQLTRPFDRSENELSEILKVARHPDPAGKAKEIRAVFDKAVIPDGYLESCVLEIKFLIQQYELLSEQKEALEERIVRLVSNFNTQIMTINGIGETNAGIILGEIGSIEKFDDVDELVAFSGLDPSVHDSGNFHSVSKHISKRGSPYLRTAMYLSAVSAIRCNPVCKAFAERLKNKGKKNKVIIVAVARKLLTIVYSVLKNNKPFFVPKSIVITET

SEQ ID NO: 467394 - protein, 438 aa, unidentified
MSNKVIFNLDELFISVGIDVGADFSWMSIALPNQQFVGKPYKILHNSIDSLTTAVSKIKEAEELYSLESRIFLETTGIYHYPLFCYLRDKGFNCSVINPIITKNSTNINIRKVHNDRFDSKKAALVGLKPDLKVSLMPSDLALNCRNLCREYYDLMDNRSAYVNKLQGELRMAFPQYLGIFSKVTINTSLTLLETYTSPSAFLKADKQEIIDIIKSTARFGLTYAQNKYNAIIQAATDANQFGYIIDSNIKRIRLYISFIRKYDEEINSILESLHELVDANEDSDFVKQIHLIETFKGAGFLSAVSIMGEIGDFSAFSKPKQLFAYFGLDPAVKQSGKFEGTKVQMSKRGSAIARRVIHTLTLQSISISRNREAKNPVLREYYLKKCDSKPKLVAMGAVSHKVCNMIFAILRDNKPFKIIAPQEHIKQYNSAKCDIAA

SEQ ID NO: 467395 - protein, 343 aa, unidentified
MKEVTTIGLDLAKNVFQVHGVDGLGEVVIRRQLRRRQVIPFFEKLPRCLIGVEACPTSHHWARELQALGHEVRIMPAAYVKPYVKRNKNDAADAAAICEAVNRPTMRFVAVKSREQQSLLMVHRSRSLLIRQRTMLVNAIRAHLAELGIVAPMGLRGLKALLVVISDTEDGRLAPLARNSLTGLTAALKTVEREIASADRQILVWHRSNEASRRLESIPGIGPIIATALIASVADPSVFKSGRAMAAWIGLVPKQNSTGGKERLGRISKQGDHYLRWLLVAGAMAVIRHARKTDFATRPWLADLVRRKPAKVAAVALANRIARTAWVLLAKGGTYQQPRITAT

SEQ ID NO: 467396 - protein, 354 aa, unidentified
MKKNSIPASEIPGLTIGLDLSDRSFQFCELNAQGEIVNEGQLKLDRATLRKYLAAQAKARVALETGGQSAWVKQVIEELGHEAVVANARELEAVTGRSHRTDHHDARQLARLARVDRALLNPVQLRGTAEQVDLFVIRARAVLVEARTMLINFARGITKTLGHRLPASASHRFVERVREAVPEALEPALTGLLEVLHEITAQIEDYDAKIEALAVERYPETRWLKQAPGVGTLTALTFLLTVGEPGRFEHSRDVGPFLGLVPRRRQSGEQDPHLRISKCGDGYLRKLLVQCAHVVMGRFGPDCALRRWALDHARQSRTAKKRTVVAVARKLAVLLHRLWSRQEVFQPFPAAVAA

SEQ ID NO: 467397 - protein, 371 aa, unidentified
MIVLGADTHKVSHTVGAVQEATGREIAERTVKAKRRSFDDLLRWGRGLGEERVWAIEDCRHVSGALERFLLARGERVVRVPPKLMAGARKSARERGKSDAIDAVAIARAAIREGIESLPVAQLAGPERDVRLLVDHRERLLAQRTALINDLRWGLHDLWPEFEIPPRALIHATWQDRVAARLARVEQVAQVRIARDELRRIRELTRAVDALERELAGLVAALAPRLLAERGCGVLTAAKLIGEIAGVGRFASDAKLARSCGSAPIPASSGQTRRHRLDRGGNRQLNCALHRLAVSKGRLDPETAAYLARKQAEGKSRREALRCLKRHLARRVWRLLQSPHASTTPPATTASRHSTPQTIHCNLPAGSFSLT

SEQ ID NO: 467398 - protein, 326 aa, unidentified
MAIIGIDVSKVKLDCLWLREVTTLKVKSKQQPNTLSGYQALLDWSVKHTGEAMESLHFILEATGIYHEGLAYALHAAGAKVSVVNPAQIRDFAKSLGSRTKTDKKDSLVIARYGATQQPRLWQPEPAEVRYLKALIARYDAVKRDIQRELNRLEKAQITQASEEVLISIETVHEQLAAERTRLEALINAHIDQHPGLKQDRALLESIPGVGPVISQQMVAVLRSRPFTAASQCAAFLGLVPVHHESGSSVRGRSHLSKAGNAQVRAKLYMAAVVATRYNPDIKRQYERLLRNGKSKMCALCAAMRKLVQICFGVLKHQTPYQPQTV

SEQ ID NO: 467399 - protein, 408 aa, unidentified
MNAVGIDVSKGKSMVAALRPMGEVALLPQEFLHTEVGLEQMAYAIIALGEDTRVVMEATGRYHEPVAAALHEYGIYVSVLNPLFIKQSGGGSIRKVKTDKADAMKIAKYGLDNWVDLREYTPMDTVRQQLKLCSRQYNLYMKTVVSLQNNLISLTDKTFPGVNELFSSPERADGHQKWVDFVMTFYHCDCICRVSENAFAERYQKWCKRKGYHFSAEKAQDVYLGSCGHFTTLPKNDNTKLLITTAAQQLLAGKMTLAALRTEMTRLAKQLPEYDIVRAMYGVGETTAVQLMAEIGDVRRFPRRSSIVGFAGVDPAVDQSGKHSAKSVPTTKRGSPHLRKTLYQIVCTYLKKSPVDEPVYQFLDKKRSEGKPYFVYMTAAQNKFLRIYYARVKECLEAFDAQQDTSQR

SEQ ID NO: 467400 - protein, 343 aa, unidentified
MQAITTIGLDIAKSVFQVHGIDAAGQVVMRRQLKRRYVLAFFQKLPACVVGIEACASSHYWSRELQALGHTARLMPPAYVKPYVKRQKNDMADAEAICEAVTRANMRFVPTKTPEQQSGLMLHRTRHLLIRQQTSVINAIRAHLAEFGITAPVGRRGVEELLRVIADPSDKRVPEIVRSCLAALGSQLLSLKKQILEFDRMILAWHRNNQTSKRLNCIPGVGPLLATALVASVGDPKSFRSGRSFSAWIGLVPKQHSSGGRERLGSISKQGDRYLRSLFVAGALAVIRYAKLHGTDHRPWLTALLARRPTKVAAIALANKLARMAWALMASGERYNYPVALRP

SEQ ID NO: 467401 - protein, 365 aa, unidentified
MSIIHWIGIDDHADKWTIAHYQGDEGRPTKEFELVPDVGGYRRLIAFVKGLAGEVRVVYEAGPCGFELFRRLTKAGFDCKVAAPSLTPQKPGDKVKTNRRDAAKLGHYLRAGNLTFVMVPDEKQESLRDLVRQRSSVQRDVGRVRKQIIHLLLRYGHRYREGEAWTLRFWAWLKKIELTAPHSRFVLDDMITELEHRVEQLARFDSEIERTSRLPEYQPYVDALRTLRGINTLSAMTLLCELGDLRRFPTAPQLMKAVGLVPAESSTGNQTNRLGITKTGNAHVRHIAVEAAWQYQRGARPGRVVRARRKDQPQQVVAIAEKCDKRLNSKFYRMTSRRKRSTVVAVAVARELLGFIWAIGQLVHP

SEQ ID NO: 467402 - protein, 362 aa, unidentified
MKPVRKSEPGADKFLRHLQSIHADSASAQVGLEATGHYWLSLYSFLVAHGYRVFVINPYQSDAWRKVYLSSVKTDKEDAFLIADILRFGSFTQTHVPDEAMIALRNLTRFRVAVCLQMTDTKRRILTVLDQVFPEFAALFSTVFGKTATTILETYSTPEALESLSERKLTNLVSRLSRGRFGKEKAQAIKDAARTSFGVIYALDSFTLQLKLLLKQLELLSGQLEDLDCDIARRMDAIPSTLTSIPGIGTGLAAAIHAEIGDIKRFRTSSQLISFAGINPTVRQSGNFTGTKNRMSKKGSPYLRLALWRAAVVASWANPILKAFYEQKLKEGKHPMTAYGAVARKLTGIIFALLRDNKSFVV

SEQ ID NO: 467403 - protein, 356 aa, unidentified
MPATIIGVDPHKRSHTAVVLDDCEEIVSQLRVTASPHQVDQLLGWAPATVQRLWAIENANGLGRLLAQQLVARGEVVIDVPATLSSRARKLSGHSGRKTDEHDARSVAIAAGHNHGLRRVSIENVTVAIGLLLDRRWQLVAQRQPTICQLHALLTELVPAGAATHLTSTKAAALLRKITPSSIVELERKLVARELLEDWRWLDRRIPAAKQRLSDALTAYGTTLTDIHGIGEIGAATVLSIVHDPARFPSRGHFAAFNGTAPLEASSGDVRRHRLSRRGNRQLNKVIHVAARTQIRRDGPGRTYYERKLSEGKSKMEALRALKRQLSDVVYRRLLTDDRQRQAVQGGQAGTRPKSA

SEQ ID NO: 467404 - protein, 378 aa, unidentified
MDVIYPRCAGLDVHAETIVACALWEEDGHIQKDIQTFSTFSKGLGDLLEWLEEHGVTHVAMESTGVYWKPVFAFLEGYVDLTLANPQRIKNVPGRKTDVSDAEWIAKLLRHGLIEKSFVPPADIRELRDFTRLRKKWVGQLSSEKNRIQKVLESSNVKLGSVLSDLFGVSGRNILARLLEKGYVDKDELDQCLRGRLKTKKQAVYDSLLGTLTEHELRLLRLLWKHVEELEQLIEEVDQHIDRLLEPYREEVDLLMTMPGIKKQAAAVIIAEMGTDMSVFETPERVASWTGLSPGNHESAGKRKSTRTTKGNPHLRSALCEAAWSAARSKTHPLSRKFWSLAARCGKKKALIATARRMLVIIFCMISRKESFRQPQLI

SEQ ID NO: 467405 - protein, 452 aa, unidentified
MSKKHISLEVVNPNAAGIDIGSRSHWVAVGQNSQSVREFGVYSEDHQKLCEWLKKHQVKTVAMESTGTYWQNLFSSLVVFGFEVILVNGRQTKNIKGKKTDILDCQWIQKLHTLGLLSSSFLPDSTTAIIRTYSRHRQNILKQASTTILKMQKYLRLMNLRLDVVVKDIVGLTGTKIITAFVKGEKSGEILAENRHYNCKKSQEEIAKALQYNGREDYFFALKQEWATYLHLQKQINQVDKEIKKFLKDIIKKDDNKKQHIASKKPYKRKNKNAIRNTDMNQLSYQYFEGIDLMAIEGVNDATLMAFISEIGLEGIKKFKSAKQFTSWLRLAPNNKISGGKMLSNHLPKGSNRLKIALRNAANVIGNLNKESDLHNFFRRISYKKGRATAISATARKLAVIIWNMLVKNIPYNPTNQYLFLDQKRKLKLVNRIKKNIAKFDINLEELGIITN

SEQ ID NO: 467406 - protein, 355 aa, unidentified
MKRTAKYVGLDVHQATTVAAVREEGGRVITREVLATDAMAITEFFRTMRGRIHVTFEEGTQAQWLHDLLVPLVERVIVCNRRDVRRQGTKSDRQDAAELADLLRRDAVRPVYHSATPHGADLKELARTYVNLVEDSTRVMARVKALYRARAIRTRGSAVYSARQRAQWLAQLPAGAVRWRAEALYAELEVLQALRVKAKAALLTAARRHPAWSVLRAIPLLGPIRVALLLAVLQTPWRFRTKRNLWAYAGLAVTTHATAQFDLDGRRPVRRWRRPMTRGLNQNHQRLVKAIFKSAATAATVRPGALQDFYHQLVAGGMREEMARVTLTRKLAALTLRLWKTGEAYDPAKLTRQVC

SEQ ID NO: 467407 - protein, 316 aa, unidentified
MIDTKCWVGIDVSKQNLDIHIRPSGHIFQHPNDKDGISALVASLESVSIERIVLEATGGMELPAAVALSQAGMAVAVVNPRQARDFAKATGQIAKTDTIDAAILAHFAEAIRPETRPLASEESQLLGELVTRRHQIVDMITAEKNRLAAMHGPMKEHIEQHIEWLKTQLNELDEQLQRTIRQTPVWCEQAKLLKSVPGVGDVLSSVLLVDLPELGKLDSRKIACLVGLAPLNRDSGKFRGKRMIWGGRGRVRTALYMPTLVAIRYNPVLKAFYERLVGQGKPKKVALTACMRKLLIILNAMVKNNQQWNPEMARGA

SEQ ID NO: 467408 - protein, 441 aa, unidentified
MEAVYRRCAGLDVHKDVIEVCVLPPAGQSGSPQRRRFATFTSDLIRLRMWLVSLKATEVAMESTGLYWVPVWRQLEGHIGKRLLCNPQQVKALAGRKSDRRDGQRIAEFLQDGRLDPSFVPPKEIQQLRELLRMRVSLVQEHNRLSNRVEKLLQSYGVKLSSVASDILGKTGQRILTALAAGQTDPDQLSWKAVGSLREKEAQLRRALRADFDEHSCWMLGVLLGQLKENEQWREQLEQRITEGMKPYEPIVIRLMTIPGVDRLTAWSMVAELGTDMSVFPDQRHCASWAGVCPGTNESAGKQHSTRTRRGNRYLRRILTQSAWATSRCKRGYLRAAFHRIAQRRGHKKAVVAIAHKILVAAYFIIRDKTTYLELGEDYFDLLHPERTARRLARRLERIGYQVTLTKAAATAPRSSEGQQPKKRGRPCKCAERGIDCKHKR

SEQ ID NO: 467409 - protein, 366 aa, unidentified
MTRYVGLDAHSKRCVYVIQDEQGQVVGEGGVPTTIEGLQSLRTRYELPEGTRVALESGTMAFFVARRLSQLGLDPLVVDAHEVRAKALRPNQKSDRRDALELCEGLRRGVYRSVVHVPPEPIERLRETLGRRRHFVRVKTMQVNAVKRLLRAAGLQPLSRSLQTAAGWEKLLASLTVDPSLHAFCLTHHAVWRCAHEQIATLEAFLHEQQQPFQRDLERLQTVPGVGPIVATTVLAVFSDVRRFPTAKHAASYAGLVASTFDSGERVQHGRITRRGSSELRSMLCEAAHHAWRRSNPLQPYFSSLCVRRGYKMAVVAVAHRLCRIMYSMLRHGTDFDLNKLAVERGHFERTTVHHYRRRKSATVST

SEQ ID NO: 467410 - protein, 417 aa, unidentified
MVEPKAWFAGVDWASEAHHVCVVGGDGSKREERIFRHGGAGLAQMAEWIAAKSGGSAPEDIPVAIEVPHGPVVESLMDHGFAVYSINPKQLDRFRDRYSPAGAKDDSLDARVLADALRTDLRHFRRIDPVDPVVIELRAWSRIDEDLTRDRTRLSNRMREQLWRYYPQILEAVGNVVEPWVLDLWAKVPTPAKARRIQRRTLEGLLKRHRIRRITAEQLQEILRAPAIAVAPGTTEAAVAHIQSVSERLRLVHRQLADAKREIARLIDVLADSEDSGSGQPGGQRDVTVLSSLPGVGQTVLATLLAEAPQALARRDYKALRCMCGVAPVTRRSGKYKLVVRRMAAHARLRDAVYHWARVAVQRDPVSKAKYAALRGRGHGHARALRSVADRLLAVACAMLRTQTCYRPPRPAENHAA

SEQ ID NO: 467411 - protein, 345 aa, unidentified
MKTFFIGIDVSKEKLDATLIHYESKSDSEQQLAYTTVENNPKGFRSLVSWSKKNAGRGVKTDTMLFCCETTGGYDRALCDWLYGNGLDIWRESALQIKRSMGLRKGKDDKADSEMIAYYALRFRSKATLYKPLDGNMRSLRDLFLYRQSLVAERQAKIVSSKEKQYISSESKSDNFIYRNAQKAIDLLTQSIKECERQMLEIIKEDEEMYRNYLHLISCKGVGPITSIMLIVYTDNFKGWSAKKMASYCGIAPFYESSGSSVFHKANTSGYSNRRLKGILTQAARSAITHNPTLRQYYLRMKAQGKPYGVILNNVNNKLVHILFSLVLHDCDFELDHEAKRALRA

SEQ ID NO: 467412 - protein, 388 aa, unidentified
MEECTRLSSQNVGVDVSKDTLDVVFSTMDLKRQVKVKASRKFSNKLHGFKDFIKWIDDKSIEGFEPTILLEATGVYYEQFAWFLYERKYAVSVILPTKAKRYFQAIGNKSKNDKIDATGLSRMGLEQRIPLWQPLSKDFYRLRLLTRQLEDFNEQRTVILNQLHALSHSAYSVKEVEKNFKKLLKELDKGIVSINKSIEKLLMEDAKLRPKVEKIITIPGVGVRTIAVLLAETNGFETFENQGQLVSYSGYDIVHNQSGKYSGKTKMSKKGNAHIRRAMHLPAFGVVRCQVTPLAALYKRLTERGKTKMQAYVAVQRKLLILIWALWKKDQAYDPTYHIKNISDNEESKLLFSLVSKGDTKKIALERTRATLDELPYNESPEVLFSLL

SEQ ID NO: 467413 - protein, 428 aa, unidentified
MADLLEGALPLNLVAIDVARYSNAVLIELSDGKRQRFRMTNNASDFDRLLSYLQALPGNCRVALEPTGDYHRPLAHRLLTAGHEVVSINSVAQARYREAMFNSWDKNDPKDAQVILEMLRRGTYQRYVDPQIAGHHDLQELAKTYYQVSRARTKVQHSLINHCLPLYFPEMHRYWCTTRNEWFVRFLLEFPTPTHVRALDRESFVAAAWDLVGRKVNKRAKLEEIWETAAHTAALPHALDCLAVETFRITLRRYLELNVLREAIEARAEVELHDNADFAHLKTLPGIGSVIAMTILAEAGDLRRFGHHRQFLKYCGFDLAKIQSGTQRGREQLSKRGNARLRLAFWMAGMAAVRMKENSFRSKYERYVHANPDDADLKRKALTAVAAKMARVAYSMIKKNQPYRQFFELGLPSGSIPLSAAVGAQATP

SEQ ID NO: 467414 - protein, 418 aa, unidentified
MLVVGIDVAAEVHQVAVIDETESVVVKPTPFAEDAAGYQKLFELLARAGARGGGDLPLAPASAQPERTLVVMEATGHYWQNLFAALMAEGYAVALVNPLRTHRFAGEELARTKTDSIDCLQIARFGAQKRPAPTGLPEAAAAELRELVRLRTRLMQEVIDRINQLHRLIDLGFPEFTRYLSDVNTELAGAILRQYPTAQAFRALAPKRLARLNYDGRHHVGEELARKLIDAAKISVGSQHSPAHQTGVRYACEDLETLRKRLKQLAAEISSKLEQHQVGKLLTTIAGIGDNTAAMLIAELGDPARFASAGALAAYVGLCPGHKHSGKHQPRSSSLTPIGNRRVRKALWMPTLGAATQSNPWLMAFYRRLIARGKPPKVALIAAMRKLLAAVYSVAKNRRPFVPFLNPYPIGDLETLSC

SEQ ID NO: 467415 - protein, 318 aa, unidentified
MQAVRTHVAGVDVHKQILAVTVLIGDAGLNPSVQRFECSTFTEDLMAMGTKFLELGVTEVAMESTGIYWKPLYNVWAPMGIKITVGNASHIKNVPGRKTDMNDSHWIAQLHRFGLIRSSFIPEPEFQKLRLLSRHRTNLVDDLSRVKCRVQKVLEDANIKLSSVVSDVFGAGPIKVLRLIANGVKDPEKLRSAIKTNIKKKEELKKSLTNCLTSEHCFIIQELMYHYDSINGRIKAVDNQIVEQVTPYADLVEELDKIPGIDHVLAIGILAEASNDMTNFKDERSFAAWAGVAAGNNESAGKKKDPKQDEVIRICAKS

SEQ ID NO: 467416 - protein, 348 aa, unidentified
MSVTMIGLDTAKSVFQVHGIDEAGKMVLKRKLRRSEVIPFFEKQEPCIVFMEACGAGHHWGRVLTGLGHEVKLIAPEAVRPFVKKGKKNDPADAAALCIVGPRPDTKFVPIKTLEQQGILALHSARSMLVKHRTATANAMRGTATEFGLTVPKGIEKLDELMELVDADEGIPERARQAIEELRGHCVEIEGRVEKLEQQIVEHARKDENARRLATVPGIGPITASLISATVGDNIGAFKSARHFAAWLGLVPRQYSTGGKAKLGHITKAGDKEIRKSLVMGATSMAWRAPQWNSAAGVWTKRLLERRAFRLVTVALANKMARIAWALMTRKDVYHAKGRDAATTGAAA

SEQ ID NO: 467417 - protein, 344 aa, unidentified
MDHIGIDVHKNQSQVCIFKGSGERIEQRILTDRVRFAEVFGGRPGARILLEASTESEWVARCLEELGHEVIVADPNFAPMYATRSRRVKTDRRDARALAEACQLGAYRPAHRTSDAQRLVRADLAIREALVRTRSRYISVVRSLLRREGLRVRGGEAKTFGRRVGELEVPRSLSSAIEPLLVVLEQVNQQIDHADRELARRVEGDPDLRRLTTLPGVGPVTATTFKATVDDVERFRGAGQVAAYLGLVPRERSSGERQQRGRITKAGNSRARSLLVEAAWLILRSKRSDTIALRTWAERVAARRGRRVAAVALARRLSRILYAMWRDDTGYAPEKIHRPAAQAA

SEQ ID NO: 467418 - protein, 470 aa, unidentified
MRSTMKKTSQIGKPQLAEPQALPPEFAHLEQLNLHAAGIDVGSAEHWVCVPTGRAESNVRSFGCFTPDLQAMAEWLKRCGVTTVAMESTGVYWIPVFQILESMGLEVKLVNAHHLKTVPGRKSDVLDCQWLQKLHTYGLLAGSFRPDDQVYVLRSYVRQRERLIQSAAVHIQRMQHALIQMNLHLHKVISDITGLTGMSIIRAIVAGERDPQILAALKHSRIRSSQDEIAKALSGNYRAELVFILQQELALYDLHQQQIAACDGQIEQCLMSFDSKTDQPPPSAKNKRRKTTQNAPVFDLRGQLYRVSGIDFTQVNGLDALSVQTILSEVGLDPKRFPSVKHFCSWLGLCPGARITGGKSLSSQTRSVVNRAANAFRLAAQAVSHSHSALGAFYRRLRSRLGAPKAITATAHKIARLFYKLWSSGGTYADPGADYYEQKYRERLVKHLKKTAQSLGFEVVPQSSTVESVS

SEQ ID NO: 467419 - protein, 339 aa, unidentified
MLYVGIDVHLKRSSIHVLDENGKQVHADTIRGSRIKVLAELEKVKEKFGEKMAVCFESSCGAGWFHDQLAAIVERVVVAHPGQLRMIFRAKRKNDRVDAKKLATLLFLDQVPPVYVPKPEVRAWRELIEHRQGLIRKRVRVKNELRALLRTQGMEGPRGLWTKAGRAWLRAAGLPNELTALKRDILTDELEALGPQTRRVEKALAETAKRYPAVTLLRTIPGVGIRTAEAVVAYIDNPRRFTKTERIGSYFGVVPCQNESAGKNRLGHITKQGPGTVRKLVAEAAWVSIRRSPRIRAFFERVMHGKKERKKIALVATAHHLLRVMLGMLKTGETWREVA

SEQ ID NO: 467420 - protein, 462 aa, unidentified
MKLYLGGDVSKGYADWVILSDKKQTVLENFQLDDTYAGHCKLYSTLEAYFDKHPGLEMYAAVESTGGYENNWLNALKSYQKVFNLKVARLNPAGVNYNRKACMKRNVTDAISALSIAEYMINHPENIAYDQDEKWKTLCRHWNFVEMQKHQRVQTINQLETILYSANPTLLRFKKNKLSNWLLELIIKCPTAEKLSKAKPEKLAKIPFLTLKRAKSLVAEANQNIASATDRNAEILVSQIARQIKAFDENIKSQMKLIEKELICPEIELLKSFRGIDTTSAIGLLLEIGTIKRFPTVKGISCCFGLHPKFKQSGDKIIGVRMSKQGSKNMRKILFNIAKGAITYNPLITEIYEKKLSQGMSKMAAIGVCMHKILRIIYGMLKHEQVFDLSIDKHNCERSKSKQQNKKLQESANIDNSRRYQEFDTTAPISRKQTKKRKEHDLSQCEISSQSTGSTCSSNTKL

SEQ ID NO: 467421 - protein, 371 aa, unidentified
MSVCWSVAVDGFEQTGWHMATALMIDVVAGVDTHSETHHVAVLDSVGRLLGTREFRAQPAGYVELASWVGSFGRVVVIGVEGTGSYGAGLTRCLRDHQIRVIEVNRPDRRTRRVRGKSDPIDAESAARRALSGVEKVVPKDTSTVVESIRVLRVARTGAVKSRTAAYNQLKDLIITAPEPLRSSLRGKSLHRVSQEVARLRPDSTQLAAPLQATKSALRSIAVRVGALNSEIAELDKHLKTLVAAAAPRTLALRGVGIEHAAQLLITAGGNPERLRSEAAFAALCAACPIPASSGKTSRHRLNPAGDRDANRTLYMITISRLRYCARTRAYVERRQADGLSKREAIRCVKRYIARQTFHTIRADLAAKANP

SEQ ID NO: 467422 - protein, 332 aa, unidentified
MMAQNELVVVGIDVAKDKVDACIRALSHRQTFPSGAEGRRQLIAWLRKHKVGQAVMEASGGYERDWAKALREAGIAVRIVDPKRVRSFARSAGRLAKNDAIDAEMIAWFAETFDEAPGQAYDAAREKLAQIVNARQGLLELQTELQNRREHSVPEVVQKVQARLLKKIAAELATLEAAITALIKATAHFAELAEIIESVPGLGGTTSAGLIAAMPELGQVNDKIAAALLGTAPYDDDSGKRRGERHIKGGRRRIRNLFYMACLGAATRHNPVLKAFYGRLIAKGKEPKVALVACMRKLIVILNTMIARRQKWDVTRYKVSDHARPLPSACPA

SEQ ID NO: 467423 - protein, 419 aa, unidentified
MDHFAGLDVSMEETHICVVDRDGGMVLETKATTSPEAIAAGLAKAPGCQRIVFETGRMAPTLYHGLDALGLAVTCIESRQAYQALKSLGTHKTDRNDARGLAHLARTGFFKPVHVKSLPAHAVRALIIARKKLVGQRVTLENQIRGLAVVFGVRLPRGLSPAFAEQAISGSEGIAGLSGAMRGLLAARNAVLKAIAAINGDLKHLARSSEACQRLMTIPGVGQLTALAFVAAIDEPERFRRSRDVGAYLGLVPRRYQSGEIDYTGSISKCGDRRMRTLLYEAANVMLTRYKPPLKLKDWALAIAKRSTMRKARVALARRLAIIMHAMLRHGTEFRTAEDQRGRRQEAETSSRAERCPREGVDDGADSEACGRSNRLTAISTKPPHTQLTPSSATEHAENGGTQRHHTTAQDPSSRPLTH

SEQ ID NO: 467424 - protein, 349 aa, unidentified
MRFIIGCDFHPSYQQIAMLDTQSGEVMEKSLAHENKEEVRKFYAGLPGPACVGIEATGGSQWFERLLVEQGHTMLIGDAGKIRLMENRKQKTDRRDAQLLLDLLQQERFPCIWVPTPAERDARQLLLHRHKWVRLRTQVKNQLQAMAMNQGVRKKSKLWSVAGRAELEALSLPHWTDRRRHDLLQLLDELQPGILDLDRDVAEQAAARPEVQRLMTHPGVGPVTALAFVLTMGPVKRFPRGKQVASYLGLIPSEHSSGGRQRLGHITKQGNAFLRGLLVEAAQSAVRHEPEMRREYRRLAQKKCRAVAKVAMARKLAVRLYWMLRQEQDYAQQFQVRVQSSPSHPVVVV

SEQ ID NO: 467425 - protein, 457 aa, unidentified
MYGPFNVASSTRIRFAVSLQLPRATAPSLVRRVEVVRVQVAQDDQEIIARVAALDIGKAEVVCCVRVPGQGPRARRMQEVRTYTTMTRSLLAMADWLTELGVTRVVMEATSDYWKPPFYLLENTFETWLVNARDVKHLPGRPKTDRLDAVWLCKVAERQMLRPSFVPPPAFRELRDLTRYRVDLITTRTSEKQRVEKLLEDSMIKLSVVASDIFGVSGRAMMAALVAGERDPKVLADMARGSMRGKTARLEEAFTGRFTDHHAFLLRTMLARIDGINTDIDIVQGRIDEQIAPFAAAVTRLDEIPGIGITTAQVIIAEVGLDMTRFPTPDHLASWARFAPGISESAGRKKGGSSTGKGNRYLARALGEAAVGAGRTKTFLGERYRRIAKRRGKKRAIVAVGRSILMIVWELLSDEEKRFIDLGPGYYDSRVNRNRSTRNHVRELQALGYKVTLEPAA

SEQ ID NO: 467426 - protein, 435 aa, unidentified
MNFIGVDLHKKSITICVMDEKRKILARKTLPCTQTNEIVEFFRQFRPFKVVVEATASYVWFVELVEPLAEKIVLANPKKLRVIAESTKKTDNLDAQVLTEFLVLDMIPESYQATPRLRQHRALVRHRQYLQGRITSVRSKIRHILSNYNADRKDLFSANCGLAYLKEVRLNDVDRFVMKQLWAEWQDHLAQRLAVSKKLKAFVAKAPQREAEAREILKTAPQVGSVTAEVILSELGDISRFRNAKTVCAYAGLVPVVRQSGERKSKDMKITKEGSGLLRWALVEAAWRLVGKSPKWAALFSRLRHRSGKKRAIVAVARKLLCVLYAMLRTSTPYKIVTTPTAAPPTTGKKLVRTSTPDQTTTTETTASRTTRKRLVRTSTPDQTTTMETTAPRTTRKKLLGTSTPDQTTTTGATAPRTTGKKLVRPSTPDQTTTP

SEQ ID NO: 467427 - protein, 417 aa, unidentified
MTEYAAYLGIDWADKKHDLCLIDAATGKQTRQVLAHTPQAIAEYFTSLGSRYPGQLIAVGLEQSRGPLLFALLQYDFLVLYPLNPTTLAKYREAFTPSRAKDDPTDADYAAELLMKHNDRLKAWQPDDEQTRTLRYLVEHRRRLIGDRTRLTNRMTSLLKCYFPQVLSWFPDLATVLVCDFLLRWPALEQLRGVKRTTLLNFFRAHHSVRTDTLEKRLTAIKASLPLTTDRAIIDSSVLMISALAAQLKTTLAAVKHFDEAITKLCVAHPDFSLFQSLPGAGEVYASRLLAMMGTQRDRWTTADELACLSGIAPVMERSGQSVWIRWRYFCPKFMRQSFHEYAGESVKHSFWARAYYEQQIAKGKSRQAAVRALAYKWIRIIWKCWLTSTPYNEVKYLEALRKKGSPLLSYAAKTAA

SEQ ID NO: 467428 - protein, 364 aa, unidentified
MTNLKEKIENKERISFKGKNIFVGLDVHKKNWTATVYVEQQFIKTFHFESDGEILYKYLIKNYPYGNYHACYEAGFCGFSVYRQLEAFGIKCTVVNPCDIPQTQKGSLSKTDASDSKRIAESFSKQMLKGIYIPNKVSEADRNLIRYRSKVQKDLKSKRQQVKSTLNIYGIKIPQQHDKPYWTLNFIKWVQSLPIDEKSAKITMSSLIEDVLFFRNKLLTTNKQIKLLSQSEEYKETFALLCTIPGIGLITAMTLITEVVDINRFESFIKFNSYIGLCPSEFSSGEKERKGKMTNRSNKKIRSLIIESAWIAIRNDPALTLKYQELIVSKSYKRAIVIIARKLLSRLYSVWKTKKAYEKGVLKY

SEQ ID NO: 467429 - protein, 349 aa, unidentified
MKSIGYIGLDIHKKVIAFCIKTNSGAVLEEGKIDATRSALTTWVARIDRPWIGAMEATLFTGWIYDFLKPHAQELKVAHPKMLKAISASKKKNDRVDAAKIADLLRCDLLPECHMADKQTRELRRALRYRNLVVRQAVLMKNKMAGLLMEVGAEYNKDKLHGKGYFDNLITTVEEVPESVIDLLKMSRASLEMFQAVEKRIRIALKNHPALRERVERLSSISGVGDMTALTWALEIGDVSRFSSRRKVISYCGLCSAQKESAGKSYRSPLSKDRNKHLQTVLIEAAKIAPRWNPELAALYERELARGNRNRATLSVARKLAVWLLAVDRKNEPFQTRTKEDKTDKQQAA

SEQ ID NO: 467430 - protein, 353 aa, unidentified
MKKLFIGIDFAKEKFDAAIIEACGLKEFGNREYGTFTNDKKGYRQFFKWVKTNADKSVENEWLFCGEDTGSCSLGLSKWLYGKGLDIWIENAYSIKHSSGIQRVKSDKADSSMITEYAWRHQDKAVLFEPLSESLSQLREVFLYRHKLVQQHIAMDVRKQDKEAAEPSKAISFIKRKSKHLMSEIDNAIKECDLMIDRIIESDAELKENYAIITSIKGVARQNGACLLIFTNNFRRFDLDARKIACYYGVAPFGKDSGTSIHSPAKTSHFANKLIKSLLGQAAHCAKKFNPEIREYYNRLIGRGKKPQVALNNVKNKLIRIIVALVRKKVYYDPKTYMFYNAKFTDVKKMLNS

SEQ ID NO: 467431 - protein, 361 aa, unidentified
MIVIGVDAHKRSHTCVAVQELTGRRIHGRTAPARDDGHGQLLEWARGLDCERVWAIEDCRHVSGRLERFLLGRGERVVRVAPKLMAGVRRTAREPGKSDPVDALAVARAALREGLEELPSAQLDERALEIRQLVDHRERLVRQRAMLINDLRWHLHDLDPAFEVPVGRLTAPSWQQKVARKLGRLGKGAHARIARDELARIRELTAAIGQLYRELATLVTAYRPALLWLPGCGVLCAAKAIGETGGAQRFATASKYARITGSAPIPASSGNHTRYRLDRGGNRQLNAVLHRIAISQIRHHPPAHDYYQRKLAEGKTTTEAIRCLKRQIATALWTLLQPDPENTRSRRRKTPTTIHCNTPLP

SEQ ID NO: 467432 - protein, 312 aa, unidentified
MNNDTIGVDVSKDHLDAYRLADGAARRFANDKGGHKALIKWLAQTPLNRVVFEPTGPYHRAVERALGASGVPFVKVNPRQARRFAEATGKLAKTDRLDAAILARMGALLELQARPAPSEVLLELKELYVAREALVKDRTAAKNRAKILTVPVLKRHNAQRLEQIKRHIAAIEAEIRKQLQADPDLAQRFAILTSIPGLSAITAFALLIEMPELGALEPGQAASLAGLAPIARQSGRWTGRSFIRGGRADVRQALYMPALVAARFNPDMKAKYAHLIETGKPAKVALTAIMRKLIVLANALLKANRKWQPKCP

SEQ ID NO: 467433 - protein, 367 aa, unidentified
MLSTLRYVGLDVHKVNTVVAVAEGSGGEASVWGRVASDYATVERELKRLGGPDCVRVCYEAGPTGYGLARYLHAEGYDCIVVAPTLVPSDTRRIKTDNRDAVRLAHFLRSGNLTAVAIPDAATEAIRDLVRARGAAKRAERVARHQLSQFLLRHGRSWTAGSNWTAAHLAWVRSQKFAHAALTATFDDAAATVESAGERVKDLTTTIGEAVESWTAAPLVKALQAFRGIQLVTAATVAAEIGDFARFPTARHFMAYLGLVPSERSSGGTRRQGSITRTGNGHVRRVLVEAAWNYRLRAQLSKAIAARNVGVADGVKAIAWKAQRRLHKRYRRLIARGKCKAEVVVAVARELAGFLWAAARQPHYLAA

SEQ ID NO: 467434 - protein, 351 aa, unidentified
MPHKLNSGIAVIGIDIGKNSFHVVGHDKRGAILLRQKWSRGQVEARLANLPPCLIGMEACVGAHHLSRKLQMLGHDARLMSAKYVRPYSKGQKNDFRDAVAITVAVLRPTMKFVATKTTEQLDLQALHRVRERLVSQRTGIINQIRAFLLERGVAVRQGLRFLRAELPRILAAPCDALSPRILRVIEDLAGDWRRLDERIEGLSNEIEALARQDKGCERLMTVPGIGPIISSAMVAAIGTGDAFSKGRDFGAWLGLVPKQISTGDRTILGSISKRGNRYLRALFVQAAWVVLVKVGPKHWERYGLKSWIEAAMKRLHHNVLAVALANKLARIAWSVLAHGRTFETSKIQAA

SEQ ID NO: 467435 - protein, 349 aa, unidentified
MQIVKCAIDLAKLVFHVFGMTEEGKVIKKRLRRKEVLKWFTNQKPLLVGMEACGGSHYWARELQKQGHTTLLISPHYVKPYVKGNKNDYNDAEGIFEAMSRPTMRYVGIKTVEQQDILLLHRIREQKVKARTALANQLRGLLGEYGIVLPKRIEQLRKRLVDELTLENSPLSERTKQQLYALYEDLLVLDDRVHQTEKELKAVYKQSEACQRVAKLPGVGYLTATAIVAHLGDVSIFKNGREVAAYLGLVPRQHSTGGREVLLGLSKRGDSYIRTLLIHGARSVLRHAKDKTDKDSRWLMELAERRGKNKACVAQANKTARRIWAVLARPEEPVILAKPKVPKTVALAS

SEQ ID NO: 467436 - protein, 335 aa, unidentified
MTQAEIFVGIDVSKAQLDVAIRPTGETWSVPHDDAGLNTVVARLQPLRPTLIVVEATGGWELRLAGALAGAGVPVAVINPRQARAFARATGQLAKTDRLDAQVLARFAEAVRPTPRPLPDEAAQELRTLLTRRRQLVEMLTAEKNRLSPAPPRVRPEIRAHIAWLEKRLAHMDDDLATLIRTSPLWHEQDDLLQSVPGVGPVLATTLLAELPELGTLSRQQLAVLVGVAPLNHDSGTLRGHRCIWGGRATVRTALYMGALVATRWNPVLKAFYQRLLAAGKAKKVAMVACMRKLLTILNAMLKHRTPWCQDRTSSSTGGYSGSGPRPIASPGPNA

SEQ ID NO: 467437 - protein, 410 aa, unidentified
MELLHRRCCGLDVHKETVVACLRLVADGKVTTEVRTFQTTTADLLRLSAWLAENECTHVAMEATGVYWKPVWHILDDGDFVLVLANAAHVKNVPGRKTDVNDAMWSSELLAHGLIRASFVPDTQTQEMRNLLRTRKQLVREQSSHVLRVQKTLEDANIKLDSVLTDVMGKSGRAMLEALIAGETNPAKLAGLADRRVKASPEELREALRGRVTKHHRFLLRLHLNQIDALDAAMATLDAQVNANLGPFRTAVEQIISIPGIKNLGAHVIVSEIGIDMSRFPSAAHLLSWACICPRNDESAGKRRSNRMRKGGTWLKTTLVQCAWAAVKKKGSYLQAQFYRIKARRGPKKAIMAVVASILTAIYHMLKDGTMYKDLGRDHFDRRSTEQQKNRLVKRLTDLGYAVEIKPLAA

SEQ ID NO: 467438 - protein, 367 aa, unidentified
MKKVSTAAVKATKNFSQPKLTIGLDLGDRSSWYCLLDEVGEVLQEQKLGTTPKAMREVFGSMPRCRIALETGTHSPWVSRLLSELGHEVIVAHARNVRLIGESRKKDDRLDARTLARLARIDPQLLCPVKHRSAKAQADLTVIRARAGLVRARTALVNTARGLAKSSGERLRGCNVRNINPEKAEGLSPELQAALQPLLAGIESLSERIRECNEGIEKLAQESYPQVALLKQIKGVGTLIGLTYMLTLEDAHRFRKSRDVGCYLGLQPGRRNSGQSEPQMHISKEGDPYLRTLLVQGAHHILGPFGADSDLRRWGLKLAERGGKNGKKRAVIATARKLAVLLHRLWVSGEVYEPLRNSHRIALPAAA

SEQ ID NO: 467439 - protein, 452 aa, unidentified
MSRQTKPAVVEALPALNPNAAGLDIGSAEIWAAVPPDRDPQPVRVFGTFTPDLHALADWLQTCGIQTVVMESTGIYWVPVFEILEARAFQVQVVNARHVKNVPGRKTDEKDCQWLQRLHTYGLLSGSFRPDAEVCALRAYLRHRAGLLEHRAAHIQHMQKALLQMNLQLTQVLSDITGETGLAILRQIVAGARDPVALAQLRDPRCRHPEDEIAKALTGNYRPEHVFALKQALELYDTYTEKVRECDRELERLFTAIRPRHANDSLPPLDLSDKRDSHSKNAPDYDARTLLYRLVGVDLCAITGMNEVTVQQALSETGTDMSPWRTDKHFRAWLRLAPANDISGGKILRSRALKTRNRATQAFRMAAQAASRSVDTALGAFFRRLRARLGPQKAMKALANKIARIYYHMLKDHSPFHRQTAEAYDEHSRERDLRKLQKKAAKLGMKLVPVAG

SEQ ID NO: 467440 - protein, 441 aa, unidentified
MVDVRSVGLDVHKHFAEVAIVQPGQGIVSRQRLPVTPASLRTFATSLGPNDQVVLEASFNTWAVAELLGKHAGRVVVSNPMKTRGIASAKVKTDQVDAGILAQLLAADFIPPVWIPDPATRELRRMVSEHRGLVVQRSQLRNRIHAILNRNLVECPYTDAFGRTGLQWLTETRLPAAERREVDRLLRLLAALEREIEGLEMELAQARLVDSGLRHLVSVPGIGLITGVALLAVIGDVRRFDRPNRLAGYLGLDPRVRQSGDRPAYTGHISRQGQAHARGLLIEAAHSAIRVSGPLHAFYERVRARRGPQIALVAVARKLAVLAWHLLSKDTDYQWARPSLKAQKWRQVELRAGLPKRTVHGIWSQGNRAQEEAVLQQAEAAYQSLVAARRRQTDAAAPMRKRLEGQRPDARRRSHPQPPLFSRGSTASPTSIVPAEPAEKE

SEQ ID NO: 467441 - protein, 394 aa, unidentified
MRFVGIDVAAEQHVVAVVDETGAVGLKPTPFTEDAAGYQQLFDHLGAPGDTLVAMEATGHYWKTLFAALVARGFAVALLNPLRTHRFAGEDLRRTQTDAIDALGIARFAAQKRPPATRLPDRAAEELRELVRFRDRLVQDFGDRVRQLHRLVDLGFPEFTRYVRDLSSELATAILRDYPTAAAFTGVSPRRLASLRYDGRHKVGDELAQALLQAAAHSVGRHHGEAYRIQVRYLCEDLDILRRRLRDLEGDIERLLHDHEVGSLLTTIEGIGPQTAARLVATFGDFSGFRSGAAVAAYVGAIPALRQSGKRIPIRAPLTPIGDAQLRAKLWMPVLTAVRKNPWLRAYDEALIARGKLPKVALMAAMRKLLHAAYSVATHRRPFVPCPAGEGARP

SEQ ID NO: 467442 - protein, 323 aa, unidentified
MTYIGIDISKNSFVAAFPKVSGYQIQTYPNTVKGIKKFIGSLSVTEHHCVMEATGNYGFLLLYLLDRQGIAASMVNPKQIKHFSRMMMTVTKTDPKDACMIAMYGEKMNPPVYKMPSETVMLLKQKKTIIRQLKKQLTASKNLKSSLVVLPFQDKNGMKALDKTISFLASQIESLESELADLASSEFDRQVKLLTSIKGIGITLATALIVATGGFSYFNNAKQVSRFIGICPTYQQSGTSVHIKGGINRNGDASLRSLLYVASWSALRGNTTCKECYARLKANGKPSKVALIAVANKLVRQAFAVIKSDAPYVDGFVSTHQTK

SEQ ID NO: 467443 - protein, 370 aa, unidentified
MKSIIYIGMDVHKNSYSLCAIYGKTGEILGETKISSDIKLIEKFINNAKKKINEDVDVLAGYEAGCLGYSLYWQLKEKGIACDILAPTTMQRSAKNKVIKNDRRDAQMIATNLANGSYKAVYVPHDHDVEIKEYIRMMNDFKDESKKVKQHINAFVLRLGYRYGGKSRWIPAHIKWLRGLELNSMYKEILDEYLSQLEELTEKIERFQHKLEELSQKDSYREKIGELRCFKGIDTTAAMTLHVEVSDFNRFPTAPAFASFCGLTPGEDSSGEKNKRLSITKQGNSLVRTTLVECAQVLVRGTIGKKGKKVKSKQLGQDVKVIDYTDKAVLRLQKKYHQMILRGVNKNIAVTAIARELACFVWGVETGHIA

SEQ ID NO: 467444 - protein, 418 aa, unidentified
MYYVGIDVAKQFHIACVLDDSNKYLVKNFRIESEISEYSHLNSLLINIDQDSSRFIIGLEATGTLFENLYLFLKNQGYHVVLLNPYQTTKFREMDTMKYVKNDNIDSQMIAALLKSGRYSEAYVSEELYQSIKSLYRHKATLMQEMKNAKRQVSTTLVVVFPEFEQIIKDPFSVSGMALLEKYPTAKHYKGASPDRILKLFRNIKGNNFNLQKASDLLDLARLTIYQGNAQEERAYVIHSNLRRIRFLKEEIEACESQMFTLLNDVNKTIETSQDEEVYIADLVDNLRSIDGVADKTIFAVLSECGDIARFRSGQAFIGFLGLYPTLHQSGNTTKYGRLAKRGAKLAKLAIYQAAIACVRHNDELKKVYLDKKSSGRAPKECVVVVARKLAMIIYSIYKNNTPYNPARVFNTQASLSH

SEQ ID NO: 467445 - protein, 388 aa, unidentified
MHVYVGVDIAKELHYAAIMDSDGVVSKPFSFENNDKGFNLLLSHLAPYDKESILIGYESTAHYQENLAFFLKSLGYRTAEINPLQTAALRKANIRNTKTDSVDARLICLALMNHHIQGDQRDSVRLDDLYQLCKMRMDTMKKRTTCKIQFVAIMDRIFPELASFFDNNLHINTIYRLIESFPLPSQIKKTRIDILTKLLHKASKGHFKKEKAQKLKDLADISVGIPSDIFAFQAQQLVHQIEFYTDQIQTIEERINTNPDVMSSPLMTIPGIGTFCVACILSAIKNINDFGAPCKILAYAGLDPVIRQSGKFNASHTRMSKRGNSLLRYALVWSAGNVVKNNRTFAEYYRHKTEDQGKSHYQALGHCAKKLVKSIYHMLKYNESFNLD

SEQ ID NO: 467446 - protein, 361 aa, unidentified
MAKATCLVGLDVHARQTHAAILYLESGELAVSRLRMSPEEVVSFLERLAGLVVAVYEAGPTGFGLARAAAGRGIDVRVVAPGSVPKGSGDRVKTDRRDAIRLVRLLAAGELSFAFVPSEEDESFRDLIRCIEDLRGDLMRARHRLSKFLLRRGYRYQDGVAWTPKHGRWLRSLSFEGCAQATFADYCASVELLVGRRSTLLVTLEQTVPGCSHAPTIGRLRCFRGIETLTAAGVCAETGGFHRFPRPTLLSGFLGIVPSERTSDLKRRQGSITKAGSPHARRLLVEAAQHYRKQPAITQTLARRQDGQDPRVIEIAWRAQRRLHQRWQHLHYERKKPAGVVAIAVARELAGFLWEAATLDA

SEQ ID NO: 467447 - protein, 382 aa, unidentified
MLSENTLRIAIELSVSSWLIAVRVPGADKSRLRRIDGGDARALLALIGEFRSFASAKCGQAVDVACCFEAGRDGFWLHRLLTAHDITTYVLEPTSILVNRRARRAKTDRLDAEGMLRVLAAWLAGDRQVCSMVRVPTPEEEDAKRPHREREHLVREKLRIENRIEGLLFTQGIRGRPSLRSWERDLAELRTGDGRALPRLLQAELNRLRRRLVLTLQLIREMEVERAETQATTIDDAVTKKITALQRIRGIGENFSNVLVHEVLYRSFANRRQLASYVGIAPMPYQSGGMDLDRSISRAGNQRARTTLIQLAWLWLRYQPGSALATWFRDRVGTLQGRTRRIAIVAMARKLLIALWRYVETGVLPEGVELGVELGAAMVGPA

SEQ ID NO: 467448 - protein, 387 aa, unidentified
MPQPNDLSRSLVALDQDSTIIAVVELSQSSWLVGGVVPGIERQPRKKLEPSPERLLALLHRWRDEAVRAGRIITRIALAFEAGRDGFWLARWLEARGVEAHVIHPSSVAVSREHRRAKTDRLDTELLKRGFLGWLRGERGHCSMVRVPTIAEEDAKRPNRERECLVRERTRLVNRMKGALARLGIRNFKPTLRQATERLATLYTPEGWPLPPNVSAELERDIARLGLVIGQIKQLEEARQQRLEEEPESGRHAMVRRLVRVVGIGIETADMLVNEVLSRPLRDRRAVARYAGLTGAPDESGTKRREQGLAKAGNARVRRGMIPLAWRFLRFQQNSALARWYQARTADRRGATRKTMIVALARKLLIALWRFATSGEALEGVILRPAS

SEQ ID NO: 467449 - protein, 351 aa, unidentified
MDKITTVSLDLAKQVMAVHAVDARGLTVMRKVLRREALLAWSVALPPCVIAMEACGGAHHWARELTRQGHTVRIIAAEFVRPFRKSGKNDANDAEAICTAVRQANMRFVAMKSVEQQAALCVHRLRQGLVEERTALINRLRGLLTEFGVVAPLSPEKLRRELRHCLDEEKTPLPPAVRQLVADELAALDPLEERIAAYAAQIAAQARDHPSAQRLQGIAGIGPLTAAAVVATVGQPQEFRNGRQFAAWLGLVPKQHSSGGKTRLGRITKRGDAYLRTLLILGAKSALQAALRKPPERRHRLQRWMVEVFGRIGYHKTLVAIANKHARIIWALLVKGEDFDVRRLAPPAVAA

SEQ ID NO: 467450 - protein, 356 aa, unidentified
MPMLAEQVDGVIGVDTHRDTLTAAAVTRLGGVLAHITTSADAAGYRRLVDFAHAQLPGRRCWAVEGTGSFGAGLAGFLQQHGEQVLEVGRPKRPASRSGAKSDALDAVRAAREALGQDHLATPRRRGERAALRVLLTTRRCATLARVAAIGQLKALLVGAPEELRAELRGRSTAGQIDYCAGLRARPTRSLEHQATVRALRATAQRIQALAAEADQLQAELTGLVGAVAPWLLEVPGVGPLSAAQVLVSWSHAGRFRSEAAFAALAGTNPIPASSGQVTRHRLNRGGDRQLNRALHTILLVRLRIDPDTRAYMARRTAQGKSRRDAKRCLRRVIARQLFRLLERYDRPGVEILQAA

SEQ ID NO: 467451 - protein, 423 aa, unidentified
MNIVYPVCCGVDVHKRFFVATIIVSNGIEAEYKKRRFSTFNNEILKFKAWLLENNCRDVCMESTGKYWIPVSNLLEDSINVTIANPKWIQIVKGNKDDDKDSKWIGDMFRIGLVPGSFIPCKDIRILREFMRYRFKLISCKSSEKNRYQNVFTVCNVALDAVVSDMFGKSASSITDYIVNSDTFDPEHCVSLLKGSLKKKSDEVLESIDGFSMTDSQKTRAKMVKEHYDYLVELVQKIDAAIDELVKPYESAIDLLCTNPGIRRHSAITIISEIGTDMSQFGSSKRLCCWAGLTPRNNKSAGKKKSVRIMRAGAYLKPALVEIAHAAVKDKKSPYYAIKYERILKRRGKKRAIIAIARMILTAIYHMLSTGEVWNPVDLDQVDMPPELKEKEVQKSLRRAAKLLIAHGLISPDAIQIPESAPA

SEQ ID NO: 467452 - protein, 345 aa, unidentified
MKTFFIGIDVSKEKQDATLILYESESYSEQQLAYTTVENNPKGFRSLVSWSKKNAGRGVKTDTMLFCCETTGGYDRALCDWLYGNGLNIWRESALQIKRSMGLRKGKDDKADSEMIAHYALLFRSKATLYKPLDGNMRSLRDLFLYRQSLVAERRAKTVSAKEKRHISSKSKVDNFIYRDAQKAIDLLTKSIKECERRMLEIIREDEEMYRHYLHLISCKGVGLVTSVMLIVFTDNFKGWSAKKMASYCGIAPFYESSGSSVFHKANTSGYSNRRLKGILTQAARSAITHNPTLRQYYLRMKAQGKPYGVILNNVNNKLVHILFSLVLHDCDFELDHEAKRALRA

SEQ ID NO: 467453 - protein, 323 aa, unidentified
MTPTFLGIDISKKDFHVVLLKEERGSKPKKFTNNTAGFESLNKWLKKSGVEELHACMEATSIYGDALAEFLYEAGYQVSVVNPARIKGFAKSELLRTKTDSVDAALIARFCAAIKPSLWKPTPPEVKDLQALLRRLESLTEMYQQEENRWETATETVAKLTKAHLDYIKEQQAEIKKMISDHFDQHPHLKQQRELLTSIPGIGEQTAAVLLAEVGRIEDYKNARQLAAYAGLTPCERSSGTSVRGKTRLSCTGNVRLRKALYMPAVVAMRCNPLLKAVSERLLGRGKVKMQVIGALMRKLVHLAFGILKSQKPFDPTYLLATP

SEQ ID NO: 467454 - protein, 357 aa, unidentified
MTSTAPTVSQITGGVDTHRDTHHAAVIDEVGRRLADAEFPASPAGYRQLLRWLSQHGVVGQVGVEGTGAYGAGLARFLRANNVAVVEVDRPDRRGRRTHGKSDPIDAYAAATAALNGTASGTPKTRDGRVEAIRALRVVRRGAVKARTQAINQLKGLIVTAPADLRETLRGLPTAGLIATCARLRPHVGGPSDASVISAPTKSALRHLASRYQQLSQEIAELDEELHPLVRAAAPALLELPGIGPEVAGQLLASAGDNPGRLRSESSFAHLCGVAPLPASSGRTDRHRLNRGGDRAANNALHTVVLTRLRYDSRTRDYVARRTGQGLSKKEIMRCLKRYVAREVYRILTAETPPPAA

SEQ ID NO: 467455 - protein, 358 aa, unidentified
MEERLNYILKKEKVFVGLDDSKRTWSLCVRSMGVVVHETSMPAKYEVLRNYFHKKLPQCQIAVMYEAGFRGFGLHDQLVTDGWECVVTPPHTVTEEKSNRTKNDRTDCRRLARNLENGDYHRCFVPDKGLREDRQISRTYRQVQADIVRVCNRIRRMLEYHGLDEGLPAGRWRRTSAYACLRRHLSELELSDALRVSFEAKFRELDNLHELKEELLRQLKKLASSDRYRENVKLLMSAPGIGILTAIRLALEWGDLSRFRRKEEFASFLGLIPSDHSSGDQQRRGHITRQGNQSVRGCLVESAWLAIKYDPVLLEKFRRVLSHSGSKKKAIVAVARKLALRVRRALLTGEPYVVGVVQ

SEQ ID NO: 467456 - protein, 456 aa, unidentified
MQSYYMGIDVSKGYADFVIINNSKQPVEENFQLDDTFDGHCHLYEKLIDFFDTHPGCILYVAVESTGGYENNWFNSLRQFQSSVKLKVARLNPFAVNASSKASLRRINTDKISAQQIAEYLITHPEQVTYEHHDPLASLRKQWGFIKMLTKQKTQLLNQLESLLYTANPELIIYCKNNTPEWVLKLLIKYPTACCLAKANASYLACIPYITVDRATELINNAKRTIASSSDKITEQIIIATVKQILHLRKTISSQTKIMARSCIIPELNLLKTFTGMGDFSAIGLMLEIQCASRFSSVKRLSSFFGIHPVFKESGDGSSGFHMSKRGRKEPRQILFMVALSAIRSNPLIQGIYLDHIQKGMNKMAAVGVCMHKILRIIYGMLKHNMPFDPEIDKRNRLKMFKPKNHVRQDKNRRYQEYDLKAPVSRRQNLKRRERKQSHSDNITKTGSSSPVPFTG

SEQ ID NO: 467457 - protein, 373 aa, unidentified
MNNTTVYVGMDVHKNSFSLCCYTVRDDACSHYVKIDPDYRLVLEYIESMRGIYGDDSKFICGYEAGCLGYTLYHQLNDHGVECIILAPSTMAKSPVQKKKKTDKRDSEMIARCLAHHSYHKVHVPTSEEEQIKEFIRMRDDHKLALKKIKQQILAFCLRHGFIYNAGASHYPAAHLSWLRSLEPEGLYKEILSEYLLTYDKLTDTLERLDRRIEELADQDAYRESVRKLCCFLGIKTQTALAVIVEVGDFKRFQKAQQFASYIGLVPGEDSSGDGINRLPITKAGNTHVRRLLVEAAQSYGRGSIGFKSKALKARQEGNSPEVIAYADKANERLRRRYYRMTLKCGKKVNVVKTSIARELACFLWGMMTGETA

SEQ ID NO: 467458 - protein, 353 aa, unidentified
MYYVGLDLHKRYVTGCVIDRDGAVVAREGRLGTSIEVLLAWLAPLGSEVAVALEATLYWAWLHDRLTAAGYAVTVVHPQQVKLICAARCKTDPVDALKLAELLRMDLLPAIWVPDAETRAHRKLLRGRAWLVRRRTQVKNRVHAYLAEENQRIEVTDLFGEAGREWLATVALPRAVRVQVELLLELIDLLDRQIARLDRQVRQVVKTSRVARQLESIPGVGPFAALLLAAEVGSLDRFPTSHHLASYAGLVASTRSSGDKTRHGSVSPAGSSWLKWILIEAVQTLKRRPGPVREHYERLLRAKGKQKATVAAARKLCCYIYWMLKREQSYAEWLAQYERSREGRPIHSLVSVA

SEQ ID NO: 467459 - protein, 400 aa, unidentified
MRVVFGIDVSKASSEVAILVNGEKVHGYTISNDAIGFSRLLGDLRTVHKPEIIFEAKGVYSRRLQTFLDEHGYAYTRLNPLEAKKQLDSLRVRKTDQIDAEKLAQSQFVLNRKTTYVQEEVYQNLRDLSRFYQNLTEDIVRAKNRLHKALQVTFPELENILSTPTGEQYWNLVIAFPCKDFVLELSKDKLSESIRQSTSKRISDKRVAYLAEKLIALANQSYCAVKKTSPILEEVRYYAKELLRLSERRQAVLDQMVKLAQPLPEYDILLSIPGIAETTATSIIGELGDIRRFQSANQINAFIGIDLRHYESGNFLAKEHITKRGNSYARKILFKCIHNIASASHTNPCHIADFYKKRKRQSQTTSTKPHTIASIHRLIRTMYYLIMHNKLYDYASTQNR

SEQ ID NO: 467460 - protein, 467 aa, unidentified
MKTSFFLGIDVSKGYADFVIINAKKQVVLQNFQLDDTFQGHCRLHDILQDFLGKYPGALLFAGMENTGGYEKNWYQLLSSLQTFLPVKTTCANPLAVVSNSKADLKRNKTDKISAQNVAEYLVAHPEKVNYQQHDPMASLRKQWGFVQMLTKQSTQFYNQLNALLYSANTELLSFCKDGVPAWMLTLLTTYPTALQLKKARPKTLAKIPYITLSRAQQLIAGAKRSVASTTDQATAQLIVATTKQILHLKKTINTQMDLMEEQSHLPEVDLLKTFVGISTRSAIGLMLEIQSISRFKTSKKLAAFWGVHPVYNKSGDGSRAFRMSKKGRKEPRRILFQVALSAINHNPVIKPLYEQHVKRGKEKMDAIGVCMHKITRIIYGMLKNNTAFDPSIDEENRQKWIPAEPVKAENKTNRRFEDYDPTAPVSRRQHKKRMERERSHSVNDTKRGITAPVPIGVILTGVLEKV

SEQ ID NO: 467461 - protein, 390 aa, unidentified
MYYCGIDVAKRKHAIALIDQHGQAVQRSFTMENTRAGFDQLLQALTALDGPVLIGLEATGHYGWALYDELTHHAYPVVGLHALQVHAFRKSGVRQVKSDRTDAVWIAEFLRFSQPEPAQPTTAVFLQLKDLSRFHYHLSEPIGDAKRKLLSVLDRVFPEYETLFSSVFLTTSRQLLAPAASAHELAEFDLQELTEQLHTARRGRFDRTKAAALHTLAQQSVGVRFLADAAQLQVRCLLAPIDLLEEQRHLVDDALAQLRDQIPPYITSVPGVGPTTGAALLAEIGDIHRFDAPEKLVAYAGIDATVYQTGQFEARQMHISKRGSPYLRHALWQAASRAIMHDAELRAYYDRKRQEGKAHGTALGAVCRKLLTRVYIVLKENRPYQIRTAR

SEQ ID NO: 467462 - protein, 421 aa, unidentified
MEDWSGGKSCFYHAMIGGGIDMDKRQRFRWFLGIDVSKETFDACCIPSHGERLFNLSASMDRKGFEELIKQLCTLSIPQESVLVGMESTACYHINLYSFLVSLGYTVMVINPLLISNFVKLQLRKTKTDKKDAYVIAQFLLLNRDSLSQSIVSSDISDLRDLSRQRESLVDQMSSTKSEIKRLLTITFPELEHISGIFTKSMLRLLCQYPSAASIKEAKRSKIAKILIPGSYGKQTPASVERILKAAQVSVGTSSTTKEIILRQKASLLIQLEEHLRELTDILIELCQGKIQGDMDILTSMKGIGEKTAVNFLIEIGGDIKQFESHKKVIAMAGLDPALYQSGKIDRKGRISKRGNRHLRRVIWLMTTKVIQFNERFKQYYLKRIKDGLPYKKAVLATAHKLIRVMFAMLRNKTLFDARMN

SEQ ID NO: 467463 - protein, 351 aa, unidentified
MLLIGVDYHPSFQTIAFLIEETGECGEQELNHSDGQAEKFYRDLKQRGIRVRVGMEATGYSRWFERLLVELGIEIWMGDPGEIKAKRVKKRKTDRNDALLLLRLLRENNFPQIWVPSPENRDLRQLLWHRHRLVQMRTRIMNQLQALAMNEGYRWKKKLFSEQGRAQLEKLALAPWASRRRQELLELLDRMNPTIQELTAAVEQEARKRPEVLRLMTHPGVGPLTALAYVLIIGTPARFQRGKQIGTYVGMIPCEDSSGGKQRLGRISKQGNSLLRFLLVEADQAAARSHPDWRRRYIHLAIRRHQSIAKVAMGRKLAIRLYWMWRNGCDYSQSLGFGSYAGQLGTGHGVK

SEQ ID NO: 467464 - protein, 343 aa, unidentified
MQTITTIGFDIAKSVFQVHCVDAAGQVVIRRQLKRRYVLAFFQKLPPCLIGIEACASSHHWSRELQALGHTVRLMPPAYVKPYVKRHKNDATDAEAICEAVTRANMRFVATKTAEQQSCLVLHRTRHLFIRQQTAVINAIRAHLAEFGIVAPVGRHGVEELLNVVADPNDKRVPEIARVCLSALGAQLRKIKEQILGFDRMITAWHRSSETSRRLDDCPGVGPALATALVASVADPKAFRSGRNFSAWIGLVPKQHSSGGKDRFGSISKQGDRYLRGLFVAGALAVIRYAKIHGTKHRPWLAALLARRPTKVAAIALANKIARMAWAMMAKGERYKEPVALAA

SEQ ID NO: 467465 - protein, 337 aa, unidentified
MPTLTIGLDIAKSVFQIHGINRHGDTVVQRKLRRTEVLKFFSKLEPSLIGIEACHSSHFWARELTSLGHTVRLLPTQYVKPFLVGGKNDANDAAAICAAVTRRDIHCVTIKSAEQQSLQSVHRMRARLIQERTAKSNQIRSMFAEEGFVFPIGLPQLRKNIIALIDEASTRITPLLRRLGRMYLEQLNAVQQWLDELDNEMARVFKQNEVCQRLATVPGIGPVIATALVSSVGDPSQFKNGRQFAAWLGLTPRQRSSGGKTKLGGITKRGDSYLRTLLVQGARAVMRFVHRRDDRHSRWIKTLMQRRHTSIASIAVANKTARIARALLRYEERFNAA

SEQ ID NO: 467466 - protein, 410 aa, unidentified
MEVLHPHCAGLDVHKETVVACVRHMVDGTVKREVRTFDTTTTDLLALADWLASEGCTVVAMEATGVYWKPVWHVLSDGDFALVLANAKQVKNVPGRKTDVNDATWLADLVAHGLIRSSFVPDAETQVLRNLLRTRKQLVRERNSHVQRIQKTLEDANIKLDTVISDIVGTTGRAMLQAVIAGETDPSKLAALAHPRIKAPPAQLREALRGRIMKHHRFLLRLHLQQIDAIDTAVAEIDREVGERIEPFRTTVELLTTIPGISELGARIIAAEIGNDMSRFATAAHLISWAGLCPKNDESAGKRRSTRMRHGAPWLKTTLIQCSWAATRKKGSYIQAQFHRIRSRRGVKKAIGAVAASILTAAYHMLKNGTCYQDLGPDHFDRRAKTTKTKRLVARLQNLGYAVQITPLAA

SEQ ID NO: 467467 - protein, 331 aa, unidentified
MTGLATDEFTAFIGLDWADAKHDICLQAVGSDKREVKVLEHKPEAIEAWATALLQRFGGGPIAIALELNKGPIVEALRKYDGFVLFHINPMMLAKYREAFTPSRAKDDPTDAELQLELLLGHRDKLTPLAPQSPEMRTLAQLVEHRRRLVGDRVRITNRLTQALKMYFPHVLQWFPSKETMLFCEFVTQWPTLKAAQLARRSTIKRFLRHHHVRGSQRINERLEAIKQATPLTTDEGVITPHVLMVQALTSQLRVTLEAIERFDQAIAERAQTHPDFALFEALPGAGPVLAPRLLVAFGEQRERYRSATEVQKYAGIAPVMERSGKQSWVH

SEQ ID NO: 467468 - protein, 428 aa, unidentified
MDYTTQNKKIELITEDTIVIGVDIGSEMNFARAFDWRGREISKKVFKFSNTFGGFNFFDGWMTDMLQRAAKMQIIVGCEPTGHYWFPLAGHLKDRDILLVTVNPYHVKQTKELDDNSPTKTDLKDPKTIAKLVIGGNYGIPYIPEGIYADLREAVSSRDRINKELNASANRIQRWLKIYFPEYLDVYKNFDSTSGLMVLEQAPLPEDVIALGIEGVVKIWRAAKMRAVGKKRATTLVESAHNSIGIKGGNCARLELQMLLEDYKTKKRQMEMIEEVLTKETMKVPNVEKLLAIKGIGIITVAGFIAEVGDIRRFDSPKQIQKLAGFELKRNSSGKHKGQTTISKRGRRRLRRILYQVVLPMLKSNPEFREVYEYYTNRVKNPLKGKQAVIAVSCKLIRVFYTLLSNGVEYDAARLRADIIRPIMLKAA

SEQ ID NO: 467469 - protein, 401 aa, unidentified
MDNTTMFYVGIDVSKDKSDICIKDEKGNDLIHRFEITNKKADLEMLYETVESIKRNIPGNSDVVFGMEATGIYSLPLYSALKRDGYKVKLYNPIQTNGYRKINIRKTKTDPIDSAIIAEMLRHSEAPQVSEIQDMHLFQLRELVRVRHRLIEKQALCKVQIVRNIDTTWPGYGGVIKRVFGAASLAILKKYSVPSKLRSESFEHFYELVKKKSRSKISRSKAEEIYANAGNVLTIPELDSVIAIEIKTLITQLELYDEQIQSVEGKIDQMMKLTDTKIMSIPGIADILGPTILGEIGNVERFSNVKKLVAFAGLDPVVNQSGRFENKSGKISKRGSPLLRHALFLAANSAIQNDENLKRFYTKKRSEGKHHFSALNAVAAKLLRIVYWVLKNNKEYQIQLN

SEQ ID NO: 467470 - protein, 441 aa, unidentified
MAMRTRSQLTVQHPDAAGIDVGGKSHFVAVPPDRSETPVREFGCYTQDLHEMAAWMMACGVTIAALESTGVYWIPVYEVLEAHGIAVVLVNARNVKHVSGRKSDVLDCQWLQQLMSYGLLSAAFRPPADVCVLRAISRQRDTLLQEQARCVQRMQKSLTLMNIQLANAITDITGQTGLAIIRAIVAGERNPHELAKLRNYRIRSSEAGIAKSLEGTWKEEHLFCLAQALTLFDTHHRLIAEADDKLAALIAPLRQHRVKAAKGKAKRGGKNAPGFDVREALREWAGVDLTQIGGIDVSTALKVLVELGPDLSKFNSAKQFCSWLGLCPGTRISGGKRLSGASKRIPNRVARALKLASQGLHHSQCALGAYYRRIAARLGKGKAITATAHKLARLIYAMLTQGSEYVEQSQAQYEAKFQERTLKYLQQKAKTMGFSLVPQAV

SEQ ID NO: 467471 - protein, 436 aa, unidentified
MELKECAAFVGIDWGDRCHAIHVIDGRTQKGKSQMLDQDPESIDQWVAKLRMLFPDQKIAVCLEQKRGPLINALLKFDNLILVPVNPSQLASFRDTFGPAGAKNDPNDAQLLAELLHKHSDRLRPWYPDGGWIRKLRVVVEDRRLFVNERTRLTNRLKSTLKQYFPLALEVTGDCIYSYMACQLLAKYSTFEALQAVSDEELLQFYRDQGCYYESVNNKRLKAVRKSMPLTTDQAIIESYSLRVRSIVSTIETLNSAIDNYDSQINAIMESHHDEADIFESFPGAGKVMAPRLLGAFGSDRDRLSSANEIQQLAGVAPVTKQSGKSKVTHRRWACNKFLLQTFHEFAALSIKHSIWAEAYYEHATKNQGMKHQAAIRSLAFKWVRILFRCWKNKVSYDELKYCDALRKRNSDLLPIITGKITAKRKESADQDQQLT

SEQ ID NO: 467472 - protein, 402 aa, unidentified
MNAVGIDVSKGKSMVAIMRSFGEIVSAPFEIKHTASDIHSLVELINSVEGESRLVMEHTGRYYEVLAHQLSKANLFVSAINPKLIKDFDNDSLRKVKSDKADAVKIARYALDKWQNLKQYSVMDELRNQLKTMNRQFGFYMKHKTAMKNNLIGILDQTYPGVNTYFDSPARSDGSQKWIDFASTYWHVDCVRKMSLNAFISHYQSWCKRKKYNFSQSKAEEIYGKAKELVPVLPKDGITKLIIKQAVDQLNSASTTIESLRTLMNETASQLPEYPVVMAMKGVGTSLGPQLMAEIGDVSRFTHKGAITAFAGVDPGVNESGSYEQKSVPTSKRGSSDLRKTLFQVMDVLIKTHPQDDPVYQFIDKKRAQGKPYYVYMTAGANKFLRIYYGRVKKYLSSLPES

SEQ ID NO: 467473 - protein, 338 aa, unidentified
MPILMGLDQHRAQITTEWLDTDTGEVSRARVAPADRTGVRRFLARFHGKQLEVALEATTGWRFVVEELQRIGAVVHLAEPADTAALKGTKKHAKNDRADARHLRELLIAGRVPESWIPPAHILDLRARVRLRHALSEDRGEWQQRIQSVLYHHGCPRRGDLINRAGLAWLAGQSLPACAREQVTVALAMIDALDRQLAPLDKELGRYARRQPGCKALMRHYGIGKLTSVTILAELGDPSRFSSSRQAVRFAGLDITVYASDRRRAPGHLSRQGPPALRWALFEAAQCARRPNSPDHTYYVQAAEKLGGNRACLSVARKLLKRSYHTLQQLGEEAMQPA

SEQ ID NO: 467474 - protein, 400 aa, unidentified
MLSIGIDVSKGKSTVCGMKPGGEIVYAPFEVQHTREGMSELVLLLHNSGEEVRAVLESTGSYHCPVVAALLENGIFVSVVNSLRMKRFCSQSIRKVKTDRIDAMQIALYGLAYWQELQPTKLPEDTYRELQLLARQYYQMTSLLIKAKVDFNAICDQVLPGMQELMNDHAGRHKLSDFVLRYRHTTHILEMGETRFRKDYCKWAEKKGYRNCERMAVLIFATAQNGIPVLPNAPSTQIVITEAIRVLHTVEASRDAILTQMQALAKTLPEYSLVREMPCIGDTLAPRLIAEIGDVRRFHSKRALIAYAGIDAPPYQSGKFCANNRHISKRGNRYLRKTGYEVMQSYVMHKPANDPIFTFIEKKRGEGKSGKLAMVAGLNKFFRVYYGKVTELYRSLPAIE

SEQ ID NO: 467475 - protein, 342 aa, unidentified
MKIIRVGVDLAKNIFQVHGVDRNEKPVWKRKLKREEWIKVLLEKIEPGCEIGMEACGGAHHWARLLQAKGYTVKLIAPQFVKPYVKSNKNDANDAEAICEAMSRPNMRFVSIKTVEQQDVQAVHRIRAGLMEQRIAKINQIRGLVSEYGLVASTQVSHLRAAIPEWLEDGENGLTSLFRKLLNGMWNDLLSLDQRLKELDQEIMVLATDPVAQRLQQLRGVGPMIATALLATVGDASQFANGRQMAVSLGLTPKQNSSGGKEKLLGISKRGDSYVRCLLVHGARSMISASKGKDDRLSKWVMRIATTRHPNVAAVAMANKTARIAWAMIRNGSNYQPELAAA

SEQ ID NO: 467476 - protein, 355 aa, unidentified
MDNLRYIGLDVHRDTISVAVLNREGQLVMQSVVQTRAPALLDFLSGIRGTLHVTFEEGIHSAWLYDLLQRKVARVLVCDPRKNRLLKSGNKGDLIDARKLAELLRNDALSPVYHGELSSLEVQRRTRSYTMLTEDTTRIMSRVKAVFRGHAVPYHGKSIYRPDHRESYLAQLPTEGLRKRVELLYQELDAVHRLRLRAKREMLAECRKHPAMKWLQSVPFLGKVRTAVLIGRVQTPHRFRTKRQFWSYCGLALETHDSAQYHVVHGQVERKPRFVQVRGLNWNHNHDLKDVFKSAATMAAVRDGVFRDYYCGLLAKGIRPEMARLTLARKIAAITLKIWKKGETFNAEQVKPQAA

SEQ ID NO: 467477 - protein, 388 aa, unidentified
MIYVGIDIAKLNHFASVVSSDGEVLVEPFKFSNDSEGFRCLSSKLDQFDKDKLLIGLESTAHYGNNLVEFLFSKGYRFCVLNPLQTSAMRKNNVRKTKTDRVDTFVIAKTLMMNPHRLFEKQDLDTLHLKNLCRFRQSLMKKRTTCKIKLTSFVDQAFPELQYFFSGIHHKSVYALLKEAPSPEQIASMHMTHLANLLRVASHGHFKKDKAQELRALAQKSVGSNDSSISIQITQTIEQIELLNSQLDNVEAQISDIALALDSVIMTIPGMSTLEAGMILGEIGDIHRFSNPSKLLAFAGLDPTVCQSGKFNASHTRMSKRGSRILRYALVYSAHNVVKNNSTFKEFYDSKISQGRGHYAALGHCAGKLVRIIFKLLTDNLPFDPTRL

SEQ ID NO: 467478 - protein, 334 aa, unidentified
MEKITTVGIDLAKAVFSLHAVDVAGRVVFKRTLRRDQLVGVVAGLPPCLIGMEACSGAHEWGRRFQEYGHTVRLMAPKFVAPYRKSGKNDGNDAEAICEAVTRPNMRFVPVKSIEQQALLTLHRVRQGFVVERTAIINRLRGLLAEFGVVLPLRSVTVRRQAAAAAENLPELARRAIGDLLEQLRVLDERIGGYDREIEVQAKLCEPAQRLMKIRGIGPTTALALVATVGNAREFKNGRQFAAWIGLVPGQYSTGGKTRLGHISKRGDAYLRNLLVQGARSVLNSAGAHQDRMSRWILELQPRRGYYRTLVAIANKNARIAWALLAKNETLRTV

SEQ ID NO: 467479 - protein, 397 aa, unidentified
MANKPRSLDEVASMKYRMRQTVSPLVTKTVGELRSPHLSQLSAADPEQSIGSCPQATEKPHSKGGRGRPVTFPKDLVMDGGCFVGIDVSKARLDGHIRQRQSFQHENSEDGIAEILTLLRPLSVILIVVEATGGLEVPLVRALQKVRLPVAVINPRQARDFAKATGALAKTDAIDAAILAHFAEAIRPEPRALPDEQTQWLDAVLTRRRQLIDMRTMERNRLSGCADTKVRADIQAHLDWLERHIDDADQGINDAVRDNPDWQARDRLQQSVPGIGKVTSRTLLASLPELGMASSKKLSALVGLAPFAHDSGKHRGKRRVFGGRAEVRSTLYMAAMSASRKDNNPLGQFYQRLRRAGKEFKVAIIAVARKLLTIVNAVVRSGMAYRPDLPALELCHA

SEQ ID NO: 467480 - protein, 332 aa, unidentified
MKKQKFSHFIGIDIAKLSFDVAVLSSSGKTDSYIFDNTKKGIKAYLRLLKNQKIELSECLICMEHTGIYGKLIITSLVEKQANICVEMSLKIMRSLGLQRGKNDKIDAIRIARYAAKNYAELELYQPLPEILDQIKTLVTIRERLVKSKADLMKYPKELEHFAPELGKLAKKNIKKSVKTFSDEIKRIEGEIRKLILSDDRLHKTVDLASSVTGIGTFTALYLTIYTNFFTRYSNPKQLACYCGVVPFEYSSGTSIHKKARVHHMANKLLKKQLHLCALAALTHDPELKAYYNRKVKEGKSKMLVINNIRNKLIHRVCAVIKRQQPYQKAAA

SEQ ID NO: 467481 - protein, 326 aa, unidentified
MQSFLGVDVSKAKLDVALLLPSGKFKSKVFGNDRSGHQALVQWLLVQLPGGLQTLHICMESTGSYHEALACALHDQGLIVSVVNPLLVKRFAESNGQRNKTDAADAKCLAQFCREKRPERWEAPSVGVRTLQALVARLETLQDMRLAECNRRDVAHVSVIESIAGVIAELDAAIAQVKAQIAKTIDDDPDLKRRAQLLDTIPGLGEKSIAQLLAYIGRPERFRNVKAVTAFASLTPLIRQSGTSLDNRRGTHPMGHQELKRALYFPAMVAGRHNPLVATFWNRLKAQGKPGKVIVVACMHKLLAIAYGVLRSGKPFNADHLKPSAA

SEQ ID NO: 467482 - protein, 381 aa, unidentified
MQVTLFVGLDQHADTIAVAVAEAGRDGEVRSLGVIPNRPESIVKLIKKLGPVRSLKVCYEAGPCGYVLYWQLTAMGVHCDVVAPTLVPVKAGDRVKTDRRDALKLARCYRAGELTPVWVPDQAHEALRDLVRAREAAKKDQLRARHRLSKFFLRHGRRPPTAGRAWTAKYLQWAHGVRFDEPARQAAMVDYLAEVEHAAARIQRLESDLDAAVAAMPSETQALIAGLQALRGVAKMTAVTVAAELGRLSRFDRPRQLMGYSGLVSSEYSTGGKTRRGGITKTGNAHLRRVIVEAAHAYRHRPAVQGELRKRQAGLSPAVTEIAWKAQHRLHKRFRHLSAKSKPLGQVVTAVARELLGFVWAVAVQVEREVAAAGHPQREAA

SEQ ID NO: 467483 - protein, 344 aa, unidentified
MSVYVGIDVHRKRSQVAVVDESGKVLANRNVPNAVEPFLKVIGGLPPGTPAAFEAAYGTSWLVELLESYGFTPHLVHASRCKAIASARLKNDKVGASILAQLLRVDLLPEAWIAPPEVRQLRALLRHRVALVRLRTLLRNRIHAIVADHGYDRPAGEYWSGPGRAWLASLELPAVSRELAGDDLALIGALETVIDRLDWEIRQRGRSGPRVKVLTQLRGVGPFTALVILAEVGDVSRFGSARKLASWAGPTTGRARQRPRRPLRAHLQTGLGVAALGAVRGGADRQALATVRRHLPAIAKRRGKKIATTAVARKLLTRAWHLLTDAGHAIPPPAAAPTAPEGTR

SEQ ID NO: 467484 - protein, 394 aa, unidentified
MKLVGIDVGKNSHHFCVMDKETGELNVTPSSFSNNKEGFDFLINSLKPYSKKSILLGMEDTGHYHVALLKFLLSNGYTVALINPKTTDLTRKMEGGITKNDKLDTITICDVLDTPERKKQYRITKVDRFDLYEQRQLTRHHHNLKEELNIYCNRLQKSIDLVFPEFNTLFGSKYGVVYMNLLKTFGSAEAIASTDIRIIRKCFEIKGRGGRISLTPEKLKECAKNSIGISSEVETIQIKHLVSQIMLIKEQIAEIDKKIEEFSIKNNSPILSIPGISHFSGTSILAELGDIGNYSKPSQIIKFAGVAPYHYESSQYNAQHTAITKKGSKYLRKTLYQIILPVINNNPVLKKYYLLKISQGKGHRCAQGHCIRKLLRIIYHLLETGQSFDPALLR

SEQ ID NO: 467485 - protein, 422 aa, unidentified
MEQSKFEVLVGIDWALSSHQVCVIDAWGKLLRECTIEHSATELHKLADWLIKQAGGVAERIGVAIEVPHGVIVETLLERGLVVLSINPKQLDRFRDRFTVAGAKDDRRDARVLADSLRTDRRAFERIELAEAEIITLREDSRLHDELQAQCVQVGNRLRDQLLRYYPQLLAVGEVDEAWVWELWKMAPTPARAQRLRAERVQALLKRHRIRRISAEQVLEKLQVRAFSVAPGVSEAAMGHIEVLLEQLRLLHRQLQQCDRRLEQAMAGLSKPQQHHEEHGPPREHSDAEILLSLPGVRNLVGAAMLTEAGRPLKQCERSMLRARCGIAPVTKRSGKMLLVHMRYACNERLRQACHYWANSAVQHDARAAAHYHRLRASGCNHARALRGVADRLLDVLIAMLRDRTLYDPTRYGAGKQAKQAA

SEQ ID NO: 467486 - protein, 351 aa, unidentified
MAPIYIGVDFHSRQQTICYLKTETGELVISELQHHDKEQVRAFYQQFQGQVSIGLEASGYSPWFEAMLERLGHEVWLGDATEIRRRARWRQKNDRRDAELIWDLMVHNEFPRLHQPLPESREVLRMLRYRQKLIKLRTMSKNSLQAIAMQAGLAKGKQLFTAAGQAQFQAAEMSAVLQWQREHWLELLKPLNQQLLETMVWCKTQSKDDVSIQRLRTHPGIGLLTSLCLLHTLQPISRFRNQRKVVAYAGFDPVIRSSAERATYLGISKAGSRLLRYLLVEAVHTAIRYDQDLKRFYKRLAERRGRPKAKVAAARKLLIRAYIMLRDEIDYAEFRRRAVAARLVPTRSRAH

SEQ ID NO: 467487 - protein, 349 aa, unidentified
MNAERVSYAGKRVYIGIDVHRAFFVASCVCEGVVVKRCRMPSKSEAVISLISQYFSESEVRTCYESGYSGFWLHRELAAAGISNIVVHAASIEVAANDRVKTDKRDSLKMAHQLATGRLKGIRVPSGEQEQERLLTRTREQFMRAKRRAQIQIRMRLHQFGLFPVHIERVIRLKDVDALLEKMDGDLHYTISCLRAEWERLAIQVKEIDRKLLERTKQNPLDAIYRSVPGIGTLIAQVLSSELGDLSQFPNERTLFSFTGLTPGEYSSGNNVHRGHISRQGSARLRHMLVEAAWKAIRKDTVLKEFFERIAKKAGKKRAIVAVARKLVGRIRAAMRASTCYEVGHKAAA

SEQ ID NO: 467488 - protein, 421 aa, unidentified
MQVLYERCAGIDVHKDQVTVAVRTPGPGPGRRDTRVRKFGAFYGVLREMTRWLAGQGVTHVAMEATGMYSMPVYHALLEPGCFEQVLVCNAAHVRNVPGRKTDAVDAAWLAELLECGLLAGSFIPPEDIKAVRDVVRYRRKMVQQRSSETQRLGGVLQDAGIKLDSVASSIDTVSGMAMIRALIDGERRGEVLADLARGRMRSKIGDLSGALEGRFDDHHALMCQLHLDHIAQLTEMIARLDARVESMMVPFARQRNLLATIPGIGQVAAAAVISEIGTTPAEYFATAAHLASWAGLCPGNHESAGKRKHGKPRKGNQHLQPLLVECAWSAIRTSGRLQARYHRLVLRFGGYRNPVARKRAIVAIAHTLAVIIWHVLTTETAYTDLGPDFYASHPDPAREAQRLIARLQALGHNVTLAPAA

SEQ ID NO: 467489 - protein, 424 aa, unidentified
MKSKAYRAVDVNRVDITQALEQRTETVVHAGIDVGKETLYCSLRWGAKDFDRPWRVRNPFDLARCADLLSIVGQGRRLIVALEPTGTYGDALREALALAKLDVHRVSPKSASDYAEMFDGVPSQHDGKDAAVVAELAALGRSWPWPLPTPSEMEQELAYQVEWMDGQRRQQMLWCGRLEALLTRHWPEATRLLKLGSGTLLKCLTQCGGPQGLASLPDALERVQQWGGRWLSAEKARQLVDEARQTAGMRMGVWDEERMRRYASEIRKNQSETRAARRRLRELTRGHTAIEAMGEVVGVPTACVLWTELGDPSQYHCGAAYRKAMGLNLAERSSGKWQGKLKLSKRGSSTSRRWLYLAALRWLRQEPVRSWYARQKAQRRGEGKAAVIGVMRKLSMALHQVGGRGEKFDRQKLFDSITTMAASM

SEQ ID NO: 467490 - protein, 400 aa, unidentified
MLHDHPSVGPTAIRTQFGAIFVSLELSRSKWVLTSLSPGNGEKMSQYSLAAGDVGGLLARFADLKRKAKERTGSDYPIMTIHEAGLDGFWVHRVLQDEGIESHVVDAASIATSRRRRRAKTDKIDGEALLRALLAFKRGEPRVCAMVVAPSPEEEDRRRLCRERQTLLDERIVHTNRIKGLLFAQGISDYAPLRRDRRKRLEGLRTGDGRPLPVHLKTQISRELDRLELLIDQIRSVEAEQEAVLAAESKAAPEAGSGPEKAVSEAEPRNAVAMLLTVKGIGDHSAAILWSEGLSRQFSNRRQVAAYAGLAATPWRSGAVMHEQGLSKAGNPRLRTLMVQLAWLWLRHQPESALARWFNARGERGRKGSIVALARKLLIALWKYVTQGVVIEGAAMKAAT

SEQ ID NO: 467491 - protein, 355 aa, unidentified
MTSTKYIGMDVHKESISIAVMNASGKIVMECVIETKASMILQFFDGLRGDLQVTFEEGTSAAWLYDLLKPHVTKLVVCDPRKNASMREGNQSDKIDARRLAELLRLNHLNPVYHGEHGLRSLKELVRSYLTITKDLGRVMSRVKAIYRSWAIPCTGKQVYAPRHRAEWLGKIGEPGVRRRAEFYYQQLDALRTVRQQVRRELLVESKKHQAWKRLCQIPSIGPIRSAVLLGILQTPHRFRTKRQLWTYSGFGIETQSSADHRSVDGQLQRVKKQSSIRGLNRNCNHDLKNLFKGAAIVASSKPGPFQEFYTALLTKGIRPEMARLTLARKIATIVLIMWKRGACFDAQHLKPQTA

SEQ ID NO: 467492 - protein, 363 aa, unidentified
MVAVPNFLPKGADRKMKCIGLDVHTKWTVVAWVDPAGGESAAPYRLDNADLPGHLVELGAGSRIALETGSRSIFLSRQLKSLGLAVLVVDAARVQPYLAARRTAKTDKNDARSLAQLLAAGELEALAVYVPDAYTEELRNLTRTRLHCSQQATATSNTLRSLVRSLGEDFPGTLAGRATQRWLDAWEPTLSERNRLVVQELRQAWAEHQTRLRRLDRELKAIARQDARVRLLQTLPGVAELTAVTVVAEIGDIARFPAAKHLRSYAKLAPSVQQSGERCHTGPLVKRGNRHLSRIMVLLAQHFSWMRGLQDTLLKRRYWRCRDKHGSNSAKVALARDLCDIIYAMLREGTEFDADRLPRIAIS

SEQ ID NO: 467493 - protein, 343 aa, unidentified
MDHFAGLDVSVKDTSVCIVDDAGRIIREVKVASEPDALLAVLTNRIYHFKRIGLEAGPLSQWLFSALAEADLPVICVETRHMRAVLKAQINKTDRNDARGIAQMMRVGLYRPVHVKTLRSQKLRMLLTHRKLLQSKAIAVDNDLRGTLRNFGLKVGMVGTAKFEARIRELVENLPDLAVLVEPLLVVRRVLREQIGILHRRLLAIVRDDEVCRRLMTVPGVGPVVALTYRTTVDVPARFRKSKSVGAVFGLTCSRDQSGERDRPGAISRCGDEMMRAMLYEAAQSMLGRSSRWSWLKAWATQIAKRRGMKRAIVALARRLAVIMHRIWVDGTEFRWTREAAAT

SEQ ID NO: 467494 - protein, 392 aa, unidentified
MIYAGVDIAKTDHVIGAVDETGAEVAKPMGFKNAEAGFERCVAWLESVAESEDDVFVGMEATGHYWMACFAHLAAAGYRVCVVNPMQVHAMRKLKGLAGVKNDRVDSWLIAETLRQGDYDETRLATDEVQALKQLTRYRQGLKQELATVKTQAVCVLDAYFPEYAGLFSDMFGAASLKVLAECPTPAEVDRRRASTIARLLSEGSRGRLGADKAARLKAAAKSSVGIRLGEDAASFQIKTMVSQVEFLNQTIAKVEREVAALLAGIEPNITTIPGVSTATGAQIVAEIGDVRRFASAAAIVKYAGLNPGVNESGKFSAEGVPIAKHGSPHLRRALWLAANRARQYDPRLREFYEKKRREGKPHRVAVTAVARKLCHIVYAVMRDGEPYDPLK

SEQ ID NO: 467495 - protein, 367 aa, unidentified
MIGQVTVGIDVGCHKHRVAIVTPDGRVAEEFDMAPGKEGFEHFFARLDFYHKAFDMPVVVAMEGNGGYARPLDRCVQLQGYTLLNVNNLKLCRFKEIFPSPAKTDAIDARKIALLARAQVVLSPAKEVLQEVREVPQEHQVLKRLTRRRRQLVEEKVSISNRMQADLQAVSPGLADIVEYKDGVAFLNFLTHCSKLEDLSKLDKRELLSIRGIGEVFAQHVIKWQEEAYFSDEVAYVGPMIIEDARRIIELKKSIKEIEREIENIAEGSPLAEAIGSIPGFGVVCTAELVAEIGTMERFSSERSLALYLGMAPLDKSSGKYQGTKTATQVNKRGKAAMMTAVAHHIRKVDESKRYYQKKRGEGKSHN

SEQ ID NO: 467496 - protein, 363 aa, unidentified
MNSVYHTELSSHEETRCQFNGGRCAIKMGIDVHQDFHVVVEQVGGTNPKPPQRFGKQAFLHWAAKLKQSGAEVHAVYEACGFGFTLQRQLAGLGIHCHVVCPQKLDERNKRVKTDGLDAKALCLKLDRFVQGNRDALALVRVPTEEEERSRAIHRQREQLVGARKRLEAQGRSLMVNHGLEPVQNWWKPRTFAALPVPQWMRELLLNSQPILLALQEKIAALTVQLQSAAAPNQPRGLGKMTSVVIDREIGDWYRFNNRRQIASYTGLCPGEYSSGNTRLQSCVTKHGNPRLRAALVELAWRLVRFQPNYKPVVKWRQILAKGALATGAARKKVIVAVARQLAVDLWRVRTGRCKPEALGLVI

SEQ ID NO: 467497 - protein, 366 aa, unidentified
MKKNSTIAVGRKQIFKQARLTIGLDLGDRSSHYCMLDEAGNVILERSLPTTSNGIRQAFGRIPRCRIALETGTHSPWVSRQLSQMGHEVIVAHARNVRLIGESSRKDDRIDARTLARLARIDPGLLGPVRHRSAQAQIHLTVIRARAALVSTRTALVNAARGLTKSYGQRLKKCGTEQMNRDSSKGLSQELREALDPLLREIESLNERIAEYNGRIEQIAKEVHPEVARLKQVKGVGTLIALTYVLTLDDPQRFRRSRDAGCFLGLRPGRRNSGQSEPQLHISKEGDRYLRTLMVQGAHYILGPFGQDSDLRRWGLKLAERGGKNAKKRAVVAVARKLAVLLHKLWVSGEVYEPLRNSHKVVRAVA

SEQ ID NO: 467498 - protein, 316 aa, unidentified
MVGIDVASLHVDVAAIGAELPAQLVRVSNDADGHSALADGLVRLAPGLVLMEATGGYEAALACALQAAGLRVAVINPRMARDFARAMQRFAKTDRIDAATLAELAGVLARRPDAERFIRPVSEPEQQDLAALVTRRRQLVAMQLSERQRLRLARPVARSSIEAMIEAIKHQLDDVEAEMARHVEQHHVALSKVLQGVAGIGKVAAATLIAELPELGRLNRRQICALVGVAPYANDSGSSRGRRRIAGGRFEVRRTLYMATLSAVRYNPPIRDFYERLVAAGKLKKVALIACMRKLITHLNAIARDHSNTHDRLAIA

SEQ ID NO: 467499 - protein, 279 aa, unidentified
MSKITLYVGLDYHQRAVQVCVMNGRGEILVNTVARNVAEEVVAAAAAGARVEAGIEACTGAANLADELLKLGWHVRLAHPGYVQRLKQSPDKHDWGDARLLADLIRVNYLPTVWLAPVDLRDLRYVVRYRQQLVMQRRSAKQRVRAILRDQRLTGPGNPWTIAWREWLEQKAPLLPQSRWVLQHLLGQLDQLKKEISEVERHLQELTLGDPLVQRLLKLRGIGLVTAVTIRAEIGQADRFQSGKQLSRFCGVSPRNASSGERQADAGLIKPAIRNCGPP

SEQ ID NO: 467500 - protein, 398 aa, unidentified
MTRKNTLKSLPTDTEFRVVGLDLAKSDVSVAAIPVDDNTPSLVDRMTYADLLDWAGKISPTLFAMEPCNGYSLLCLQLENLGHEIKVISGWTVSMWINTHLSGQKTDLNDAIALARLAVSDAELTPIRHKSITEIRIQTVQAVRQQLMSQRSKSIVSFKALAQQWGIPCAAGHRNLKKLRESIEAKVDLITRPVANAMLFLLDAVKSLDRQIGQLNQTLQELVMSDERGRLLQSVLGVGTQISARVITVVGNVERFNSPRSLVAYVGVAPRNFITGHKNLTKKKHGNCPDLSHKGQGKISRRGDKLLRSLFIQGAACLYMQFCKDQIPECQLKRWILKQLAMQKPYGKLIVSLAAKLIRIVWAVLTYGEKFNIQKAGMTRSMWSEMALETPFNKEVPA

SEQ ID NO: 467501 - protein, 315 aa, unidentified
MTNRKKSKTIINVGVDVGKQFLDVCIYEKSLHWQEENNAQGIKCLLRRLAHYQVERLVMEATGRYEFNLAQAAYEKGIAVCIVKPLSVRRYAGAIDQLAKTDRIDAALIAEFAALVQPRATPQKSRNLIAIKDLIARRRQLMGLRTQELNRISIMGKAFEVSCKRIIRTLDAEIARMEKRLAGHVQDQAEWTDKHTLLKTAPGVGDTLIYTLLADLPELGALNNKEVAALVGVAPINRDSGKLRGKRRIRGGRASVRTVLYMATLSATQCNPVIKGFYKKLVAQGKHKKVAITACMRKFITMLNAMVRDECVWAY

SEQ ID NO: 467502 - protein, 369 aa, unidentified
MTSITQSTAPCHVPADAEDVLLGVDTHKDIHAAAVITVLGTGLDGRKFPATADGYRQLLDWARSFGVLRRAGVECTGSYGAALTRHLRAEGIEVTEVNQPDKAARRRHGKTDAIDAEAAARAVLTGRATAAAKTGDGPVEMLRLFKLAKGSAIKSRTQTINQLKSVLVSADSALRESLAGLSNPLLFKRCADIDTQHASGPAGAARYTLRLLARRIQHLTEEIDDLNKRIAEAVEASTPGLLEVRGVGPDSAAALLISAGDNPERLVSEASFAALCGTSPVEASSGKTQRRRLNRGGDRQANAALYRIVLSRLRWDERTRDYLQRRLAEGKTRREIIRCLKRYVAREIHRHLVPANPPADQTGPVTVAA

SEQ ID NO: 467503 - protein, 319 aa, unidentified
MDATLAASVAPCVGVDIAKGHFDAKFLPDDRLQTFDNNPQGIQAMLDLLQCRQGCLVVVEATGHYERPLVAELVNAGHRVAVVNPCRVRHFARAEGQLAKTDRIDAHLLALFGQRMQPRETPKTSEKQQELQQLVVRRRQVISLRTAESNRLQQTTSKLAAKGIRKLLALLDRQLTELDAHIARLVQSDDEWKAKDRIIQSVPGVGPVTSSSLLAELPELGKLNRQQIAALAGLAPFNHDSGKLKGKRTIAAGRRTVRCALYMAALSARRSNPVFRRFSQRLERSGKRFKVILTACMRKLLVTLNSMLRNNTAWSESPR

SEQ ID NO: 467504 - protein, 392 aa, unidentified
MSKVTMIGCDLHDRSMLLKVAVGVGKPATKSFSTSDNAAMIAWVKAFSERNDASRIVFAYEASGQGFGLYDVLREAGIECHVLAPTHLPHTAHRRKNKTDEKDAQMILDEVRAHVLAGRKLPAVWVPHPQTRDDREAVRMRLQLAEQRTRIKNQIRSLAKRYRMTFPGWFTRSGNWSRRSVQWLRDVAATEIGELGEGVRVSLASLVDLYEELGRQLKALDQAIARLAKSERYARPFRKLKLMGGVGTLTAMVFLTEMGDLNRFANRRQVGAYLGLAPAAFESGDRNDRKGHITRQGPAQLRHVLCQAAWAALRCSARWRGIYERVKRGSPKRSKVAIVAVMRQLGIAMWQTARSQEMDELIDLIDAQKAFARAQQKGAAPPTIAVATAWAG

SEQ ID NO: 467505 - protein, 370 aa, unidentified
MAEPITLVVGLDAHTETLAVAHASPDRSSDVVYVGQIGTREADLEKLLRRLHSHASRLVVAYEAGPCRYGLYRRLTEKGVSCLVVAPSLIPKKPGERVKTDRRDAVQLARLLRSGALTSVYVRTVEDEAVRDLSRAREASIGVLKDAKLRLKSFLLRHGRHDSGRATWNEAHLRYLAKVVCPTPAQQIVFQESLRAVSEQTDCVRRFEDELVEIAATWRPRPIVDAFQSMRGVQSHTAVTIAAEPGDLTRFDNPRQLAAFVGLIPSEYSSGESRRLGPITKAGNGHARRALVEAAWAYRYPAKVSAHLQQRIERCPKPIQEISWKAQVRLCKRYRRMVARGKNPNIVVTAIAREILAFLWAIAREVPIGH

SEQ ID NO: 467506 - protein, 407 aa, unidentified
MVVTIGIDPHKGSHTAVALDEHEATLGQLRVRSGPDQVARLCEWAKAWPGRTWAVENASGLGYLLSQQLLGAGERVLDVPPKLAARARLLDNGESNKNDPNDARSVAVAAMRAKRLSEVAREDHAAVMRLWARRRKELTSSRTRVANRLHAVILELVPGGYAGEIYASKVARLLEALEPVGAVAAARKEIAEERLDDLRRLDAQLKELRERLAAVVAASRTTTTKVFGVGPVVAAITVGLTRDVSRFADRDHFAAYNGSAPVEVSSGPKKIYRLSMRGSRQLNHALHMAAITQVRFRHSEGRAYYDKKVTEGKTPKEALRALKRRISDALFAAMVADARRDQQESRTSGGPGGQTGNGSIACAAGSHPAGPALRPSHSRANPKARPSKTAAPSLVRREAQKKIRKAS

SEQ ID NO: 467507 - protein, 341 aa, unidentified
MQIHSIGIDLGKTTFHLVALGEAGKVLVKKKFTQKQLLAYTANVQTSLIGLEACSGAHFLGRALRKQGHDVRLIAAQFVKPFVKSNKNDFVDAEAIAEAVERKNMRFVPIKTDDQLDLQAIHRIRDRLVSRRTAVINQIRAFLLERGLVFAQKPAKLKAAMADILENAEADLTPLMRNLIDTLWGEWKTVEQQIEELNDELERISAADAGCTRLRQIPGIGPVVATAIVAAIGNGAAFRKGREFAAWLGIVPRQYSTGGKAKLLNISKRGNVYLRKILIHGARAAVLRIKRDRVPIGAWLDRLDARAHKNVVVVAMANKLARIAWAVLSSGNEYRPIAVPA

SEQ ID NO: 467508 - protein, 338 aa, unidentified
MKKLKQTVGIDVAQNELVCAFGYLLEDLNIGFKSSMTFKNSLIGFKKLKKWADKLADDENPFFVLEATGVYHQKLANWLYANSCKISIVLPNKISNYCKTLEIKTVTDKTASQAITRFGLERKLEKWAPAKPIFRKMKQLTRERDQIIAEKTTIKNQIHAEKTEAFPNPNSLKRLKARKKLLDSQELAVKNDIEQLVEQDIEIRERISNMTSIPGVGILTAAIVLGETNGFELIRNKRQLTSYAGLDVQEKLSGTSVKGKPRISKKGNRHLRKAVHFPALSAKRFCSRYNGSFERLVAIHGIKMKALVAIQRKLLELMYTLYKNKTNFDPDFGSSLDQ

SEQ ID NO: 467509 - protein, 344 aa, unidentified
MKDVSIIGVDLAKQVFQLHGATAEGEVVFRKKLSRKQFLTFMQSQSGCIIAMEACATAHHWARTLSAIGHEVRLIAPKFVKPYVKSQKNDMADAEAIAEAGSRPTMRFVEVKTPEQQGLGMIFRLRDLLVGQRTQMINALRGHLAEFGLVAGKGRENVDKLRTVLEPGAGSDDLPAVVRHMAQLCFDQIDDLSQRITELDTQIAAASKRSRFSARLQKMPGIGPITAMALAAFAPPMESFRQGRDFSAWLGLVPRQHSSGGKQRLGRTSKSGQRDIRRLLIIGAMAVISGTKIRPPAESSWLGRMLARKPRMLAAIALANKMARMLWAMITKNEEFRGGPLMAN

SEQ ID NO: 467510 - protein, 338 aa, unidentified
MRYVGLDVHVRQSTFCVLDHRGRKLMTRTVKGSVPSVVAELAMLKRPFAVCFEASTGYGFLFERLRTVARRIVVAHPGQLRLIFRSKRKNDRVDAEKLAKLLFLDEVPTVYVPAHATQAWRRLIEHRRTLMAERTRAKNGLRALLRSEGIEPPKGLWTHRGLAWLEAVALSSPLDALQRDLLCERVMSLTQMLARVEDALNRTAATQPGVPLLMTIPGVGIRTAEAVLAHIDDPHRFRRVKAIGRYFGVVPSQDASAQSNRLGHITREGPSVVRHFAVEAAWQSIRRSPRIRAFYDRVRRGDPQRTKIAVVATAHSLLRTMLAMLRTGEEWRYTTDPA

SEQ ID NO: 467511 - protein, 401 aa, unidentified
MYNAVGIDVSKGKSTVAVLQPAGVIIRKPFNVNHTSSELDELAKYIGSLEGETRVVLECTGRYHEPVVKTLSEAGLFVSAVNPHLIKNFGNNSIRKVKSDPADAKKIARYTLDNWIELRQYSSMDNTRTQLKTLNSQFSFFMKQKVAAKANLIALLDNTYPGVNKLFDSPVRDDGSEKWVDYAYSFWHVDCVRKIGLKTFTERYQAFCKKHHYNFQPAKPAELFLASKDLIAVFPKEASYKLLIQQSIQQLNLASSHVEELRSKMNELASTLPEYATVMGMYGVGKTFGPQLIAEIGDISNFSHREALTAFAGVDPGVDQSGTHNSKSNKASKCGSNRLRKTLFQIMSTLLQTAPEDDKVYQFLVKKRAEGKPYYVYMTAGANKFLRIYYGKVKELSLIHI

SEQ ID NO: 467512 - protein, 374 aa, unidentified
MSKIARIGIDTSKGSFQLHGVNEKDEVVLRRTVRRRQFLEFMAKLEPTVIGLEACGASHHWARELGRLGHRVMLIPPQAVKPYVAPGRKNDKNDAEAICEAMSRPRVRARLVPVKSVEQSASQMLMGVRDSLLKRRTQLCNTIRGHAAEFGLVAAKGLDKIEPLLVRIAGDEGLPALAREMFADLGQEHAELSKRIAQIDRKLAAFHRSNELSRRLMEIPIVGPVGAGLLITRIINPRGFRSGRLCAAWVGLTPKNHSTGGKQRLGGITRAGDESLRAVLVSGATAYIQQVRRGRIVPSPWLAALLERKPPKLAAVALANKTVRIAWKLMTSGGRYDPTHRVDREGPGASLYGGLRAEPLAPSPTAGHSHAVAA

SEQ ID NO: 467513 - protein, 380 aa, unidentified
MWEAVLEHCCGLDVHKKTVVASLLIGDLEKQPKEYLHTFATTTKGLLELRDWLEANSCTHVAVESTGIYWRPVFHILEDTVAILLVNANHMKQVPGRKTDLKDAQWIARLLRWGLLKPSLIPPKPIRELRDLCRYRKKLTEQASAEKNRIQKVLEDANIKLSSVASDTFGVSGRAMLESLLAGEMSPEETADLAKGKLRHKIPQLVEALEGQVNEHHRFLIRMHLEHLEYLQQAIAVLRQQIDEKIKPYEDKVELIKSTPGFDKTSAQDAFVEIGGDIECFPTERHLASWAGMCPGNNESAGKQKSGRRRKGNRWLSGIMVQAAHAATRTKSTYLKSFYHRVVAHRGKKRAIIAVGHKQVCIIYHELRDNKPYKELVSCN

SEQ ID NO: 467514 - protein, 350 aa, unidentified
MAVLKHVVGIDVAMDNFTVRFGVITDSQEKRFLATATFSNEARGFRKLLAWTHKQMVEPQAPVWFVMEATGVYFEYLAYFLVEHGGLVAVILPNKLKHFAQTLDNKSKTDRLDAGSICQFGLERNLTPWQPPSPQMKLLKELTREYDTVQEMATQVKNQLHAKQHTHKPLAETSKRLRAQLRLFQNQLKSIESQIRSVVDDDDDLRARIANITIAKGIGFMTVVRTVAETNGFALITNQKQIASYAGMDIVIKQSGKRQGKPALSKRGNKHLRRAVYMPALSACRYNRPLKALYLRLVRTKANKKVALLAVARKILCLIYTLWKKNVPYDPNYQHRNIRPVSMHPIVQPT

SEQ ID NO: 467515 - protein, 453 aa, unidentified
MAQGSGLTRGDRNRNQRIAALRAVVRRDRAVLAIDLGEDKQVAAVVDHEGRVLARKTVKAKAYQLGELLAWAAGKAAAAGFAGLVVACEPTGHRWKAVMGLADAAGHGFVCVQSLAVARAREGDDYTRDKTDHRDAYLIGKLVIRLDCYLPERADEVWARLRHLGARRFALVADVISCMQQVSDLLACAWPAALEVAARPLEATTWLAAMGAVVDRCNGNPARLRTMGYEKFVAAVRRELPRWGAKNIYHKIVKGLWEALADTGGVAAQRRGALERVHLLMGDWRSLLARLADAEERMSAVLDELGLRELVTSIDGLSAVGAAVILAETGELTRFASARSVVKHAGLNPSEHTSATLAGKTRISHRGRPALRAAAWRAVWGGMRHNRVLRARHAHLTGRDGNRLSDGQARAACAATLLRWLYAVVSRRQMWDPRIAAGVIPARRGAVTAPAAA

SEQ ID NO: 467516 - protein, 429 aa, unidentified
MTRISVGVDVSKNRSTVCIMDQDGKFIMRPFLVWHSTEELDFLADTLKRLNGEVRVIMESTSVYQYPIALQLKERGLFISIVNAYEMKQFANIDFRGGKTDKKDSRTIASYGISYWDKLVEWQIPKDTYFNLDLLNRTYMNAKKHRQIILQELQHYIDCAMPGMDKELHSLNLSTKKDFMLDFVEKFWHRDEIVNMTETEFTEVFTAWAKEKGYRPGKGKAAKIYAIAKSCIPYYPANPTVKTILQCIVDKLSGVNRTLVTIVTQMIEEAKKLPEYQIVREMPGVGDPLAARFFGSAGDIRRFKNSKALVAYAGIDSPPDESGDFSSTHRHITKKGSKVFRDTGYEIMMALRAQKRTWEKVRKNPEVYDYMLREEAEGKPRKVAKIAALNKFLRIIYARIKELYDNMALAERAKAKTKSKTKAKTKATA

SEQ ID NO: 467517 - protein, 344 aa, unidentified
MQVSVLGIDLGKNVCSIVGLDVSGAVVLRRRVKRETLISLARKLPPCIIAMEACCGAHHLGRLFAGQGHEVRLMSPEYVRPYIKAQKNDDRDAEGVAEAATRPTMRFVELKTQEQLDMQTLHRSRDRLIGERTALINQARAVLLERGIVVPQGKRRLAEYLNTLMGDPEAGGLSSRMRVLIADIQLQWQELDRRIEIFDAEFMAFTKENDDARRLVTIPGVGVTIASALTAAVGKAETFDHGRDLAAWLGLVPRQSTTGGKPTLLGISKRGNKYIRRLLIHGARSILRFIAERDTALGLWVKELLLRVHHNVAVVALANKLARIAWAVLRRGDRYTARGTPVSA

SEQ ID NO: 467518 - protein, 472 aa, unidentified
MAIPHSSRLNRKQRKELARRLQSVDPGLDIVHPNAAGIDVGNSVHYVAVRPDRDPDPVRRFECFTADLHRLADWLEHCGVTTVALQSTGVYWLPLYDILDARGLEVYLVNARHTKNLPGRKSDVQESQWLLKLHTYGLLRNSFYPSADIRVVRTYWRQRADHVCAVSTCIQRMQKALTQMNIQLANVISDLSGWTGMRIVRAILAGERDPQALAALSHPGIHASRATIAKSLEGTWRVDLLFVLQQEVTTYDAYLQRIAECDHALEQHLRNLADKVGDHGDAPLASPAAHRQAHSKRRRKADSHTPQFDLGRELQRISGVDLTRIDGIDVSVAQTVISEVGLDMSRWPDAHHFASWLGLCPDNRITGGKVIRRGTRRVVNRAATALRIAATTLLRSQSYLGAQYRRFRSKLGAPKAITAMAHKLAVLVYRMLRWGHEYVDKGMQYYEDRHREQQVQLLKKRAAKLGLQVVAA

SEQ ID NO: 467519 - protein, 409 aa, unidentified
MERQLERCGGLDVHKETVAACVRVGGRTGQAEQHVQTFGTTVGELLVLRDWLAAHGVTHVAMESTGVYWKPVFYALESDFTCLLVNAAHIKQVPGRKTDVKDCVWIAQLLEHGLLRGSFVPPAPMRDLRDLTRYRKALIHDRTRVANRLHKALEEAGMKLATVASDILGVSGRAMLAALVQGTTDPAVLADLARGRLRGKLPALRQALASRFRPHHAFVIGQLLAHLDYLEEAITTLSAEIERVMAPLAEPLRRLDTIPGINQRTAEVILAEVGADMSVFPSARHLASWAALCPGHHESGGKHKSGKTRKGNRWLRTALIEAAAGASRAKNSALQARFRRVLRQRGPKKAVVAVAHALLRVVYHVLADGTVYREAGANSYDRHHSQRVTRRALQTLERQGYRVTLEPAA

SEQ ID NO: 467520 - protein, 343 aa, unidentified
MGEVSTIGLDIAKSVFQVHGVDDTGTVVMRKRINRSKVLQFFGDLSPCLVGLEACPSAHYWSRELQALGHRVKLMPPSYVKAYLKRSKNDANDAAAICEAVTRPSMRFVPIKTQEQQTGLMLHRTRQLLVRQRTMLSNAIRGHMAELGIISAKGRNGTAELLRIIRDVADDRIPPVARFCLDLLARQYLALNAEVSAVDKRIHAWHRSCQESRRLEEIPGIGPIVATALVAEIGDWGAFRSGRNLAAWIGLVPKQHSTGGKERLGSITKQGNRYLRWLLVTGAMAVIRYARQHGTKRPWLTRIMGRRPAKVAAVALANKIARMAWAIMVRGEMYKEPKLLLAA

SEQ ID NO: 467521 - protein, 347 aa, unidentified
MTLHGGLDWGSAGHAVCVVDQAGQIVARLEVRHDSAGLADLLLRLKRLGPPTELPIAIERPSGLIVDVLVEAGHPVIPIHPNVVKACRPRYRMAGGKSDPGDAFMLADILRTDGHRFRPLAAASDEIKALRALVRARDDLVAQRISLANQLRSLLETFWPGAALIFAAIDSPIALAFIDRYPTPDSAARLGERRLANFLASHGYCGRRTPALLLARLRAAPAGLAGEAEAEAKGEIARAFAGILERLLAEIARLSARIEHAVAELPDGRIVMSFPRAGRICAAQILAELGDCRERFLTEDQLAAEAGVCPVTHASGRSRGVVFRWACNQRLRQAITCFADNSRHASV

SEQ ID NO: 467522 - protein, 433 aa, unidentified
MSNYYHLPVVGIDIAANFSIVTALKPDGDIYQKNLRIEHTLCGFNKLLTFLQKIEEELGDSPKVFCESTGIYHLTLLHFLVNNQVDIRVINPLITNSNKNSNIRKVKNDKLDSLSIAKICKFDHVKTSSFTCEEFLHLKFLVREYYKVVDLKANLKKTFSNNIYIHYPGLQDAFADLTGKTPLMFITKYPTPQHLLDACENEVINMLVTSSKRGVKWATKKFKQLMDIAKSADVIGINSLLFQSKVNRFYESFTFYSHQLQSITKEIFEYLDGCSFANIFKYNLELLKTFKGIGDISAITLLVEIGNIDNFCKPQQLVAFFGVDPGINQSGNFSSDCNKMSKRGTKVGRRALYAIALASIRTNKNKVPINQVIYEYYHISLGKKKKKVKLVAVMNKLLRYIFSVLKNQKPYEIRNPKIHKRMFLESKPSLQSA

SEQ ID NO: 467523 - protein, 316 aa, unidentified
MVPSPLFVGIDVAKATLDIAVRPTAETWSVSNDATGIDALVLRLGALAPTLIVLEATGGYQGPLVAALVAAALPVVVVNPRHIRAFAQAVGILAKTDRIDARVIAHFAEAVKPAPRPLPDAETQELRALLVRRRQLVEMVSAERARLDTVPPSIQDAIQAHIAWLTTQIAGLDDALTRASQTHPVWQAKDDVLQSIPGVGPVLARTMLGQGPELGTLGPKPLAALIGVAPFNRDSGTLRGRRTVYGGRAEVRAVLYMGALVATRHNPVIKTFYERLLAAGKAKKVALTACMHKLLTIMNAMVRDLKPWQPQEVPSA

SEQ ID NO: 467524 - protein, 359 aa, unidentified
MTNDKYVGLDVHQASTSFAVVDGNGRTVAEGTIRTRADSIRDFINGLSGTVHVTFEEGTQAAWLYEIIKPLVAEVIVCDPRQNKVLAVGNKGDRIDANKLAQLLRGGLLKPVYHNNRDTKSLKQLAHNYGSILGDCTRVMNRIKAVYRGQGISCSGRDVYYKRNRDQWLAKLMESSLRTRVQFLFDELDGLKTLRRAAKNVFLREARRNEAFKILSKIPTLGAIRIGQIIAAVGTPHRFRTRRQFWTYCGFAVVTRSTDDYRFNESGPLIRTRPPQTRGLNQNFNRKLKHLFKSAALEGVRREPFKSFYQARVAAGIRPEMARLTLARKIANLTLTLWKNGDQFDEHRMSGNQPNNARS

SEQ ID NO: 467525 - protein, 396 aa, unidentified
MRLLVGDDWAQDHHDIEVMDEAGRVLARRRVPEGVAGIGQLHELISRFLPEQGTDAEVQVGIEPARGPWVAALVAAGYTVFPVNPLQASRYRSRHSVSGAKSDSGDAHVLADVVRTDAHQLRPAAGDSQQAEAVKVLARTHTTLIWQRAAMAQRLRAQLLEYFPAAVTAFGDLDAPDALELLGKAPDPARAAKLTRAQISAVLKRAGRYKIAERTGAILATLRSPQLAQAPALTAVIATLNDQVAVLQGQVEAHFGQHPDAEIYLSQPGLGAITGARVLGEFGDDPYRYACAKARRNYAGTSPITRASGKKKIVAARFVRNDRLIDALMIQAFAALRVSPGARTFYDDLRTRGIEHNDALRRLASILHGCLKARTCYDETTAWGHRENTGQSPVAA

SEQ ID NO: 467526 - protein, 360 aa, unidentified
MRIIGCDLHARQQTLAMLDTESGEVVNRTLLHEGQEVREFYSQLPRPVLVGIEATGPMQWFLGLLEELGIECQVGDAARIRAAEPRKQKHDRRDAELILKLLVEKRFPAIWRPSKEQLDLRALLLHRHHWVRLRTQVQNALQAIALANGLRRGPGLWSYDGQAKIAFLPLPPHASYRRSMLQALYRKMAEEIEQLTAQVAERARQRCGARLLLTHPGVGPVTALATEVFLGDPQRFADGKALASYVGMIPREYSSGERQRFGGLTKQGSPLLRFLWGEAGAHAARRDPELQRFYRRKLVQKGLGKARAAVARKLGIRLWIMLRDQIDYEEFCRRGKKHSGAVCAGMPETRFGANGHRPVD

SEQ ID NO: 467527 - protein, 367 aa, unidentified
MTLYIGLDVHGKETVYVAQDQSGKVTAQGKVATSAEGFCQLVKTLETPKGTKIGLETGTQAMWVSRLLSGLEMEPVMIDAREVRQKARRIGQKSDRRDAFEICDGMRRGIYTTIVYVPDARVLRLRQILSRRRHFVKICTRQINAAKWLLRSLGLGREAASLTSVGAWETLVGRPAVEGLRDHLAMHADLWRLAQEKVVLLEKQLREALKPFQETVSRLQTVPGVGIITAATYVAVLATPERFPDSSRLASYIGLVPSTYDTGNMQRHGHITKRGSGELRAMLCEAAQHAASKRHPLHPHWVRFCAKQGYKKTVIITAHRLARILFAMWRKGEDFDPSKLNVVAEQGVYRKKYYWRMKRPEEQGVVA

SEQ ID NO: 467528 - protein, 443 aa, unidentified
MKEKKSKAFPIIYPNAAGIDISSKEHYVAVNPDSTDNPIRAFGSFTEDLHAIANWLKECNVDTVAMEATGIYWISLFLVLEESGFDVVLVTAKHVKNVRGKKTDVSDADWIRQLHSCGLLSASFQPDIFTRKLRSYMRHRKNLVQMSATHINMMQKAFEQMNIKLQHVIADITGKSGQAIIKAIIDGERDPEKLYRYCDTRIRQDKKADIIKSLNGVWKEEHVFELEQSYSLFNFYHEKIKECDKKIEEHLREKTGVDTFEEVKPKAKSNKNNLNFNAKDLLQELTGTDLSEIFGITESNAIEIISEVGLDMGKWPTVKHFTSWLNLAPNNKISGGKILSSRIPKKKNQAGQIFKMAAYAVQRSKHWLASFYHRIKAKKGAPKAIVATARKIAAIFYKLVKEKIRFNPIPIEQYMNGFKEQQIKKIQRQAQKLGLQVVMNVVT

SEQ ID NO: 467529 - protein, 371 aa, unidentified
MGKHRLAFVAFDSAKNKHAVAIADSGRGAEVRYLGEIDNSPDAVRKLVAKLTRQYERLHFCYEAGPTGYGLHRQLTELGHVCDVVAPTMIPKRSGDRVKTNRRDSVALVKLLRAGELRAIWVPDRVHEAVRDLTRARATAMVDLKTKRQQLLSFLLRHGRGFPDGRNWTKTYERWLAKQTFAHPAQQIVFQDQLEAITTAQARLAALEQQLREIVPTWTMAPVVAAYQALRGVSFLVAITFVAEVGDVRRFATPQQLMAFLGLVPSERTTGDTIRRGSITKTGNHRARRVLIEGAWTYRFSARVSETLRTRLKDLPSSVRAIAWKAQVRLCARYRRLIARGKKTPVVTTAIARELSAFLWAIGQQVAPQTR

SEQ ID NO: 467530 - protein, 350 aa, unidentified
MKQVLKQVCGIDVSQKELVVAFGQMYDDLSTKLLWHKTFVNNQKGFESLIQHVKKLTDDTTGTGYVMEATGVYHEKLAHYLYLNDQLVSIISPNKISNYARTLDVKTVTDKTASEAITLFGLERKLDSWNPPDPLFKQMRQLVRERDQIVQSRTVAKNQLHAEMAEVAPLKNTVSRIKKQIVLFDKQIAEVVSEINALISSKETIKADLELLASIPGVGLLTAATVLAETNGFDLIRNKKQLTSYAGLDVKEKQSGTSVKGKPRISQKGNKFLRKSLHMPALAAIRHDDRFKAIFGRLVSRHGIKMKAAVAVQRKLLELMYAVYKKQEKYDKDYLQKQNAEVQEVLNEKN

SEQ ID NO: 467531 - protein, 441 aa, unidentified
MAAKIRASLSFILYLYSKGGEITMNYDVLSTLFVGIDVSSLTNTVCAIDFQNNKLLDFDTKNNRIGAEYIAEAIVNCLVSNNLEYVVIALEATSFYSTHIANFLSTNKKLLPFKPLVYQLIPKTTANYKKTFVDIDKTDHLDAYVIADFARCGKISSSPWRGSQFLALQRLTRHRFHLVQTLASEKNWMLSNIYLKFSELAVNNRDKPFSDIYGATSCAALTEFYSLDEIVYKPIDELTQFVMKKSKNRFKDPVKVATLLKQAANNSYRLDKMAYEPLNIAISSSFNVIKALENEIETVDKAIEKTVKGLNPIEYQSLISVKGIGPVISSGIISEIGTIASFPSHDSLAKFAGLTWRKRQSGNYSSDETEMTKTGNPYLRYYFIEAANSVKNHIPEFEEYYQKKYYEVTTHQHKRALALTARKLVRMIFALLSKNRIYSNY

SEQ ID NO: 467532 - protein, 399 aa, unidentified
MTASPRVVIGADTHLDSHHLAVITDTGKPLADTEFPTSQTGYDDAVRWAQNFGTIVIAGVEGTSSYGAGLTWVLQAAGIEVAEVSRPDRAARRCQGKSDPLDAYTAARAALAGHGVAVPKDASTGALRALLSARRSAVKAHTAATNQIHALLVTAPAELRDRYRRHNSNALVKALARCRPATHNDATTVAVLTAAKALAQRAEFLAHQKQDLTTHLDILVRQINPSLRSAYGVGADTAAQLLVTAGTNPHLLRNEASFAALCGAAPVPASSGKITRHRLSRGGDRAANNALYRIALVRMSAHPQTRDYVQRQVANGRSKKEILRLLKRAVAREMFRLLTRPAPIDDYGDLRPARQARNITLATVATHFGVPLITVSRLERGHQRNDTLANNYRQWLTAA

SEQ ID NO: 467533 - protein, 410 aa, unidentified
MEVLYPHCAGLDVHKDTVVACARHMVSGTITREIRTFRTTTKDLLALSEWLASQGCTHVAMEATGIYWKPVWHILSDGDVTLVLANAAHVKNVPGRKTDVNDATWLADLLAHGLIRGSFVPDAQTQELRDLLRTRKQFVRERSSHVQRLQKTLEDANIKLDGVISDIIGLSGRRMIEALIAGESDPEALAALAHRRIKAAPEALREALRGRVTDHHRFLLQLHLQHIDALDAALSAIDREVGIHVEPFHTEVLLLTTIPGVNDLSAYVIRAEIGGDMSRFPSVGHLISWSGFCPRNDESAGKRRSNRMRKGAPWLKTTLIQCAWAATRKNGSYLQAQFRRLRARRGAKKAIGAVAASILTAAYHMLKDGTLYHDLGPDHFDRRAKTVQTKRLLTHLERLGYAVQLTPLAA

SEQ ID NO: 467534 - protein, 467 aa, unidentified
MNALVAPVQAPVVPVIGIDLAVTASSELAVASGSAIESSARVSSTPRGLTNGIAKAAAGRSVAIVVESTAMAWFVAAVAAVRSGVSHTMYRVSGRKAAALREFYRSHTKTDRIDARVLARMPAVDDGLQVFSLPSPGQLALKRLVVTRHRLTTEATQVSNRLRSLLAWACPGLVSAAGGVNPGLAAVLGHWPNLRCLAAARTGTVARLADWGLERAAAVHQAAAEAVEFYQGYVDFADVAVELSLLLSQQGFLTAQIRTLEARIAELHAAQYPKDPLVSIPGVGPVVAGVVRAVVGDMSRFTSLASLRAYTGLVPREDSSGQARRRGRISKAGPSVLRWALYLAGDAARQADPALAELYRRLMVERGRTHTQAVCAVASHLVGRIWAVGRQGRDYTWRDLEGNEITKEAARMIAQSLRVDPQTRARLRSRAEGEPRAPRTRQPKAPQDATRPADQLTEEALGVAADA

SEQ ID NO: 467535 - protein, 413 aa, unidentified
MTITCGIDWAESHHDVALLDEAGKLVAKRRISDDAEGYRRLLEMLAEAGDTALDPIPVAVETARGLLISCLRTTGRKVYSINPMAVARYRERHRVARAKSDHADAVALANILRTDADAHRPLPADTELAQAIAVLARAQQDAVWNRGQLSNQLRSHLKQYFPAAVAAFQVRGVGLDSREARAVLAAGPDPSSAAKLTLARLRTLLRNSGRQRSIDTWAQRLRGVFAGEFLRQLPLVEAAMGRQTQALVGQLDAACRAADDLADAAAEAFAQHPDADILTSFPGIGPLTGARVLGEIGDDRARFRDARGLKSYAGSAPITIASGKSLVVHHRKVKNQRLAAAGYVWIFGALPSPQVKQHYDRRRAAGDKHAAAMRNLFNRFLGCLYHCLQTGQAFDPAKAFPAPEPQQSQPVAA

SEQ ID NO: 467536 - protein, 450 aa, unidentified
MDKKSKAIESLQLAVIHPRSAAIDVGSMMMMVAYTDKDGNQNLLEVDAFTASLQHLAATLHKAGVTHIAMEATGVYWIVVYEILEQQGFQVTLVNARHFKNVDAQKTDVKDCQWLHQLHASGLLRASHIADEVYRELRSYLHERNLLQKQKSDTLNRIHKLLTQMNIKVQHLISDIEGVSGMKLLCGIASGITDAKELLALIDVHKLKAGEEDLLKSLQGIYKKQYVTILKNTLRSHDFFKAQMRAYEKLIEEVLNKMLPEDGNGNKAVIKSKTSYTRKNQYRINLKEYLKHIIGVDVTRIDGIDEISALEIIAVTGLNMSKWPSAEHFASWLNLSPRPKISGGKIIGYEKRPTNNNATQAFRMAAQTMWQNKGSLGHLYRRLSAQKGSKKSNKAIARKLAVIFYHMVKNKTEYNKNKLQVNTERQRAKRISFLNKEARKYGYVLQNAVD

SEQ ID NO: 467537 - protein, 549 aa, unidentified
MASLLQEALPAQTLVVAIDPGKVCNRVLLASGERGLIGESVSLPTLREGLDELVRLIGASGAVGEPVIAIEATGSLHGPWTAELERRFPGRVRVLAPSETQAARAQLGSRRFKSDDRDCAALVWLARQGLGRSPDEPALGALTGAVRHRRQLVSELKVLRQRLHGQLNALCPGLSAPQGQGRTLDLLRPSGRAVLACAAAFAGRAPSVRSLVARAPGRLGRAYAEYWVQRWRACLPPPADAELRAERLRLDLTRLEALVGALATVDAQTAGLLAKTPGQVLTSLPGVAVVRAAAFAAHSLPSERFPTVEHLYSSTGLAPASYESGTISSPGGISRQGLAEHRDALMTIAWASRKRHPPSVSAHTSTARAASRRSRCGWRSHDTPALSVTPSFATRSPTTRRAIVSRAGAGGDGGCSSAARRRNLACRPPASAAPNGDNEKPAARRRPISLPIPRGPTRTTRRPAPRSPTGRRRSAPACPHPPLTHERKASRRSAEPSEQPDDLLTVRAFDQDVARPAAGSPLDQDANGLAAFEVCLADHASAVRLSARG

SEQ ID NO: 467538 - protein, 370 aa, unidentified
MENRSMFIGLDVHKETIDVSIAEGARHGEVRHYGVIASDLEPLDKVVRALRAPDRQLHFVYEAGPCGFGIYRHLTTHGEDCVVVSPSMIPKRSGDRVKTDRRDSQMLARLHRAGELRAIYIPDATDEAMRDLVRAREDAVGVGTQVKYRLKAFLLRQGRRYPGREGWTLPYRRWLTDLSFPSAAQHIALQEYRDAIAEAEQRIDRLTEQLRQLAPTWRWAPMVDALQALRGVSFITAVGVVAELGDLTRFRHPRELMAYLGLVPSEHSSGPTVRRGAITKAGNPHVRRLLAEAAWAYQGIPRIGRRHAYRQEALPKIVCDIAWKAQLRLTTRFRRLVARGKAKPKVATAIARELTGFIWAIAQEVSPASR

SEQ ID NO: 467539 - protein, 399 aa, unidentified
MNQDKLYVGIDVSSKNNVCYLMYSDGSKHSSFSVPNNRNGAKLIVDRVISVLLLQDIPQVVIGMEATSVYGDNLMRFLRESGSLGRFERSLHMLNPKQVKKFRDAYSDLPKNDHVDSYVIADHLRFGRINKEVYMDDYKYRALKMYTRARHQLVQELTREKQRLLNTVFISFSGLTQEKIFSDKFGATSTALIEEFSSLDELAYMSTDELVDFIRKKGKNHFDDPEEIAEAVQRAAKNSYRPPQVIADTAKQMLAISMNTIRLLQKQIKEYDKAIEKMLEAFPQTLTSIKGIGNIYAAGIIAEIGDINRFPSQAGLAKYAGLVWTQHQSSDFEAEDKRMIQGGNHHLKYYLCEAANALRRCDPEFKRFYALKYKEANKHNHKRALALTARKLVRLVIHC

SEQ ID NO: 467540 - protein, 341 aa, unidentified
MESQRHIGIDLHRNQFTCCVRLENGRNYLTDWRLEELPRFIKKLRPDDEIAVEVTGNTRLFRDAVAPHVARVVAVDPNQFKVISHSVKKTDRNDARNLALYLEKDLLPEVRMKDKTQAQLASLTQTRDTLVKLRTSLKNKVNNILSAHGINLEKEALSSEKKLREILAMKFDAMVSIELEVIIEEIRSLNQRVAKLEKTITEEGSKLEGHKNLTSIKGIGPLSGSILLSVIGDIDDFEDEGKLAAYFGIVPRISNSNETERSGRITKRGSKLGRTALVQCALIAQRYSPYLKRYYEKIKARRGTGKAIIALARKLLGIIYRTLKNNWVFADFPNFVLAEEV

SEQ ID NO: 467541 - protein, 368 aa, unidentified
MTRRCFGLDVHREFAQVAIWQDGVVHQAGQIAATPEGLRMFADSLAPTDEVAIEATCNTHAIAKLLEPRVARVVISNPQKTRAIAEARVKTDKVDAEVLAQLLAADFLPGVWLADDQTHALRRQVARRAHIVRQRTRLKNQIHSILHRNLVPRCPAADLFGHKGRRWLAEQLLPEDERQAVGALLRQLDFHGQELRIMDAELGRIGLASADVKRLMTIPGVDATVALSIVAAVGDFGRFASPDKLVSYLGLNPRARQSGGQPASHGRITKQGRAHARGMLVEAAWVAAKTPGPLRAFFERVRARRGMQIAVVATARKLACLCWQLIAKGARTMPSSAPHSPRRSSGRSSSGRVCRRGVARRARPQATR

SEQ ID NO: 467542 - protein, 457 aa, unidentified
MTRKKKLELDIINEDAAGIDVGSKSHFVAVGQALDDVKEFGVYAEDLVALCQWLQSFGIKTVAMESTGDYWQNLYVELIKHGLEVVLCNGKFTKHAKGKKTDVKDCRWIQKLHSLGLLTSSFLPDETTEVLRTYCRQRGNWIDLAASASKKMQKYLKFLNFRLDVVVKDVCGLTGLKIIDDICNGNLDPHSLAEHRHYNCRKPKEEIAKALHGNNREDYLFGLQQEYESYKFFQDKIRACDKEIEKLIHKHIRKDPKKSKLITSDKPYKRINKNAPEVKNFNQVAFQYFGGIDLMAIEGVSHATVMSIMSEVGIDGFMKFKSAKEFCSWLRLAPNNKISGGKVLSNRIPKGSNRLKIALRQAANAIGNLKETHMSDFFKRIAYRKGRQAAVSATARKLATIIWTMITKKVPYHPPKEYLFLDQKRKMNLLKRMKKNIAKFNIKPDEIGFNNSLILSA

SEQ ID NO: 467543 - protein, 318 aa, unidentified
MGPLMSIPKICAGIDIAKSSHDVCVRKGPERLSWSVATDQESLEKLARRLAELGVELVVLEATGGYELDCMIALQAGGLTVAKVNARHVREFARSAGQLAKTDRLDASILAVFGEKMRPRPSPLLDEKLMELRALRLRRRHLVDHRAAEKQRLKAPGNDTIVASIEEHIVFLGRQISAIEGRIEKLTRDSEAWSERARILRSMPGIGAVSVLAILADLPELGEANIKEIAALVGVAPLNRDSGAMRGRRSVWGGRAELRQTLYMAAETARRCNPRLKPFYERLRAAGKPHRVAIVAVMRKMLVILNAMVQEGREFMPA

SEQ ID NO: 467544 - protein, 343 aa, unidentified
MKQPMTVLGIDLAKRVLHLVGMNETGHVVFKQRLTREALLPFIARLSPVVIGMEACGGAHYWARQFRAHGHTVKLIAPQFVKPYVKSQKNDPADAEAICEAVTRPTMRFVPIKEIDQQDLQALHRARERVVKARTALVNEMRGLLAEYGIVLPQSVTKFRHTFTQTLEAERAKLTPLSTELFAQLYDEFGVLEKRLASYTDKIAAIGAAHPVCQRLMTIPGIGPLTATALVAAVSNATAFKHGRQFAAWIGLVPRQHSTGGKPRLRGMSKRGDVYLRKLLVHGARATLRWIGLKTDRRSTWLRGLIERRSKNKAAVALANKNARIVWVLLTTDQVYTPEQAAA

SEQ ID NO: 467545 - protein, 378 aa, unidentified
MKAILQDKDSATGPILHMAMELSNKKWKLGFSNGERMRSRNIDAGDWIALLDEITQAKARLHCEPSCRVVSCYEAGRDGFWIHRALVAEGIENHILDSASIEVSRRKKKVKTDQVDVVALLRLLMRYLSGEKAALHTIRIPSVAEEDQRRLNRERDRLIKERGAHSARLKSLLITHGIRLERLSTFPELVRTAKAAVTGYALPSDLKAELQREYQRYELANEQIKALERLQKERAEALDKPAMRNVTQLMSLKGVGWQSSWILCMEFFNWRDFKNAKQLGSCAGLTPTPHDSGDSQREQGISKAGNKRIRRLMVELSWLWLRYQPDSALSQWYEKRFGSGGKRMRRIGIVALARKLLIALWRYLEHGVLPEGAVLKAV

SEQ ID NO: 467546 - protein, 422 aa, unidentified
MLEEDPQSEEIIARVAALDIGKAELVCCVRVPHEGKPGRRLQEVATYSTMTRSLLAMSDHLRCLGVSRVVMEATSEYWKPVFYLLEAQGLAVWLVNARDVKHLPGRPKTDKLDAVWLCKVAERQMIRPSFVPPPEIRRLRDVSRYRIDLVGVRTAEKQRVEKLLEDAQIKLSVVASDIFGVSGREMLAALVGGQTNPKALAELARGRLRAKISQLEEAFTGHFTDHHALLLRKMLARIDALDADIAELDTAIEELVAPFAAAVERLDEIPGVGTTAARVIIAEIGMDMSRFPTAAHLASWARFAPGVKESAGRKKGKGTTGHGNRYLARALGEAAVAAGKTNTFLGERYRRLARRRGKKRAIVALGRSILVIVWHLLSDPQARFHDLGPDFYDNRTSPEHKKRNHIRQLEALGYKVTLEPTA

SEQ ID NO: 467547 - protein, 400 aa, unidentified
MISIGIDAAKGKSTICILKPYGEVVVPPRDISHTASELDSLIFLIKSLGEPVKAVMESTGTYHYPILHALVDADIFAAVENPLVIKKYISSNIRKGKTDKLDAIKLAQYGLEKWLILKRYEPQEVTYSELKLLGRQYTNYIGMRVAALNQFSDLLDQTMPGIDRLLKSNSANKAKCKACDFAEAFWHFDLITKRSEKSFIATYNAWAKKKGYRPSESKAKEIYALAKDGTPTLSSSMPSTKMLILESIRLLNTANLTLRTILSQMHLLASELPEYSIVSAMKGVGSQLSVLLIAEIGDVRRFHNGSALVAYAGLDAPPFQSGTFDGTKRHISKRGSSQLRKLCFEVMMALKLKPPKEDAAVYDFMLKKEAEGKPKMVAKVAAMNKFLRIYYARVLESYSA

SEQ ID NO: 467548 - protein, 410 aa, unidentified
MEVLHPRCCGLDVHKATVVACVRRVIDGKAVKESRTFATTTSSLFALSEWLTETKCTHVAMEATGVYWKPVWHILSDGDLELVLANAAHIKNVPGRKTDVKDAEWISDLLAHGLIRASFVPDTQTHEMRTFLRTRKQVVREKSSHIQRIQKTLEDANIKLDSVITDIMGLSGRKMIEALIAGEKDPAKLASLADHRVKASQGTLREALRGRVTRQHRFLLRLHLDQIDAFDEAIAKIDREVEASIAPFRTAVEQVSSVPGVKDLSARVIVSEIGTDMSRFASDAHLISWACLCPRNDESAGKRRSTRIRKGSPWLKITLVQCAWAATRTKDSYLNAQFHRIKARRGPKKAIMAVAASILTAIYHMLKDGTFYQDLGPNHFDPRTKERQKNRLIKRLADLGYVVELAPQVS

SEQ ID NO: 467549 - protein, 373 aa, unidentified
MNNTTVYVGMDVHKNSFSLCCYTVRDDACSHYVKIDPDYRLVLEYIESMREIYGDDSKFICGYEAGCLGYTLYHQMNDHGVECIILAPSTMAKSPVQKKKKTGRRDSEVIARCLAHHSYHKVHVPTSEEEQIKEFIRMRDDHKLALKKIKQQILAFCLRHGFIYNAGASHWTAAHLSWLRSLEPEGLYKETLSEYLLTYDKLTDTLERLDRRIEELADQDAYRESVRKLCCFLSIKTQTALAVIVKVGDFKQFEKAQQFASYIGLVPGKDSSGDGINRLPITKAGNTHVKRLLVEATQSYGRGSIGFKSKALKARQEGNPPEVIAYADKANERLRRRYYRMTLKCGKKVNVVKTSIARELACFMWGMMTEETA

SEQ ID NO: 467550 - protein, 352 aa, unidentified
MKLESLQEVILGVDTHLDVHVGVIISDTGRLLGTRSVSASAAGYLDLLCWASSFGVLTRAGVEGTGTYGAGLCRFLLDNGIAVLEVNRPDRAKRRQQGKSDPTDAESAARAVLSGIATAIPKQQSGACEAMRIISVARRSAVKAKTQTINQLRALLVRAPQDIREKLWRTKTGDCVKACAKVRNLGGSVLLQALTSTLRSLAKRWLTLAAELDEFDKQLELLTRTHAQQLRSRFGVGPHTAAILLSVAGDNPNRLKNEAALASLCGVNPLPASSGKTTRHRLNRGGSRAANNALWTIAMVRMRSDPRTRTYVARRTTEGLTPKEIHRCLKRYIARELFPLIIRDLGNLRGSI

SEQ ID NO: 467551 - protein, 386 aa, unidentified
MQKPNDLNQSRIVLKQDSTLIAVIEMSLSSWLVAGIVPGVERQPLKKLAVDESALLKLLNRWREEAEKAGRRIERITVAFEAGRDGFWLARWLRARGIEAHVIHASSVAVSREHRRAKTDRLDTELLKRAFLGWLRGERDHCKMVAIPTTKDEDAKRPNRERQSLVGEQTRIVNRMKAALIRLGIRGFNPKLKKAAGRLEDLRTPEGEPIPPNTLAELRRDMERRRLISDQIRQIEDARLERIEQAPGDGPHAMVRLLARVIGVGIETADMLVQEVLARNMRDRRAVARYAGLTGSPDESGAKRREKGLARSGNARVRRGMIQLAWRFLMFQKESALAQWFRARTESARGTRKTMIVALARKLLIALWRLVREGVVPDGVVLRPAQ

SEQ ID NO: 467552 - protein, 333 aa, unidentified
MGFEPGPSKEGSWMMAQNDLVVAGIDVAKDKVDVCIRSLSLGRTFPNTSQGRRQLIAWLRKHKIGKAAMEASGGYERDWARALREAGIEVRIVDPKRVRSFARSAGRLAKNDTIDAEMIAWFAETFGEAKGQAYDAEREKLAQIVMARQGLLDLQTQLQNRSEQSKVEPVQKVHARLLKKIALEVAKLEAAIVAMIKAMPHLNQLAEIIESVPGIGRITSAGLIAAMPELGHVPNKIAAALLGVAPYDDDSGRRRGERHIKGGRRKVRNIFYMACLGAATRHNPVLKAFYRRLIAKGKEPKVALVACMRKLIVILNIMIARREKWDARRYAVG

SEQ ID NO: 467553 - protein, 411 aa, unidentified
MRLFVGDDWAEDHHDVELMDEAGRVLARKRLPEGVAGIARLHALIGQQLGDDADDAEVVIGTGTDRGPWVAALVAAGYTVYGVNPLQASRYRERHGVSGAKSDTGDAHMLTDMVRTDSHQLRAVAGDSPDAGAVKVVARTHKTLIWERTRQVQRLRHQLREYFPAALAAFEDLDAPDALELLGKAPDPARAARLTRAQVSAALKRARRRDIPGKAAAILAALRSEQLGQPPAVTAAYAVTARSLIAVITTLNEQVKVLEEQVRAHFGRHPDAEIYLSQPGIGPVLGARVLGEFGDDPGRYASGKARKNYAATSPITRASGKKKVVAARFIRNDRLTDALMAQALSAISASPGARALYDAERDRGAEHNPALRKLANRLVGILHGCLKTRTPYDEATAWPQRENLPQSDLAA

SEQ ID NO: 467554 - protein, 324 aa, unidentified
MNDTVVGIDVSKKTLDTSYAQGQRKQARIFENSSDGWKQMLSWLKAKGSQPAHVGMEATGRYSLGAALMRHDAGHTVSIINPAQIRDFARSKLGRNKTDKADAALIREYTTLFRPQPWTPPSPAMRRLCELQTVRAGLVANRTEWKNRLGSGLGDSTAIQVAKAVIDALSSQLKVIDQAIAETIEQDGDLRGRRDLLLSVIGVGDTLAALLLAEMPEPGVLRHSAEMIAYAGLNPSHHRSGTSIDRPTRISKIGNATLRSALYMPALSAMRFNPVVAALAARVKSAGRLKPKQIVVAAMRKLLVLCFGVLKTGTPFDPAIAMPT

SEQ ID NO: 467555 - protein, 320 aa, unidentified
MSSHCKMESITPEKATYAGVDVSKDRLDYALPDQRSGHVPNTSAGHARLLALLREYPTARVICESTGGYERAMIAALLQAGVEVCLVQPGRVRAFAHAEGLLAKTDRIDAALLRRFGEAMQPRLVVPADPAAATLRELLEHRRALSDQLVAVQNRLELAGTTLRKLLGRQQSFLKKELASVEAMIEAHIDQDPDLRGKAERLQQMQGVGPVLAATLLAYVPELGQIESAQLSALLGVAPFARDSGTSSRPRHVRGGRAVVRHVLYMAAVTATRFNPVLSVFYKRLVAAGKPKMVCLVAVMRRMLGVLNRLIADPNFALVR

SEQ ID NO: 467556 - protein, 357 aa, unidentified
MEKRLKQSLGIDVSKLNLSLSLGFLNERLVKEFKSRPDVSNDIKGYKVLLKWLGASVDPEVELLVVLEATGVYHQGIAHYLHDKGYAVCVMQSGRVKRYAQSLDQRSKTDALDSRMLSMLGLERNIRPWHPPSEELQELKGLSRERSSLLNDRTVETNRQGAIASSVHSNVRALKRHKARLKLLNAQIAAVEEEMRSLIADNEELKRKLEYLTSIPGVSFVSAATVVGETLGFESIVNAKQLASYAGYDVVLRESGNFKGKTRISKKGNSHIRGVLHMPSMTCVRCNPTLKQFYNRLKPNKAKPLVALVAVQRKLLILMYTLWKNEQFYDAEFEIKKQQKHEALAARDNNLINQSVS

SEQ ID NO: 467557 - protein, 379 aa, unidentified
MKDIRHVGLDVDSAKIAVAVAEASGELRSLGAVPYTEEAVRRLVKRLGPASRLRMCYEAGPHGYALYWQLKRLGVHCDVVAPTLVPVRSGDRVKTNRRDAEKLARSYRSGDLTAVWVPDAAHEALRDLVRAREVSKKDQLRARHRLNKFLLRRGLRAAAGVKSWTVKHLAWVKTLRFEQAAQEVTFLDYLHEVEHAAERVARLEQAIEQVIAAAPAATRALVAGLQALRGIKQVSAATIVAEVGPLSRFARPKQLMGYSGLVSSERSTGATVRRGAITKTGNAHLRRIMGEAAWAYQYRPAMSPELRRRQLGLSEKVKEIAWKAQHRLWARYRRLTARGKLRQSVTTAVARELLGFVWSIGIQIEKEQSLQPARRRAAA

SEQ ID NO: 467558 - protein, 374 aa, unidentified
MERNGITWVGLDAHKKSIHVAMFVPGREGPLTWQEANEETAVRRLARRLTREAPGEVRSCYEAGPLGYALQRELEAQGVVCEVVAPSLIPIKPGERIKTDWRDAVKLAEMLRAGLLTEVQAPNEADEGLRDLCRGRDSVRQDLMRARHRMSKFLLRRGYRYRDTQRHWGVRHMKWLRPLTFEQASAQAIFDHYLLTIDHLDERQRQVDAHLEVFGGQEPYRQPVAWLRCFRGIDTVTAVSLVAELHDFRRFRSARALMAYLGLVPSEHSSGEQRHQGGITRAGNRHVRRLLVEAAWHHRHRPVLSQPLRRRREGQPAHVIALADRAQERLHGRFVRMTRRGIHYNKIVVAMARELVGYLWATLYPWETEAPPLA

SEQ ID NO: 467559 - protein, 382 aa, unidentified
MAKRGVARSSVLITEALAGNVVGSDPHKRTVTTTVPDGRGGVLGTEHHKVSGDGHRAMEAWVGSFGPVVRWGVEGAASWGRHTAMFLCTRGYDVRDVCPNRTHERGKARQQGKSDALDSERIARETLAHPLLPLAFKRSSAGAAGADEDHELLTLWHGARRSVLTSRQHLVNEAEFLLDALPEELRRRLPDTKAVRPRLAAAARLARRKSLDAATVVRLGLLRDHHQAVVALDGKERDVTRQLTVLVRASGSTLDQLCGLSTRSVAELLVEIGDPRRFTEGGFARFNGTAPLPASTAEGPGEPVRHRWNPAGNRRVNAVLHRMAVTQLRCEPRAQAIFADARRRGHSKKEARRVLKRHLSDVIYRRMIRDHAALEECATGAA

SEQ ID NO: 467560 - protein, 381 aa, unidentified
MRLRARIGDCRVQANQEEQGGEEVEMAVYVGIDVHKHYCQAALMDDKGHVVKELRFDNTSQGTSSLVTVARSIDSQVEAVVEPSANFWVRIYDKLQDEGVDVKLSNPLRTKAIAEARIKTDRIDAKTLAYLLRGDLVAESYVPTRKNRERRALIRHRASLIRMRVEIKNRIHALLDKHELTHTYTDLFGKQGLEWLRNLQLPTPDQEILQSSLHVAETLTEQIRLMDIQIAKDATSEEKSKLLMTMPGVDYYAAMVLLSEIGDVHRFSSDEKLVSWVGLAPQTHQSGDSNWTGHITRKGSKRARWILGQCAQSARQHDPRMREFYERIERKHGPQKAVVAVARKMLAIMYVMLIRNEPYRGENPELTERKHKRLDTLVNSA

SEQ ID NO: 467561 - protein, 428 aa, unidentified
MTVKDCTSVKEFWQLKKEIRGSKDHLIVGIDVAKDEHKAFFGTANGKTLLKRLTFKNDIKGFDKLLARVKEMKVKHSLNELVLGVEPTANYHKPLGDFLIKCSHMVVLVSGVSVKRNRELLDGRWDKNDTKDSANVADLISQGKCLYYEYAPLVLKDLRGLLSLKRRLKKQEHGLRIRIRNSLLAQYFPELDKYYSKWEPEVLSTVRWCLNPSVIAGLEYDQFVSLVCPGRKNIRQQDRLEWIWKKAVDSIGCDAGEAAEFEAKVMVEELGHIRGIIKETDAKIKDICVRFPEYNYLLTIPGFGPDVSSKVLAAIGDPFRFNSGKQVLKMAGMDLNANRSGKSSDTAVPVISKKGSAHLRYAIYQAAFIASVRNKYFIRYYTNTLRGREREKGIKTKMRVKLAAKMLVIAWTLMKQKEPFDPGYLKID

SEQ ID NO: 467562 - protein, 422 aa, unidentified
MSYCPVAGIDVSKRFSDMCILSPDNKIFAQEKIYHDETSINRANALLQKAERLFFSKPVIVMESTSHYHLILFQFFSEHGYDVIVVNPLQSNSMKDFSIRKRKTDRVDAFKLAMMYRTKTLRPSQIPQTATRALRQLCRHRAELLNDVSSYKNRLTALLDQTFPGYDKVFSDVGGVTSCAVLVRFPTPTILLVEEESELVEVIAAASKSGYSFAKKKAGLLISAAQKAQTLGIHSCADETLIVCTIQMLRTLSESVLQIEAAIDHLLAQIKEMRNNVSLLQSIPGIGSHSAALLLGEIGDISLFKKPKQLAAYFGLDPTERQSGSFRGTKNKLSKRGSPYARAALHMGVVNSICKRGKDSAANPVLLSYYEKKCKNKPAKVAQAASMHKLVFIIFAVLRDQKPFELKTPEQHAVEQGFVKAA

SEQ ID NO: 467563 - protein, 339 aa, unidentified
MAILFVGIDLAKNVFAIHGVDEHGKAVLVRPSVQRARLHQLVSALPPCTIGMEACSGAHHWARLFAQHGHAVRLMAPKFVTPYRMGGKRGKNDAADAQAICEAVQRPNMRFVPVKSLDEQARLCIHRVRQGFVEQRTATINRLRGLLSEFGIVLAQKAATVRREAAAHLEDLPGWANTAVGDCLSEVHRLDERLAEYDRHISQIAAEDERSSRLMRLQGVGCTTASALVSTIGDARDFKNGRQLAAWLGLVPGQYSSGGKTRLGSITKAGDGYLRTLLVLGAKSVLAAARNKHDRLSRWALALEVRRGYWKAVIAIAAKNARMAWAVLAKGEEFKLIEA

SEQ ID NO: 467564 - protein, 413 aa, unidentified
MRLFAGDDWAEDHHDVELMDADGRRLAKARLPEGVAGIARLHAMIGEQLGEDADEEDAGQVAIGIETDRGPWVAALIAAGYTVFAINPLQASRYRERHGVSGAKSDAADAHVLADMVRTDSHQLRPVAGDSAQAAAVKVVTRTHKTLIWERTRCTQRLRHALRDYFPAALEAFEDLDAADTLELLGRAPDPASAAKLTTAQISAALKRARRRDIATKAERIQAVLRAAHLGQPDIVAAAYAASVRALIAVLATLNEQVKTLQGQVEAYFGQHPDAEIIASQPGLGPVLGARVLAESGDDPGRYISAKARKNYAGTSPITRASGKKKTVMARYVHNDRLIDALMSQAFTALRTSPGARAYYDHQRARGAGHNPALRQLANRLTGILHGCLKTRTLYDEATAWPHYAATPEKTAA

SEQ ID NO: 467565 - protein, 390 aa, unidentified
MIYVGIDVAKDKHDCCILDAEGRKLYPVFTISNDKVGFDELFSRIEEVTSDKTEIKVGLEATGHYSNNLLASLVDKGFPTVVINPLHTNLYRKGLSLRKTKTDKVDASSIAMMLMTDRTLKPYSETSYHNEELKSLTRYRFDKVHERSKLKASLARLVNILFPELEKLVPTLHQNSVYTLLEELPGANYIAGCHLTHLKKILEDSSRGHYSRDKAIEIRNAAIDSIGTPMGAKSMELRHTIHLIWMLSKEIEEIEASIKSIMDETQSPIMTIPGISYRMGAMILAEVGDFARFDNADKILAYAGLSPSTYQSGQLDSSHSHMEKRGSRYLRYALFNATKFVCKWDESFGIYLGRKISEGKHYNVAVSHAAKKLIRTIYRMELTGQAYSPS

SEQ ID NO: 467566 - protein, 431 aa, unidentified
MNKGRIPLANTFSIGGFSMTLTCVGIDVAKGKSTISALGWGDVVLIKPYDVPHTASALCELAGSLRQLPGEVRVVMEHTGRYWFPVAQVFYEAGLFVCAVNPKLIKDFGDNKLRSIKNDKADSKKLSRYGLKYWTDLVPYIPTEVTRQKLLEFSRQLDASNKLLTGLKNNLQAIVDMTFPGVRKLLKSPARADGHIKWVDFVCTFYHCNYVRELGEARFMERYRNWCKRHGYSFVSRGAGKIYAIAHNQVTTLPCDADTKLLISEAARQLTSVSAAAETWRAKINALASILPEYDCVMSMYGCGKTTGPQLMAEIGDPVRFTGKKNLVNFAGIAPGDNQSGTYRQKSVSASKKGSSHLRKTLFLVMSALLQKSPLDEPVYQFLDRKRAEGKPYYVYMTAGANKFLRIYFSKVRDHLAMLDAASSNSVLANP

SEQ ID NO: 467567 - protein, 350 aa, unidentified
MTMVGGLDVHRQQITFDYVDSDGLVRWGQIRPATRKTLRAWLAEHCPDGAGEFALEGCTGWRYVSEELAAAGVGVHLGDPAEIAALRGPKKRAKTDRADARLLRTLLLEGRFPESWIPPAHVVEMRTLGRLYYRLMDERRAWQQRIHAQLFHQGCPPVATLLSAAGRDTLGRAELSVAGRQYVETALRRIDELTDQIDPLRTQLVNFAQHQTGCRALQRHYGIGWLCAVIIWAEVGDVRRFRSSDQPVRFAGLDVTVYSSDAKRSPGHLSRQGSPELRWAAFEAAKSAARRGSPDYGYYHELAAKHDHKNGKNPTLAVERKIMRRCYHTLRALGDAALAVPSPQGQEVAA

SEQ ID NO: 467568 - protein, 463 aa, unidentified
MACRASHRATCTDATGEIQFSGRRFTTTPKDLERLWDSLPTTDDVVVIMEPTRNAWVPLAAWFQRRGAKVILVPPEQSADLREYYSKHTKNDRLDSRVLARLPLLHPEGLRDLSDAGPANALRRAVRRRSSLVERRTATFYRLDALLELLGPAWADALGTGSYSKAALAVLEKTGADPHALRRLGRKRLAALLIRHSRGQWREEHAERIFNAAQQTIELWPDGALDFAELAEDIAGEAHMATHLNAQIATLDDRIAVLYDEADPGQIIASGPGLGVITAAGILGRLGDPNRFTSLAGIRAFTGLVPRLSQSGLTGRDGPPTRQGDPGLRETLFKAADIARHADPALAARYHDLVVGKGRHHNSALCTLAATLVTRLAACWRNGTLYELRDTDGREITEAEGRQICATRYKINKDERAKVQVRRRSQRLKYPTTSRREKESPSAPATGPSGTTLRTAPRSPRTA

SEQ ID NO: 467569 - protein, 401 aa, unidentified
MDPHLCVGIDVGYRAHRVGIAHPDGSILEEFDISHSDAGFQEFFRRVEARRCELSLPVAVAMEGYNGYARPLDRLVREKGYRLFNVNNLKLARFKEVFPGAAKTDPIDTRKILELFRLKDQLPLAKDAIQEVVGAPAVNEKLKRLSRRRRHLVTEKMRVLNRMQADLQAVCPELLASTNDANNLWFLRLLIFRDDLRQLARLRRSTIFQIPGVGQKYARLIRDWQAKAQFSAEVEYVGPMIIQDARRILELRAQIHALDEAMADLAEQSEIARRLSTIPGFGKTSIAELAGEIGALERFASEASLALYLGMCPLTRQSGQMCTARTPRQVNTRCKAAMMTTIARHIGCVPQSRAYYDRKRAESKTHNQAIRSLGRHLVRVIWAMLRDGRDYEIREDIHPTP

SEQ ID NO: 467570 - protein, 342 aa, unidentified
MQVTTIGLDIAKNVFQVHGIDAAEKVVVRKQLRRSQMLAVFKVLPPCLIGMEACATAHYWARELTKLGHTVRLMPARDVKAYVKRNKNDSADAEAICEAVRRPTVRSVQVKSAEQQSQLMLHRTRDLLMRQRTQVINALRAHLAELGITAAQGTAGLKELLKIIAKDEDERLPVDARASLVVLAAELQAMQTLIGSLEKRIMAQHRKSEASRRLQTIPGIGIIGATAIAATVTDPKSFRSGRDFAAWIGLVPRQDSTGGKQKLGPISKQGDRYLRRILVVGAHAVLKLAKQHPEKYPWLTQLLARKPFKVVAVALANKMARTAWALLAHGGKYRRPALVAAP

SEQ ID NO: 467571 - protein, 392 aa, unidentified
MLYLGIDIGKRSHVASLLNEEGKVVFKAFSFHNTTLGADKLLTKLNTYIESPCDVEVGMEATGHYWLSIYSFLVESNFTVFVVNPIQTDGWRKGIEIRKRKTDIIDSILIADLIRYGDFLETSISDEDSLALRNLSRFRNYLSHSCSDLKRKAIAVLDQVFPEYDSVFSDIFGKSSKQLLLNFSSALEFEDISAAQLSKALEKITFKKFATKKVHALSSLAKNSFGVKFAIDSFSLQLKMIVEQIIFIEQQIDQLELELEILVSKIDSPILTIPGIGAVNAATILGEIGDISRFSHPSKLVAYAGLDATVSQSGEYSSTNNRISKRGSPYLRKAIWSAAFVASNHGPVFKAFYEKKRREGKHHLVAVGACARKMCNTIHAILKKNVPYVPQI

SEQ ID NO: 467572 - protein, 312 aa, unidentified
MTLHQKFIGVDICKEFLDVYCTQSERHWRVANDDREITRLVHANPQAFFVFEATSGCDGVLRTRLDQSRTPFARVNPRRAREFARAAGVFAKTDRVDARVLAEMGRCLELTPTTEPSKERRCLSELVQRRDQIVEEIVRERNRLHQASLARVRQDIQSHIRLLQKRQHKLDQAIADLIEESRELAELNALLQSIPGVGPVIAATLLAELQELGHRDRRAIACLAGLAPRANDSGRWQGRRRIWGGRRKARRVLFIAALQASRFCSHWRHIRREMEKSGKPKKTIIIAIARRLLTTMNAMIKTGTAYQPPTHA

SEQ ID NO: 467573 - protein, 317 aa, unidentified
MNTPENQTLINIGVDVGKANLDIALHPSGQSFTIPNSTTHIRELVKILKGYAIERIVVEATGRYEHALVRAISQAGLPIIVVNPISVRRYAQAIGVLAKTDRIDAQVIAKYAATLKPEFKPIPDKTSQKIKDLLARRSQLMEMSTMEKNRLQILPKTLHSSINSLLKTLQTQIKTITKQIEHEVAKVDHWRSKTDILTSVPGVGKVMAFTLLSELPELGKLNRREIAALVGVAPINRDSGRLTGKRRIRGGRHRVRTVMFMAMMSAIQCNPVFKQFYERLKAQGKLPKVALIACMRKMIVMLNTMVKNQEPWREKTA

SEQ ID NO: 467574 - protein, 276 aa, unidentified
MMIIGCDFHPSFQQIAYVEQETGEYEERRLSHRGEAAAFYRSLAGRAVRIGVEATGNDRWFHKLMSELGHELLVGDASAIHASAPREQRTDKRDARHILRLLMENRFPAIWQPSVGNEEQRQLLLHRCRLVRMRTRIKNQLDSIAKSEGLTGSRAWKAKRRQQIEALPLTGWYAERRKDLLALLDEMDKRIEPLDKAVKAAAEQNAEAQLLMTHPGVGPVVSLAYVLILGDWRRFPRGKQVGSYLGLIPAEAFSGKHQQRMGHITKQGNTLHWPGR

SEQ ID NO: 467575 - protein, 396 aa, unidentified
MISVGIDVSKGKSTVCIMKPCGEILESPFDIGHTADELDSLISLIKSFDEETRVVMEDTGHYHLPVATYLSSHNIFVCCVNALRMKKFCSQSIRRAKTDKIDSIKIASFGITYWNELVKAYPSNVIYDELKFLARQYYQVTGMLVKSKVNFSNLLDQVMPKINDVLSNQGENHKLTEFVNRYIHFQNILDMGEMKFTSDYCKWAKKKGYRLNERKAAEILALAQNGIPTLPNSQSVKIAVSEAVKLIHSIEESRNTILAQMQDLCNTLPEYSVVKEMDCIGDTLAPRIIAEIGDVRRFKNKHSLIAYAGIDAPPYQSGAFHASERHISKRGNSYLRKTGYEIMQSLIKHKPVDNAVYDFIQKKRSEGKCGKEAMIAGLNKFLRVYYGKVMEFYSEH

SEQ ID NO: 467576 - protein, 316 aa, unidentified
MKKHSTVCAGIDTGKRKLDLALAGAGERLEVANIDQGHGKLTAWLRQHQVRRVGIEASGGYEQAVVSRLRRAGFVVIVFQPMQVRAYARFHGLRAKNDKIDAALIADCTAAAKKIHAPPDPRLVVLAAHQTLIDQIIDQIARCKNYRESSRDAQRQFWNDEIKRLRGLFKQQLKNLVAAIRRYHDLAERLDLIASIDGIALRTAVAILVRVPEIGRISRQQIAALAGLAPYDNDSGDQSIARHIEGGRQRLRNNIYNAAFAASFHWNAELTALYQRLTAAGKGHKVALVACARKLLIYANAVVARGTPWVSRAVAP

SEQ ID NO: 467577 - protein, 363 aa, unidentified
MAKIITKLPLFHLKANKSALLFALQLHTNADSLMSFIFKNIGNSPCVFGMEATGHYWYPIYSFLKAKGYTIYVINPIQSDTLRKMYIRQTKNDSIDSFLIAEVIRFGQFTTTSMADENILAMRQLCRYRDSVISSRTEIKLRISTIMEQIFPEYEKQFSSLWLSTSMGILEKYLTPENIENAPIDELFEIIKDKSHNRLTRAKAISIKEAAADTFGIKIAQDAFSFQLKQLIDRMNFLDKQIEALDCQILEYYEKFDCYLHTIPGIGMIAAATILAEIGDINRFKSSSALVAFAGIDPTVRQSGEFSSTHNHMSKRGSPYLRHAIFLAATTCSFHNSPLNAYYKKKRDQGKHHLTATGAVARL

SEQ ID NO: 467578 - protein, 402 aa, unidentified
MISVGIDVAKGKSTVCILKPYGEIVSKPFDIAHNEKDLSELASMLLRFNEEVKVVMEATGIYHLPVLTYLQEKGLFVSVINPYLMKVYRSGDLRKAKTDKIDSRIIANYGIDHWFTMPEFQASEDIYGELKLLGQQYRHYMKLHINSLHELTHLLDYTMPGIKGMFASWNEGNRKDKLSDFVESFWHYDKITCLDEMEFINQYINWAKEKKYHQSQTKAKAIYKLAHESIPTLSSETPSVKMLVTEAVRVLKEVDATLGIILSRMQELAKGLPEYAVVREMGGVGEVLAPKLIAEVGDIRRFHSGKALIAFAGIDTPPYESGQFAGSNRKITKRGSAALRKVGYETMRCIKTHPRPDDPVYQYIVKKELEGKAKKSAKIAGLNKFLRIYYARVKEVYSDISE

SEQ ID NO: 467579 - protein, 368 aa, unidentified
MGRKSSKLYVGMDVHKDSIDVAVAEEAGEVRHQGRIGGDSNALARAVRKLESQGRLLVFVYEAGPCGFGLYRMLKARGHECWVVSPADTPRRSRDRIKTDRRDSLKLAGLARAGELKPIYVPDATDEAMRDLVRAREDAVIVQRQGRQRLAALLLRNDIRYAGKTAWTEGHRRWIARLTLPAAAQRIAFEEYVEAVEEASARVERYTRAIEQELAHWRWQPVVAALQACRGIQLIHAVRIVAELGDLTRFGHPRQLMAYLGLVPSEDSTGERRRQGSITKAGNSSARRALVEAAWAYQHRPAVSPVIARRQARLPKAATQIAWSAQLRLCARFRRLHARGVNRNKIAVAIARELSGFVWAIGQQVKPT

SEQ ID NO: 467580 - protein, 423 aa, unidentified
MEHPRIYAGVDTHSDTHTLALIDEYGRPLATQTFTADPTGYERLAAMIGDPDACLGIGVEGTNSYGAALTRRLVEAGYDVYEVLRPKRAVRRRDGKSDPVDALAAARSVLAGDGTSVPKSADGWVEALRALNAERAQLVTAMTALSNSATGLLTTAPEHIRERYRGLRTPTRMRRLAACRPSGNMVEQGMLVALKASGKAWKALKEQADLLEKNMRLILEEHARPLLDIYCASTVTAAALAIVAGDNPERIRSEAAFAKLCGACPIPASSGKTNRHRLNKGGNRQGNSALHHIAIVRMRYHQPTRDYVNRKTGEGKGKMEIIRCLKRFIAREAYRALISIRRGRTPLNKPPAERGRRLRELRVAHGITQQQIGDALGVPSSRISEIERGTRNLPELERRATLWIQTITTPNQPTQHTETLDNV

SEQ ID NO: 467581 - protein, 434 aa, unidentified
MTPDSAAVRASKGKVMKPFDQITHYAGFDWARDHHDVVIVDRQGQIVADFRVEHSLAGWQQFRDKMKDYPALGVAIETSQGAAVDQLLQLDCNVYPVNPLSAKSYRERKAPSGNKTDHLDGWSLAEALRTDGHAWKALQPLDPLTQQLQLLCRDEISLIEQRTALVNQLQQALVEYYPAALQAFEDWTQPFCWDFIIQFPSPEKLAEAGPRRWEKFLHTQKLWRPETASKRLEIFQKARQFCGSAPVTSAKSLLALSLANLLNALQLQLDQYRQRIEALFAQHPDHDLFGSLPGAGQTLAPRLLGEIGGNPRRFEDTQALQCIAGTAPVSFQSGQIHRVRLRLQCNKVLRHTVHLWSHCCVRVCPWAETYYKQKRAEGKSHACALRCLGQRLLKILWKMVQTHKPYDSDLHARHQQQHGSWVLALMKPEAKASE

SEQ ID NO: 467582 - protein, 353 aa, unidentified
MHPSQHDAVLYASLELSHSSWLVTSLSPGSTKMSKHASAACDGPALLALLARLQAKAKQLARTDVGIVVIQGAGLDGFWVHRLLEANGIESHVVDPASIAVPRRQRRAKTDAIDGETLLRTLLAWKRGEPRVCSMVVPPSPEQEDRRRIARERSVLLKERVRHVNRIKGLLASQGVVDYEPLRQDRREQLDVLRTGDDRLLPARLKAELLREIEVIELLVRQIAEVEAERDAVEPEPQRQDAPVALLMRLKAIGPQIAAVLYLEGLYRNFGNRREVAAYAGLVPTPWRSGKIDREQGISKAGNRRLRTIMIELAWLWVRHQPGSALTRWFRERVGGERVGCCGLPLWHSRASC

SEQ ID NO: 467583 - protein, 358 aa, unidentified
MRFYTKQHQYYCGIDLHTKKMFICILDAAGQIRVHQNIKTDQETFLNIISPFREDLVVAAECMFTWYWIADLCAEKNIPFVLGHALYMKAIHGGKAKNDKIDSHKIATLLRGGMLPQAYVYPARMRATRDLLRRRNHFMRKRAELYAHIQNTRSQYNLPDFLGRIAKPQNREGIVERFNDPSVQKSIAVNLEMIQAYDHILTQLERDIITSAKEHDLRSYALLQTIPGVGRILALVILYEIETIERFPQVQDFVSYCRLIKSIKESNGKKYGSSGKKIGNAHLKWAFSEAAVLFLKGNEPAKRYLEKLSRKHCKAKALSILAHKLGRAVYFMLKNKEAFNQKKFLGLQKLEGMDQPVV

SEQ ID NO: 467584 - protein, 345 aa, unidentified
MTTMNYIGLDVHKKTISYCVKDVSGRIQQEGKIGSTRRELDCWMKTLPEPWTVAMEATIFSGWIYDHLLPHATQIKVAHPLMLRAIAAAKKKNDQIDASKLADCLRCDFLPECHMMPRAIRDRRRTLRYRHLLVRQMVQMKNRVSGLLMETGVEYNKQRLHKVSYFRELLSANGEVPPSIRPLLKLSRETIERCQKTEYALVSSLQRDPVLADRIKRLRTVPGVGPITALTWALEIGDVSRFGSIKKAISYCGLCGDERSSADKAMRMPLSKQRNKHIQRALVEAAKLAPRQNHEMAVIYDQERQKGNSNRATLAVARKMVAYLLAVDRQQRDFVPAEERRTTAA

SEQ ID NO: 467585 - protein, 344 aa, unidentified
MQHYVGLDVSVKETSVCIVDKAGKVIREVKVATKPAEILAVLTEEALAIERIGLEAGPLSQWLYGALAEAGLPVICVETRHMKAALSAQINKSDRNDARGIAQMMRVGLYRPVHVKTLASQKRRMLLTSRQLLQAKALDIENDLRGTLRNFGLKVGMVGTVKFEARIRELVADHLDLAAIVEPLLIARRVLREQLGVLHRQLLEIVRQDEVCRRLMTTPGVGPVVALTFRATVDVPSRFNNSKAVGAALGLTPRRQQSGEIDRMGGISKCGDAMMREMLFEAALVLMTHSRKWSWLKAWGMKIARHRGMKRAIVAVARRLAVIMHRMWVDGTEFRWSRKEAAAA

SEQ ID NO: 467586 - protein, 389 aa, unidentified
MESDYSVFVGIDLAMTASHQAFAWGGDLGCLGERRFEHSAKEIHAFVEWVLGLATSPERVVVGLESPHGPVVEELLGRGISVFHLNPKQLDRFRDRESVAGAKDDRRDARCLARSLATDLHCFRRVEPQEPVYVRLREASRERERLVSDLGGQANRLRDELHRLSPALLALCPGANERWLWDVLALYPTPADASNFRRGKVREILRVRRIRRFDLEKLKAALRSPPVRVAPGVLEAARGRVLRLIKALRVIEENVREVESEIRSALTEARFSSEDTSGKVEQRDAAIVLSMPGVGTIVGATLLGEATQALRDRDYALFRCLAGIAPVTKASGKRSRKRAKVTMRRACSARLRNAMHHMAQVASQRTPRRRRTTRPVANEDIHTAARFVA

SEQ ID NO: 467587 - protein, 520 aa, unidentified
MASTRTRCHSYRRRSPTSLGKPRGVLHPRVQQVGPEHFGIVCFDCHKASSKFLLADFYGRQLIAPTKVHHNRPELDAAIAQIRQAFEQHQLGDGLVVIERTGRYHRVVQRAFAAAGFETRIIHPFVTKQYRQPVDPSQKTDDADLGAIHRATVTGCALLEATRDEAWTILQLLIRHRRDLVRKGAALNCQIRDHLEAALPGYAACFDKLWESAIPWHLLRHFPTAGQLRDAGLTTLCHSLDEAGIRFQQRTIQTVVDWAHQAAPGDIGASLHRRIALALYEDRQRKTQEITALEREIAGRLVQTPYVLLLSFPGINVVSAADFGGEAGPMEHYLNAKSITGRAGLRPSRYQSDQVDLANGPLVRNCNRSLRAAILGIADNLVVCNHHFQVLATQWRAQGKDPRHTRVKIGLRFCRIAFQMVAGRQVFRHPSIQGRHYILDKLTAFHLAHGTKMPDLLRDLQAAIGQIPRRQYAAEAKPLQDEYRKIHDGRRRGPQLLGDILPIVLARLGVDVVQSNESGE

SEQ ID NO: 467588 - protein, 348 aa, unidentified
MSIVGGLDLHRGQITFDVVSTKTGELWRGRIWRPDRERLRRWLRVEVAQRAEAEPVALAVEGCTGWRYVAEEITAAGYEPHVAEPADTQAARGRKRHAKTDRTDAKLLRELLAAGELPESWIPPECVLEWRERVRLYKTLVDQRTQWIQRIHAELFQHGVAVPEGEITAVSTRAALGDPAVSLSAAARGRVATGYVMIDATNAQALPLRAELSRFGTRQPACRALVDAHFGVGGLTAVAIWSELGDCRRFSRSEQAVRHAGLDISVDASDVHRARGYLTRQGPGTLRWALYEAAKCSARASAPDHAYYASVKARHDGKLAALAVARKLARRCYHTLRAVDPKEVYAIR

SEQ ID NO: 467589 - protein, 349 aa, unidentified
MTDQRISYCGRIVYVGIDVHKETYTVTCVCNKQIVKTATMQADPAALAASLPRGFPGATLYSVYEAGFSAFVLHRVLTTTGITNIIVNPASVAVAANDKVKTDRRDAKKLAIDLADGRLRGIYVPTEAEELARLLPRTRAQIVKPRATIARQIKAKLHQFGLIAPSSRRMISSRYLREMAAWSLPPELSVSLTLLAEQWRFATRQLIEMRRLLRDQAQAQEGIEKVYRSVPGIGEVVARTLATELGDMTRFANERALFSYTGLTPSEYSSGASVRRGHISRQGSSRGRHWLVETAWRALPRDGVLKEMFDRIAATRGKKRAIVAIARRLTGRIRACFRQGTTYAVGTYA

SEQ ID NO: 467590 - protein, 354 aa, unidentified
MSQTPSTAIAVIGIDIGKNSFHVVGHDTRGTIVLRQKWSRGQVEARLANMPPCLIGMEACVGAHHLSRRLASLGHDARLMPAKYVRPYSKGPKNDFNDAEAIAEAVQRPTMKFVATKTAEQLDLQALHRVRERLVSQRTGIINQIRAFMLERGIAVRQGIGFLRTELPTILATRTDALSPRMLRVIEELAGDWRRLDQRIEGLTGEIAALAHQDQACSRLMTVPGIGPIISSAMVAAIGTGDVFSKGRDFGAWLGLVPKQISTGDRTILGKISKRGNRYLRVLFVQAAWVVLVKIKDWERYGLKSWIEAAKKRLHHNVLAIALANKLARIAWAVLAKGRAFELTRTNDAGVRPA

SEQ ID NO: 467591 - protein, 335 aa, unidentified
MLKIGIDISKLTIDCAYFVNDKSHHRKFSNNEAGFKLLLGWVKNPDNNSVDKTTLFCMEATGIYHFMLAKFLFEKGFSVIVANPIKTHHFAKLKMMRNKTDKTDALLITQYCEYLDFNKSIDKNLWQPKAAMFEDLQYLVMRLVQLDKQKRTECNRLEIASNKIIVKSLKLAIKQLDKQINVIETGVKDLIKANAKLSDQIELLKTIDGIGNKTAWSLLAYAGDMSAFDNANQITSFVGLNPKQRQSGSSVAGSSLSKTGHRKLRKSLYMPALVAIQYNPLLKTYYENLLARGKVKMVAVIAVMRKLLVICYGVLKSGQAFDVDYVKKKQALRLA

SEQ ID NO: 467592 - protein, 360 aa, unidentified
MGNERTFVGLDVHARSVTGHALDAVTGEVWQRKLCPDPGEVLRWVSGLPGPVKVGYEAGPTGYGLYRCLNDHGVLCVVAAPSKLHRPHGDRVKTDARDAELLAHLLKLGEIVEVNVPSVEQEAARDLVRAREDARADLMRTRHRVSKMLLRQGIVYSGGDAWTKVHDSWLRGQRFDQQSRQLAYDSAYEAMVLTVDRRDRLDRAIDEMAANSSYTPVVRRLGCLRGISTLTGFALAVEIGDWQRFTGATIGAFVGLVPTESSSGQSRSQGSITKTGNTHARRLLVEAAWHHAKPYRVPGKTMRDRWELAPPAARVRGHEGNRRLHQRWQRFNARKKRPAVADVAIARELAGWAWSLALLE

SEQ ID NO: 467593 - protein, 408 aa, unidentified
MARYYLGVDWADQSHQLYVSDESGRKIRELEVQQTADGLAELGRWLEESRGQGIELWAAIEKPEGRVVDFLLDHGVVVYPVNPKALDRARDRFRMSPSKSDGFDAYVLAEFLRTDHAHLRALEPNSAEGQELKMLTRDHQRLGRQKTRLLNQIGITLKEYYPVPLEVFESLDTKIALDFLKAYPTPQALSKLTRRGWKRFAKRDHHLSEARCSELWDKLNKPQLAVPAHVVRAKAKLLAALVMQLEASVKAVDSYSQEVQSFFAAMPAAEIAKTLPGGKSGTTVASIWAELGDAPKRWNSFRHLQAEGGAVPVTKASGKSHMVQFRFACNKHLRQAMYWFSFNSLQRSEWAKKYYRNQRAKGHSKHESLRALGAKWLKIIFVMWRDHKPYDENYHLANIARQMMRQAA

SEQ ID NO: 467594 - protein, 414 aa, unidentified
MEIVHKACAGLDVHKKTVVAAIIVPGEQGGLRKEVRTFGTMTSDLLALSDWLMDCEVSHVAMESTGEYWKPVFNILEHNFEVLLVNAQHIKVVPGRKTDIKDSEWIAELLRHGLLRASFVPPLGQRELRDLTRARSTFVRTRATLVNRVHKVLEGANIKLGSVASDVMGVSGRAMLAALVEGQSSPVEMAELARGRMRDKRDLLAKALEGRMQAHQRFVLGQLLAQIDSLDETIDRFNEQIETYCRPFEEAVTLLDTIPGVGRETAEVIVSEIGTDMNRFPTADHLASWAGVAPGNNESAGKRRSGKTRKGNKVLCAALNQAAHAAACTKNTYLSAQYRRLAARRGKKKAIVALEHTILVMAYHLIQRNEPYHELGVNYFDNRRPEATAKRLVKRLEQLGYAVSLHQAPALAPA

SEQ ID NO: 467595 - protein, 349 aa, unidentified
MQHYAGIDVSLELLSVCIVDAKGKIVKEAKVGSDPDTLVAFLRGLDLAIDRIGLEAGPLSQWLHAGLTSAGFEAVLLETRHVKAALSAMTVKTDRKDARGIAQLIRMGWFRAVHCKSAGSQEVRALLVARKLLLSKLLDVEFSIRGILRGFGLKMGMVTRKRFEARVRELYAGHAMLEQICSAMLTARSALQTEYAKLHKALLVIVREDEVCRRLMTTPGVGPLVAITFKTGVDDPSRIHKSKAVGALFGLTPKKYQSGETDVTGGITRAGDEMVRTALYEAASVLLSRVTRFSALKRWGMDVAKRRGTKRAKVALARKIGVILHRMWVDMTSFRWTKGAPTTMRLARV

SEQ ID NO: 467596 - protein, 367 aa, unidentified
MKKVSTVATKQSRNISRQKLTIGLDLGDRNSWYCVLDEAGTIQLEQRVRTTAKALQEVFGAMPRSRIALEIGTHSPWISRLLSDLGHEVIVANARKVRLIGQSRKKDDRLDAQTLARLARIDPELLYPVKHRSAEAQADLMMIRARAGLVRARTGLVNTARGLAKSYGERLRGCNVRDMDPEKAENLSPELQRALEPLLATIEELSERIVEYNDRIEALAQASYPQVELLKQIKGVGTLIALTFLLTLEDPHRFGKSRDVGGYLGLQPGRRKSGESEPQLHISKEGDPYLRTLLVQGAQHILGPFGMDCDLRRWGLKLAERGGRNAKKRAIVATARKLAVLLHHLWVSGEVYEPLHNSSRVTVAAAA

SEQ ID NO: 467597 - protein, 359 aa, unidentified
MKIVGCDFHPRWQQIAVFDVETGEINEHKLMNGDGEAERFYRALEAPALIGIEACGNSQWFIELLEGLGHLVWVGDAAQIRASYVRRQKTDRRDAGHILRLLIEDRFPRLWTPTAEQRDLRQLLIHRHKLVEIRTRVKNGLQHLALNRGLQKQRALWSVRGRACLEKLPLEGWTARRREDLLHLLAELDRQLGELDQAVSRAAEEHPQARLLMTQPGVGPITALAFVLTIGEVSRFRHSNQVASYLGLIPREHSSGGKQRLGAITKQGNRFLRQLLVEAAQSVNRLDEGFRRQYQARCHHKPKGVAKVAAARKLAVRLYWMMKQNVGYPEIAHIESSSRVPLRGESHLATLNEPSRIQH

SEQ ID NO: 467598 - protein, 432 aa, unidentified
MKVLYERVAGIDVHKDMIKVAIRSPGEKPWTRKTEILEFRTFYGVLQAMARELRKRGVTHVVMEASGIYTDPVYYALCEQDFEQVAVINPAHAKALRGHKTDARDCARLAELFECGLLRGSYIPPAELREVRDLTRYRMKTVQARTSEIQRLAKALESAGIKLGSVASSITGVSATAMIESLIDGERRGTVLADLARGRMRTAGKLADLSMALTGRFTGHHALLCRLHRDRIAVFDAAVADLDERIAGKAARWQREAGLLTSVPGFGDVVAQAWLGEIGPAPHRHFATCEKLASWVTLCPGNNISAKKRKHGRTGDAGTYIKPMLIQAAWAAIRVRGRLRARYSRLVRRFGGDKNPAAKKKAITAIAHTLLKIAYQVLKSGTPYQEPGADFYTRRESPEQKQAWLERQMQKLHPGCTITITISPEAALAPGA

SEQ ID NO: 467599 - protein, 482 aa, unidentified
MTPRRQKNGRVVASPEPLRVANPHAAGIDVHAAVHWVAVPPNHVAAAKCMDAGAGDAANLPPHVRKFGTCTADLELLADWLHQCGITSVAMESTGVYWIPLFELLERRGFQVYLVDPRQTKHAPGRPKTDVLDCQWIQRLHSYGLLTASFRPEDQVVVLRGYLRQRHMLIRYAGQHVQHMQKALEQMNVKLPEVVSDITGVTGLAIIKAILAGERAPRKLAKLRDERCKRTEVEIARALQGNWREEHLFALKQALELYQDYEHLLRECDVKLEAHLATFADKSGGQKLEPKPRRCGRRHNEAAFAVRSALHRMSGHDLTVLEGIDDNTALVILSEIGMDMSKWPTEKYFTSWLGLCPQHQGSAGKIKSRRVRRGSNLAARAFRLAAQGCHHAKNALGAFYRRIRARCGGIKAVFATARKIAERVYRLLKYGTEYVRQGIEAYEKAYRERLLKGLTYRAKSLGYALIALPEAPPSTEATPATL

SEQ ID NO: 467600 - protein, 335 aa, unidentified
MKDIIYDHYIAIDWSMINMAIARMTKKSNKITVIDVPSDIGELKVYLKNVSGTKIVTIEETTTTQWLYVELVEYVDKIVICDPLRNRLLSEGPKTDKIDASKLVQLLKANLVKEVYHSTDTFLYLRRVISGYEDLVKAGVRLKNQRHALLRACGKKGDKDKKLESHGDQFVLECLDRQIEAYSNEKKGYEEEFKRLVKKYPEIKQQKSLPGIGDINAVKIVSRIVTPYRFIDNGHYLSYAGLIKLDRISGGRSYGKKTPRFCRQLKSVYKSGVLAAIGGNNPINDYYEYLMKEKGYPEFNARHKACRRLAILSLGVFKSGKKYQPYRRDHVEAVN

SEQ ID NO: 467601 - protein, 381 aa, unidentified
MQSNHTVPTILVAIELSTATWLVAVRVPGSEKPHLHRVDGGDTAALLALIASVSARAAHQLNAEIGIVCCFEAGRDGFWLHRLLTTRGITNYVLEPTSVLVNRRARRAKTDRLDAEGMLRVLAAYLRGDHQVCSMVRVPTPDEEDAKRMHRARENLVQERLRIENRIEALLFTQGIRKRPSLRSWERDLAILRTGDGREIPRHLLAELDRLRRRLVMTLELIREVEAERDQATKTTPQNQACRKIAALCRIRGISDNFAAVLTREVFYRSFDNRRQIASYVGITPMPYQSGGIDRDRRISRAGNPRARTTMIQLAWLWLRYQPGSELARWFRERVGTLAGRTRRIAIVAMARKLLIALWRYTESGVIPAGAEIRAETPVAA

SEQ ID NO: 467602 - protein, 408 aa, unidentified
MEVVVVVGAGLDVHKKKIVACCIDGRSSPPTVITCTFGTFRDEIERMRDWLIKRECTHVAMESTGVYWMPVYQVLEGVLEITLGNPRHMANVPGRKTDVSDAHWIAKLLRHGLIQPNFVPPRPIRDLRQASRYRRKLMQTRTACLLRVEKLLQCATIKLSSVASDVFGVSGRLMLAGLAGGVTDPRELSELAKGKLRGKRGALMRAFRGSFTKEDASLLRVELKVIADLEAQIERLETLIEQKLDPFEEVIALLDTIPGVNRTLAIDLVAEVGTDMTAWKTDRQFAAWSGTCPGNRESAGIRKKAKTREGNPYVKTILIQAAVSASQTIGSHLAFRFNRLAARRGPRRAFVAIAREIAVAIYHMISKQVPYTPPRNADPELTRQQRSRHLIRELTKLGYEVNCKLLNT

SEQ ID NO: 467603 - protein, 399 aa, unidentified
MAAPSLWAGIDAGKLDHHCVAIDASGRRLLSRRVRNDEAALVALIEDVIALADGGSVQWAIDLNAGGAALAIALLLVRDQDLLYIPGRIVHHAAAAYRGDGKTDAKDAAIIADQARMRTDLPEFRHRDETTVELRTLCARRADVSADRNRALNRLRAQLLEYFPALERAFDYSHRKAALILLTGYQTPEALRRIGRTRLENWLRDRHAYNPGAIVSRAMEAANAQHIVVTGQHLAAVMVARIAQQILDIDAELADLDDMIEERFSRHHQASVIRSMPGFGPLLGAELVAATNGALDSFPSADRLAAVAGLAPVPKDSGRITGNLKRPRRYDRRLLRVFYLAATNSIKTCPESRAYYDRNRAEGKHHMQAVLSLARRRVNVLWAMHRDNTTYKSTAKTAA

SEQ ID NO: 467604 - protein, 386 aa, unidentified
MPQLNDLSRSLVILEQDATLIAVIEMGQSNWLVAGIVPGVERSPLKKLAVDESALLKLLNRWREEAEKAGHRIERIAIAFEAGRDGFWLARWLRARGIEAHVIHASSVAVSREHRRAKTDRLDTELLKRAFLGWLRGERDHCKMVAIPTLAQEDAKRPNRERESLVGEQSRIVNRMKAALARLGIRGFNPKLKKAVERLDGLRTPEGEPIPPNTLAELKHDMERRRLVRSQIRDIEGTRLERLKQTPGDGPHVTVRLLARVIGVGVETADMLVQEVLSRNLRDRRAVARYGGLTGSPDESGKKRREKGLARSGNARVRRGMIQLAWRFLMFQKDSALAHWFYARTKNAPQTRKTMIVALARKLLIALWRLAREGAIPEGIVLRPAL

SEQ ID NO: 467605 - protein, 345 aa, unidentified
MEITTVGLDIAKRVFQLHGVDAAGKAVLRWKLQRSEVLAFFKALPPCLVGLEACGTAHYWAREIRELGHEVRLMPPSYVAPYVKRGKTDAADAAAICEAVTRPTMRFVPIKTAEQQAVLMLHRTRDLLVRQRTMLVNALRGHMAELGIIAPQGIARVADLMAVLLGEDTTNVPALAREALRGLAAELEALDRRVKEIEVVIVRWHKDNEASRRLATIPGVGPITASAIVATITDPFQFHSARHLAAWIGLVPRQHSSGGKQRQGGISKQGDRYLRRLLVLGATAVIRHSRSKSTAEAGWLKSLLERRPARLVSVAQANKTARIVWALLVRGEAYRMPAAVPSGAA

SEQ ID NO: 467606 - protein, 338 aa, unidentified
MGSYVGIDLHRRRSVVVVLNEDGDRVSWCRIDNTAANLAAEIVSAGGSEAEVAMEACWGWYWAADVIAECGARLHLAHPLGIAGYENRRVKNDIRDATLLADLLRLGRLPEAWVAPPEVRELREAVRYRAKLSRLRSGLKQQVHQTLGKEGVIPEVDSIWRGGGQRWLDELQLGDVYVDRIESLRDLIELYDREIGQCDARIHRRLKGHPGYEAIQALRGVGPVLAAVFVAEIGDVGRFDNPRRLCSWAGLTPRLRESDAHSHRGHITKMECGGAGLARRFCLSFGGDCDDRWRYRHPSGPADLRLCRSGHGRGPRRAGDAGAPRPVARLVGAVPRGR

SEQ ID NO: 467607 - protein, 391 aa, unidentified
MFLLGIDIAKLNHVASCIDSSTNEVVFSNFKFKNDFKGFSALLNKIKSFDAKNLIIGLESTSHYGENLINFLFIHNFKVALINPLQTSHLRKANIRDAKNDNLDSLNIAKSLLFTKLNFVSKKNIECFSLKKLTRFRSNLIKQRSKAKIQLTSLLDLLFPELQYLFKSKIHSKAIYSLLKKYPSTEEIAALKDDEISNLLYASSKGHFKKEKSIELKSLAKTTVGIKDTSISLHLIQLIELIELYTKQIKDIEIKITDTVNNLDTTLLSVPGISIIACAIILGETNNFENFSSSKKLLAFAGLDPKIRQSGNFNASSCRMSKKGSPYLRYALIFTAWNIVRHSEKFNEYYSLKRSQGKSHYNALGHVAHKLVRILFTLIKKNISYQEEKLE

SEQ ID NO: 467608 - protein, 339 aa, unidentified
MDITTVGVDIAKNVIQLHYIDAETGEIVNKPVKRTAFLEHFANRSACLIGMEACGGSQHWARKLTAMGHQVKLMPAKFVKAFVMGNKNDAADARAIWMAAQQPGKSVAVKTETQQAVLGLHRMREQLVKFRTMQINSLRGLLTEYGEVMGKGRAALDKAVPDVLERLVGRLPTILIDTLREQWNGLADLDRHIAEIERRLQAWLKEDKACRAIAAIPGVGLLTATAAIATMGDAKTFRSGREFAAWIGLVPRQTGSGGKVQLLGISKRGDTYLRKLLIHGARSVLFHTKEPGPWLEQIRKRRPMNVAVVAQANKMARTIWAILAHDRQYDKDHVSVKPA

SEQ ID NO: 467609 - protein, 457 aa, unidentified
MGQQKGRIPARLVEDEEYQLRHERVAGIDVAKVKADVCTRLPPAREGGRRLARTEEVTATVAEVTALAERLLAEGVELVSMESTSDYQRIWFYVLEAAGLSVQLVNSSQSRQLVGRPKTDRLDAQWLARLTEMGLLRPSFVPPAEIRALRDLTRTRLQLVHDRTREWQRLEKLLEGALVKLSSAVSSMARTKSARAIVEALADGERDPRVLAGLAARQVRAGRAGIEQALEGMAYGDRHGRLTRIHLDHITFPDRSIAAIEDDIGATLDAIPAAQGIDATGTRSADPGPGAAVLPAAERLAEIPGVSLDLARAIIAETGLDMTRFPTAGHLVARAGLAPVARQSGPRSRKPGKGQGDSCLRGYCTQAATGAATTGTFPGERLRRLSRRLDGTRARCAVGRSILVIIWHLLATPEARYVDPGPDWHARKTGTDRRTRSLPNQLRALHPDSDITIAPAA

SEQ ID NO: 467610 - protein, 350 aa, unidentified
MSNHKFAAADVHAATTTFAVLDSSGKFVMETVVETKAESLLSVVKSMTGSVHLTFEEGTHAAWLYDLLRPHVAELLVCDPRKNRNDKGNKSDRIDARQLARWFRSGDLSPVYHGHDSTKVLKELVRGYENLVVDSVRVKNRLKAIYLSQGEWASGGDVYSLEKREEWLSKLRSSGLRSRAEWLYLQMESLHDLRGEAEKAVIREAKKHRPCSLLKSVPGIGPIRSATIVAHVATPFRFRTKRQFWSYCGLAVVTRGSSDWEIDGEKLRRKRQSVSTRGLNRNHNRHLKDAFKSAVRDARAFRPHLDSLVESGMRKSMARLTVARKIAATTLAIWKKGEKFVLKKAVIRSE

SEQ ID NO: 467611 - protein, 343 aa, unidentified
MTVYVGMDVHRKRSQVAIIDAAGAQQRNRNLANDPAKLVPVLGALPPGTPVAFEAAYGWGWLVDLLEELELEPHLVHPSRCKAIASARLKNDKVDAATLAQLLRADLLPEAWIAPQQVRDLRALLRHRASLVRLSTSCKNRIHAVLADRGIPDHSSLWTGPGRAWLADLELPATPRGIIQDCCGLLDALATPIARLEREITTLAKPDPRVQALMALPGVGKLTAMTLVAEIGDIARFPTARKLCAWAGLTPQVRNSDRKVRHGHITKQGSPWVRGILQEAAQTAKRHPMFASTYAQLARRRGSHIATTAIARRLLARSFHILTQLATAPAPEKASTGRARVSA

SEQ ID NO: 467612 - protein, 395 aa, unidentified
MEDPIIACDVSKGKSHIQGFIGLSNPVGNPFVVRHLKSDLKLIKELAKSLEKQAHKKPKFVFEFTGIYHECIAKYIRTLGLDLYAISPLESAKVRKSQIRVTKTDSKDCLNIATVYYTRCIRKFESDNNDIKSLSRRKRDIREEMVRQRGVYHRYLDLIWPCFDEYFDADSKVCDIIISTYKHPYVIKRRSVNMVAEILLNNGRFSKNRAFDIAYKIKDYASNCVSGVDEKSDYVNALISSYSKINSLKKEIEEINLELDNLLRKSPAYQLLKTVPGIGANLLIQMSAEIGDYTRFKTAKQFVAYIGLDPSILQSGTNDGEHYSITRKGNGILRSCLYLAVSQMLTQKLDNQITRFYFKKKSSGLSHKVAAVASCRKLACCVFGMLKNGTSFETI

SEQ ID NO: 467613 - protein, 384 aa, unidentified
MTEQSAAATAFDHNSTLVLALELSGKGWQVGAVLPGVARRPHRSMAPRDVAGLLAQIERWKAEAQLAGRTVLRTVLAYEAGRDGFWIARCLLAHGIEVQIMHPASIPVERRGRRAKTDRIDLDMLLRTLLAWLRGEPRVCSMVRIPSETEEDMRRPERERERLVSERIALENRIENLLCLHGIAGFKPRLKKAAERLDGLRSFAGAPLPPMLLEELKRLMTRHRMLSEQLREIETAREQAAMAAEPDLAVQQIQMLARLVGLGLATATGLTREVFCRSFADRRAIAGFVGLTGTPFNSGGSEREQGISKAGNPRVRRILLQLAWRWLRFQPDSALSCWFVERTGSAKGRIRKIMVVALARKLLVALWHYVETGEVPAGARLAAA

SEQ ID NO: 467614 - protein, 385 aa, unidentified
MSELNDLSRSLTSLEQDKTIIAVIEMSQSSWLVAGIVPGIERHPLKKLEPSEEELVRLLTRWRAEAIKKGHTITRIAVAFEAGRDGFWLARWLRARDIETYVIHPTSVAVSREHRRAKTDRLDTGLLKRVFIGWLRGEPDHCHMAAIPTLAEEDAKRPNREREGLVRERTRIVNRMKSCLVRFGIRNFKPTLRKAPERLATLGTPEGVPLPPNTLRELRRDMARLRFVMDQIKEVEEARAERLEQAPQERTHAMVRLIARVIGVGIETADMLVHEILSRKLRDRRAVARYAGLTGAPDESGSKRREKGLAKAGNARVRRGMIQLAWRFLVFQKDSTLAQWYRTRTESAGKKRKTMIVALARKLLIALWRLVTTGEVPAGVVLRSA

SEQ ID NO: 467615 - protein, 348 aa, unidentified
MRFYSGQHRFYCGVDLHTRTLSLCVLDSVGAIVLEATLPPEPDRLLASLAPYRDGLVVGCECLFAWYWLADLCATEKIPFVLGHALYLKAIHGGKTKTDTIDAQKLARLLRGGTFAEAYVYPKAMRATRDLLRRRTYLVRKRAELLAHLQMTFLQYNLTPPAQKLCYAANRAALDLAVFPDPSTRSMLQADLAIVTALDQQIKRLEAELVRTAKVHDPQAFHRLRTVPGIGPVLALILLYEVQSIDRFEDEGRFLSYARLVGGVRESAGKKKGTAGRKIGNAHLKWALSEATCLLIRSLPKAKAWLARKERRIGKKRALGALAARLARTVYHLWRKKEAFDVNRFLAS

SEQ ID NO: 467616 - protein, 316 aa, unidentified
MAQEQVVVGIDVAKEKVDVAIRRGAEGCFANDPRGRRQLLAWLKEHVVGQAVMEASGGYEKSWTQLLRKAGVEVVIVDPKRVRHFAKSAGQLAKNDPIDARMIAWFGEAFEHRGKPEDAAREELDQLVTARRGLSRLRDKIDNWGEHEQPRAVQKAYQALLREVERQQARLEALIADRIEKTEHFAERAEIIQSVPGLAGNSAAALLAFLPELGQVDRQAASALLGVAPFDDDSGKRRGHRHIQGGRRKLRCLLFTPILGAATRHNPVLKACYRRLIAKGKAHKVALVACMRKLVCILNIMLARGEKWDPARHALA

SEQ ID NO: 467617 - protein, 344 aa, unidentified
MGEVSTIGLDIAKSVFQVHGVDADGTVVIRKRISRAKILEFFAALPSCLVGIEACPSAHHWSRKLQALGHTVKLMPPSYVKAYLKRSKNDANDAAAICEAVTRPSMRFVPTKSEQQQSGLMLHRGRQLLVRQRTMLSNAIRGHMAELGIISAKGRNGTAELLEIIANADDDRIPAVARLSLDALARQYDNTTAEIRAFEKHIHAWHRSCEESRRLEEIPGVGPIVATALVAEVGDWKAFSSGRNLAAWIGLVPKQHSTGGKDRLGGISKQGNRYLRWLLIAGAMAVIRYARQHGTKRLWLARIMERRPIKVAAVALANKIARKAWAMMVRGERCKEPRLLSEVA

SEQ ID NO: 467618 - protein, 342 aa, unidentified
MYYIGLDVHKKTISYCVKDARGRVQQEGKVGSTRRELDCWMAGLPQPWTVAMEATIFSGWIYDHLLPHAVEIKVAHPLMLRAIAAAKKKNDTIDAAKIADCLRCDFLPECHMMPRAIRDRRRTLRYRHLLVKQMVQMKNRVSGLLMETGVEHTKSRLHKVGYFHEMLSKNAEIDASIRPLLKLSRETIERCQKTEYALVSSLQRDPLLADRIRRLRTVPGVGPITALTWALEMGDVSRFRTIRQAISYCGLCGDERSSADKVMRMPLSKQRNKHIQRVLVEAAKLAPRLSPELAMVHEKEKQKGNSNRATLAVARKMVAYLLAVDRQQREFIPAEQRGSRAA

SEQ ID NO: 467619 - protein, 472 aa, unidentified
MRKHKRAKTKSKASKPIHDPQPDSAGVDIGANEIWVAVPAERTEKSLRRFDAFTQDLKALVKWLLDCGVRSVAMESTGVYWIPLFQLLEDAGLKVCLVNARHVKNVPGRKSDVRDCQWLQYLHSVGLLLGSFRPHQAICAARSIYRYRQNLLSMAAQHIQHMQAALDQMNIKLHHVIDDLTGLSGRTIIEAILSGQRDPVQLAKLRDKRIQAAESTIVKALEGDWRKEHLFVLAAAWDNWKQVQQQIQKCDQQLWQYTRELEAATTIAKPTKTIRLKPQWIGSSPVIGPQPAPRVRKKTSKNQPEAPWREELSRFFGVDLTAIPGISVLTGLTLMTELGNDLSAFKSQHHFASWLCLCPDNETSASKVLRRATRRSQNRVRQALRMAASSLHHDKSYLGHKYRRLRAKLGAPKAVTAMAHQLARIIWTLIARRVPFDLSIFALQEQANEQRRLNRLAASARQMGYQLTPIAA

SEQ ID NO: 467620 - protein, 477 aa, unidentified
MEQEEQPPSRRLVGIDLGIASRHSVRVLEPDGRLVCRSSCVPATGSLTLTEQAALDGAPVGTRLAVVFGPAGPAWLPIAVFFARRGHDVYRVSSAKASDLRRFLRRHAKSNGIDAETLARMPLADPAGLRKLELPSADAAALDRRVRACDRLTRAASEHKVRIKDLVRQLMPMTPLTGDIGKADLAVLERYADPRALLAAGPAGLIRLITSASGHQQGKERALQWRAAAAAALDLYGDHPAVPFAELAAEVATEVRLLHAIQHELALHAAAREQHYRQVDPGQLARSLPGFAEISAPVLVAIMGRPGRFRDGTRFKSYAGLAPRASETGETDRKGTSMSKAGPSLLRSVLFQAADAARRQDPQLARIYYQQMTERGATHLKACCVVAGHLAERAWTVLNRGTPYLICDNNGNPVTPAEAKRIIAERWTVPEEVRKRRRSRKTAGRAPQAATTGPDRRGDPPRPRSSRPRPTTVNPAT

SEQ ID NO: 467621 - protein, 454 aa, unidentified
MQKQDSYDYYVGIDCAQNKHDFAMKNNQDKFLIKKGHFSNTLQGYEKFLNTVLSKCLDKDKILFGMEVTGIYGTNLYERLKSDGYHVVMIFPDSVKNYRDYKRLNKTDKIDSACIAELLLNGDAQIVHAEKNGYTDLKAYIRRRNALKVTCTQETNRFLAKVCLYFPDLLKVFPSGRTTLKAIFSIYPTPYSIIEADFNELVSVLQKASKNKFGVDKANELIHAARNSIVVRKSISDGELYNIHSLIDSIDSLESEIRNLEKIIDSKAEEFPAYHVLLTLTGCGKITAATIVAEIGDISRFHKASQIVSLAGLYGDNSKSGSSVNKRGKISKKGSRYLRHAIYMVAEFARRNNPIFKAYFTKKKNGDRTKHILAVNAVANKLCKVIYSLMKNQSTYIIQYRDLAKLSESTQNEFFQNAETDFSAKTRRKKYLYEDEYGELHEFVFKSIKTALIE

SEQ ID NO: 467622 - protein, 352 aa, unidentified
MQIIGCDLHARQQTLAVLDTITGQVVEKTLTHSGSNVQEFYSTLPGPVRVGIEATGTMQWFLSLMEELGMDCQVGHPAKIRAAEPRKQKHDRRDADLILQLLVENRFPSIWRPSKELVDLRALLLHRHQWVRMRTRIQNALQAIALANGLRRGPSLWSQAGQCAIASLPLASHTAHRRSELQAMYAKFETDIEKLNQQIQEQAGKRTGATLLMTHPGVGPITALATDVFLGDPTRFADGKALASYVGIIPSEYSSGGRQRLGGLSKQGNPLLRFLWCEAAAHAVRRDPELQRFYRREIVQKGLGKAKVAAARKLGIRLWIMLRDQIDYHEFCRRGQMQQRSGDACAGMPGTR

SEQ ID NO: 467623 - protein, 343 aa, unidentified
MQDTIYDHYIAIDWSIKNMAIARMTTKSNKITAIDVPSDIEDLQAYLKNLRRTKILAIEETTTSQWLYAELKEYVDRILICDPNRNKLLNEGPKTDKIDASKLVQLLKAGLMKEVYHSTDRFLYLRRVVSGYEDLVKSGVRLKNQRYALLRACGKRGKEKAGSSIDSQGEQFVLDCLDRQIEAYENEKEGYEHEFEKLARKNPEIKHQKSLPGVGTINAVKIVARVVTPHRFADKGHYLSYTGLIKLEKTSGGRSYGKRSPRYSRQLKSVYKSGVLAAIGGNNPINDYYEHLIQEKGYPEHNARQKACRRLAILSLGVFKSGKKYQPYRRDYVKGNKQATSGL

SEQ ID NO: 467624 - protein, 381 aa, unidentified
MLDRFAVTHDAAGLKSLVRRLLSAGVDEVGIERGDGPVVEALIQAELTVLVIPPGQLKNLRSRYGSAGNKDDRYDAYILADVVRTDRRRLRPLVRDSAATTALRTTVRARRDLVEHRVAAANQLRAHLQIVFPGATTVFAAIDSAISLTFLERFTTQTQADWLSPKRLGTWLSSESYSGHTDPEILHTRLLTAPYGTIGAEAQTHAVTTLAFVGILRSLNTQIQALAASIGEQLAIHPDAHIVTSLPRSGTVRAARLLAEIGDARGRFPTADSLACLAGVAPSTRQSGKVKAVTFRWGANKELRDAVCDFANDSRHANPWAADLYAKARARGHDHPHAVRILGRAWVHVIWRAWQDNVAYDPSKHGALQALLNCTTTEKAA

SEQ ID NO: 467625 - protein, 390 aa, unidentified
MDVLYQSCAGIDVHQANIVVCILHGPLTSTRPKREMATFDTTTKGLRACHDFLSQFHVEAVGMESTGVYWRPVWHALCDDFELILAQPAHMKAIPGQKTDKKDAHWIAKLTRIGLLPRSFVPDETIQELRELTRQRKHYVESRNRETNRIHKILQSGGIKLTTYIEDIMGLSGRNLLQLLVDGTPITPRIVHQSVYTSLKKKVPQLLEALDGYFSDHHRFMLKQSLEIYDFYQKQIELLEERMNVYLSQYENHVEILDSIPGIDVITASVIISEVGVDMSQFPTSGHLASWAGLCPGNNESAGKKRSTKIRHGNSYLKKCLCQAAFAIKNQKGSPLADRFYQIQSRRGSQKATIALAHQLLKIAYILLKEQITYPEFLAQKKTTRDELVA

SEQ ID NO: 467626 - protein, 410 aa, unidentified
MRYYLGVDWADQTHAVWVVDESGTKITERAVPHTAEGLGEWGRELDEWRAQGIDLWAAIERPDGRVVDVLLDHGVVVYPVNPKALDRARDRFRQSGAKSDPFDARVLADFLRTDHAHLRALQPSSEAAQELKLLTEDCQRHIRQQTRLVNQLTATLKAYYPRALEVAELTSALAREFLPAYPTPAALTALTERQWQRWARAHRLPEARTADLWAVLQQPQLPVPAHVVRAKARLMRTLVEQLMPVVAAVAQYRKAIDDFFASLPAAQWARTLPIGKHGITAPTLWARLGDAPGRWESFRHLQAHAGTVPVTKRSGKQQRVVHFRFACDKALRHVVDQVAFLSLLSSTWARAYYDQQRARGHAHRQALRALGAKWLKIIFVMWERHVPYDEQYHLATMTRQQLRQRQEQIA

SEQ ID NO: 467627 - protein, 346 aa, unidentified
MTIVEGTRAVTGGVDTHLDVHVAAALDDIGGLLGVESFEASAAGNDKLLGWLGSFGSITRVGVEGTGSYGAGLARHLRAAGVEVVEVDRPNRQARRRTGKSDPADAVEAARAALSGRAQGAGKTRDGNVEAIRALVVAKRSTRSTKIKTLNQIRHLGFTASDDLRERFRGVSRFHLGATAAALRPRVGSDPVSYATKTALVVLGRRVIALDEEKERLDALLGELVAKTAPQLLELHGVGVDTAAALLVAAGDNPDRLRSEAAWAHLCGVAPIPASSGKVTRYRLNRGGDRQANSALWTIVITRMSSDPRTRAYVARRLEEGRSKADIIRILKRYVAREVYRHLPRD

SEQ ID NO: 467628 - protein, 403 aa, unidentified
MNAVGIDVSKGKSMVAIMRPFGEIVATPFEIKHTASDIKSLVKLINSVEGESRIVMEHTGRYYEVLAHQLSEANLFVSAINPKLIKDFDNDSLRKVKSDKADAVKIARYALDKWQNLKQYSVMDELRNQLKTMNRQFGFYMKHKTAMKNNLIGILDQTYPGVNSYFDSPARNDGSQKWVDFASTYWHVDCVRNMSLNAFIDHYQKWCKRKKYNFSQPKAEEIYGKAKELVPVLPKDEITKLIIKLAVDQLNSASVTVEKLRSLMNETASKLPEYPVVMQMKGVGPSLGPQLMAEIGDVTRFTHKGALTAFAGVDPGVNESGSYEQKSVPTSKRGSADLRKTLFQIMDVLIKTKPQDDPVYQFLDKKRAQGKAYYVYMTAGANKFLRIYYGRVKEYLSSLPESE

SEQ ID NO: 467629 - protein, 408 aa, unidentified
MNAVGIDVSKGKSMVAALRPMGEVALLPQEFLHTGVGLEQMAYAILALGEDTRVVMEATGRYHEPVAAALHEYGIYVCVLNPLYIKQSGGGSIRKVKTDKADAMKIAKYGLDNWVDLREYTPMDTVRQQLKLCSRQYNLYMKTVVSLQNNLISLTDKTFPGVNELFSSPERADGHQKWVDFVMTFWHCDCICRVSEKAFTERYQKWCKRKGYHFSEEKALDIYAESCGHFTTLPKNDNTKLLITTAAQQLLAGKTTLAALRAEMTRLALQLPEYETVRAMYGVGETTAAQLMAEIGDVRRFPRRSSIVGFAGVDPAVDQSGKHETQSTSTTKRGSPHLRKTLYQIVCTYLRKAPADEPMYQFLDKKRAEGKPYFVYMTAAQNKFLRIYYARVKECLEAFDAQKGTSQG

SEQ ID NO: 467630 - protein, 343 aa, unidentified
MGEVSTIGLDIAKSVFQIHGVDADGAVVIRARVSRSKVLQFFTDLSPCLVGIEACPTAHHWSRQLQSLGHTVKLMPPSYVKAYLKRAKNDANDAAAICEAVTRPSMRFVATKSKEQQAALMLHRSRQLLVRQRTMLSNAIRGQLAEFGIVASTGRLGFNRLLEMVDGPEELGIPKVAWVSLMALAEQHQRLQVEIGKLEQCIQAWHRSSELSRRLEEIPGVGPIVATALVGTITDPHAFASGRHMAAWIGLVPQQNSTGGKDRLGGITKQGNRYLRWLLVAGAMAVIRYVQKHGTAKRPWLARLIERKPTKVAAVALANKMARIAWVIMTRGERYRAPTLLTA

SEQ ID NO: 467631 - protein, 345 aa, unidentified
MKEHTTIAVDLSKTVFEVAVSGEPGRVSERRKLSRTQMSRFFAQRPPATVLLEACGSSNHWARQIESLGHRVLLLPPQHTRRYVPRDKTDRADATALLEAHRNEQIAPVPVKTLQQQSLAALHRLRSGWLATRTARLNAIRGLLREMGVAIPQGARHVLPGLSAALSDPSHPLPDALHETLLSAAKEIRELEEKIRLIQRQLEALAQTLPAVGRLRTVPGIGLLSSTALVAVVGDPSRFPSGRRFASYFGLVPRERSSGPSRHLGAITKRGDAYLRTLLIHGARSVLYAAKRSQQNDRLRRWALSLEQRRGHNRTAVALANKLARIAWAVWSRDTVYQPAPPTTV

SEQ ID NO: 467632 - protein, 320 aa, unidentified
MEDMVETSPVYVGIDVAQEHLDGAVAPAGEEWRSPHDEEGIAQMVARLRALRPALVVLEATGGMEVMLVAALAAADLPVVVVNPRQVRDFARAMGKLAKTDRLDAQVLALFAERVRPPVRPLPDAESQALRALVTRRRQVVEMLVAEKNHRRTALPPVRRRIERHITLLEQELREMDDELSRALRASPLWREQEDLLRSVPGIGPILAATLLADLPELGTLTRHQLAVLVGVAPLNRDSGKWRGKRTTWGGRAAVRAALYMAALVATRCNPVVQAFYQRVLAAGKPKKVALTACMRKLLTILNAMVKHETPWNPDYALTH

SEQ ID NO: 467633 - protein, 328 aa, unidentified
MIKSCCDPHLFTNMVTGIDCSKDYFDIAVLKDQKVVFEKRFTNDIIGFGQALGHVLGSHIAMEATGPYYFQLARFFHEQGQKVSVVNPLVVRRFSQMQLSRAKTDKKDAVLIAKFTALTHPKEWVMPSKDILHIRNLESYLEGLKARRGMLYNQLHAFEAAATIDARLNEEIKTELGHYDKKILNKEKEIENLIAESYAGLSQNLRSIPGIGPRSASLLIILTDGFKMFENHKRLISYFGLAPRIYESGTSVKGKNHICKMGMGQVRKVLYMAATAAIRCNKACKELYERLRVKGKPHKVALIAAVNKLIKQSFAIAKTGRQYQLQPS

SEQ ID NO: 467634 - protein, 352 aa, unidentified
MNSSIVTYRTTKNNSPNQYDYYIAVDWSQNNMAIATLNQKSKQLHTLDLRSNLHDLKDYLGNLKGSKIITIEECPAAQWLYVELTENVDKVLICDPYRNRLLSDGTKNDVLDAEKLCLLLKNGLLKEVYHTHNKLFELRKYVSAYEDIIKAGVRLKNQRSALFRSEGKNPRKESVKKTNVSTFIVDILDKNIENYEQDRKHYQLLFTQIKQHNTRLKNLCKIPGIEIVSAVKILADVVDAHRFPGKGNYLAYCGLVKHKRVSGQKTYGLRKPRYSRILKSVYKTAALVAITMSNNPIKDYYEYLLTKGIEIHNARNAVARHIAAITYGMLKSGEKYQPYKWRKENKSESNTK

SEQ ID NO: 467635 - protein, 429 aa, unidentified
MSNFFNDFVVGIDVSSKSSVITILMPGGEAYGKKINITNDLKGFDKLLLILTDITENFSKRPKIFMESTGLYHMPLLNYFNKNNFECYVINPIHTKNFAKQSIRKVKNDKVDSLRIAQLAQSPTFFSESFFDEDIFLLKKLCREYDSLVSHRAHYKKKVLSSLNLVFPKFNDIFSDTFSAVPLAILSNYPTYKDFLSAHKSDVVTLMKSTVSHSSEWADKKYKLIYTTAKEAEMLKLPTTCLGTELTCFINIIKTFSKSIDDLKEQILIFHKQIPNFEDNAKLLCTHPEVGLLSAISFLAEIGDIKNFSSPKKLVAFLGVDTSVSQSGAFTSTHNKLTKRGSNLARKILYNLAIASIKTLRNGASANPVLLTYYNKLIKSKPKKIAICAVMHKLINHFFAILRDKKVFELRLPETHKQIYIDKNLLVVI

SEQ ID NO: 467636 - protein, 430 aa, unidentified
MSYRIAGIDVHKKMLAVVVSDVEIESEYQFERRMFGSSPDQLRSLAAWLLEQEVEEVVMESTAQYWKPVWEALERYWKPLRQKREGTSRRSGTLHLAQAQSNRGRRGRKRDFPDAERLVKRLVARELTLSFVPDAEQRLWRTVTRRKYQLRRDHVRLQNQVESLLEEAHIKLSSFVSDLLGASARRMLKALAEGETNPAALAALADRKLRATPEQLCDALGACTDLKPVYRRLLKMALEQLQFLEQQIGQLDQEMASLLRQHQDAVERLAEVPGLGVDSAQQIIAEVGPTAATFPSEKCLSSWVGACPGDDESAGVNYSHRSPKGNRHMRRILSQTANAAARTKGSIFEVVYRRSVPRLGHNQTIGAIAHRQCRLIWLILHQGVRYEERGPAVTKQSKQRRTARMIGQLRSLGYRIEPPNPQHASPARTH

SEQ ID NO: 467637 - protein, 312 aa, unidentified
MNRVICGVDVSKDWLDAFVRPSGVFERFSNDAAGIGALAALCREHGVELVVMEASGGYERSAFLLLWELGIACALANPRHVRRFAEAMGFLEKTDRIDAAMIAHYAEARRLSALPPPKAAQLRLSALMTRLSQVTSDLTVQRQRRSAARDQQSVASLDEVIALLVRQSRALESEIASMIDDDPLWACLNQAFRSIKGVADRTVARLMAELPEIGRISNKAIVKLAGLAPIANDSGKRSGPRPVRGGRSGPRGILFLVAATAARYDPHLAAFRQRLQSAGKPKMVIRIALARKLLVILNAKARDARREFECAT

SEQ ID NO: 467638 - protein, 359 aa, unidentified
MSNQAHYKVGCDAHKRYSLFAVLDGNGKVLRRRRIDHEPGAIRAFLSPFPPGTPVALETVGNWYWIVDEIEEAGCVPHLAHAAKAKLMMGYVHKTDKLDADGLGLLLHNGTLPSVWIPPGELRDERELPRTRMTFSKMRTQLKNRMHATFAKYGLSLDTLSDIYAAKWRAELTRVIGRLPEETRRCRVQGQIDRLEARILERVRITPTIQLVMSLPGPAEILSIVIDRELGSIDRFSCPKHFCGYAGMVPKVKGSGGKFHYGKMIKQCNNYLKWAFIEAANVVVRQRHHPNWQKKYVVQLYERTRQRKGHAVAVGAMARHLAEATYWVLKKGEPYREPSSKQPTRARSSTPSRQGRTRA

SEQ ID NO: 467639 - protein, 347 aa, unidentified
MLIIGCDFHPGFQQVAIFDNQTGEIQEKRLGHRAEAEQFYRGLSGQEVRVGMEACGHYPWFERLLQELGLELWLGDAAQVRASVVRKQKTDRRDAEHLLQLLLENRFPKIWVPSLEVRDVRQLLVHRHKQVQARTRTKNQLQAMALSQGVQKRRKLWTKAGREELEQLPLLPYAAERRKRLLEALDGLEAEISQLDRRVAEEAGQRPEAVRLMTHPGVGPVTALAMVLTLGPAERFASAKQVGSYFGLIPQEESSGGKQRLGKISKQGSSFLRFLLVEAGQTAARLDPQLKRFYRRLAMRKNRSLAKVAVARKLATRLYLMLRENWTYAQLCQAIMQVSPSHSVAGE

SEQ ID NO: 467640 - protein, 415 aa, unidentified
MSNQYRYFVGIDWATESHEVCVLNAEQQVVDRKAVEHSGSGIAQFVAYLEKLVSGDPEQVAIGIEIPRGALVETLVERGFAVLSLNPKQMDRFRDRHTVAGAKDDRRDALVIADSLRTDMKVFHRVRIDEPLVIRIRELSRTEEDVQQEQVRTGHQLRDLLRRYFPQMVDLCPGVDEPWLWELIELAPTPAKAAKLTRARAEKILRSHRIRRLTAEEIVTQLKAPPLRLAPGAAEAASEHVLLLIPRLRMLHQQRKDIAGRIEGVLGELSAEGESGEHRDVTLLLSLPGAGRVVAATMLAEASQPLGDRDYHALRSYSGVAPITRRSGKRRVVVMGQSCNERLRNAVYHWSRVSAQCDDRSREHYAELRRKGKTHGRALRGVADRLLAVLVAMLKNRTPYDPDFSKLSAQHSVAN

SEQ ID NO: 467641 - protein, 383 aa, unidentified
MLNLTDTPAANDYATIYVAFELSKAKWKLGVVVPGSPKTSYFNVVGGDSAALSELLAKWRAKATATGKPVRIMSCYEAGYDGHWLHRWLTDRGVTNYEIDPASIEVNRRARRAKTDRIDVDQLMRTLAAHVRGEPRVCSVVRVPSHEDEDRRRVSRERKRLQNERTQHSNRIIGLLHAQGIRDVQPLKRGLLASLDQLRTGDGRALLAKLKAEIVREHERLCLVNKQLSELEAASQAEVKAAASGSAGAQIKELARLRGIGLRSGRDLVNEVFYRSFNNGRQVGSFLGTVNSPYNSGNSKRDQGISKAGNKRARVLSIQLAWLWLKHQPESELSRWFQARVGKLKGRIRRIHIVALARKLMIALWKYLTTGLVPAGAAFGRGI

SEQ ID NO: 467642 - protein, 344 aa, unidentified
MAEITTVGLDLAKNVFHAILCNEHGKVEKRKMLKRGKLVAYFANLPACLIGMEACSGAHEWARRFEALGHEVRLIAPHHVKAYVRGNKNDFNDARAIAEAVRVADMRFVPIKTVEQQDVQALHRLRQARVGERTALCNQVRGLVAEYGIVLPQGVSTIRRRLPELLEESENGLSDFFRPLLADCYQQLKEIDAHIEYYTGVLKAHARRNEAIKRLQTVPGFGPIVASVFHAFVGDGHAFGKGRDVAAALGLVPKQHSSGGKSVLLGISKRGDRYLRSLLVHGARSVVRQAQRKDDRLSRWINQLKAKRGANKAAVALANKMARIGWAILSRNDVYRAPAPAAVG

SEQ ID NO: 467643 - protein, 361 aa, unidentified
MKSTTIIAFDQHAATTVAAVLLPDHRTPVLHPLSSESATILRFVERVRRQGPVRCCYEAGPCGFELRRALAAREIPCDVIAPALIPRRPGDRIKTDRRDAGHLAVLYRAGALTAIHIPTAQEEAARDLLRCREDIRADLLRARHRLSKFLLRHGRRFTGTKQAWSKRHDAWLRAQTWPLPTLEQTHRAYLRAVDEVLARLRAIETDLLALLDLEPLRPRVQRLRCFRGIDDLTALPIAAELGDPHRFATAPSTMAFVGLVPSEHSSGTKRVQGGITKTGNAHLRRVLVESAWHYRHHPFVSATLRARQRGAPASVIARAWTAQQRLYRRYQRLAVRGKPKQHIVTAVARELTGFLWAALIQ

SEQ ID NO: 467644 - protein, 375 aa, unidentified
MKEKVRFLGLDVHAETIAVAVAEVDGEVRSLGVIANRADSIRKLIGKLGAVDRLRACYEAGATGYVLYWQLSELGVDCAVIAPTLVPVKAGDRVKTDRRDAEKLARNHRAGDLTAVWVPDSGSEALRDLVRAREAAKQDQLRARHRLSKFLLRTGQRPASGVKAWTELHMAWVRQLRFQQVAQESTRLDYRHEVEHMAERVKRLEQAIGEAVKLASPEMQEVIRGLQALRGIAGISAVTIAAELGNISRFQSARQLMGYSGAVPAEDSSGKRTRRGSITKTGNAHLRRIAIEAAWSYRLRPAIGPGLRKRQEDVPDEIKEIAWKAQHRLHKRYARLGAAGKDQRKIVTAVGRELLGFVWAIGIKAEAASKLRMAA

SEQ ID NO: 467645 - protein, 374 aa, unidentified
MERMSLRGVRHVEPLARRAAPVVPPANNRSGAFGTAAAVTHDRTVARLSIARTRQVTVTKVICGVDVSSLSLEAFVGPAGPARGFPNTGEGIAELLAFCREQSVELVAVEASGGYERPAFAVLWAHGVAVAVLHPRAVRRFAEGLGLLEKTDRIDARVIAWFAKVKGSVPCAPLSAEQQQLRALVTRLRQLTELQAAQKNQRLLVSDATVLGLIAELLKVLTAQMRKLEAQIAALLASDPLWQKLDQAFRSIKGVADRTVARVLAEMPEIGRLSNKAISKLAGLAPLARDSGKKQGPRPIRGGRRNVRAILFVVAGVVRRHDPDFAAFHQRLSAAGKPKKVIRIALAHKLLVRLNAKARQVRNQFVEPTACQTT

SEQ ID NO: 467646 - protein, 349 aa, unidentified
MKTYYVGMDVHRASIVLVVLNGAGKVVMQSVIETGAERVRGFLKQLRGKVYVTFEEGTQANWLHEVVRPLVTEVIVCDPRHNKLLQSGNKNDRVDAQKLAELLRNGSLKAVYHGDNGVRTLKELVRTYDCLVSDTTRVMNRLKAIFRGRAIACGGHDIYRQDRRKQWLEKLREPGAKQRAGFLYEQLAALKPLRHKAKLAMVKEVRRQTAYRWLMSVPKLGPVSVAQLIAVVSTPHRFRSKRQFWTYVGLAVVTRSSADHEVVNGVLRRSTRPLATRGLNRNHNHLLKRVFKNAASSACHSGPFKAGYDVRVARGMVPSLARLTIARQLAATTLALWKRGEQFDPERKK

SEQ ID NO: 467647 - protein, 422 aa, unidentified
MAGTTITIGVDWGVEKLAVCAVDAQGKRLYDKEIDRKGDAIEELVERMLKLADGEAEQLRVALEMPRAAVLDAFLERGVATFSLNPKQLDRFRDRHTVAGAKDDDLDAYVLADALRTDAHLFRRLEPDPEQVVLLRERSRAYEALTEQLLASANQLRAVLTRYYPALLTLGTLHEKPWIWRLLELAPTPQALRDTPVEELAGELQDKALRPARDLAEKLDAARAGKPLPSAPGVVEAYSERALRTLPILRAIYDERQRCIRELKQLTREMAREPKDDADPDPRPSDMKIVLSMAGIGYRIAAVLMSEARHALEARDLQGLRRLGGVAPITRRSGGKHKRGVVSIRRARHIRVSNAIRLWADSARRCDPRARQLYRELRERGHDYERALRGVGDRLLPMLIAALRDGQLYDRRRRQGILPQAA

SEQ ID NO: 467648 - protein, 338 aa, unidentified
MELYAGIDLHSTNNYIGIINDQDKRVYSKRHTNLMPEVLSVLEPFQHCLKGVVVESTYNWYWLVDGLQENGYKVHLANPAAIQQYEGLKHTDDKWDSFWLAHLLRLGILPEGYIYPKEDRPVRDILRRRTLFVRYRTSQILSLQSTLNRNLGHDIPGNWIKQYQVTDSEDMFDSPLLNLTAKIGIETIRDLTKKIEPIEKEVLSRVKLKPEFEYLLTIPGIGKILGLTIMLEVGDISRFPEVGDYSSYCRCVKSERLSNKKKKGRGNQKNGNKYLGWAYVEAAHFSTRYCSKAHSFYQRKKAKKNGAVATKALGNKLARASYYILRDKVPFDEERLFA

SEQ ID NO: 467649 - protein, 395 aa, unidentified
MEPVIGMDVSKGSSVIQAFLGRNEPYGKAKQIYHNEQGFEWLSVLCAELKTRTGAEPVVIMEATGHYHRGVVCYLIQKDIRHIILNPLQSKRAKGMGLRKVKTDEADAWSLAEMFYRGDALPHRIWDESYMELQHATRQHEFVTSLYVQAKLNTRALLDQVIPAYEGVFSDLYSATSLQVLQSCLQGQMDKAEIIEKVLIKYAGRSRSQSWIREKSIRIEEILGKWKEERTSPSQTEALKGMITLLLTLQAQLKQLEQQMEEISVQLPEVDLLKSIPGIGEKLAAAIVAEIGDIKQFRHAKQLVAYAGLDPSVHSSGKFTASSNRITKRGSKRLRRSLYLAVQCGLRQGNNRRLASYYERKKKEGKPYKVTVIACANKLLHHIYAILNRGQPYQT

SEQ ID NO: 467650 - protein, 340 aa, unidentified
MNTTHIGIDLAKSVFEVAISRAPGRVDARQRLPRSRMHAFFAQCEPAEVLMEACGSAHHWGRELEAMGHRVSLLHPGDVARYRDGNKTDRADAKALLEAARNEAIDRVPVKSIDQQAIGALHRLRQGYLQTRTARINAVRGHLREFGVVIAMGAKHVLPETRAALDRGVVPAYLRDALEDVLAEIETLRAKAEALKVELERLAERMPDAQRLMSVPGVGVLTATAMVAFVGDVRRFRSGRDFAAYLGLTPREHSSGHSRRLGSITKRGNAYVRMILIHGARSALRAGKVSKEPDDLRTWALQIERRSGHNVAAVALANKLARVCWRVWRDQRPFERRLAA

SEQ ID NO: 467651 - protein, 353 aa, unidentified
MRIVVALDVHRRQITYKTLDRESGEVRRGRIVPATRGAVREWLDQFAGCEAEFALEGTTGWRFVVEEIGRAGHRAHLADPAETAVKRGRKRRAKTDNADCDLQLKLLLAGELPESWIPPAHMLELRIRVRMRKLLIDQRTAWQQRLQAQLLHQGVVAGLKPRTRAGRAALAQAELSPAGRELVALALRTIDMIDRELAALDRALRSFARRQPACRALIANLYGVGAITATAILAEFGDCRRFASSDDAVRHSGLDVTVYQSDRKRSAGHLSHEGPELLRWALFEAAHQSARRSSPDHDYYLQVAARIDHNRACLSVARKLCRRAHHLLRELGDEALAPVEREPQSEEAIEAAA

SEQ ID NO: 467652 - protein, 341 aa, unidentified
MTEVSTIGLDLAKNVFQAHGASASGAILFRKRLRRDQVLAFFAAQPRCLVAMEACASAHYWAREIAKLGHEVRLIAPAYVKPFVKRQKNNAADAEAICEAAQRPTMRFVAVKSEAKQASAVVFRTRDLLVGQRTQIINAIRGHLAEYGLIAPQGPSHVDQLIAQIEDPSSGIPDPARSCLAVLVETLRALQGKIAALDTEIAARAKRDDGARRLMSIPGIGPLIATAIEALAPPVETFRSGRDFAAWVGLTPLQRSTGAQERLGKISRMGERTLRRLLIIGASGVVRWARRKGVPAGSWLARMLARKPPMLVIVALANKMARIAWALIAKGGSYRAPAVAA

SEQ ID NO: 467653 - protein, 316 aa, unidentified
MKNVRFIGLDVHAETIAVAVAEPGGEVRALGTIPNRPEPIGRLIRKLGKPEQLRVCYEAGPTGYVLYWQLSELGVKCEVIAPTLVPVKAGDRVKTDRRDAEKLARCYRAGDLTPVWVPDAAHEALRDLVRARLAAKRDQLRARNRLGKFLLRHGRRAPQGITAWRTKHLAWLKQQSFEQPAQQATLVDYLYKVEHAAERIVRLERSIDVALETLPEKMRAVIEALQSLRGIAKVSAVSIMAELGEVSRFESPRQLMGYSGIVSREHSSGERTRRGSISKAGSAHLRRIGPGPTDIDQAWALRYWPVNAICLTISRQ

SEQ ID NO: 467654 - protein, 443 aa, unidentified
MRFVGGDVQALFVEQVRGLDPEQCLLVPVDVGKSTAMALVADLFGGIVVDPFGFDLTEYGVSVLLTAVTEAESERGAVMVRFGVEAAGRYHRTLMAHLRRQGLEVVELNPGAVKEARSGQGKRRLKSDVRDLAAMADLLARGGGRPPRPVDIEMAVQAAWAAHRRRKLKVRTALQNQVIGQVDVVFPGLTGCFGDLLETKAGRIIVRHICEPSRIRRLGVEGLRSYVAKRGCRMSRPKAAQILTAAKDALRLDDAEHAAASEVLAADVVLLETVGAEVERAEKILEAILDQTPAGVLSSLPGIGVVRASNYGAALGDPHRFANAAAAYRFSGLVPTDYESAGRRRPGQHISREGSVELREAIIELGRGLASHQPDFGAYKNKKLAEGKKPSVAGVAVGRRAHRLCFAMIRDQTRYDPARWTLAVAAGRSVMAQTPKRVDATAT

SEQ ID NO: 467655 - protein, 350 aa, unidentified
MEFFVGLDVSLDETHICVVDEGGRIIKETCAASEPEAIAKAIRHKGRRIEHVGLEAGNLSQWLYEGLVKEGFSVSVMEARHVRAAFAAMRVKTDRHDARGIAQLVRLGWFKRVHVKSLDAQETRALLTARGFLVEKVTATENSLRAALRNFGLKMGSVTRKTWEGRARELADGNAVLEGIVETMLRVRNLLLVELASLDGQLTALAKSDPVTRLLMTTPGVGVIVALTFRSAVDDPDRFPRSRDVGAWAELTPRRWQSGKMDIAGRITKAGDPRVRVMLFEAAASILGRARIMSPLKAWGLRIAKRTSMKKAIVAVSRKLATILLAMWKSGTAYWATGRPPASAQDFAAA

SEQ ID NO: 467656 - protein, 359 aa, unidentified
MSSSTDQPFECFVGIDIAAKDFTAAILLPNQKPKLEKGSFEQNVDGFSRFTAVLQTTGYASGRVLVVMEATGPYWVALAVTLTQAGFATSVVNPAQVHYFAKAQLKRAKNDQLDAQTLAQFAQALLPKIWTPPPHFYYELRQRLTQRDNLLKLQGQVDNQRHALSVSPTIIESVQVQLESLHQSLSEHIKHMEHELAALIKFDLDERLSPDQPSLTPDQEWQKSIALLRTIPGIGPLTACWLVLATLNFTTCSSVEALVHYAGLAPLERTSGTSVRGRSQIGHSGNARLRTLLFLATLTAARFNPLIKTFWHRLRIEKNKPVKVARCACARKLLHLAYAIVKSGKPFVADYGLDVAKAA

SEQ ID NO: 467657 - protein, 373 aa, unidentified
MLIKIVRVAVITAFATFKKPYKDMKKFIIGIDFSKETVDASIVQKEQPETLIAYKKFRNNLKGVDGLIAWAKSKVAQDGEIIFCGENTGTYSTLFSDELTDRGFIIWIEHGMNIVRGMGDVRGKDDKTDSLRIASYAARFYDKMKPYVRPKDETRVLKTLLAKRDRLKSFLKAEITNTKENPLMLQDSNIASSINEFFKRLEESLRKELKELERMILDVVMSSSEYAKNFNILTSMKGIGLINAVALIVYTDNFTKFNFNHRKIATYWGVVPFKNESGTSVRRGTHVSPKCNSWLKALLTEATLCAIRYNSRIKAYHDRLMARGKAIGIVFNNCKNKMLKILVAMVRDSKIYSDMDVSKDPHTTTTTSSIVVC

SEQ ID NO: 467658 - protein, 498 aa, unidentified
MAKGESTTTQQAKQRKAYRRRKARGQARAARAQEVEAARVQGLPVTQLHAAGIDIGSRSHWVCIGCCGNGRDDLIQEFPAHTDGLHQILAYLRQHGVTTVAVESSGVYWIPLYELLEANGFEVLLVDPSYTKQVKGRPKTDRRDCQWIYRLPGVGLLAGAFRLDEKTCQLRSYLRQRANLIRYAGQHIQHMEKALEQMNLKLTEIVSDITGVTGRAIIQAILKGTRDPHKLAKLRNRRCKASEAEIAQALNGSYRDEHLFALRQAYEAWQFYQKQVGAVEEQIEQQLGRMKQDRALPPLKPRPRNGGRKPNQPRFDVRSALYYVVGIDLTEIEGIGEQTALTIISEIGPEVSRFATVKHFCSWLGLCPQLQKTGGRVRSSRTRPGVNRAAVAFRLAANSLYASKGALGAFLRRQKARLGAPQAVTATAHKLARIVYLALKHGLAYVRQSQEEYEVRLRDQQIKAVKRKARQLDLEVIDKQASTPAAGAAAAGAAAARC

SEQ ID NO: 467659 - protein, 388 aa, unidentified
MQIITDRPHAPTAIRTDLGAIFVSLELSRSTWLITSLSPGGGEKISKHTVRSGDVAGLWARFSQLKDKVQVRTGQVAPIIVIQEAGLDGFWIHRLLQDEGVESHVVDPASIATSRRRRRAKTDKIDGEALVRALLAYKRGEPRVCAMVRAPTPQEEDRRRICRERKTLTAERIEHVNRIKGLLFAQGISDYEPLRRKRRERLEALRTGDGRLLPEHLKAQIGRELDRLELTLQQIKSVETERDAMLSPSDEGTPAPGAMLKSLKGIGPEFAAVLWAEGLFRSFSNRRQVAAYAGLAPTPWRSGSVAHEQGVSKAGNPRLRTTMIQLAWLWVRHQPRSILTLWFHQRVQLNGGRVRKMLIVALARKLLIAFWKYVTAGVVLEGAETTVA

SEQ ID NO: 467660 - protein, 402 aa, unidentified
MKVSGLDVHKDSIFCAIYDGKVYSEVKEYETMTESIRKMGKYLQSEGVVRIAMESTSIYWIPVWDILEEMGFELILVNPFLIKQMPGRKSDVKDAQWISTLLHKCMLRGSMVPCATITELRIYTRKYTRLVQRASQILTEMDRIMVTAGIRIGSCVSSLTNKSVLNVIDALIKGETNPDDLVKLVYGNTANKKSGKLKAALTGNMKEHHRQSLKWSKEQYDLYQKQILECLSCMEKICKAHYSAEMALLQSMPGISKVSAMCIIAETGADMSVFEDSGKITGWAGLRPKNDESAGKFKSTSITKGNKYLRAILVQVAWGASRTKGSYFKEKYQRLALRKSNKKAIIAIARKMLVIIWNILYEKKPYNPALIPVYDPKKVERATAYHQKEIERLSKLLSNKVA

SEQ ID NO: 467661 - protein, 338 aa, unidentified
MDHYAGIDVSLEYSSVCVVDATGKIVREAKVLSEPAALIAWFGSLGLSLVRIGLEAGPLSQWLYAGLRGANIAVELLETRHVRNALKTMPVKTDRKDARGIAELMRLGWHRPVHCKSMAAQETRAMLTTRDLVQSKLHDVEMSLRGTLRGFGLKVGKTTPRRFEARILELVAGHPSLEVIAKALLAVRAVLLREFNAFQKQVRAMARSDTRARLLMSVPSVGPIVALTVASAIDDPTRFKSSKSVGAHFGMTPKKYQSGETDITGRISKIGDKGVRTVSYQAAHVMLTRPVKGCSALKSWAMKLAKRAGMQKAKVALARKLVVIMHRMLADGTTFVDA

SEQ ID NO: 467662 - protein, 342 aa, unidentified
MSISYVGVDLGSSKFHQVAINQAGTSTLNRELVTSEVNLVKAFADLHGEIHVHLEAGELAPWASEIIRPLVTQVVCSHPQTNAWIARDRDKCDRIDAYKLASLLRLNEFKEVHYPREQRRRDFKTLVQHYDELTAQQARLKTKLKARLRMQGVIVSGEEVFSVRGRKAVLEQVNSTAVRTALKQLYAVLDQSIASQTEAQMLMLRAAQALPEIRIMRTAPGIGPIGACRFSAYVHTPQRFSSTRKLWKYCRLSVSHRSSNGKPLRRPRLDRMGCGRLKDVSRKAFEAALRRRDNNGFKRAYYRALETTHDATHARLTVQRKIVSTLRAMWINQTPYCDELMR

SEQ ID NO: 467663 - protein, 355 aa, unidentified
MNSEKYIGLDVHQATIVVAVTDSTGKLVMESILETEAATILQFFAGLRGNLAVTFEEGTWSAWLYDLLKPHVEKLVVCNPRKNALLKDGNKSDHIDARKLAELLRGNQLKPVYHGENGVRMLRELSRSYLAIVKDLSRVMNRLKAVYRSWAIPCAGRDVYYRRHRAQWLDKIREAGVRRRAERLYEQLDMLQHLRQQARRELLAESRKHAITARLRQIPYLGPIRSALAVALMQTPHRFRSKRQLWAYSGLALETRISAEYRLVEGQVRRSKKLLSIRGLNKDHNHDLKALFKGAATMASVRPGPFQDFYQAALAKGIKPTMARLTLARKIAAITLTLWKKGESFDPEKLKSQAA

SEQ ID NO: 467664 - protein, 403 aa, unidentified
MKTIKNNNIANNSLTLQNKTSKRTGTVHPSPGAITPRCSKNVPVPSPKSEQLPEPPSRESSNTQGRIYFTPSLQNKQCIIGIDVSKSSLHIASFPKVFSPFEIPYDSSEHWETLISTLHKFKPLLIVLEASGGYEKPVCKKLKEAGFKVEVVNPERVRYFAKSLGYLAKTDKIDARVIAHYGAVLVENGIVYGKEDKELEKLKELKRRRDQIVEMIVKEKNRLKQAEKGVLGEEIRRSIEKVLEVLEKEKRRLEEEIEKRLNEAKEIKRRVKLLETIPGVSTVTAVSVVVEMPELGKIERRKVVALSGLAPFARESGNLKGKRMIKGGRKRVRQALYMAVLAGIIWNKKIRGYYERLVEEKKKAKKVALTACMRKLLLIMHQMLKNGVGWQENYDGKNLVAAS

SEQ ID NO: 467665 - protein, 311 aa, unidentified
MQITIGIDIWKETVVAYRLSDNQSIQVANDGAGQKTLIRWIGKQNGSLVVFEATGAYHRGREAALAANGTAFAKVNPRQARRFAEATGRLAKTDRVDAIMLAKMGATLGLKADQPKSEALHLLRELLTARRALMKDKVSAKTRLQTTRLTLLKNQIKARLKQIEMQIRQVDAAIAEKIELDETLSNRLAILISIPGIAKTTAFSMLIEMPELGTLEGKQAASLAGLAPISRQSGKWQGKERIQGGRAFLRRAIYMPALVATRRNPCLKAKYDQLVRAGKSGKVAITAIMRKLIVMANAVLRDGRKWSELRP

SEQ ID NO: 467666 - protein, 401 aa, unidentified
MAAVRDNAWVGIDVGKTHHWVCAVDADGKTLLSVKVANDEAGIVSLIAAVTTLTQQLTWAVDIIGAPSALLLALLAQAGQPVRYASGRVVAAMSAAYVGEGKTDAKDARVIAETARLRRDLAIIDTDTDLVRNLAVLTGHRADLIADRVRMINRLRDLMTSVFPSLERAFDYSSHKGALVLLTGYARPDRIRRIGQTRLAAWLRTRHVRGFADVAARAIAAAKAQSVVLPGQDLTASIIAELAGNVLRLDERLKGLDDQIEELFQQHPQAAIIQSMPGFGPFLGASLLVGAGDLRAFPDAGHLAAAAGLVPVPNDSGRRTGNLHRPLRYSRPLRHVCYLSAQTSMMRAGPNRDYYLKKRANGRTHSQAVIALARRRIDVLWALLRENRTWTATPPQLAQAA

SEQ ID NO: 467667 - protein, 385 aa, unidentified
MPGNAFIPREYDIFAGLDVDRKSISVTFTSHQGFLRSLRMPYRVDHLVHYVGKHFANQRVVFAYEAGPTGYGLYDGLVAHAYPCLIAAPAMIPRAPGQRVKTNRLDSRALAENLRGGQLRSIHVPSPVYRELRHLTQLRDTVVSQAVATKQRIKSLLLFEGLAFPPAAAGHQWSLQVKAQLRTLPCAPPVRFKLDQLLATLAFAEQQVLQTTREIRRFCRTEPELARCIQYLMTVSGIGWITASQLLARIGDWRELKNIRQLGAFVGVVPTEHSTGEGPQRGAITRTGDARLRAKLIQAAWAAIRHDAELRPCFRAVCQRHPPDRGPRIAIVAVARKLTVRIAVVLRQQRPFVLRDPVPSVPLTQEETVPQGTTRRLAEPGAAAP

SEQ ID NO: 467668 - protein, 428 aa, unidentified
MGYETVEWVGGDDGVEITRVAGLDLGKAEVTCCVGWPDPDHPGRQVQDVSTWSTMTGSLTGLANQLISQGVELVAMEATSDYWKPVFHRLEAHGLNVIVVNAKHFKHLPGRPKTDKLDSQWLCRLATKGLLRPSFIPPVDIRVLRDLTRDRADLVDQRTANKNRVEKLLEDACIKLSVVATDIFGVSGRLMMDALIEGQRNPFVLADMAQGRLRVKKTALVEALTGMFTDHHGFRLRMLLERIDALSADITILDTRITEMLVPYARQCEQLAGIPGVGQTNAAAILAEIGVDMSRFASAGHLTSWAKYAPGVNESAGKSKGSGATGKGNRYLARALGQSATAARRTKTFLGDRYRRLSRRIGAKKAQTAIGRSILVGVWHLLQNPNTEWVDLGPDHHTRNHNPQRAKQVHLKALEALGYTVTLAPHPA

SEQ ID NO: 467669 - protein, 359 aa, unidentified
MPDARKEINFKGQNIYVGIDSHLKNWRITIMTENLLHKTFSQDPSPVILAEYLKRNFPGANYYSAYEASFCGFNGHRELEKLGIKNIVANPADIPTTDKEKKQKEDRRDSRKIAKTLRAGDLKGIYIPSKESEELRSLVRYRQSLVKDISRGKNRIKSNLYFHGVAIPNEMDNASKYWANTFTNWIKGIEHSTPSGTIVLQDLLESNLLLRKRLLNVTKEIRKAANSDKYLKIYGLLCGVPGIGLIVAMTIISELETMKRFKNLDKLCSYIGLVPTTNSSGETEKTGRVTPRANRVLRGCIIESAWVAARIDPALSLSYNELCKRMKPNKAIIRIAKKLLNRVRYVLKNEKEYVQSIVS

SEQ ID NO: 467670 - protein, 391 aa, unidentified
MHKDSIFCAVFDGKRYSEVEVFETFGTGISALGGYLEAEGVKRVAMESTSIYWVPVWNILSEMGFELMLVNPFLIKQLPGRKSDVKDAQWIAQLLYKDMLRGSFVPCGVIQELRSYTRAYNKLQQRITRIITKMDNILVQGSIRLGSLVTDIGGKSMLGVIEALIAGETDPQRLSKLVYANRKNKENGTLAAALTGCMKEHHRFNLQMAKAEYDLLVRQSGEYLEKIEAICQRSFPRQTALLKTIPGVGRISAAVIIAETGADMNVFENSGKLSGWVGLRPKNDESAGKHKSTAITKGNKYLKPILVQVAWAASRRKGSYFKDKFNRLCIRKSAKKALIAIARKISVVVWNVLKDLTPYNPALQVVYEPAKLEAKIRYHQREMERIGRLKP

SEQ ID NO: 467671 - protein, 352 aa, unidentified
MSYQKLKNLTDELYIGLDVHKAFTVAFILNQMGQKVMVKTIRGHWSNIFLFLDSLPATLHVCYEASNGYGYLYDNISKRAKSVQVAHPGQCRLIFKSKKKTDRIDAEKLAKLLFLNEVPSVYVPDINIRDWRRLIIFRQTLVAEGTRVKNRIRGLLRRYGIKAVTGLWYKKGLDWLESLTFESPATKVELNILLDSLQRLKANINDVEDELQKIADKHPGVSLLMTIPGIGIRTAEAVVAWIDRPDRVPRNNQIGPYFGLIPSEDSSGGKTRMGRITRQGPAIIRKLLCEAAWRAIRFSPEIKAFFEKVQRNDCDRKKIAVVATGHYLARVMLAMLKQNKPWIPKQDIAKAA

SEQ ID NO: 467672 - protein, 380 aa, unidentified
MDTTAREMECNAEEVLFVAVEMGWKQWKVGTTVALGQKPRMKTVSGGDVEAFLVELERAKYRFGLASTARVVSCYEAGRDGFWFHRFLEAKEIENVVVDPASVSVNRRRRRRKTDRLDAAKLLNHLMHWHQGQTKEWSVAHVPSVDDEDARQFHRELECLRKERTRSVNRIKGLLAAQGVRMRKVGHDFLQLLGEARLWDGSKVPPQLRSRLGREYDRMQLVQGQMNELESQRCEALKRVEDPRMDQIRQLRRLRSIGDKGSWLLVMEFFGWRQFRNGRHVGSLAGLTPTPFDSGGGVWEQGIDKAGNPRVRAMAIELAWCWLRFQPQSQLSLWFEERFGAGSKRSRRVGIVALARKLLIALWRYLETGVVPEGALLKST

SEQ ID NO: 467673 - protein, 388 aa, unidentified
MIYLGIDVAKNKHDICVVDSNANVLLEPFTFYNSVAGFKFLLEKLKPFDLSDSLFGLESTGHYGENLINFLHKQGFKLGIINPIQTDALRNTNIRKTKNDKIDTKLVAKALILGNYTPFVPKDLTLLELRSLCRHRDDILKSRSKLKVRLVAFTDQLFPELNYIFNSIHQKSCYALLAEYPAPTDVCAVRVDKLSNLLRKASKGHFGLDKATKLKELAKSSIGINNSSLSIQIKHSLKQIELLNEQIDELDNKIKEVMDEIASPILSIPGISYTLGSIIISEIGNIERFSSPCKLLAFAGLDPTVKQSGTFNATHIKMSKRGSKLLRYALIKAASITIWNSETFNTYYSKKISQGKSHNNVVCHVAHKLVRIVFKILKENINFKEQSI

SEQ ID NO: 467674 - protein, 419 aa, unidentified
MRDIGLDVHRDFCEVAICEGGEVRSAPRIKTSPEELELFAQSLGHEDRVALEVTGNAWSVARMIEPHVAQVLVVSPNDTGIRQARAKTDRLDARALARLLAAGSLEGLWMPDAPTRALRRRLQRRSQLVRARTRAKNEIHAALMRQLIAKPKVSDLFGLGGRRWLEALELPIEERETLDSALRQIDFLDAEIAEADRVIAAAALGSVEIRRLMSVPGVNVISAATFMAAVGEIGRFGDPRRLVGYLGLDPQVRQSGSSPAAHGRISKQGSTSARHALVEAAWSVVAQPGPLRAFYQRLRARRGPQVAIVAVARKLARLFWCLLTRSEDYAYAQPSLTRKKLRRLELRAGAPKGEVEPGIWSTNAAMRRAERELARQGEAAYERTVADWKANNKAKKGAGATPGRASRAARQGSAPEPAL

SEQ ID NO: 467675 - protein, 387 aa, unidentified
MTKNKGRVVGLDVHPDSFAGAVVEGSDPAQARVLSTSTRVQLEQLERWALRHTSTEDRLVLEASGNAFAVAERLRMIGRKVEILDSHCAGKVGKVYCANDRVDAVKIARIYLSALSPIVWQPDAKTLERREVFSAYQAVVKESTRAKQQLRSMLNEHCVRLEKGFRLCHPKAITRLLALREWTPARTMLLQQLHGSLVAARARRTLLRRHMAQEIAADDALMRLSRLCGINLVTLYGVVSAVGDVHRFTHSKKLVAYFGLNPSVSQSGNFEGSGALRRHGRGALRALLIQSGKKLLEVANPLQKWGLAVAARRGRNKAAVAVARKLCVAVWHVLMGHVIGALERLDTLETKLSKFATEIGPAALAAFGYNNKADFVQKKLYVLRSYP

SEQ ID NO: 467676 - protein, 337 aa, unidentified
MAIVKIGLDIAKVVFQVHGVDGHGKVVLKKTLSRSEMLAYFAKLPVCLIGLEACAGAHYWARELRRHGHDVRLIAAQFVTPYRKSGKNDANDAEAICEAVGRPNMRFVPVKTEEAQAILTVHRARELLVSERIALSNQIRGLLGEFGIVVATGMARLRRVMMEVQTGERHLPLLAKETIDELYERMLNLNGKAAEYERKITLLARQSEAAKRLMKIEGVGAITATALVASVSDAKLFRNGREFAAWLGLTPRQYSSGGKTRLGGITKRGDARLRTLLIHGTRSALRFMADKFDSKSQWVIALQKRSCNNVAAVALAARNARIIWAMLARGTEYRSAT

SEQ ID NO: 467677 - protein, 389 aa, unidentified
MPSVSERPEALTAIQTHLAASFVSLELSRSIWLITSLSPGSGEKMSKHSVRAGDVAALLARFSELKRKASERTGKSFPIVVIQEAGLDGFWLHRVLQSEGVESHVVDPSSIATSRRRRRAKTDRIDGEALLRALLAYKRGEPRVCAMVKAPTPEEEDRRRLCRERKVLIAERVKHVNRVKGLLFSQGISGYEPLRRDRRQRLDELTTGDGRPLPVHLKTQIRRELDRLELLLDQIKEAEAERDALLAAPQPAAPAPAGRMLLEFKGIGAELAAVLWLEALFRHFDNRRQLASYAGLAPTPWQSGSVDHEQGVSKAGNPRLRTSLIQLAWLWLRHQPQSALTLWFKERVSGNGGHFKKSTIVALARKLLVALWKYVTAGVVIDGAVMKDA

SEQ ID NO: 467678 - protein, 347 aa, unidentified
MTEGYDGRQVVGMDLHRRRSVLVRMTEDGRKLETVRITNSPAALRAVIARAGKNPRVVIEATYGWYWAVDVLEAAGAEVHLAHPLGVKAYSYRRVKNDERDASDLADLLRMGRLPEAWIAPPEIRELREISRCRHQLVKARTSLKDQVHGVLAKLGIPVTHTDIFGVHGQAWLDELAMPQPYAGKVASLRQLAGELTAEITLLDAVLGDLLAGHEGYAAIQALPGIGPVLAAVIVAEIGDIRRFPGPGQLASWAGLTPRHYESDTKVIRGHVTKQGSRMLRWAVVEAIQRQPAGSRPRQVKDAIIARRGTQAKNIAKIAAARELLTLACYGMRDGRIRRAAPPGQAA

SEQ ID NO: 467679 - protein, 327 aa, unidentified
MVARRWSASTDLSAVAGPLCIGVDVSKDWLDIADTAGRAVRIANTVAAITEALAGPWSQGCRAMVCEATGGYERPLRLVAAQLGLPLRRVHPNRARAFAQAAARLAKTDAIDARMLARFAAFIADEPARPSPAPQTQTLAALVSRLDQLSDLRQSESCRAHQAHEASVKASIGAVIEVLDSQIDAIQHAIDALIASDPILTEKASLLRSCKGVGPKNAQMILARLPEIGALDRRKIAALVGVAPITCKSGSSINRASIAGGRKPLRDTLFMAALCASSHNPTFIAFRDRLKANGKPHKLIIVAVIRKLIVTLNAMIKAKTPFKPALT

SEQ ID NO: 467680 - protein, 362 aa, unidentified
MFRPHTLYIRIRIVRKVSEPAFAMKDQDVTDVIRRKQQTAMRYIGIDVSKATFVVAYSSDKGGEIRTFNNTTTGIKQFIGALPKDSSIHCVMEATGNYSAMLLYLLNVAGIAVSMENPLKIKNFARAMLSTVKTDKIDARLIALYGEKMNPQPFKIQGEAILRLRQKRTVIRQLTKQITAMSNLRGSLACLPVPDKGATHTVDETIEFLEKRRDRLQSELTDLVEVEFSRQLALLTTIKGIGITLATALIITTGGFTYFQNAKQVSRYLGICPTYEQSGTSVNIRGHINRNGDAYTRGFLYVAAWTASRFNTKCGETYTRLRQNGKPGKLAMIAVANKLVRQAFAVVTHDKEYVDGFVSNRP

SEQ ID NO: 467681 - protein, 445 aa, unidentified
MKSRAYRSSPVKQLEPKTLLEGREGQSVVVGLDIGKKVILVMLRWNGDDYARPVRVQNPGELLELVALLKEVGQGRSMKIALEPTGSYGDALRQALHDAPLVVHRVSAKATKDYAETFDGVPSQHDGKDAAVIAELAAIGKCWEWKYPIKTEAEEEISYLVDSLKQQRRLAMHWVGQLEALVVRHWPEVTRLAKLTSGVLLRVLSVYGSPAALAADAEGQKKLQRWGGHYWGETTVQAVWSSASSTMGMRMSRWDIERMREAANHLRAYRKLRAAKWRRLKALGEKNPMIKAQSAVVGMTTACVLWDALGDPKDYHCGAAYRKAMGLNLAERSSGQWEGKLKITKRGSSEVRRYLYLAALRWVKDSAAIRSWYRRQQERRRGESKPVTVGVMRKLALACWQVGARGVTFEAEKVFAPQEPSAKKQKSSQQRKKRQKVLTSRAKAR

SEQ ID NO: 467682 - protein, 366 aa, unidentified
MKISPVAIERIQIFKESQRTIGMDLGDRSSHYCILNEAGEVIWESKLPTTPKGIEEVFSRIPRSRMALETGTHSPWVSRQLTELGHEVIVAHARNVRLIGESSRKDDRLDARTLARLARIDPGLLSPVRHRSAKAQIHLTVIRARATLVSARTALVNAARGLTKSYGARLPKCGSEQMNREIAPGLSQELREALDPLLAEIESLNERIAEYDRRIEKVAKEAYPEAALLRQVKGVGPLIALTYVLTLDDPHRFRRSRDAGCFLGLRPGRRNSGMSEPQMHISKEGDRYLRTLLVQGAHYILGPFGQDSDLRRWGLKLAKRGGKNAKKRAVVAVARKLAVLLHKLWISGEVYEPLRNNNHKVVAAVA

SEQ ID NO: 467683 - protein, 340 aa, unidentified
MQITTIGLDIAKNVFQVHGIDAAEKVVVSKQLRRGQMMKFFAALPPCLIGMEACASAHYWARELTKLGHEVRLMPAKDVKAYVKRNKNDAADAEAICEAVGRPRMRLVRAKSAEQQGRLMQHRARDLLLRQQTQVINALRAHMAELGIVAAQGREGLKQLLKNIADEKDARLPIDARASLIVLAAQLQALHTMIGSIERRIVVQHRANEASKRLECIHGIGVIGASAITATVNDPGAFRSGRDFAAWIGLVPRQDSTGGKQKLGPISKRGDRYLRRILVVGAISVLRRAKLNPEKYPWLTQLLARRPFKVVAIALANKMARIAWALLANGSHYRPRLATT

SEQ ID NO: 467684 - protein, 356 aa, unidentified
MQFYKSQHRYYCGVDLHARQMYLCVLDAEGQKRVHRNMRNDEAYFLKLISPFREDLVVCCESTFNWYWLADLCAKEGIEFVLGHALYMRAIHGAKAKNDRIDSEKIATLLRGGVMPMAYVYPARMRATRDLMRRRTFFVCAQAALQGHIKLVNAQYNLPSIEEDVRSARHHEAILEHFGFAEDVKASVAADMDLIVDYQTVIRRLERKILDSARGHCSEDLDLLLSIKGVGPVIALTILYEIERIERFPRVQDFVSYARLVKCSHDSAGRPQGSGGAKMGNPYLKWIFSEAVIHVPRHNPRIAARLERLEQKHGKGKGKILMAHKLGRAVFFMLKNKTAFDEERFLAGPAGQQAAA

SEQ ID NO: 467685 - protein, 420 aa, unidentified
MYNKSIIKKGKFVKRNILVVGIDIGKHIHKAVGVTIESDFTKPYVVSNNRQGFEGLIKKIGDWKRRLNCKDVVVGFESTGHYWKPLGYYLIGKGIKIVEVSTKFTKKSREMMDNNPLKDDVKDSRVIADLVRQGKVLTIILPKGEKLELRELVHTRENFMKERTSIINRLHKIADITFPERGEIIKAIENKTSLYLLRESPFPDDILKKGRKWLSEKMRKISHGRYGERKIWRLYLLANESVGLKEGIAGFRYELFSLLSSIEILDKKIEDVGNRIRKILGGIEESRFIESIKGIGMITTASIISETGGISNYRSSFELEKIAGLNIYEVSSGNHKGQKKITKIGRSLLRQKLYYAALQQTREGMPLYYFYRRLVDRGTIKVKAIIAVTRKLLALIFALVRDKREYEWEYAVVRKMAEVI

SEQ ID NO: 467686 - protein, 344 aa, unidentified
MDHYAGIDVSLEYSSVCVVDASGKVVREAKVVSEPEALIGWFGSLGFELARIGLEAGPLSQWLYAAMKQAGLAVELLETRHVSDAFKAMPVKSDRNDARKIAQLMRLGWFRPVHCKSITAQEIRAMLTARKLVQSKLLDLENSLRGILRGFGLKVGKTTRTNFAGRIEELVKGHPNLQTIGQALLRARAVLLAEFNGFEKRVRAMSRLHDKARLLMSAPAVGPIVSLTFACAIDDPSRFTSSKQAGPHFGLTPKKYQSGETDYTGRISKHGDASVREALYEAAHIMLTKPIKGCSDLKSWAMRIARRAGTNKAKVALARKLAVIMLRMLKDNVPFNPAAKAATA

SEQ ID NO: 467687 - protein, 334 aa, unidentified
MAMMTIGLDISKSWFQIHWITADGEIIRKKLARGKVLDFFSRLPSCLVGLEACGSAHHWARELIKLGHRARLMPARYVRAYVKTNKHDAADAEACWEAVQRPAMRFVHVKSAEQQGILMLHRTRDLLTRQRTGAINALRGHLGELGIVTGKGKANARELMALVDVDDRIPQSARRALSILVDQINELELNIESYEKMILATARDNEVCRRLMKVAGIGPFAATALAASVDHPQHFASARHFAAWLGLLPKQHSTGAKERLGGISKRGDGYIRTLLIHGARAAVHRVRIHQVTNTWITELLGRRPFNVVTVALAHKTARIAWAIMANGEEYRARA

SEQ ID NO: 467688 - protein, 343 aa, unidentified
MTLKASFKWVNPQDINVLGLDVAKAKIDICFLSSNHSWFYQIANNSQAISQFSQELKALGLNATIPFVLESTGSFHLLLATLLKNDGWNVKEINPIITHQYIKHTVRGTKTDTTDAQLLAKIGLIEGDNLKSFDRDLNIIKLRMLISFLAHLETLIQQSKASFNALEKGLATLRLWESQELEKMKEVIKVLEQRAKGLEREILDIQLSPEAQEQVNCLDSIVGISPFTAKVAYALFAHNTFSSKRAMLAYVGLDPRLRQSGTKTWALRMSKRGHPYMRKRLFQSAFCSLQHSPYFKSIYDKHIQRWKHHFIAVLAVAKKMIYIMRALLKNNTQFDHNYHLLST

SEQ ID NO: 467689 - protein, 427 aa, unidentified
MKYESIRHRQYCQIVNEIRGSDQYLVVGIDVGKDKHHAFMGTATGKSLHRKLIFENNIGGFSRLLRTADEIKLQNALCKIVYGLEPTGNYHKPLAEHLIRCGSHVVLVSGEAVKKNRSLLDGRWDKHDTKCAANIADLVSRGRCLYYDRPLPGVVEIRSLLSLRRRLKKEEHSLRMRIRNNLLAQYFPELDRFYSACESESLAIVRWFLYPDTIAAMEFGEFFHLVTTSHRGLAQTIRLRKIHGQAKESVGCPRRVAGEYEAGLLVEKLNQVREQIKKTNDLIEDFCLEFSEYSYLLTIPGFGPYISARVLASIGDPFRFKNRKQLIKMAGYDLCATRSGRTSDNAVPVISKKGNSELRYALYQAAKVASGKVDLFRTYFTELLRGRERERGIKTKMCVKLAAKMLIIAWTLMKKKEPFDPAYLTFE

SEQ ID NO: 467690 - protein, 517 aa, unidentified
MEETCIDYATDVMWSVAPAKTEEPLERACPRVSVVLGHVGDIGEAVKATIPFERVSTTTYPNRRDIPINMMEKVMARRKRAVLELAHPNAAGIDIGSASHFVAVPADRDDEPVREFKSFTDDLNSLADWLLTCEVDTVAMESTGVYWIPLFELLESRGFTVYLVNARHVKNVSGRKSDVLDCQWLQQLMSYGLLSGAFRPKDEICALRAVSRQRDMLLAYQARHVQHMQKALTQMNVQLANVISDIVGETGQKIVRAIISGERDGKVLAKMKNVRIRASEADIEKSLRGNWRVEHLFALEQAVALFDAYGEQLAVCDRQLESMLAALQQNDGEPGKAKRRSRARNAPKFDVRAYLFGMCGVDLTRINGIDTTTALKVISEVGTDMSRFKSAKHFASWLGLCPGTKISGGKVLSGASKRTANRAAQALRLAAAALRSSQSSLGAYFRRLCARLDRPKAITATAHKLARLIYTMLTKGSEYTDQGQDYFEERYRQRVMHHLAKRAERLGFQLTPIPEVA

SEQ ID NO: 467691 - protein, 348 aa, unidentified
MLADELDYVIGVDTHLDEHVLAVVALPSGAVVAKRSVRASGRGYASALAFALEAGSGARVWAIEGTGSYGAGLARYLVGRGETVLETGRVPQTERRLRGKDDALDAVRTARAALAGDTLALPRVGERREALRLLLVARRSAVDVRREALGQLRAVIVTAPDGLREQLRTLPVGKLLERCSRLRRSSAMSTDEVATRLVLRSLARRIEAATVEAAELERELLGHVHALAPRLLDEPGIGPIVAAQLLVAWSHRGRLRSEACFARLAGVAPVPASSKTTRHRLSRGGDRQLNRALHTIVLHRRQHDRATRDYIERRIAEGKTRRDATRLLKRHLARHLYRLLQQTEPLMT

SEQ ID NO: 467692 - protein, 385 aa, unidentified
MTQLENMSTPSAALDQNSTLICVVEMSLKGWLVAGLVPGIKRQPLKKLEPDEAALHRLLLGWKAEAERAGRQIARIVLAFEAGRDGFWLARWLRARGIEAWVIHPTSIAVSRDHRRPKTDRLDTQMLMRAFLGWLRGEPGHCRMAAIPTLEQEDAKRPTRERDTLVAERTRIINRTKSALIRLGIRGFNPGLRKARERLVSLRTPEGVPIPPNTLAEIHRDLARLAVLQTQIAEIAAARLERLKHATDSAHTMIRLLARVIGTGIETAEMLVTEVLSRNLRDRRAVARYAGLTGSPDESGSKRHEKGLAKTGNARVRRGMIQLAWRFLLFQKNSALARWYNARTENAKRSRKTMIVALARKLLIALWRFVTTGELPEGVALHPAM

SEQ ID NO: 467693 - protein, 454 aa, unidentified
MAPRHQKTKKIVPAQLPVFHPHAAGIDIGAREIWVAVPPGSDPKPVRRFNTFTEDLLKLRDWLLACGVRTVAMESTGVYWIALYQILEAAGLEVCLVNARHCKNLPGRKTDIQDCQWLQYLHSVGLLRSSFRPPEHICAVRAILRHRSRLVRCAADQVRLMHKALTQMNVQIQHVISDLVGVTGEAILQAILEGERDPVKLAKLKDHRIKATCDTLARSLQGDWRPEHLFTLRQSYDTWQHYQRQITASDEQIERQLANWDARVDLNVNPLPPPKTSHRTAQRNEPQFQARTECYRVLGVDLTAVPAFQTSTVLVLLAELGPDFAHKFPSAKHFSSWLGVCPDNRITGGKIMSSATRDVKSRVAEALRLAAQSLWHAQNYFGELYRRWKARLGGPKAITAMAHKLARILWHLLKYRQPFNPDVFRKEEEKLRRKKLARLQNTAAALGYRLIQTQ

SEQ ID NO: 467694 - protein, 354 aa, unidentified
MDIKYIGMDIHKETISIAVMNGEGRVVMESVIETKASTILQCIQGVHGNLHVTLEEGTWAAWLYDLLKPHVTKLVVCDPRKNALLKEGNKSDKIDARKLADLLRGGYLRPVYHGENGLRTLKELARSYLTISKYLTRVMNRVKALYRSWAIPCEGQQVYAPRHRAEWLNKIGEVGVRRRAEFFYQQLDALRALRQAVRQDLLAESRKHKAAKLLRQIPSIGPIRSALLIALIQTPHRFRTKRQLWTYSGLAIDTRDSAQYRYVGGQLQRSKKPQQIRGLNQNHNHDMKAIFKSAASAASSREGAFHDFYQGLLTKGMKPAMARLTLARKIAAITLVVWKKGAHFDAEQLKPQAA

SEQ ID NO: 467695 - protein, 344 aa, unidentified
MGHSMGIDLHRKYFVATIVDEDGEVVRRDRVSTDRLAIAGYLGGLDGERPRKAVMEACYNWSYLYDQLESEFEEVLLAHPLKTKAIAEARIKNDVLDSETLAQLLRAGLIAQAYAPPKETRDVKNLLRYRSSIVGARTAFKNRVHAVLARNHVEHPALRDLSDIFGKKGMATMRSLELYGHDTAILNGLLDIVDEFAGRELELRKQIRAMNREDDITRLLMTVPGVGDITALLIRYEIDDIDRFLSPGKLCSYAGIVPCTLSSGGKTYHGRITKQGNRWLRWGIIEASHKATVTSPSLAAYHARIKGRRCSSDATVALARKLLKIVYCVWKERRPYYEGPVRIG

SEQ ID NO: 467696 - protein, 420 aa, unidentified
MDRDTVNWNERTVFVGFDWASDHHDVIVVDAPGEIVEDFRFEDTAEGWKQFTQKLRRYTPVVVAIETSSGATVERLLEAGYAVYPVNPHAAKRYRERKAPSGTKTDRLDAWSLADALRLEGNTWRPLKPNDPLTAELRLLCRDEIALIEQRTAFICQLRAALGEYYPAALEAFDDWTLPSAWAFVEAFPTPEALLKAGKRRWEKFLHVHKLYRPETYEKRLSLFAQAQTFCGSPATTQAKSLLALALTAQLRVLQIHLDRFRDRIQQLFTQHPDHDLFGSLPGTGEKLAPRLLAELGDDRERFDSPQALQCYAGTAPVSYQSGQIKKARCRRACQKGLRQTVHLWANLSRAKCPWAEAYYQKKREEGQGHASAFRCLGQRWLKILWKMWQARKSYDAELHQRNQVRHGSWVIALMPAPNA

SEQ ID NO: 467697 - protein, 388 aa, unidentified
MQVIGDRPEAASAIRTNLGAIFVSLELSQSTWLITSLSPGSGEKMSKHVVHGGDIAGLLERFARLQEKARARTGRNFPIIVIHEAGLDGFWIDRALKNEGIESHVVDPASVATSRRRRRAKTDKIDGEALVRTLLAYKRGEPRVCAMVKAPTPEEEDRRRLCRERKVLVTERVKHVNRLKGLLFSQGVCGYEPLRRNRRRRLDELRTGDGRPLPKNLKAQISRELDRLELLLEQIKVVETERDALLAAQQIAAPTSAAMLLAIKGIGPDFAAILWSEGLFRHFDNRRQIASYAGLAPTPWKSGSIDREQGVSKAGNPRLRTTLIQLAWLWLRHQPQSALALWFKERVVRNGGRLKKVTIVALARKLLVALWKYVTAGVVIEGAVMKVA

SEQ ID NO: 467698 - protein, 430 aa, unidentified
MANGTRWIGIDLHRRRSQVAIIDEDGELTLSRRIVNDPETFKELLGDPDATHVALEATYGWEWLADLLLEAGYAVHLAHPLRTQAIAAARVKTDAVDAKTLAHLLRAGLLPEAYIAPPELRDLRELLRHRAVLTRMRTAVKNRVHALLARQGMRHEHADLFGKAGREFLAGLELPEGSRRRLDSLMALIGDFDREITATTREIDARAKTDERVPVLCQLPGVGRYTAMLILAEVGDVTRFPTARHLCAWAGLAPTVRSSDGKARLGHISRQGSPALRWALTEAAQKIPTGGGPLRAMFERIAKRRGRSIAKVAVARQILTLCSTGSATARSAVSNTSPSPTTTTGSWPRPHDQCQLTPDSRSRGREVHARASSLLCLASFSTSSWTAVRLIEPPSTARHSGPPRATGWMTGASSHAGTPSANRRPTPRAP

SEQ ID NO: 467699 - protein, 365 aa, unidentified
MNFIGIDVHKKQSQICVLDEQGEVCFETRVPTTRAHLKDAQLIYKGAKILLESSTPSEWVARHFESMGMEVIVADPNFAPMYATRSKKLKTDKRDARCLAQACKLGAYKLAHRLSDEQRRVRMQLDVRQTLVETRTKLTNQIGALLLGSGYHVGTGAAENYARRLEALNLPTELRGQLAPLVNMLTPLNQQIGELDKQLAQRADAEPDAQRLQSIPGVGPVTALMFLAVLDGAKRFESAHSVMSYMGLVPREFSSGEKQLRGHITKAGASRARSLLVQAAQTMMRVKKPQTETLCKWAEGIAQRRGKRIAVVALARRLSGIMWAMLRDGTEYTQRPVSSSVQSVTGSMPRLQARSVRKQREGQAA

SEQ ID NO: 467700 - protein, 347 aa, unidentified
MLYLGLDVHGKWTTVVGFDPESGETVRLDRVSNEPEAMGAALGALPGPLWGVLEAGTNSWAIYRQLEPLFERLVVAHPADLWDRRQDRQAKTDRREARRMAQKLYRGEITPLYVPDARTQDLRCLVRSKVRASRWVTKLTNEIGSLLRSWGYVGRRSLLSKSGLNDVDRAQLPARSARILALWRQMLQTAQAIEDELDQAVAEEAAGEPECVLLQTVPGVGPFTALLVRAEIGEIRRFSGPKALAKYAGLTPKVHQSGEKCRYGPLAPWGNRWLRYALVLWANRIAASRRDTRLRRFYWRRSLAGGKSNPAKSATARKAIQVIYHLLRRGEAWQESLTQEERAGQVA

SEQ ID NO: 467701 - protein, 334 aa, unidentified
MDRTTGELVERRLEHATGEAERFYAALAAPARVGIEATIATQWFERMLGRYGHELWFGDAAEIRAAMVRKQKTDTRDARHILDLLIQDRFPRIWVPSVAERDVRQLVRHRHKLVRFRTSVMNQLHALAMGQGLCLRKKLWTTVGRQKLESLTLDPWASRRRWELLELLDKINPSIEELDRAVISEAESRPAAVGLMQQPGVGPVTSLAFVLTVGPVSRFPNSKKLVSYLGLNRSEESSGGRQRLGAISKQGNTMLRCLLVEAAQTAARFDPELRRDYQRLKFRRGISGVAKVAIARKLAVRLYWKLREAAQPVPLARMQGSPATPVVGESLSSF

SEQ ID NO: 467702 - protein, 381 aa, unidentified
MITIGMDVHVRNSYLHVTDDAGVPLRHGRCHNTMSDLAKFLGPLEPDARQQSEPIQVVLESTTNSRAIQRLLTQYGEEAGVDLTAEVLDARKIRIIAESVCKCDRLDAKVLCELARSNLKLPTCYMPDDEEFALREHLRARTDLVRMRTMFKNRVHAVLHRRGILAPTATLFTKTGRAYLAQLDLETEGREILDRFLALMDETDRTITNSTASLRELMRRPRWAKQAALLMTMPGIGLITAMTILAELGNLDRFRSRAAVANYAGLVPICRSSNDKRYSGGITHRGSKHLRAMLVEAAWMAVPRVPVYRAMFDRIAQKKNKLVAVTAIARRMLEDAFTMLKRDEAFRYVGVSLADAPQQVGSVTPTPTSSSNRKVASSVAG

SEQ ID NO: 467703 - protein, 317 aa, unidentified
MTAVGIDVAKKTLAVLVLLADGRQRQKHCANSPAGHAELVKWLGRYAPGRVPVGLEATGGYQEAVAIALHDAGYAVSVINPQAIAAYSQSQLRRAKTDPTDAALIAHYVLTQAPALWTPPPPELRQLQALVRRLDALIEMRTQELNRLELAAPVVQASIRETVAHFEQQIAQVKAQIATHIDQHPTLRAQRDLMQSIPGIGELTAAIVLGELQNLQRFSSARQLAAYTGLVPHVRQSGTSLRGRGSLSKLGASRLRKSLYYPALTALRHNPPLMRFGARLRAAGKPNLVIIAAVMRKLIHQIFGVLRSGRPFDPARA

SEQ ID NO: 467704 - protein, 351 aa, unidentified
MRTSQKTAGIITTIGIDLGKNTFHLIGFDQRGAIILQQKVSRGQLERRLANIPRCLIGMEACSGSHHIGRQLQAAGHDVRLIPAQYVKPFLKGHKNDYRDAEAIAEAVQRPTMHFVAIKTPEQMDLLALHRVRSRLVSQRTGVINQIRGFLIERGIIVRQGVVPLRKALPEILSSQTGPLSPRMIGVIADLTQDWRRLDERIGGVSAEIEALAEQDDGCQRLMTVPGVGPIISSAVVAAIGNGAGFKQGRDFGAWLGLVPEQESTGDRTSLGKISKRGNKYLRTLFVQAAHVVLVRRPSAAMRGLWPWIEQASKRLHRNMLAIALANKLARIAWAVLARGHEYQPRITAHA

SEQ ID NO: 467705 - protein, 371 aa, unidentified
MFTERTGVGLDVHARSVAAAAIDTVTGEVIERRLGGDYGSVVDLARRLEAGHGPLRITYEAGPTGFGLARELAAAGLTVQVAAPSRLLRPAGQRVKTDRTDAMLLARLTINDDIVAVRVPTLSQESARDLVRARDDARADLMRARHRLSKMMLRRGWVYPGRTTWGPAHDAWLRRIRTNDVPALGSGAAAAFDDAYDAVAHALARRDRLDEAITALAADCEFTDTTTRLSCLRGISTLTGFALAVEIGDWNRFTGATIASYLGLVPCEHSSGQTRSQGGITKTGNTHARRLLIESAWQHKPAYRPGPTLRAAWAKAPAVVAERADRGNRRLHRRWTALAARHKRHAVANTAIARELAGWCWSLATMDAQPP

SEQ ID NO: 467706 - protein, 325 aa, unidentified
MTDLPPLGLDVAKSKFTACLIRESGKLRHTSFANSPAGFAQLSAWLAKLGAGSAHACMEATGTYYEALAAYLHEEGHAVSVVNPAAIKAYAQSRLSRTKTDRVDAELIAGFCAERRPAHWHPPAPELRELQALVRRLDALVAMRTAEENRLSSGVTVEAVRESVAEHVAYLTAQIKKTEALIRSHIDSHPGLRHQRELLDSIPGVGEATAAALLAEVPDLKQYKSARQVAAFAGLVPRERQSGSSVRGRVRLSKIGNARLRKALYFPAVTALRCSPFFQAWAEGLRARGKSKMAVIGAAMRKLIHLAYGVLKTGRPFDPEWTKIA

SEQ ID NO: 467707 - protein, 349 aa, unidentified
MNKKLFVGIDFSKETFDAAILKVSEESSIDLKIIGNEQFKNDVPGCKRFVKWLNKTCALSGDYSSVLVGGEDTGNYSTTLPKQLYVLGIDCSLQNAYSIKCGSGKIVRDKTDKMDAEKIAYYFYRFRDQIRLYKPLSKDMESLERLYSYRYGQVRESARLQCQIKEYEHILKSEPNDETLKFMIQRLEEQERFLKEEIKTIEAKMVEMIEADEELNEIHECLLSIPGVGKITSLLLIVVTRGFTRFDNPKQLACFLGVSPHPNQSGTSVQNGNHRSWFADPYFASLLHMTALTASIHNPKFKAYDERLKSKGKPKLLIMNNIKNKLLTVAFTIATRRTKFYSDYDAKRA

SEQ ID NO: 467708 - protein, 350 aa, unidentified
MVLYVGLDLSRKRIDWRAVWPDGAECGAGVVPPDRDGLARFAADLRPLGDAVLVIESMTGARFVHDELERQGLDVRIADARKAKVAGELLGRSGAKTDRLDARLLAELGRRQLVPEIWLADPATRCARERSRFRLHLVRHRTSLKNRVHQTLITHGIAPGPSDLFGVGGRQRLARLSLPEPWQSNVELTLALIDHLDEQIAEQERLLRRAGADHPYVPLLQTAPGIGPVLGYAIASELGSIDRFASPGKLVGYSGLCPKVDQSGDSDRRGPLTKNGPKWLRWALVEAATHGCNHPAYRDLYQTTKRRLGKQRGPRVAQITVARKLAEAIWYMLSRQQPFAPAGATPGLAP

SEQ ID NO: 467709 - protein, 347 aa, unidentified
MDQQSHYVGLDVSLETTSICVVDDAGAIIWRGKCSSDPDTITATLRQHAPGAVRVGLETGQLSNWLTLSLRRRGVPVVCMDARHAKAALSLQINKTDANDAFGLAQVVRTGWYREVAVKSMDAHTLRMLLVARSRLVSQRQATANTIRGLLKTFGLVVVKGSKGLFPGRVREQIAGNPALTAIIEPLLAVWYAIRDQVTMLDRQMLARTRNDQVARRLMTIPGVGVVIALAYTAVIDDPARFRRSVSVGAYLGLTPRRYQSGEVDTNGHISKCGDSLLRGYLYEAAAVLLYRDGRASILKSWGLGLAKRIGMRRAKVAVARKLAVIMHRIWSDQSEYRWTAIPSTTA

SEQ ID NO: 467710 - protein, 354 aa, unidentified
MNIKYIGMDVHKEAISIAVMNGEGRLVMESIIETKASTILQFIQGLRGDLHLTFEEGTWAAWLYDLLKPHVTELVVCDPRKNALLKEGNKSDKIDARKLADLLRGGYLRSVYHGENGLRTLKELARSYLTISKDLTRVMNRVKALYRSWGILCGGLQVYAPRHRAEWLNKIEEAGVRRRAEFFYQQLDGVRALRQAVRRDLLAESRKHSATKLLRQIPYIGPIRAALLMALIQTPHRFRSKRQLWTYSGLAIETRDSAQYRYVAGQLQRSKKPQQLRGLNANHNHDMKAIFKSAATMASSREGPFRDFYQGLLSKGMKPAMARLTLARKMAAITLTIWKKGARFDAEQLKPQAA

SEQ ID NO: 467711 - protein, 429 aa, unidentified
MEKIRKNVAGIDIGAKKVFTAVENQPVVSHFTFTGDFLKLRNFLLEHEVESVAMEATGVYWVILYEILEKAGIDVWLVDGRQTKQVPGRKTDVKDCQWIQELHSYGLLNRCLVVDSDIKELRSYLRLREDHIRSSSMHINHMQKALTLMNIRLKEVLSQIHGKSGIAIIEAILNGERNREVLVGLCYTSILKDKKDLVYKSLDGIYTKAGLFALKQAYDAYQFYLQQIQQCDAQINIVINRIGKSGEGQNLKNTRKAIRHHKPNVGDLGPNLLNIFGGKDATLISGITDYTWMQLLAETGSDLTKWPTEKHFTSWTGLSPGQNDSGKRKRNAKKKGRPAAGQIFRTIAQGLINSKDIALGAFGRRLRGRKGSGVAIKAVARKIAALYWRVAVKGLEYAENGVKKYEEQLIKQKFKTVMKLANELNLQVS

SEQ ID NO: 467712 - protein, 360 aa, unidentified
MHATTVAVDLAKSVFQLVVANEHWRITETQRLTRTQFERWFVNRSVGLVVMESCGSAHHWARWLNSLGIGVRLLPAQYVRAYVRRNKTDATDAVALLEAARAADIRPVRVKSVEQQALQGLHRIRSLWMGTRTSRINALRGFLREFGIAIPVGARTGIEAISRVLADPNTAVPELIRGSARLLVEEIRLLEARIAQVERELAAAARLSPACTTLLSIPGIGLLTATALVAATSGDVSHFQDARHFASWFGLTPREFSSGNSRYLGRISKKGDRYLRMLLTHGARSVLRAAKVAEGAGKEVCGVRRWALEVQSRTNHNKAACALANKMARICYATLRDKSAFDETARLSKKMNRQAFAMPA

SEQ ID NO: 467713 - protein, 348 aa, unidentified
MDKITAVGLDLAKQIIQVHAIDVRGQVVLRKAVRRERLLALLAQFPCCIVGMEACSGAHHWARELVKLGHQPRLMAAEFVRPFRKSLAAKNDANDAEAVCTAVVQPNMRWVTLKSIEQQARLSLHRLRQGLIEERTATINRLRGVVAEFGIVLPQSVALLQRALPAVLADEERLPVLVQRSVQMMREHLHDLDARLVEFDRAIAQHARSSVPAQRLMALTGIGPLTASAAVATVGNAHDYRNGRQFAAWLGLVPRQYSSGGKIKLGRITRRGDAYLRTLLIQGARSALQAALRRAPARRDRLSAWIVQLAQRVGYHKTLVAIANKHARIIWALLARDQTLDCAHLVTP

SEQ ID NO: 467714 - protein, 433 aa, unidentified
MNRKQTERIEAITATTLVAGIDIAKKVHWASFANYRGIEIGKAISFTSNRSGFEKIVAKIEQLRNNKALREPYNNVVIGMEPTGHYWKTLAHYLAKAGYRVVGVNPHHTKKSKELDDNSQTASDKKESLVIARLVKDGRYFDPYLPEDVYAELRVLANGRVNAMKRNNAVKNNIIAILDEYFPEIFEVFGNPLTGKAARQVLKKCPLPPLIIELGAEGVLAAIKEAVKKSVGMKKARELLEAAKTSVGVTYGLESAEMRLGHLLRELELIEGHLAEIELGMGQRLQETGYSESLLSIKGVGVVTAASFLGEVGDPLRFSDARQIANYAGYNLVEDSSGKSKSGTSISKRGRGQLRSLLYKMAFVMVGQNPEMKALHQYLTSRDKNPLKKKQSLVVVSKKIITVIYSLLKKQALYDPVLALGTVRREMILKSVA

SEQ ID NO: 467715 - protein, 344 aa, unidentified
MQIAVLGIDLGKNYCSLAALDGSGQIVLRRRVRRENVLKTVSRLKPCTVAMEACGGAHHLGRLLRDSGYEVRLMSPEYVRPYVKAQKNDDRDAEAIAEAATRPTMRFVELKSAEQLDMQVLHRARDRLVAERTALINQLRAVLMERGITVPQGRRKLEQALTSMLEGCETALSPRVRALINDMREEWCALDHRICAFDNEFAARAREDERARRLTTIPGIGVLSATALVAAIGDGQSFARGRDLAAWLGLVPRQATTGGKPRLKGISKRGNVYLRKLLIHGSRAALVSLSRSETALGSWLRGLLARAHVNTVVVALANKLAPIAWAILRTGHSFEAKAKGVAVG

SEQ ID NO: 467716 - protein, 286 aa, unidentified
MGNDGAGIAAVLERLSGAGPIARIVLEATGGYEIPVVAALTAVGLPVVVGNARQVRDFARAVGKLAKTDAIDAAILAQFAEAGRAERRALPDELTQTRQSWLARRRQRLEMWLAEEQRLAIAVRGLRAPIQPHGEWLRRQMRDLDTELQGLIRQSPVWREQENLLRTVPGVGPVLATTLLADLPELGRLNRKQIAALVGGAPLNWDRGPQRGARHIWGGRAPVRTALYMATVSAVRCDAVIRAFFERLCAAGKPKKVAITACMRKRLTILNAMRHSRTGWLPAGGA

SEQ ID NO: 467717 - protein, 410 aa, unidentified
MDVFLERCAGLDVHQASVVCCVLIGAPGRKPQKLLRSFGTTTRDLETLRAWLAEHGVTHVGMESTGVYWKPVYAVLEGHVDLTVGNAHHIKNVPGRKTDVKDAEWIAQLVRHGLVAKSFVPPPAICDLREMVRHRRTLIETRTAVRNRMLKLLEGANIKLSGVASDVFGVSGMAMLEALAAGTNNASEMAGLARGRMRRKHAALEAALEGRMREHQCFLLGMQLRTLRTIDQDLEALDARIGAQLEPFQAQHRLLMQIPGVDWVTAAFIIAEIGIDMDVFATARRLAAWAGVAPGNYESAGKSKGAGTRRGNVFLKSALFAAASAAVRTKGSYYRDKYNRLRARRGPVRAIMAIAHKLLIAAFHTLSTGEAFRDLGESYLDQVARKRSTAKLVQRLSNLGYDVMLVPKAA

SEQ ID NO: 467718 - protein, 418 aa, unidentified
MLLAGIDWSDQALDYHLRTAGGRVLADGQVAVSPEGLAELFVSLETHAPPDQIGIAIETAQGAWMQSLLDRGYRIYPVNPKAVERFREAMSANGDKSDGIDRRVLAMFLAVFHERLRPLKPDDPEIISLRIACQDRLRLVEERTAKLTELGAILKVHYPAFGPLFGDLSSRVALEFLEQFPTQKQMQKLTGRRLRNWLRRQQYTCPQRIDAMVAILKQPALPVADHLQTVKAPLIQYLASSLIALKAEIAQREEQITRQFEQLPEADWIGSLPGAGPNLRPALLACLGRDRDRFAATSDAQAFMGTAPVTKASGRSRSVKFRRGCWKFARRTLQLFAEMSRRCCGWAQAFYHKQRASGHTHHQALRALAHKWLKILLAMQRNGTPYNKAVFLNSQRAYLLKTPEIRTPAKAFFVAPLT

SEQ ID NO: 467719 - protein, 363 aa, unidentified
MERERTSVGLDVHARSVVACAIDGDTGELTRARLCPQPEVILGWLRELPGPVAVAYEAGPTGFGLARFLASQGVRCVVAAPSKLRRPAGDRVKTDAKDALLLARLLRLGDIVAVAVPSEQQEAARDLVRAREDARGDLMRARHRTSKLLLRQGIVYSGGTAWTETHHQWLRRQTFDLTGLAVAYDSALETVLLTADRRDRLDKAITAMAADPAWSPMVTRLSCLRGVSTLTGFALAVEIGDWSRFTGSSIGTFLGLVPTESSSGGSRSQGSITKTGNTHARRLLVEAAWHHRRPYPTPSKALRGRWDAAPAAARARGHAGNQRLHQRWQTFTDRKKRPVIANVAIARELAGWCWSLATLEPTG

SEQ ID NO: 467720 - protein, 390 aa, unidentified
MTYVGIDVAKDKHDCFIMSSEGEVLHEVFTIPNNIVGFNDLFGKIQDASDLGKVKVGLEATGHYSYNILGFLLDKGLTTFVINPLHTSLYRKSLSLRKTKTDKVDARTIAAMLASDVNLKSYTDTAYHNEELKSLTRYRFCKVQERSKLKTSVSRLVNILFPELEKMVSTLHLDSVYALLGEYPGAYQIAEAHLTGLKNHLHDASKGRYDRDKAVSIRDVARNSIGSKMPAKSLELRHTIKLIRELDMEIAEVEAEIQAIMDEIASPILTIPGISYRMGAMILAEIGDFSRFDSPDKILAYAGLSPSTYQSGQLTSTYAHMEKRGSRYLRYAIFNATKFVCRWDPTFAAYLAKKRADGKHYNVAISHAAKKLVRLIYAMENSGQAYCPIA

SEQ ID NO: 467721 - protein, 423 aa, unidentified
MKPRRKHLTSPILEPIQPNAAGIDVGATEIYVAIPVDRDPQPVRCFLSFTDDLQALADGLQKCGIQTVAMESTGVYWIPLFQILEARGIQVCLVNARHVKHVPGRKSDVMDCQWLQYLHSVGLLRTSFRPEQAICMIRSLLRHRDGLVEMAAVHIQHMQKALTQMNLQIHHVISDITGITGMAILEAIVMGQHDAQTLARLRDPRVTAPEKTIVKALVGDFRREHLFALRQSMEAYRSYKNLMAECDLEIEQYLVALDAKVDVKEKPLPAAKYPHQARGNEFRFDLRSHLYRIFGVDLTAIPGMDAITAHTILAEIGADLSKFHSAAAFASWLGLCPDNRVSGGKVLSVKTRKVANRAAAALRRAAQSLHSSKTFLGNYYRRMRTRLGAPMAITAAAHKLARIIFHVLTTRQNYDESIFAAEA

SEQ ID NO: 467722 - protein, 360 aa, unidentified
MNTMTETARRVTGGVDTHKDSHVAAALDEVGRVLGTEVFPATPSGYRRLLRWLRAFGDVGAVGVEGTGSWGAGLNRFLTAAGVAVIEVTRPNRQHRRRHGKSDPADAIGAARAVLAGEATGTPKSQTGTVEAIRLLRVARRSAVKARTQAANQLHAVVDTAPAALRQRLGSVNTEQLVTLAARFHRHHPGTPHHAAKLTLRSLARRWEALDNEIAELDAHLDELTAEAAPTLRAINGVGPQNAAALLAAAGDNPDRLRSAASFAALCGTSPIDASSGRQQRHRLNRGGDRQANCALYYVAMSRLRWHQPTKDYMARRVAEGRTSKEIIRCLKRYIAIEVHRAITTDLANNVTPHSTRIAA

SEQ ID NO: 467723 - protein, 431 aa, unidentified
MAKAKSSHTVDIVYPICCGMDIHKSFIVACIAITDERSHTKHHLKRFSTFQKGLRELVAWLKSYNCLDICMESAGKYWVPIFNTLEAAGLNVCLTHPKYVKAIKGKKTDKKDAKWIVELFKCDLVRSSFIPPLIIRQLRELCRYYVKLTYALSSEKNREQNCLTICNFKLDDVFTDLSGMSASRVIAKLLEHGNSDFDVAPLLDHRCKATVQDVIDALDGELSPAETEKLKLVRLHKEYLYYLRDTLESLILELAQPLARQIELLLTVPGIKEPLTAVRILAEIGADMSVFETSKQLCSWAGLTPQNQESAGKKKTTRIGRAGQYLKPLLVQIALAVSKSAKHPEIKNKFDSLKKRRGGKKATIAIARRLLTAIYHMLSKNEAYNAELYHKAGKPPKERILSPEQALDFARRHGFLIEGLDPPPTPGESVA

SEQ ID NO: 467724 - protein, 372 aa, unidentified
MSSTQKTLDMVTQLTATPKLYIGMDIHKKSWSVHMRTDISDHKSFTTPPDCAVLYNYVASHFPGYQVSLTYEAGCCGFSAARYFLNLGWEVLVVNPSDIPRMDKQQYQKTDAIDCRNLSKQLKADQLKGIYVPGEDQDQLKSLLRQRAEITKQLRSVKAQIKSLLLYHGHQIPAQFDNPNWNKNFIQWLSSIKWTYEPGNACMESKLRIYEVIHKEHLQLANLLRSYYRKHYKKDYYLLKSIPGIGGYLSSAILAELGDLRRFGSETELASYIGIVPVIQNSGAKETMQRVTPRCRALLRSYIIESAWVALRLDPAMQNYYRKHLGKNPKSIIVKIARKLINRMLSVIKNETPYQLNTTKEQAKKQPIKNKK

SEQ ID NO: 467725 - protein, 353 aa, unidentified
MNDSTSIAWLGLDAHSKNCVLGQLDDHGTEIKWWGFPTKPEQLVQHIKAIPATEKHLMLEESNLARWISQLLKPHVQQLVVCDARRNRLISQDHHKHDKRDAFALARLLRLNEFKPVWQPAEDQRVLFKRIAKAYENSVQRQTRLKLQLKSLFQHWGLFPTGSTVFAKSGRNDWLKKLPHDPLREQARLLYEVLDQALASQAQFRRLLCQTGRQFPEIQRLRSVPGIGLVGAHLFVAYVQDPKRFPKFSRLARYCRLGIRDRSSDGKPLGYEQLDRQGIGTLKAISYRAYLQAAKRRTGPVWEFYQLSLRQTGSTTHARLNTQRKILLTMWTLWLTGKEFDPQQFFRSQPIDV

SEQ ID NO: 467726 - protein, 353 aa, unidentified
MTLYIGVDFHPHQQTVAWCDTETGETGTVDLLHDGEAVQGFFGTLPGPAVVGIEASNRAAWFEKMLFENGHELFVGNPVLIRKRAVSRHKSDRRDAELILGLLLRGEFPAIWRRPAESAGVIEVLGLRQSLVRQRTQVYNRLQALAHNAGLPKGRMRTLAYRAVVREAVMDETAGFARTQLLGLAEELDRRIAEAEVWLKRKAGESGAVRLLMTQSGVGYLTALATVHTLGDVRRFGRLSKQVAAFAGLDPVERSSAGKVRFGSISKAGSPLLRYHLVYAAHIAARFDARLKSFYKRLAKRKTKAVAKTAAARKLLVKLAIMLRDNITAEEFDLRGTRSRQCPSGSGSEMTAV

SEQ ID NO: 467727 - protein, 381 aa, unidentified
MRVLDLHPAIMNIELYSLEETRCQFNGGTGAIKSAVGRMRPVCALGIDVHQDFYVVVEQVDGTNPKPPQRFPKRAFLRWAARLKENTGAEVHAVYEACGFGFSLQRQLSSLGVQCHVVCPQKLDEQNRRVKTDGLDAKALVLKLDRFVQGNRSALALVRVPTEEEEQKRAIHRQREQLVKARKQLEAQGRSLMVNHGLEPVQSWWKPRAFAALPVPQWMKELLANSQPILVALQQKIASLTIQLQSSATPKQPRGLGLMTSVIIDREIGDWRRFSNRRQIGSYTGLCPGEYSSGNTRLQSCVTKHGNPRLRAALVELAWRLVRFQPNYKPIVKWRQILAKGALATGAARKKAIVAVARQLAVDLWRIKTGRLRAEELGLIN

SEQ ID NO: 467728 - protein, 369 aa, unidentified
MDQSTTIIGLDVHKDSIVASILPSRADRPSKTISFENRPAALRRFTQHLADREPRVFVYEAGPCGYAVQRELVAQHERVVVVAPALTPVRPGDRVKTDRRDAEKLARLYRAGELAPIRVPTRPEEAARDLVRIREDILMDRLRARHRLGKFLLRHGRIYRETKTWGLRHRQWLYAQHFDLAPLEQTCTAYLRTLEETEARLDTVTQQIEDLAQTAPYRRTVQALRCLKGIDTLSAFTLVAETQDFSRFPHAPAYMSATGLVSSEYSSGARQHRGCITKTGNAHLRRVLVEAAWSYRGRNRASLVLAKRRHGCPDAVIQIAQRAQDRLHRKFWRLTSRGKPSQVAVVAVARELAGFVWAIAQHVPIPVAP

SEQ ID NO: 467729 - protein, 602 aa, unidentified
MRDPIRSRLPGGHMGADARLARSRTQCAPTGGLGFDTRLRGGMRAPTGGLASIRGCAGACAPWVGVLVAPLRCAYSRIKQFAVRFVGSRRAGERWVLGRCRTGACCPRRSLAWALIGFDSLMADGGFRCCRTSRERLNFSRGLTQRSIPMVEERVMKRKQEPKSSMSVVYPDAAGIDVGSREHFVCVPADRDDEPIRSFAAFTEDLVGLGEWLKRCRIRHVAMEATGVYWIPLFEVLDRMGFEVILVNGRQTKRPAARKSDVLDCQWIQQMMMFGLLSGSFRPADALCAVRAVTRLRARLIRDGQRSVQRMDKALVQMNVQLGRLLSDLSGKSGMAIIRSIVAGERDGVKLAALCDRRVRTSADVIAKSLVGNWRDEHLLALKQAVATYDLIQSHVAECDEKIAQAIAALQRLPDPPPEPRIKPRTNKRHTALEQHKMRTALFQAMGVDLTAIPTIDIDTATVILSEVGPDLSRFPTSEQFCAWLNLAPGTRISGGKRLGRAPMPATNLAGEALKRAAFNARNSKTFIGAAHRARMARMPKACATKATAHQLARLIYAMVKNGQPYVEHGIERYEAEHRDKQIRRLRQKATSLGLTLVEKAA

SEQ ID NO: 467730 - protein, 356 aa, unidentified
MHSMKQEVRRVVGGVDSHADTHQAAALDERGRLLGSKSFAVSATGYRELLAWLASFGLIERVGVESTGSYAAGLTRHLLAEGVRVLEVNQPHAHTRRRRGKTDAIDAELAARHALSRASAVTPKQTSGIVESIRQLRVARNSAVKSRSAAIVQLGELVRTAPSELREQLAIRSTVKGKAALCRRLRPDTDRLGEPANGAKLALRSLAGRIARLDDEIAQLDGQLAPLVATAAPRTTALLGISTGHAGQLLITAGQNIDRLHSEAAFAALCGASPIPIASGKRGRYRLNPGGDRQANRALHMIAVCRLRHCAKTRAYAHRRSSEGKTKKEIIRCLKRYIARQTYATLRDDLRSLTIG

SEQ ID NO: 467731 - protein, 344 aa, unidentified
MAIAVLGIDLGKNSCSVAGLDGTGRVVLRRRLTRESVLRLAGTLPACVVAMEACCGAHHLGRVLREQGHEVRLMSPEYVQPYVKAQKNDERDAEAIAEAATRPTMRFVELKSEAQLDAQILHRARSRLVGQRTALINQLRAVLLERGIVVAKGRRRLEEYLIGLLDGDRPATLSHRICLLIEDMRLEWSELDQRIAALTAEFVARAREDHAARRLATIPGFGALNATALVAAIGTGETFRRARDLAAWLGLVPRQATTGGKPRLLGITKRGNTYLRTLLIHGARAALPSLSASQSRMGEWLRGLIGRAHKNKVIVALAGKLARIAWAVLRSGETYVKEGRPVAA

SEQ ID NO: 467732 - protein, 313 aa, unidentified
MTSLSTMKTIHYIGIDVSKNTLQIDAANLAPTCPNQAKALHLWLRQLPVRAHLVLEASGGYEKLLTTLAHRAGVPVSIINPVRVRSFAKARGQRAKTDRIDAALITDYARCLQPTPTPPVSAAHARALELLRGRQALVEQRITWINLLEHATDAGLIKLYKKHLRQTDASIAALEKEITTAVTADAVLAARYQRLLAQFGVGAITAATLVLELPELGYLNRKQIAALCGLAPFAKDSGEKRGVRFVHGGRNQLRRALYMATLSAIRQKASPLQDFYLRLRTNGKPGKVALIACARKLLTHLNSQLKNHELSPK

SEQ ID NO: 467733 - protein, 370 aa, unidentified
MGNRSMFVGLDVHKETIDVSIAEGARHGEVRHYGVIASDLEPLDKVVRALRAPDRQLHFVYEAGPCGFGIYRHLIKRGEDCVVVSPSMIPKRSGDRVKTDRRDSQMLARLHRAGELRAIYIPDATDEAMRDLVRAREDAVGVGTQAKYRLKAFLLRQGRRYPGREGWTLPYRRWLTDLSFSSAAQHIALQEYRDAIAETEQRIDRLTEQLRQLAPTWRWAPVVAALQALRGVSFITAVGVVAELGDLTRFRHPRELMAYLGLVPSEHSSGATVRRGAITKAGNPHVRRLLAEAAWAYQGIPRIGRQHASRQEALPKIVCDIAWKAQLRLTTRFRRLVARGKAKPKVATAIARELTGFIWAIAREVSPAPR

SEQ ID NO: 467734 - protein, 405 aa, unidentified
MLITEQVAIAPCTDVMKQAPPSVSVNSRQFSGMRLKGGAMGAIYIGVDFHSRQQTICYLKTETGELVITELKHQDKEQVGAFYQQFQGQVIIGLEASGYSFWFEALLERLGCEVWLGDATEIRRRARWRQKSDRRDAELIWDLMVHDEFPRLHQPAAESREVLRMLRYRQKLIKLRTMSKNSLQAIALQAGLAKGKQLFTRVGQEQFQALPMSPVLQWQRDHWFELLKPLNQQLLETMVWCKAQSKDDVNIQRLRTHPGLGLLTSLCLQHTLQPISRFRNQRQVVAYAGLDPVVRSSAERALHLGISKGGSRMLRYLLVEAAHTAIRYDEDLKRFYQRLVERRGRPKAKVATARKLLIRAYIMMRDEIDYAEFRRRAVAARLARTGQGPTTVPVVLIGQSASPGA

SEQ ID NO: 467735 - protein, 338 aa, unidentified
MKFKRIAIDTSKHVFTVHGVDEQERPVLRRELKRSQMGPFFGKLDPTDVVLEACGGAHHWGRVLSRLGHRVRLIPAQYVKPFVKRAKNDRADAEAISEAAARPTMPSVAVKSVDQQASAMILKHREMLVTQRTQAVNALRGHAAEFGVIAAKGTVQVKALLDKLASDEAIPAPAQAMFTEMGEHIEALDQRMATLDGQLLALHKANPVSQLLAEVPGIGPVTAITLALTVEPGHFASGRHFAAWLGLTPKEHSTGGKQRLGRISKAGNERLRTLLVVGATAVVRHAKPGGKSASAWLLGLLERKPRKLVAVALANKMARIVWAMMARGEAYRRQPAAA

SEQ ID NO: 467736 - protein, 383 aa, unidentified
MRSVALDLAVKKISYCEVEVGQVVARRTVTSLSSLKELLGPECLPARIAIEACREAWHVHAELTRWGNEVLLVDTTRVRQLGVGEHGRKTDRIDAEILAKAVEKGSLPKAHLLSKPRQQLRLELSVRRTLVETRSQYVTTIRGLARTHGVRLPSCDTNAFVSHLRKVKLDQDLQELIEPMSHVLEKVDEDLARAEMRLQSIVEKDSKIQLLMTVPNVNVVVAAVFVSVIDDAHRFRNAHQVGAYLGLVPSEKSSGDRRRLGSITKEGNSYARATLMQASWGLIRLGRSDDPLQQWAKAVAHRRGKFIAAVALARRLAGILWAMWRDDTAYDAARVGFRSAAGLERQAQETKFRATAMQSAAQKARRRARPHERKLEHLKEINL

SEQ ID NO: 467737 - protein, 361 aa, unidentified
MTDRHRTRVVVGVDTHKDFHVAHAKDHLGKQLGELKVPADPDGYRRLLEWARSLGRVEAFGIEGPGSYGAGLARYLTASGVKVLEVGRPNRQHRARHGKSDPADADAAAGAVLAGNALGVPKSGDGPVEAIRILHLTRASAVKAKRSAIITMKGLLVTAPPELRERFKSLSAWKLIRACAELPVVSHPSTPAQSAGCALRALAHRAVALEAEAKALEVQITALVRTTCPRLLDITGVGPEIAAMMLIAMGDNPGRLASEAAFGPHAASSTDWRLSPANAASGRRISHRLTRGGNRQSNRALHTVIVVRLRMDPATKAYMTRRLTEGKTKPEVMRCLKRYVVREIFAAVQPSPSPDPAQLAA

SEQ ID NO: 467738 - protein, 404 aa, unidentified
MKGPIVSIDVSKGKSDYQAFKEMNVKYTGSRSIKHTKEGFDEIVSLVREMEKKLETEVCVVYEATGVYHRVLKKVLEDNNIKQFIINPLLSAKTRKNDSLRSPKTDKLDPKSIAKTYYSHSLHNSHKPETIYHELRELSRYYEDILVHLRKDKVAFRAQLDVVFPGYDTLYDDLYGPVALAVIEKYPHPEMLQKKKINTVSKVIQSKTCHRQAMSDTMADKAIEYSKTIYSGCDRDDIEVLILQRFIKKLKEDMAEAERTIGEMIKLAQELPDFSIIKSIPGIGDNLAARIIAELGDMTRFKKKNELVAFAGLDPRISESGQNDGDHMHITKKGNKRLRCLLYLAVTCSIRLKRDDNSIKDFYIKKKQQSNPMCSKAAKTACASKLVRIIYSMCKTGELYQYNK

SEQ ID NO: 467739 - protein, 408 aa, unidentified
MERMVERSCGLDVHKKSVTACVRAPGAGGGQGQEVRTFGTTTAELLLLRDWLEAHAVTAVAMESTGVYWKPVFYVLEDRFRCVLANAGQIAQVPGRKTDVQDCIWIAQLLEHGLIRSSFVPPRPIRELRDLTRYRKAIIEDRTREVNRLHKVLEDAGIKLAAVASNVLGKSGRDMLQALVAGTTDPETLAQLARGALRKKLPALRQALTGRFRPHHAALLTHVLAHVEYLDEAIAQVSGGIDEALRPFAEAMTALDSIPGVSRRTAEVLLAETGGDMAVFPSARHLASWAGLCPGQHESAGKRRSGKPRQGNRWLRATLLEAAWAATRTDTALAARYRRVMRRRGHKKAIIAVAHAMLVIAYHVLHDRTTYRELGPTYDEQRQATRARRRAIHTLEAQGYRVVLEPAA

SEQ ID NO: 467740 - protein, 425 aa, unidentified
MNYKQNEKINQVKESTLVIGIDIGSTTQYARAFDWRSIELGKVFTFSNSREGFEAFKAWMRHLQDKYRKSDVIVGIEPTGHYWFDLGAYLEDEGILLVMVNPYAVKQTKELDDNSQSKNDRKDPKVIAKLVTEGRYSAPYTPDGVYADLRIMVANRKRLIREMTQIKNRFARWFAIYFPEYTDVFGDYEAQSSMLLLKKVCTPEAIVELGAEKINQIWRDAKLRAVGMKRATTLCETAKRSIGLKKGSSAAQYEMKLLLEDYEYKKAQLDAVMEEIEKLCRKIPESEQMLAIKGIGVITVAGFLAEVGDVRRFESPRQIQKLAGLSLRENSSGKHKGQTTISKRGRRKLRAVLFNAAIPLIAKNPEFKSLHEYYTTRANNPLKKKQSVIAISCKLIRVFYAILANGVTYDAQKMLSDIHRQPQAA

SEQ ID NO: 467741 - protein, 342 aa, unidentified
MDIAVLGIDLGKNSCSVVGLDGSGKVILRRRMQRKTIVVLTSKLSPCIVAMEACCGAHHLGRVLSAQGHTVRLMSPEYVRPYVKAQKNDDRDAEAIAEAATRPTMRFVALKSEEQLDMQTLHRARDRAVGERTSLMNQLRAVLLERGVIVPQGRAKLRLRITELLRQPPEQISSRIRLLIEDMLMRWQALDERIAVFDGEFAAEAKRDEAARRLTSIPGIGALNATALVAAVGNAQTFARGRDLAAWLGLVPRQATTGGKPRLLGITKRGSKYLRKMLIQGARAALPTLSRSNTRLGQWLRGLLARAHSNTVVVALAAKMARTVWALLRYGTTFEPRAIATI

SEQ ID NO: 467742 - protein, 454 aa, unidentified
MSKSALQRDEMMSLNVVHANAAGIDIGNAAHYVAVPPDRDAEPVRTFQCFTEDLHKMADWLAQCGIVTVAMQSTGVYWLPVYEILVQRGFEVFLVNARHTKNLPGRKSDVQECQWLMKQHTYGLLNNSFRPTEEICVLRTYWRQRDDHVKSASASIQRMQKVLTEMNVQIANVITDISGVTGMAILNAILGGERNRSKLAELADPHVKASQAEIAKSLEGNWRPELVFVLRQQMQIYVAYQKRIEECDEALEAHLKTLEDQAEPGSKPQTPQAGKKAGGNAPQFNLRGELYRISGTDLTRIDGIHVMIAQTIVAEVGLDMSKWPTEAHFASWLGLCPNNKITGGKVYHRGTRHVENRAATAFRMAATSLWRSKTYLGAKFKRLRAHLGAPKAITAMAHTLARLVYRMLKYGQDYVDKGMEFYQQRYQQQQINWMQKKAKDLGLVITLTAAPAPK

SEQ ID NO: 467743 - protein, 460 aa, unidentified
MSGGSENGGSIRRSVQRLAVIQPDVAGIDLAAEEHWVCGPAREDGKPNVQRFGTRTHELQALANWLKAQGVKSVAMESTGVYWIPLYELLESRGFDVVLANARQLSHVPGRKTDMQDCQWLQLLHSCGLLRGSFRPKDAICKLRALHRQYANLVGERSRAIQWMQKALDQMNIQVHRAVSELNGKTGLAIVRAIVAGERDPLRLAQNRDFHCRKSVEQIATYLRGNWRDEHLFNLKMALALYDQIAHMLCEYEGELTRQMQALQPPDRQDAPVPPHPNRTKEGVIRSRGEQGQRTDLWRFAGVDLTRIDGLRPDACRLILTEVGPDLSAFPSEKHFVSWLRLSPRTAISGGKVLPRRRNATGATRIAGVLRMAALAVGKGKTALGAAYRRLARRKGADVAVFAIARKLAVLIYRMLRFGQDYLDEGMQAYEARFEAQRLHNLHSVAKQLGYQLVPLETAS

SEQ ID NO: 467744 - protein, 342 aa, unidentified
MSIVIVGIDLGKNSCSIVGLDSLGTVVVRRRLRRDGVIAFASKLPACIMAMEACCGAHHMGRSLAALGHEVRLMSPEYVRPYVKAQKNDDRDAEAIAEAATRPTMRFVELKSEEQLDVQTLHRVRDRLVCERTSLTNQIRSLLLERGHVVAQGHARLRHLLADLLDPGTGSLSARMAFLLGDMRTRWDELDRRIAAFDAEFSAMARTDERARRLTSIPGIGALNATALVAAVGNAATFTKGRDLAAWLGLVPRQATTGGKPKLLGITKRGSRYLRKMLIQGARSAMPTLAKANTAIGAWLRALLVRTHPNIAVVALAAKMARTVWALLRHGRNYEAVPQAAG

SEQ ID NO: 467745 - protein, 315 aa, unidentified
MKKISTAGARQTRNFREQKLTIGLDLGDRSSWYCVLDEAGEVVLEQRLGTTPKAMKEVFGKMPRSRIALETGMHSPWVSRVLSELEHEVIVAHARNVRLIGESRRKDDRFDARTLARLARIDPQLLAPVQHRSAQAQAHLMVIRARAGLVRARTSLINTARGLTKSYGERLRGCNPRNMNGEKAQGLSPELQAALEPLLVAIESLSERIYEYHQQIEKIAKESYPQVARLEQVKGVGTLIALTYILTLEDAQRFRKSRDVGSYVGCSQDGETRGRVSRSCTSARKAIRIYERCWCRERTTFWDRLERTAICGAGG

SEQ ID NO: 467746 - protein, 346 aa, unidentified
MKKIFIGIDFSKEKFDATLIKAEGLKECAPSVHEVFDNKTSGYRCLAKWVKAHADGCAADAWLFCGENTGAYSIGLSNYLYASGYDMWLECAYKIKHSAGIQRVKNDKADSRAIAEYAMRNYDKMILHKPQSASLTCLREVFLYRHSLVRQKVALTVRRDEKRLTQEKSDARAFMSFTSKHLITEVNKAIVKCDQKIKEIIASDDELREVFDIITSMPGIGVQNATCLMVYTDNFQKFDLDSRKIACYYGIAPFGRQSGTSVNSRPQVSPFANRMIKSLLSQAALAAIKFDINVHSYYQRLIERGKHPLLVHNNIKNKMLHILVAMVRDRVKYNPDYVYRTNKEIV

SEQ ID NO: 467747 - protein, 403 aa, unidentified
MTKCFAGLDWSSRTHAVCLIDSRGSVRAEFEVSHDAAGLAQLVRRLKAVHVDSVAIERPSGLVVDALLEGGLQVVPVHPNVVKATRPRYRSHGGKSDASDAYLLADLLRTDGHRFKPLAPQSDEIRSLRALVRGRDDLVATRVQLANQLRSLLESFWPGAAEIFADIDTPIALAFVQRYPTPEAAARLGPKRMAAFCAQHAYSGRRSADELLQRLQQAAAITPAALEMDAKGELVTSLARVLERVVEQIRLLTSRIEHAVQSSDDGQIIMSFPRAGRVCAAQILAELGSVRERFDSVERLAAEAGVTPVTYESGKSKSVAFRWACNHRLRAAITCLADNSRHASAWAAAIYTAARARGRDHPHAIRILARAWLRVIWRAWQDRTAYDPQRHTGAMLQLAAAGG

SEQ ID NO: 467748 - protein, 335 aa, unidentified
MQIKQFIGIDVSKKTLDFSVVINGKVVNHYCVLNNTREIKSVVNKIMKAFGGSYEETIFCMEHTGLYNLPLVKWLQINQCKIWLESGIHIRKTLGMVRGKNDKVDSLRIAMFAYTNRHQIKLWVPPRKVIERLGALLSQRHRMMKARKQLATANSEQKLFIDKEIMHSLNVYTNKTVLVIDKQVKAIEKEILSLIKKDEKLKQMYDIITSVSGIGFVIAVHILVTTNEFISINDPKKYACYCGVVPFEHTSGSSIRGKNRVSHMANKSIKTLLHLAAVSTIRMSGELQDYYNRKVSEGKNKMCAINAIRNKLILRVFACVNQNRLYEKNYCYKFV

SEQ ID NO: 467749 - protein, 327 aa, unidentified
MEENTTLTYLGIDVSKAKLDCSLRLGEKYRSKVVVNSAPGFAQLVEWLNKQCAGQVHVCMEATSVYGEAAAMALSQAGYIVSMINPALIKAYAQSNGLRSKTDAVDARVLANFCHERRPRVWTPPSGNELALRALVQRHQALVEMQTQEKNRLGVARDAVSGSLQQHLAWLDEELKRIEEAIAKLMDDDPDLRNRRDLLDTVPGLGERTIAILLAYIGQMLRFETARQFVAFSGLSPRLHESGSSVRGKPRLSKVGHAALRRALYMPAMVTLYKTAWGKVFRERLAASGKAPKLIIGAMMRKLAQVAYGVLKSGKPFDPQLHGVCIG

SEQ ID NO: 467750 - protein, 352 aa, unidentified
MEQFIGCDAHKKFSVFVAVNEKGQAGEALRVAHDRQLYREFLARLPAHSAIAVEASGSYSWLVDEMERSGHHPRLCNPLEAKRRMGLTNKTDKLDARGLAILLRNGTLPEVWIPPAEVRDQRELLRLRIFLVRLRTRVKNRIHGTLARHNVQVPRADLFGVAARLELVARLPELPVHSREAVEQELTTLDFLETQIESAERRLESIMKVSVEADLLKTLPCVGKILSMVLLLEIGRIDRFPTAAHLASYAGLVPRVRSSGGRTHMGQVCGNVNRNLKWAFVETGNLIVINQRRCAGTHVVRLYQRIKRAKNHQKAVVAIARHLAEAAWWVLTKQEVYREPPGPQQALSSTHG

SEQ ID NO: 467751 - protein, 351 aa, unidentified
MMLIGVDYHPSFQTIAFLIEETGEYEERELNHSDGQAEKFYRDLKQRGICVRVGMEATGHSRWFERLLAELGFELWIGDPAEIKAKRVKKQKFDREDARLLLRLLRENNFPQIWVPDAENRDLRQLLWHRHRLVQMRTRIMNQLHALAMNEGFCWKKKLFSEKGRAQLEKLALAPWAGRRRQGLLELLDRMNPTIEELTAAVEREARKRPEAMRLMTHPGVGPLTALAYVLIIGTPTRFQRGKQIGTYVGMIPCEECSARKQRLGHISKQGNSLLRFLLVEAAQAAARVNPHWRRRYMHLAMRRHKSIAKVAMGRRLAVRLYWMWRNGCEYSPSLEFGSYVGQLGTGHGVS

SEQ ID NO: 467752 - protein, 326 aa, unidentified
MITIGIDVSKVKIDCLWLRDVTTGKVKSKVFKNTAEGHSALLQWAMKNAHVESDEIHFVMEATGIYHEALAYTLYDAGSNISVVNPAKISSYGKSFGVRSKTDKKDSWVIAHFGATQQPLLWQPEPSEIRTLKALISRHDAVSKDIQRESNRLEKATISGISNEIIISIETILMQLKVERKRLENLINQHLDQHPNLKKDRALLESIPGIGPILSRLMIGVIRSRNFTAAPQCAAFVGVVPVQFESGSSVRGRSRLSKAGDANIRAKLYMAAVVAIQHNPDIKQQYERLLKNGKSKMSAIGAAMRKLVQICFGVLKHQTPYQSRVN

SEQ ID NO: 467753 - protein, 325 aa, unidentified
MTYIGIDISKATFVAAFLHGKSYRTETFPNDAKGIRRFISKLDPAIHHCVMEATGNYCFLLLYLLDKSGIRASLINPKKIKNYARVMMSVTKTDSKDACLIADFGERFKPEPYKFPSEKIMILKQKKTVLRQLQKQLTATKNLLSSLEPLPVKDKKCVNSLKQTITFLEKQIKYMQQEMEAVVTEVFDRQLKLLTSIKGIGVTLATALIIATGGFTYFDNAKQLSRFIGICPTIEQSGTSINIRGHINRNGDETLRSMLYVAAWSASQHNKACKECYQRLRGNGKSGKVAMIAVANKLVRQAFAVVTSNNSYIDGFVSTKPDTTV

SEQ ID NO: 467754 - protein, 342 aa, unidentified
MIGRRRSTALPSSSKAAFLSFKTIPFTQKSAQAQITSVKLKRAKFLEYFANRSSCLIGMEACGGAQHWARRLTALGHNVRLLPAQQVRPFAVGNKNDVADARAIWMAVQQPGIRAVVVKTETQQAVLALHRMRQQLVKFRTAQMNGLRGLLAEYGEVMPRGRFALAKAIPLVLERLIDRLPAVLIETLREQYARIGQMGSQITDIERRLHLWHRSDEDCQRIAAIPGVGLLTATAAVATMGDPHAFRSGREFAAWLGLVPRQVGTGGQVRLLGISKRGDTYLRTLLIHGARSVLVHSQNHHRGYRPSFSVDHSTWRRWHWPTKSHARYGRSLPIIASINPDT

SEQ ID NO: 467755 - protein, 445 aa, unidentified
MTFRTIGIDLAIRGDHLAQIYDDGRPNGRAIRFRHDQPSLAAFVRTAVMGLRADDHIQAIMEPTGMSWFPVAHHLADAGVTVARVKGKRVKALRRYLSEHAKTDMADAQILAAMPSFGGPRLDPVHIPDPRSHALQRLTKQRSRFQNEIADARRRLLDLIRWASPRLEAVLPDLGTRLSLALLQKWFHPSDVLKARRTTLAKYVAAHAGGNHPRSGPFVETLITGLREAAQYAQDLHGTHIDFSELQFEIAMEIKNVLATIQTVGDLERHIADLYKHLDPQGLVLSIPGVGRHLAPTLIGILQNIERFHSEKHLRGFCGLFPRRADSGGVERAGQTLTQGGNNRIKHALYLAADTARKTDPELAELYWRLMTVKGHHHKQALCAVANRIVNRIFSVLKRGKPYEVRDREGNSITLSEAKAIILERYTVGENIRAGRRSNRIEKTP

SEQ ID NO: 467756 - protein, 375 aa, unidentified
MKEKVRFLGLDVHAETIAVAVAEPDGEVRSLGTIPNRAESIRKMIRKLGTAEKLRACYEAGPTGYVVYWQLAELGVQCEIVAPTLVPVKAGDRVKTDRRDAEKLARCYRSGDLTAVWVPDEGSEALRDLVRAREAAKQDQMRARHRLSKFLLRSGQRPPTGVRPWPRPYLIWVAQLRFTQSAQESTRQDYLHEVEHMRARVARLEQAIMEAVKLASPALQQVINDLQALRGIADISAVTIAAELGQVSRFSSARELMGYCGSVPSEDSSGKRIRRGGITKTGNAHLRRIVGEAAWSYRRPPCIWYGLRRRQESISEEAKEIAWKAQHRLHKRYMRLGAAGKPQGKIITAVARELLGFIWAIGIRAETTVSQRVAA

SEQ ID NO: 467757 - protein, 418 aa, unidentified
MDNRPPFLYQATVGIDWADQKHDVFVRFTNGDSYRRKIDSRPEAIQEWLLELRSVCAEGKIAIALEQRRGALFYQLCTHLNWIDLYPVNPHSLSSFRLTFFSSRAKDDPIDSQLLEELVRTHSDRLRPYRPESVTERKLDQYCRHRRSLLDLATKTELKLISTLKQYFPLAVNLFAAVGMKSDIALSFLSRWPTLSELQRAKAHTVRSFFYAHNSRSQSRIEKRLQQIGQAHNVTDDLALIEPLVLTTKCLVGQLRQFNHAIKEFDHEIKELFKSHPDHFLFANFPGAGEQLAPRLLSLFGSDRARWADATDIQKYSGIAPVIERSGKSVWVHRRLSRPKFICQTFHEFAQQSVQHSSWAKQFYQHQRDSGKSHHSAIRALAFKWIRIICACWKANKPYDESFYLQTLAGKNSPLPST

SEQ ID NO: 467758 - protein, 384 aa, unidentified
MDKSITLHVGLDVHKDSIDIATADIGRAGEVRHVGSIGGDLASLDKALRKLTSKGHKLHVVYEAGPCGFVIWRHLAALGQSCDVVAPSSIPKRSGERIKTDRRDAMLLARLDRSGDLTAVRVPGPADEAVRDLVRSREDGVRECRNARHRLKALLLRNGITYTGKSSWTSAHLRWLATLRLEHAAQAIAFQEYLHSITEATARVQRLEQAMRDALADWSLKPLVQALMALRGVQLIAAMTLVAELQDFARFESPRKLMAFVGLVPGEHSSGPKRRQGSITKAGNSAARRMLVEIAWHYQHSPRVSPIIATRHAELPRAVTDIAWAAQLRLHAKFKRLLARRVMKNKAVVAVARELAGFVWAIGCEVQTSGWQGLTVEHANAAVS

SEQ ID NO: 467759 - protein, 388 aa, unidentified
MNRIIKIGMDVHSTNFTLCAMEPTIGAEDRIFGEVQVKPDYKEVICFIKSLKMKLGLYDDYSIECGYEAGCLGYTLYHQLTEAGIKCVILAPSTMLSQQGQRIKTDKRDAHLIAQCLCYGGYHPVYIPTGEDDAVKEYLRMRDDHKLALKKLKQQINAFVLRHGHQYTGTKWTIKHLTWLNKLELDPMYRETLNEYIASYKQQEEKITRFDKRIEEISAEARYQENAKKLGCFLGIRTHTALSLIVETGDFKRFAKGNTYAAFLGLAPGEHSSSKSVNRLGISKAGNTHLRCLLIEAAKGICKGTIGHKSKELRFRQNGQSAEVIAYADKANTRLRSKYYRMIRHGKKKNVAVAAVARELACFVWGMMTGNISVVSNAGTSVPAASQG

SEQ ID NO: 467760 - protein, 348 aa, unidentified
MKFYTNQHKFYCGIDLHARSMYLCILDPEGNTMLHKNYKASPEAFLRAIKPYREDVVVAVECMFVWYWLADLCTQEGIPFVLGHALYMKAIHGGKSKNDKIDSKKIAALLRGGTLPVAYVYPMNMRSTRDLLRRRNHLMRKRSELLTHIQNTNSQYNLPEFGKKLAYKANRDGVTDHFPDPSAQKSIEVNLQLLDLYDRLLTELELYIVKQAKGHNVRSFYLLRSIPGMGKILSLILLYEIHDINRFPRVQDFVSYCRLVKCPRESGGKKSGAKNSKIGNAHLKWAFSEAACLFLRGNEQAQLYHERLVSKHGKGKALSILAHKIGRAVYFMLKRKEPFRMDTFFAHA

SEQ ID NO: 467761 - protein, 351 aa, unidentified
MRNLAALECDRRFGRKLTMVGVHPDGSTLTPEGIAMQSRLDLGADVDSRYVMVACAAGSFKTQRIVNEAKAIRAWLRTVPRGSRLAMESTGSYHELLADLAHQADLQVFIVNARDMRRYGQGIGRRGKTDRIDAEVIARYIAREHDELHAYVPLTDEQRLLARLISRRAKLVQAKDSIRQSLGGVPALQSKARRLIGQVDQVIVSLDLLMKRTVKKMPSVGEAAGHIATIPGFGELTSAFLGHCFTRVPYSTSDAVVAAAGLDPRPDDSGLREGRRRLSKRGPAEARRLLFNCARSAAQMTLWRPYYEAQLAKGLSKTAAAMVLARKMLRVAFAVYKHRQPFNPLLVGGRT

SEQ ID NO: 467762 - protein, 411 aa, unidentified
MNKQTKILIGIDWADDKHDFHLIDPSEKVQTGVFKQAPKVIAEQLKVWREQFPGATFLIAIEASKGALINALVEHDDIVIYPVNPAALAYHRKSFAHGGGKNDPLDAKRLAGFLQDRLSDLRPLKRDRPITRELGTLSEDRRRAVDTRADLANELTAVLKQYFPAVLGFNAAKPYAAFLLSFLIEYPTLQAAQEAGEAKLRSYFHGVGMKRKADKLAKLIIEAMPLTVDEVTLRSNRRRAVILAEQLKILNKHIRQYEASIKELLPKHPAYAIAKSLPGPSDNTQARLIAAMGDDPDRYSSAESLQCASGIAPITEQSGKRKFAVARWACTKFLRQTFHEMAGLSITKSRWAKAFYNQQIAKGKSANTAKRALAYKWQRIIYRCWQTGQPYNEDRYIARLKATGSPLCDLL

SEQ ID NO: 467763 - protein, 407 aa, unidentified
MQETTQHDAVDVFVGVDVDVGVDVGKGQHHAVALDRNGKRLYNKALPNDEVKLRALIAELKTHRRLLFVVDQPSTIGALPVAVARAEGVLVAYLPGLAMRRIADLHAGEAKTDARDAAIIAEAARSMPHTLRSLRLADEQLAELTMLRGFDDDLAAQVTQTSNRIRGLLTQIHPALERVLGPRLDHPAVLDLLERYPSPSALAAANEKTLANRLTKLAPRLGKNWAAEIVQALNEQAVIVPGTQAAAIVMPRLAQQLAALRKQRDEIAAEVERLVLAHPFWPVLTSMPGVGVRTAARRLTEAAPKAFATAAHLAAYAGLAPVTRRSGSSIRGEHPSRRGNKVLKRALFLSAFAALRDPVSRAYYSRKIQQGKRHNQALIALARRRCDVLFAMLRDGTIYPPKSAPNA

SEQ ID NO: 467764 - protein, 462 aa, unidentified
MRAIRTPTAPGSSEELQTGNKGARPRASFSDHPAELFSPRHRQAGETREVARNVLFAGIDWASAEHAAAVHDDAGRALASFMVAHSEDGLDKLVGRLRAFGEPGELTVAIERPDGRLVDRLLEAGHPLVAVSPNAIKAWREGEVVSGAKSDPGDAAVIAEYLRLRFHLLKPLRPFSDHTRALRAAVRARGDLVAQRTAAHNQLEATLDAFWPGAKEVFSDVTCKIALAFLQRYPTPASAERLGDKQMAAFCKKHGYTGRRSPAELVERLRRAPVGIAAGAETAARKVAVLGYVAVIASLNAAIKDLDKEVATRLGEHPDGEIFTSLPRSGSISAAQMLAEWGDCRQAYAGPEAVAALAGMSPVTKKSGKHKAVHFRWACNKRFRTAVHIFADNSRHGSDWAAGIYAQARARGADHPHAVRILARAWIRVIYRCWIDGVPYDPAKHRAAVALTTNSDVTSQAA

SEQ ID NO: 467765 - protein, 307 aa, unidentified
MFVGIDVAKDRLDVHIRPSGEAFSVSRDDEGVAALAKRCINPAPTLIVLEATGGFETIVAAGLAAAGLPVAVVNPRQIRDFARATGRLAKTDTLDAAVIAHFAEAVSPPTRPLADPQARVLGELMARRRQLIEMIGAESNRRRLLTVRRTVKTVDRVLATLKAQLEQIDHDIDTAIRGTPAWREAEDLLTSVPCVGPRIARTLIAELPELGSLDRQHAASLAGVAPFNRDSGTLRGRRTIAGGRPAVRAALYMGVLVAIRRNLPLAQTYHRLRAAGKPAKVAIVACMRKLITILNAILRDKTPWQHA

SEQ ID NO: 467766 - protein, 370 aa, unidentified
MIQHTTDTIWVGMDVHQASITAAILHGDDVEPQVVRLPGDLNAARRLFRRLAEKGVPRACYEASGAGYVLQRTLSDDGFHCEVIAPSLIPSRPGDHRKTDRLDAVHLAGQFRSGHLTAVAVPDVDQEAVRHLVRAHLFSRRQITRAKHRIAGILRTGGYHFTETKSGWTKQHRAWLAKLRRELTGPMQTVLTSELQHLEYLEASLSSLEAAITEVSVQPPWREPVEALCCFRGIRTLTAMTIVSEIGDIKRFGSPRQLMGYVGLVPSARSSGERSHRGPITKAGNRYLRRVLIESSWHYSKRACSTLKLQRRRAGQDPAVIGIALKAQHRLERRFQHLSRTKHTNKATTAVARELCGFLWAMLWEVEGRR

SEQ ID NO: 467767 - protein, 327 aa, unidentified
MAQKMDVVGIDVSKATLDAYALTSQQARQFANDPAGHQGLVAWLQELGVGVAVFEASGGYERAAAQSLRRAGLVAHVVDPKRVRHYAQAAGQLAKTDRIDARMIAAFGAAFLLGKPSGVAGGDDPARQDLAELVGTRQVLVDHRTSLQQQADAVTSAIAKKLLLATLKQLDRQIETSDRQIAAAIARHEPFAALARRLDTVPGLGPVSIAALIAWLPELGQLDRRQLAALVGVAPFADDSGKRTGQRHIQGGRMKLRNVLYMATVGAATRHNPVLHARYRRLLENGKKPKVALIACLRTLLTILNAMVAHQQDWNPTKLPATEPVAA

SEQ ID NO: 467768 - protein, 417 aa, unidentified
MQVVRPICCGADIHKDIIVATIATSNQNGIAEYIQRKFCTQNYDLINLKSWLKEHNCFEFAMESTGKYWIPIFNVLEDEIKVYVVHPKYTKSIKGKKTDKKDSKWIAELFRHGILTFSFIPPREIRELREISRYRIKLVAMRTSERNRYQNAMTVSNIGLASILSDPFGKSSKAIMEEVLKSSSLSEGKIRSLLNKSAKKKAKEVFASLEGSRIEPDQRLKMTVSSEHMNQIDSHIDTLELDLVQRCLPYANLINLLIDIPGISYISAIAVIAEIGIDMSVFKSSKQLTCWAGLAPANNESANKKKSVRISRAGTYLKPLLIQCALSAIKSTSNPYYRIKYNIIKKRRGHKKAIVAIARMILVNIYAILSTGEAYNPCDFKEVTSPKPAKKEMTIENALSFLQAQGIDTSALVLNVS

SEQ ID NO: 467769 - protein, 320 aa, unidentified
MTSRGMEKMKHDTIGVDVSKGHLDAHRLADGATRRFANDKRGHKALIEWLAETPAIRVVFEPTGPYHRGVERALGLSGVPFVKVNPRQVRRFAEAAGKLAKTDRLDAAMLARMGAALELKARPVRSEALLELRELYVARAALVKDRTAAKNRGKVLTLSLLKRHNAQRLEHIDRQIAAVEAAILGIVEADVGLSDRFAILTSIPGVSNITAFALLIEMPELGALEAGQAASLAGLAPVVRQSGRWTGRAFVRGGRASLRQALYMPALVATRFNPDLKANYAHLLAAGKPAKVALTAVMRKLIVLANALLKANRRWTPKTA

SEQ ID NO: 467770 - protein, 465 aa, unidentified
MELTLGIDVACRAAHQASLARPDGTFVWTGRRFFTRPVDLEKLWAACGLTDEDTVRIVMEPTRNAWVVLASWFRHRGARVSMVPTTQSADLRAYYSKHTKNDHLDSKMLARLPLLHPEGLRDHTGEGPAEPLRRIVKIRASIIKRRTAVFQRLDAQLELLGPAWYDALGSRYGKATLALLARYADPNTVIRLGHARLTRLLIRYSRGSWREPQATLILAAAQESSQLWGAGTAARIDFAELAADIAIEAEQAQALTEQIDDLDERVANLYAEADPHGIIASAPGVGPVIAGIIAGRLGNPHRFNSLAAIRAYSGLIPKLNQSGQSHYQHGLTKAGDPLLREALFTAADHARKIDPQLAAKYKRLMQTERHHDSATCHIATMLLTRIATCWRTGQSYEIRDTDGRPIDADEGRRLVIAHHRIDRQTRINAANTRQSQRIKGRTGRGQQESPSAPNHRPVATSLEPV

SEQ ID NO: 467771 - protein, 500 aa, unidentified
MSSELVYVGLDVAKATLDVALRPSGESWQTANDDAGVADLVARLRALTPTLIVCEATGGFERPAVAACAAVGLPIVVANPRQVRDFARSTGQLAKTDALDAAILALFAERVRPTPRPLPSDAAQLLDALLTRRRQLLEMLVAEKNRLGFAPRPLHRGIRQHIRWLERQLDDVTGELAALIEASPVWQAKSDLLQSVPGIGPIVSAVLLGELPELGALSHKQIATLAGVAPLARDSGTLRGKRMVWGGRGGVRTALYLAALCGRRWNPQLRVFYERLRAAGKPKKVALIACARKLLTILNAMVRDQARWAIPTSGIQYSCLRIAPKLRRHTVHCTNAMLPQTTGAASFRRMLGGHVGYAELRPLNDCLTRRRHHPSVKSRRRFVMFSARIPAAECRRHPAKRSTQRLHGSAYSASVAGRCRRAPAARRSARSVVVELMAEYADEALPSQPLLLAQRAAHVGEHEQLMGQPSLAKRPAPQLPAPLPRAPRKRDLEHAGRVVR

SEQ ID NO: 467772 - protein, 332 aa, unidentified
MRYVGLDIHKKHTQACVRNEKGKILLDERFKTDADEIGKFFSKVEGHGPLTVAMEATGFYFWIYNCIAARGHDVKVVHPARIKPLMKAKSKNDRNDASMLAELLRTGCLEGIYVPSEEVRDMRDLTRHRESLVRKKGDLKREMIAALDQRGIKMPAEFRTNFTKKHMAWMRSLEIFTVDEKLDLLELTMAKLENVEQKIEEEWGKDEDVVLMQSVPGIGLVTSAVVKAEIGDTKRFGSPDNLAAYMGLVPTTYQSGEKEWSGPTRHGNSRVKHVLLEATLMHLHICPDSKISRYYHRKRDTIGAKKAIVAAGRKMAEALYFMLERREEFHAH

SEQ ID NO: 467773 - protein, 351 aa, unidentified
MPRGSTVRAVTTIGIDMGKNTLHMVGLDSLGAIVLRERVSRGRIKSRLANLPPCLIGIEAGMATHYVARELAALGHDVKQVPPAYAKPFRQGHKNDFRDALAVAEAVQRPTTRFVPPKSNEQLDLQALHRVRSRLVSQRTAVINQIRGFLLERGIIVRQGLRFLRQLLPDILAKRTDVLSPRMVRIVSDLAGDWRQLDDRIETVTDEIETLAKADDNCRRVMTVPGIGPIISSAMVAGIGNGSAFAKGRDYSAWLGLVPKQMSTGDRTILGRLSKRGNSYLRMLFIQAARVILVRPANWPKHGFGVWLVRAIQRLHPNVLAAALANKLARIAWTVLAQQRSYEARVTKAEA

SEQ ID NO: 467774 - protein, 370 aa, unidentified
MKKNNTVKQSSKRAMDQKTGPITIGLDLGDKTSCYCVLDSEGGVQSEGSVGTTRKAMAQKFSGIKRCRIAMEVGTHSPWLSRWLSGLGFEVIVANARQVQLISASSRKNDRMDASLLARLARVDPQLLRPIRHRSEQAQADLMAIRIRATLVEARTGLVNAARGFTKAMGERLPACDTDSMGVEKLEALPAELQQSLRPLLEQIEALTAQIKKLEGNLEQIARTRYPETQLLTQVSGVGTLIALTFVLTVEDRERFQKSRDVGCYVGLRPKQSESGESQPQLRITKEGDRYLRTLLVQGAHLILNRRGPDTDLKRWGLKLAERGGKNAKKRAIVAVARKLAVLLHRLWVCGEVYEPLRNSQPSKSSKQAA

SEQ ID NO: 467775 - protein, 418 aa, unidentified
MLKIVYPICCGIDVHKKFVVATIGTTNKSGVTEYQTKQFSTFTENLHQLLDWLKSQSCINVCLESTGKYWHPIFNVLENYCDVVVANPKYVKGIRGKKTDKKDSIWLCDLHKHGLVPGSFIPPLEIRQIRDLMRYRFKLINFKSSEKNRIQNSLTVSNIMISNVVSDTFGVSSMKVINHILENPDDKDFEVLSMLHGKMKDKAETITKSINGNLTKPQADKMRVCLDHFGNIEKHMADIETVILGLAQPYLPQIELILSMPGVKDVFTAISIIGEIGTDMSVFLSSKHLCSWAGLTPQNNESAGKKKSVRVSRAGVYIKPLLVQCANAAIKSKKCTYFKVRYDQIKKRRGHKKAIIAIAHMLLNCIYHMFDKNEPFNYDLFKIDSKPKQTYAPQITEEMALRYLQTLGYQIPDLPNTT

SEQ ID NO: 467776 - protein, 293 aa, unidentified
MTITTIGIDLAKNVFQIHDVDHSGKTVLKKQLRRNQVLTYFIKLSTCTIGMEACGGTHYWARKLTAMGHTVKLMAPQFVKPHVKANKTDAADAEAICEGVTRPTMRFVAIKNAEQQAILSLHRARQDFDKARMAQANQIRGLLGEYGITIPQGIKYVRKDMLMLLDSPEHELPSAFTDLLKRLHARLMVLEGQVSDLETQINVWHSNNEYSQRLCKILCIGRELAAWLGLVPRRHSSGGRPMLLGISKRGDTYLKTLLIHGARSVVRVAKNKSSLFWSSPTGHFSKGIFKFNR

SEQ ID NO: 467777 - protein, 357 aa, unidentified
MNSSKNISFTGSHFFVGFDAHLKNWKVTIRFNCIELKTFSMNPSPVELVNYLKKNYPGGIYHIVYEAGFCGFWALRKFRELGIDCIVVNPADVPTSNKEKVNKNDPIDSRKLARELENKSLKGIYIPDIFHEELRHLMRLRFRIVQNQTRVKNRIKGLLHTQGITIPLNFTGNSRWSASFIQWLKEINLNTDAGQFTLSNLILQLQQQREHNKNVLRQLREQAKQKHIAPVIRALLSVPGVGFITAMSLYTEIVDMKRFSNQEQLAAFVGLVPSTRSSDETIYNNGISFRRNKFLRPIMVEAAWTAVKTDPAMTLKYRELTKRMKPQDAIIRIARKLLQRIRHVWLNQEDYVYSLVA

SEQ ID NO: 467778 - protein, 367 aa, unidentified
MGKSSKVFVGMDVHKESIDITLAEEGGEVRRFGQIGGERTALMKAVRQLTAGGRERVFVYEAGPCGFWIYRALTVVGHACMVVSPALIPRRAGDHVKTDRRDSARLASLARAGELQAIHVPDIRDEAIRDLVRARDDAVIAQRRVRQQLKALLLRNEVRYGGKTSWTGAHRRWLAELKLPEPAQQIAFEEYVDAIVVATSRIERLTRSIESEAAPWRFAPVVAALQAMRGIQFVHAVTLIAELGDLTRFASPRALMGYLGLVPREDSSGEHRHQGSITKAGNSYARRALIEAAWAYRYPARVTRIIATRQAGLPKAACDIAWRAQLRLSAKYRRLAARHLHHNKIVVALARELSGFVWAIGQSIKPN

SEQ ID NO: 467779 - protein, 359 aa, unidentified
MAKFIKMISTVMSAIGLDLADVWSDWAGLDESGTVVRRERVKTTESELRRVFGEIAPTTIAIEVGTHSAWISRVLSSLGHTVVVANARRVALIHRNKRKNNRIDAEFLARLVRADKELLFPIQHREERSQADLAVLRSRDVTVRSRTKLINHVRGTCKTFGVKLPRCSAEAFVVRCSGLVPVALHSAVNDVLALIADMTAKIKSYDSTIAAMIKRHPAAQLVGKITGVGPLTSLAYVLTIEDPHRIVRSRSAGAYFGLVPGSDDSGEKHEQRRITKEGDQFCRRLLVNAAQYILGPFGAKVDSDLRRHGEAIASRGGKNAKKRAVIAVARKLAVVMHHLWVHNEDYVPLFNAAQKPVAA

SEQ ID NO: 467780 - protein, 433 aa, unidentified
MVTREIVEQKWWTLGVDCGEQEHRFVLEDELKVRQSAMWVGNRVDKIHGALLNILAMLPEGYRLEIVTEGLRSIGGILMQVATELGIRVYQVNLKALAHYRDLEGQPRKDDDRDADLLARMRINGVEGCRLALDSNPEERMLCRLTRIHTQLVEQKRRATSRLRSRLLELGPEVVSSSWEGPRYSSEGMRVVLERWPGFEGLERARVSTIERELRPVTRKGQACEGMARALQKMAGRIKLNSAERDVITIELGMTLEQLRLTKTSLDTIDKRVNKAVNSHPIAQKLLEMPGVGHFTAGVLIGEILPLARNESEGKAATYGGLTPLSRRSAKGGKPSRLARGVNKHAVRVLYLSAVSAKQVSALDRAYYEKQFKRHRGHPKPHVKSFLSLARQRFKVMYKLLTTDARYDKEKLIESHLERQKRERTKSKNSQAA

SEQ ID NO: 467781 - protein, 348 aa, unidentified
MNLKRIGLDTSKAVFTLHGVGEDERAVLRRDMRRAEMEAFFAKLPPTHVALEACGGSHHWGRRLAALGHTVQLIPPQYVKPFVRRGKNDRNDAEAISEAAARPDMPSVPVRSAEQQAEAIVLSARELLVRQRTQLVNAVRGHAAEFGIVAAKTISQLPGLLEAVAAAETVPATAKEMLAFLGEQVAQLDDQIAELERRMKQQHKANPVSQLLAEVPGIGPVSALSLALTIDPGRFQSGRHFAAWLGLVPKEHSTGGRQRLGGISRAGNERLRQLLVLGAMAVIRFAKPGSKSASAWLLALLERKPRKLAAVALANKMARIVWAMMATGEAYRGSKKVAAPAAGAAAAA

SEQ ID NO: 467782 - protein, 331 aa, unidentified
MKKRVWVGVDVGSQELVVAVERNGKRGETLSFENTAEGHRKLIHLITKRGASARVVLESTGVYGFDLALALERASRVEVMVANPRAVSHFGRASLQRSKTDALDAEVILEFAKRMPFEPWVAPAREILDLRAISRRMEALTKTATQEKNRLHASNQSEELGEVVRADIVFSIEHLESRVAQLRDQALQLIASHSHLRDAFGHLTSVKGIAEVAGIQILAELAILPKDMSVRQWVAHAGLDPRQYQSGTSVHKPARISRTGNAHLRRALFMPALVAVQHEPHVTAFYEKLLNRGKTKMQANVAVMRKLLHAIYGMLTHDQDFKGEKFYVIGA

SEQ ID NO: 467783 - protein, 351 aa, unidentified
MPFKTDTATVRTIGIDTGKNTLHMIGLDEKGTIVLREKVARGRIAARLVNVPQCVIGIEAGMATHYVARELTALGHDVKQVPPAYSKPFRQGHKNDFRDAYAVAEAVQRPATRCVPVKTDHQLDLQALHRVRSRLISDRTAVINQIRSFLLERGIPVRQGLRFLRHQLPDLLATRTDVLSPRMIRIIEDLSGDWRHLDGRIEQVTEEIEVLARGTEGCRQLMTVPGVGPIIASAMVAAIGNGTAFAKGRDFAAWLGLIPKQMSTGDRTILGRITKRGNRYLRTLFMQGARVILLRPANWMKHSFGPWLTAAAQRLHHNVLATALANKLARVTWTVLAQGRSYEARVEPKTT

SEQ ID NO: 467784 - protein, 346 aa, unidentified
MNHYAGIDVSLECSSVCIVDASGKIMREAKVASEPEALIGWFGALGLKLDRIGLEAGPLSQWLYAALKAAGLSVELLETRHVRDAFKAMPVKSDRNDARGIAQLMRLGWFRPVHCKSMEAQEVRAVLAARKLVQAKLRDVENSLRGILRGFGLKVGKTTANGFAGRIQELVSGHPSLEAIAAALLSVRAVLLREFRAFERRVRRMAREDAKARLLMSTPSVGPIVALTYGFAIDDPARFKSSKQVGPHFGLTPKKYQSGEIDRSGRITKVGDASVREALYQAAHVMLTKPVKGCTELKSWAMRIAKRAGMAKAKVALARKLAVIMHRMLSDNKPFNPIARAAAMAI

SEQ ID NO: 467785 - protein, 482 aa, unidentified
MKKTNIYQDQSQELLHLFEEAGGGAKVMCVPMDYAKKDHLVMFCNGHGDILRKPFSVKNTPEGIAYIDDQVTRCCRRRGIKKKHVFFGGEDANSFAKNFVSTLRSKGFVVANVNAHDAKKQRVNMQASTDRIDLMGIATMLLNCRANCCAAQSGIYRNLRTLVRHRRRLVQMLTEVKNRVHGIVDELFPGFLNEKNSGIIPFTQSSLYLMQDRFSPKQIRRRRRQKLIEVLKRSGTSKAEHTAAKLQQYAAKVLHAPVEYVDTMQLSLSQHVKHIRCLKESVAQMEKEIALNLAQTQGAFLTSVRGIGLVLAAGVTAEIGEVNAQRPLNNLASYSGIIPRVKQTGGLDGKTYTGPVAKRCNRILKDYVVKSAYHIGLHGPPDLMADYKRRDASGQHADFGIGRRYLRMAKSLMRTSQVYLPPNLRKDDDTLQQRAGYYLMNWPYLREKWKKVGALEAAFANNRPLGLWRQIVQQLYDIKLKL

SEQ ID NO: 467786 - protein, 343 aa, unidentified
MTKTPIAVLGIDLGKNSCSLAGLDAAGAVIIRRRMTREGTIKFVAALPACVVAMEACCGAHFLGRTFASQGHTVRLMSPEYVAPYVKAQKTDNRDAEAIAEAATRPTMRLVTLKSEAQLDLQVLHRARERLVAGRTRLINQLRAMLLERGVILPKRRAPLIKRLDELMAGELPISQRARQLLLDLRDEWMDQDRRIKAYDDELMALTREDGAARRLATIPGIGVINATALLAAVGDASAFAKGRDLAAWLGLTPRQHSTGGKTKLLGISKRGNKYLRTQLIHGARAAMAHFANKATPVGTWVRQLLTRAHPNVVVVALAAKLARIAWAVLRHGSNYDHRAATV

SEQ ID NO: 467787 - protein, 375 aa, unidentified
MPKYSTAFGMDVHLRSTTVCALDADTGEAVTRRFPGNPWGEIAGWMGGFPGPSLAAYESGYPGFAPQRELAGLGVECVVAAVSKIPRSAADSASKNDRNDAARMAKAILAHDISPVWVPSPEVEGIRDLAGAYDGATARLATAKQRLLAFLAKRGFAYGGTTPAGNPRKYWTYDFLRWLDKVRPEDDGGVRTLAALRSEVEAAAEARADLLSEYRAAVDASPIAAEAAALQSIKGCAFALAAAFSAEVGDFTRFRSGRQVTAYFGLAPSQRSSGDSVLLGGISGAGNALVRKLAVEGSWCYAAARHQPKLMPRDTGVPLEIRMHGRKGSERLLRRREEMLARGMPQAKANAATAAELVRWLWALGTMCREGAEWT

SEQ ID NO: 467788 - protein, 418 aa, unidentified
MKEVYRRCCGMDVHQQTVVVCVLPPVGSEGKLIRKVYGTFRNDLIRMRVWLKQLKVTEIAMESTGVYWRPIWNVLEEHGFQRLLLVNPLQVKALQGRKSDGRDCQRIAEFLQDNRLDGSFIPPPEIRQLRLMLRHRVALLEQRNEVHNQIRDLFETVGIKLSSVMTDLMGVSGRGIIEALIAGIDSPELLSWKVRGRLRKKEKLVRESLKGYFNEFHRTMLQSYYEHYQFLTRQIAWLEVKVEEHMHPYAELVALLMTIPGVDRIVAWTLIAELGTDPSVFPDAAHCASWAGVVPGEDESAGKQRSRRCRKGNKTLRRILTQAAWAASHCKHGYLRALFYRIKARRGWGKAILAVGHKILLIAYGIIKDRVPYHDLGDDYFDKLNPTRTVKRLVHRLERMGLEVQVSEVRSDASTPNL

SEQ ID NO: 467789 - protein, 355 aa, unidentified
MNEAKYIGMDVHQATISVAVRDSRGNLVMEAILETKAETILQFIRGLRGSLYVTFEEGTWAAWLHDLLQPHVARVLASDPRKNALLKAGNKSDRIDARKLSELLYLNKLSPVYHGEQGIRTLKELARSYITITRDLTRVMSRLKAIYRSWGIPCAGQQVYAPRYRAEWLAKISEAGVRRRTELYYQQFDALAALRQGTRRELLAEARKHPAMRLLRQIPAIGPIRAALLIALIQTPNRFRTKRQLWAYCGLALRTYTSGEYRFVSGQLKRSKKVLAVRGLNINHNHDLKNIFKGAATRAAAAAGPLQGFYQASVARGMKPHLARLTLARKIATITLLVWKKGVRFDAEHLKQQAA

SEQ ID NO: 467790 - protein, 427 aa, unidentified
MEEVTDEPLYRDRVCGIDIGKAGMAATIRVPSDVNPARRAQETRSFGTTKREVLALADWLRSWQVPAVVMEATGDYWKPVFYRLEAEGFECVLADAKQVKHLPGRPKRDPSDSRWLAACFERGAITSCFVATPEFRIIREHTRYRRDLTAGRTREKQRAEKLLESAAIKLSSVVTDLHGVTGRDIMDHLIAGERNPKVLAQLARARARRKISELEAALEGAEFFTPRLAALLARMLARIDQLNASIGELTAVVETLLEPYEEQLQQAESMPGWGRRSAQDAVAETGAGMTRFRTGGHLASRAGRTPLDNQSGSRSGRAKSKKGNRYLAAITGETAVAAGKTQTREGARYRRIARRRGKPKAAVALGNTQLKVYHALLSSPGTRYQDLGVDYYDNRASTRRQVRALQKRASELGYTLVPDLTGCPEIA

SEQ ID NO: 467791 - protein, 377 aa, unidentified
MNEFNQVYVGLDVHKATIAVAVARPGRCEPEYHGNIVNSDAAVRKLLKQLSRPGEALSFCYEAGPCGYGLYRDLTALGHGCAVVAPSLIPRKAGERMKTDRRDALMLARLHRAGELTAVWVPDQEQEAIRDLTRAREDMKAIELKARQQLGAFLLRHGRIYQDGKSRWTQAHFRWLETVKFDSPVQQIVLQEYLDTVKAAQRRVAGLEAQMREALAQWSLCPVVEALMALRGVSLITAMTTLAELGDITRFDSPRELMAYLGLVPSEHSSGGSRRQGSITRTGNGHVRRVLVEAAWNYRFAARKTRCIEKRAEKCPAAIQAIAWQAQKRLCGRYRALMEAGKAKQQVTTAVARELAGFIWAIACESMGKAHGSKALA

SEQ ID NO: 467792 - protein, 338 aa, unidentified
MALYGGIDLHSNNNVVVVQDEEDRVVAKRRLPNDLKTVLAFLEPYRKGLVGIVVESTYNWYWLVDGLMAAGYGVHLANTVAIQQYDGLKYRDDGSDARWLAKLLRLGELPEGHIYPRRERGIRDLLRKRSQLVRQSTMNLLSIQNLYARSRGEGICGNRVKELTADVVDAAFEDPNVALAVKSSVKVMDCLAEQIVLLEQAVHGQVRLRRGYKRLLTVPGIGKILALTIMLETGEIGRFDQVGHYVSYARLVGSSHLTNGKRKGSGNTKNGNAFLCWAFIEAANFAIRHNEAIRRYYQRKLARTKRIVALKAVAHKLARACYHMIQEDVAFDLMRAFG

SEQ ID NO: 467793 - protein, 401 aa, unidentified
MDPQIRVGIDVGCKAHRVGIADPKGSILEEFDISHTGAGFRDFFRRIEHHKQKLDLPVAVAMEGFNGYARPLDRLIQERGYILYNVNNLKLARFKEVFPGAAKTDPIDTRKILELFHLKDHLPLAKDVLQKVVAAPPVNDKLKRFSRRRRQLVNEKVRVANRLQSDMQAVCPELLAITNNVSNLRFLRFLTCRDDLTQLARLRRTTLLGIPSVGQKYACTIQEWQRKASFSAEVAYVGPMIIADARRILELREQIHALDEAMAELADQSELACRIGSVQGFGKTCVAELAGEVGTTERFAGEESLALYVGMSPLDDRSGKHHGSKCPRQVNHRAKAAMMTAVARHINCVPESRAYYEKKRAEGKSHNQAVRALGRHLVRVIWSMLKNERDYELREVIPSVT

SEQ ID NO: 467794 - protein, 450 aa, unidentified
MSKKNQHKSMKAIFDLISPDCAGIDIGSKVHYVCVPQNRSSEPIQKFECFTEDLAKMVKWLRECKIKSIAMESTGVYWIPVYQALEVAGFEVHLVNAKHIKNVPGRKKTDVEDARWIQKLLSCGLITGSFRPDDQICILRSFVRQRKRLTECASSHVLRMQKALTEMNIQLHNVISDITGATGTAIIKAILAGERNPIELVKLCDVRIKSGKDIVAKSLCGDYRKEHLYVLKQEFELFEVYQQKIAELDKEIDDHYREIDKKDYETKKDLEPKKKLSNSPKINIRQNLYEIIGVDLTKIPGLNELTMQTIISEVGVNMSKWETEQHFSSWLGLSPMNKITGEKVFRSRTNKVKNRASEAFRMAALSVSKTQTAFGAFFRRIKARAGAPKAITATARKIACVFYRLLKFGEDYVDQGIESYEKKYNESLVRTLDKLAKQLGCTIVQSQEAC

SEQ ID NO: 467795 - protein, 377 aa, unidentified
MNETSNSINPFVQEARQEAIRNRYVGKRVLFIGVDLHKDSLTTVGVDTEGNIVFCTSLATKCRNQIIAFFMAQKTHWDHVLVAVESVGFYQWFWDLVQPLVQEIHLANASQVRAAAGKRAKTDKNDAETLARLLRDERLPTAFVPDPELRDLRAFFRHRMRLARRLSSAKNSIRMEMGKLGLAGPKVISTDSLHKWMTGQRNKLTAPALFALKDLAAHVRLLEEQLLDREDELRRLVEASPRFRAPVARAMTAPGIGFITAVALYVETGGLTRFAEEKEICCYVGLTPRVFQSAETIRHGRISKAGPPVLRKCLIQAAWTAVRECEDIRRIYETARRKSGKKRAIVKVARKILVWAWSMEKHQTAFDMAKIGPKKAA

SEQ ID NO: 467796 - protein, 367 aa, unidentified
MSTKLRYVGLDVHKESITIAVADEGRDSANVWKVIPYDLARLVKAMGLLATEAELLICYEAGPTGYGVQRALEKAGYACQVVAPSLIPAQSGNRVKTDRRDAAKLAHFLRSGDLTVITIPSHEREALRDLERSRDDAKRAERVARQQLSKFLLRHDLRYSEGRNWTKKHLTWVRRLRLEDEVTQTVLDDYFKAVQDATERVEQLTSILGEKILASSLEPLFRALMVLRGVATVTSAVIAAEIGDFRRFRTANQFMAYVGLTPAEDSSGERVRRGAITKCGNRHVRHLLVEAAQHYRRRPALSQELRKRSVDQPEPIRKIGWEAQKRLHKRLRTLTARGKPGNKAITAVARELAGFVWAIGREVSLAS

SEQ ID NO: 467797 - protein, 340 aa, unidentified
MAQNDRVVAGIDVAKDKVDACIRALSQRRTFESTAEGRRQLISWLRKHKATKAVMEASGGYEREWAKALREKDVEVRIVDPKRVRHFARSAGRLAKNDDIDADTIAWFAETFGEAKGQAYDAARETLAQIVNARQALLDVQTSLQNRNEHSAPEVVQKMQARLLKKIAAELATLEVAIAAKVKATPHFAGLAEIIESVPGLAGTTSAGLIAAMPELGQVSDKAAAALLGVAPYDDDSGKRRGERQIKGGRRKVRNLFYMACLGAATRQQSCAEGLLSSPDRQGQREEGCPGRLHAQADRHSQHHDRPRREMGCQSLRGGLTSAPISRSDLGRAHAEPTDR

SEQ ID NO: 467798 - protein, 415 aa, unidentified
MEGLQPLHRRVAGIDVHRMLHMVTVVIEQPDGSIEQTSREFGGFRRDCRALAAWLSELRVELVVMESTGIYWKSVHAHLEHAGIAAWVVNAHFIKHVPGRKTDMSDSQWLAVLARFGLVRASFIPPKDLRELRLVSRYRRKLTHMHSAELNRLHKVLDDAGIKLGGVVSDINGVSATAMVKGLIEGQPIDSLLGLARGALKLKRDDLQAALDGELSARHLFVLKHIHAHTLSLQRELADIDAYLLGAMQPYALAHGLLQTIPGIDQIAAALILIEIGDDMERFGCAERLASWAALCPGNNESAGKRKSGRTRHGNGVIRYILCECANAARMTKSSLAAKYRSLMGRKSHKKAIVAVAHKMIRLIYVLLTRQQAYLDQHIDYAAMSARKNAPRWIKQLKLIGKWPAPKSAPATATT

SEQ ID NO: 467799 - protein, 407 aa, unidentified
MNAVGIDVSKGKSTVAVLRPFGEIVVSPFDVSHSPKELSKLVTLLKTLNGDTKVVMEYTGNYYLPIALFLRNNGFFVSVVNPILVKDYSTKSLTVRKVKTDKKDALKIASFALDRWNELSPFSAQSEARLLLKSYNRQYNQYNKLKIILKNNLIALLDQTFPGANTLFSTPTRKSDGHEKWVDFVLKFSHSECISKKSFSFFLKSYLSWCKKFGYKFSKSKAQAVYDFACNCSPSLSFSDSSALLVSNAIIQLNSINETLASLASEMNKIAATLPEYDSVMSMFGVGSVLGSQLIAEIGDVSRFPNKKALVGFAGLDASPFQSGNFNPQSRSISKRGSAALRKTLFQVMSVVLQRAPTNNIIFQFMDKKRSEGKHFYVYMTAAANKFLRIYYARVTEHLNLFTTTTA

SEQ ID NO: 467800 - protein, 406 aa, unidentified
MELITLHKRVIGLDVHQAQITACAIIEEADGTTLIEQRQFGAFKRDRRALAEWAASLRPDEVVMESTGIYWKSPYAALEAVGIRAQVVNARHVKNVPGRKTDVGDAQWLATLSRAGLLRGSFVPPAKLRELRLISRQRQKLVGQLASEKNRLHKVLTDGGIRLGVVVSDLHGQSARAMVKAIINGQPPHEVLKLASRRLKASREEIFDALQGELTGSHRFVLDELMQHIEEIEARIARFDAQLLDGLKDEQNALVVLQTLPGVDLIGAAMLLVEIGTDMDAFGSADRLASWVGICPGNHESAGKRRSGRVRKGNLYVRRLLCEFAHAASRTTSGFKSKFQSLIVRRGHKRSIVALGHKILRTIFFMLKRREHYRDSAVDYEALSVQRNAPRWIKALTRFGFIPAKA

SEQ ID NO: 467801 - protein, 407 aa, unidentified
MIFIGHDWAEAHHDICVEDDQGTVLAQRRFPENVDGLAKMHELIGEHAGDASDVVVGTETDRGFFALSMVAAGYEVHAINPLSASRYRDRHGSSRAKSDRSDAKMLAEIVRADRHNHRSIGNDSDEAKVIGVLARTHQNFIWDRQRQANMLRSTLREFYPGALGAFGDNLESGDAVEVLIVAPSPSHGRKLPLSQIESALRRGGRQRSVKVRAIEIQQHLRAEHLGISAAMSEAFAVMVKSTAKVLGEMNRQIKSLEQELANHFEKHPDAEIICSLPGLGTVLGARALGEFGDDPNRYVDAKSRKNSAGTSPITRASGIKRVVVRRIAKNNRRTNACHQWAFCALSQSPGARAFYERLRAKGNGHNQALRTVANRLVGILHGCLTHRTLYDEAIAWPSLQEAEAKAA

SEQ ID NO: 467802 - protein, 317 aa, unidentified
MSEACFVGMDVSQDTVDVAIHPGTMFQVETNERGIGQAVERLQALHPTLIVLEATGGLDVPLAGALAAAGLPVVVINPRQVRDFARATGQLAKTDALDAQVLAHFADVVRPTPRPLPDVETQELAALVTRRRQLIEMLTAEKNRVASARAVVRKQLRAHITWLERALDQADTDLAEAIRQSPLWREKEELLRSVPGIGPVLTTTLLANLPELGTLTHKQIAALVGVAPLNRDSGTLRGKRTVWGGHAQVRAALYMAAIVAARFNPVIRVFYQRLCAAGKAKKVAFVACMRKLLTIINAMLKHRTPWRQGTEPVCAGA

SEQ ID NO: 467803 - protein, 372 aa, unidentified
MSARPAGACLLRKAASSMAGTTVVVIGGVDTHGHTHQAAAIDSAGRVLGTAEFEASAHGYRELLAWLGSHGRVQSVGIEGTGSYGAGLCRHLLAQCINVIEVDRPDRRTRRAKGKSDPIDAECAARAVLSGTADTTPKARTGIVESVRMLRIARSGAVKARTAAINALKTTIVTGPEAVRDTLGKLTPARLLDTCRSLRPDRVRLDDPVQGAKLALRMIARRIEAFDLEIHDLDRTLGRLMREVAPATLALLGIGVDHAGQLLVSAGQNPERLRSEAAFARLCGSAPMPASSGRTSRHRLSRGGDRQANRALHMAVVVRMRRCPRTKAYVERRTAEGLSKPEIMRCLKRYLAREVYHALRADLGALEGLDSI

SEQ ID NO: 467804 - protein, 363 aa, unidentified
MKYVGIDLHKKCMSVCVMDKERKVLHRQRLLCVEPERIAEYFRSLGEFCFAVEAMGSFEWLALLLEPLASSWVLVNPSKFRVIAESTQKTDRQDAQNLAEFLALGMLPRAYFPTERTREHRLLVRYRLRCRQKLSQIKVEIRQLASRYNADRQDLFEADQLAALQSLKQMHAADRFILKQQLVALHEAQKRTEAATKQLQKFAAQGSEAEQREREIVLSAPGVGEVVTEVVLAELSDVKRFASIKDATAYAGLVPAQRESAGKEKERGLTKKGSRILRWAMVEAAWQSIRSSARWRGVYEQLAKRRGSKKAIMAIARRLLGVLTSMLKAGTSYRWSLAELKEREERSQQRKLQRARKRQGSAA

SEQ ID NO: 467805 - protein, 451 aa, unidentified
MKDLSMRIINARSAGIDVGSRFHVVAVDQRSENVRQFGVYSEDQQAMIKWLKLHQIQTIAMESTGNYWQTLFDALQRAGFEVQLVNGNQTKNVKGKKTDVLDCLWIQKLHSLGLLNGSFLPAAEIQSLRTYHRHRIHLIEQCSRYINKMQKAMRLMNIRLDVVLNDVMGQSGRLIIEAILAGERDSDKLASLANYRVKKSRGEIAKALIGNWRNDLLFELRRCLTLHDVYCQEIKECDHQLETAIKNLLPHSTTTTDFKYAKATKQRNKYMPEFDIERFSWQYYGVNLMEIQGVGNGTILSFLTQIGDRINQFPSSKHFCSWLRLAPNNKITGGKVISSRTPKGKNPLSLALRQAANAIGNQKEGELVNFFKRVAYRKDRASAITATARKLAVIIYNMVTKRENYKPSSPVPISDKVKNKIIKNIRTRVEALELTKEQLNFLFQATSFSTA

SEQ ID NO: 467806 - protein, 422 aa, unidentified
MKTWSDITHFAGFDWAKDHHDVLVLDGAGKIVAELRFDHTASGWALCQEKLAQFPQVAIAVEGGHSAAIERLVTLDYRVYPVHPRSSKSYRTRKLPSGTKTDRADCWALADALRLEGESWRVLTAPEPLVQQLRLLCRDEVALIEQRTALINQLQQALYEYYPAALEAFEDWCAPSAWAFVERFPTPQSLVQAGKRKWQSFLHAQKLFHPEWNKKRMEIFAKADQFCGAEATIAAKSVLAVATVKILQTLEAQLARYRALITERFKQHPDHALFASLPGAGPKLAPRLLGELIALKPLADAPQALQCLAGMAPVSYQSGKVSVVYLRRQCNRFLRATVHLWVDLSRHYCDWARIYYETHRKKGQSHACALRCLGMRWLKIIAAMIRSQTPYDAAIHTRNQLQHGSWVMQLQPVKVVKKNGSD

SEQ ID NO: 467807 - protein, 351 aa, unidentified
MVIIGVDYHPSDQYIAFVDTETGESGERRLNHSDREAERFYRDLKLRGVSVRVGMEATGYSRWFERLLAELGIEVWIGDAAKIKTKRVRKQKTDRNDAQLLLKLLLENTFPRVWVPSPENRDLRQLLWHRHRLVQMRTRIMNQLQALAMNEGQRRKKKLWSDQGRAQLEKLPLATWASRRRQDLLGLLDRMNPPIEELTRAAEQEAKKWPEVLRLMTHPGVGPLTALAFVLIIGTPERFPCGKQIGSYVGLIPSEDSSAGHQRLGHISKQGNSLLRFLLGEAAQAAARCDSDWRRRYVHLAMRRQRNIAKVAMARRLAVRLYWMWRNGWEDAQWLKFGSNAGQLATGHGVN

SEQ ID NO: 467808 - protein, 387 aa, unidentified
MPQLNDLSRSLVALDQDSTIIAVVELSQSSWLVAGVLPGIERQPQKKLEPSAERLLGLLHRWRDEAVRAGKKITRIALAFEAGRDGFWLARWLNARGVEAHVIHPSSVAVSREHRRAKTDRLDTELLKRGFLGWLRGERGHCSMARVPTIAEEDAKRPNRERECLVGERTRIVNRIKATLARMGIRNFKPTLRKAAERLGTLHTPEGSALPPNVSAELQRDIARLGFVISQIKEIEEARQERLEQEPETGPHAMVRHLARVVGVGIETADMLVNEVLSRPMRDRKAVARYAGLTGSPDESGAKRREQGLARAGNARVRRGMIQLAWRFLRFQKESALARWYQARTADSRAGTRKTMIVALARKLLIALWRFVTTGETLQGVILRPAG

SEQ ID NO: 467809 - protein, 383 aa, unidentified
MGNSITLYVGLDVHKDSIDIATAESGRTGEVRHVGSIGGDLAALDKALRRLISRGEHLHVVYEAGPCGFVVWRHLTASGLSCEVVAPSSIPKRSGDRIKTDRRDAMMLARLSRSGDLTAVRVPSAADEAVRDLVRARDDAVRECRNARHRLKALLLRNGITYEGRSTWTAAHLRWLSRLKMQHAAQQIGFQEYLHSVTESSARIARLEQAMRDALPDWSLKPLVQALQAMRGVQLIAAMTLVAELQDFTRFESARKLMAYVGLVPGEHSSGPKRRQGSITKAGNSAARRMLVEVAWHYQHNARVTPIIARRQDQLPKAITDIAWAAQLRLHAKFKRLLARRVMKTKAVVAVARELTGFVWAIAGEVHNSGWQGVAITATDNAA

SEQ ID NO: 467810 - protein, 317 aa, unidentified
MEQRQSSSKVGGVDVGKHRLDVAVHGLEDELQVANGAAGYSELIAWLRAREVGRVGLEATGGYERGVRAALEQAGFEVVVHQPIEVRRFAQLKRWRAKNDRLDAQLIAMATAQVEAVKAAQDPRLAELAERLTAYEQITDQAAELKTFLESVTLADVAKLIRAQIAALERAKAKLLGEVLRRLKAEADLLDRFRLLLSLPGVGPVVAATLVIRMPELGAMRRGQAASLIGVAPFDRDSGQWRGVRFISGGRARPRRMLYLAGWQAKRCDPSLKAFADRLLARGKPAEVVIVAVMRKLIEAANLVLSRGQPWVKHPTT

SEQ ID NO: 467811 - protein, 486 aa, unidentified
MANRKQSTFERLSSGRLNRQQRRELARKLTAENPGLEIVNRNVAGIDVGNESHYVAVAPGCDPQPVREFGSWTADLERMADWLKACGVEMVVMQSTGVYWMAVYDILEARKFKVCLTNARHTKNLPGRKSDVQESQWLLKLHTYGLLRDSFHPPEEIRALRSLWRLRDRHVKEAGRAILHMQKTMTVMNVQLSNAISDISGATGQAIIRAILNGERDPWKLAKLRDRRIKATEEEIARSLEGNWRADMLFELRQAVEAYDFIQNQIAECDQRLQTLLAALPQREVKRTEVQTEAPLRESMKRKQKRKKSRADGNAPRFDLQAELKRVCGVNLTSIDGIDIMTAQTIVAELGTDFSRWKNESHFTSWLGLTPSREISGGKIVKQESRTIKSPVAAMLRMAASSLIRSESYLGARYRSLRTRLGAGKAIKAMARYLACLVYRMFTHGQDWVDRGTKEFESKQSQREISSLHRKAARLGYTIVPQPASA

SEQ ID NO: 467812 - protein, 412 aa, unidentified
MTTEEVVKLIFVGVDWSEDYHDVEVLAEGGQRLGRRRLRTGIEAVRDFEGLVAEHVDEPKEVVIGIETDRGLFVQALVAAGFVVYAVNPKVVSRYRDRHSVSGAKSDVGDARVLADLVRTDRHLHRVVAGDSALAEAVKVVARAHKSLIWHRQGQIANLRSNLREYYPAALEAFGEDLGHHDCLAVLERAPTPAAGRALSHRQLVVALRKGGRQRNLERRAELIGVALRAPQLEAPDLLAEAFGAATTSTVAVISAFDAQIAALESKLASAFEEHPDAEILRSLPGLGAVLGARVLGEFGDDPSRFADVRARKNYAGCAPITRASGKARLVTRRQARNARLVDALERWAFCSLRTSAGARRYYDELRARNKSHNAAIRQLANRWVGILDGCLRNRRLYDEEIAWPEPVALAA

SEQ ID NO: 467813 - protein, 369 aa, unidentified
MNDITYVGLDVHKATVCVAIAESGRGGEVREVGVFENRPDVLRKMVARLGKHRRRLNFCYEAGPCGYGLHRLLTGLGHDCVVVAPSLIPMKAGDRVKTDRRDALMLAKLHRAGELTPIWIPDAAHEAMRDLVRARATAVRALSKARQHLQGFLLRHDRIYHGARAWTLAYRRWLTTVRFDHPAQQIVLQDYIHAVEDAEFRRDRLTRQIEELMPSWSMAPVAAALQAMRGVALVVAVTVVAEVGDFRRFTNARQLMAYLGLVPSEHSSGSTVRRAGITKAGNALVRRVLIEGAWTYRMSARVSRKLHDRLEPLSAAIRDIAWKAQVRLCARYRRLAATGKPKVVVTTAIAREMVGFIWAIARVAQPELI

SEQ ID NO: 467814 - protein, 328 aa, unidentified
MDPTTTTTVALFAGVDVSKDRLDVCLRWSEPESHQKEETFFVAYDDNGIDALLSRLLREPTVLVVLEATGGFERTVVGALAAVGLPVVVVNPRQVRDFAKATGTIAKTDRIDASILARFAEAVRPAPKPLPDREIRALQAIVARRRQLLGMIAAENNRLSSAAKPVAKRIKAHIRWLEKELSRTEGDLEAAIESSPALGENEALLRSVPGVGPVLARTLLAGVPELGTLTHKRVAALVGVAPLNRDSGTLRGHRSVWGGRAEVRGALYMGALVAARRNPVVKEFYERLLVAGKPKKVALVACMRKLLSILNAVLKHRTPWRSPQYLSP

SEQ ID NO: 467815 - protein, 400 aa, unidentified
MMTPDDIDVWVGLDVGKSAHHAHALDHDGNTLYDKPLKQDEKAIRTMLGKLSKHGRVLLVVDQPNTIGSLPLTVARNMGIAVAYLPGTDMRRTAQLLPGDAKTDRRDAHVIAWAALKLPETLRDAGPDDETLAALKLLAGHDEDLAHESTRHVNRLRSLLLQTHPAFERALKGERITRDATLALLERYGGPMGVKRAGIEDVKDWAKSNGLRAGRIIDDMFKAIGEQTVTVPGTLMAETIIPSIAHDIKTIRDRRREVDRQVEKLLEDHPLLTVLTSMPGIGVRTASNILLGIGGDIANFKSSAHLAAYAGISPVTGQSGTSIKGERPSRRGNKRLKNALWQTAFVASTKHPPSVAYYKRKREQGKHHNAAIICLARRRCDVIYSMLKNGTLYQEPALVA

SEQ ID NO: 467816 - protein, 350 aa, unidentified
MSIIGCDLHSRYQVIAMLDTETGEIVRRRLEHEKGEARAFYAALPKPSLIGIEATSYTQWFERMAGEQGHQLWVGDAAKIRASETRKQKYDGRDAEHLLDLLLTKKFPRIWVPTRQERDLRQLLKHRDKLVHMQTAVKLQLHFLAMSQGICRKRKLWTEQGRALLERLSLDPWASRRRQELLELLDSLAPRIEPLDQAVEREAQQRPDAVELMKQKGVGPVTALAFVLIVGPVERFPNSRKLVSYLGLNPAEHSSGGRQRLGHISKQGNAMLRWLLVEAGQSASRFDPQLRRKYQRLKSRRGANVAKVAIARHLAVHLYWALRQMKDASPPVRMPGSPVSSVVEATPSIL

SEQ ID NO: 467817 - protein, 342 aa, unidentified
MKKMQNYVVKGKRIFIGLEDSKRSWRVCVRHDNMIVHEASMPADFDNLREYLRRSFPGCEIRLIYEAGFSGFWLHDLLEGIGIRCIVTPPNKVTQEKVNRVKTDKIDARRLAYNLEKGDYVSCCVPDKERRGDRQISRTLDQIQRDIIATKNRIRRFLDFHGLNTGLPSGVWKISSYRMLGKLPVSEPLRISLEAYLSLLEHLESLRLRLTAELKALSEKERYRKAVAIKVSFPGVGWLSAIRFTLEWGELSRFKTGKHIASFTGLTSREYSTGETVRRGRITGQGSRQVRAWLIQCAWRAIHYDPVLLSKFRSICSSSGSKKKAIVGVARKMAVRMRALEL

SEQ ID NO: 467818 - protein, 344 aa, unidentified
MSTITVVGVDLAKRSFHVYGVDEGGKKVVSRSLSREKFLDFFVNLPSCLVGMEACATSGHWQRKIEECGHTVKRIHPRYVIPYLIGDKNDANDARAICEAVQRPGMRFVPNKSQEQADIQAIHRIRKGFVEDRTRAANQARALLAENGIVLKQGIANILSQLPDIIMEESNNLSDIVRLLLNRLYEHINSLEAQIAEQESMLRTVIRNSEPARRLLKIPGIGPIGATILFVMLGTAGDFANGRAFAAYLGLVPREHSTGGKHRVLGISKKGDSYTRTVLIHGARAVLSSLQRGGKPFGEGSLHNWLSELIARRGKNKAIIALANKIARIAYGLIKTGTEYAIAI

SEQ ID NO: 467819 - protein, 362 aa, unidentified
MTKTTYLGLDVHAATIAIAVLEDGQERPEVREITNDPAAIRKTIKQIGKGRSLQCCYEAGPCGYVVQRQLAGMEIDCQVIAPSLIPRKPGDRVKTDRRDAAKLARLLRSGDLTPITVPTEDQEAVRDLVRAREAARRARTDARHRLTKFLLRHGHRHHACNWTLQFWKWINKVSFAHPALTRTLQHYTDMVLHLDQQIKALDKDIEDIAAREPFREMVAKLSCLRGISTLAAMVILSEVYDLRRFATASEFMAFLGLVPSEHSSGQKQRRGGITKTGNGRMRRILVEAAWAYRHYPKVTSRQRKMFEQQPPAIVDVCRKANLRLTRRFQRLEARGKKSPVAMTAIARELAGFVWAVARANTA

SEQ ID NO: 467820 - protein, 356 aa, unidentified
MDNRKYIGMDVHQASTSIAVSDAAGKVLMECIIETKAATVLEFIQGLRGSLWVTFEEGTSAAWLYDLLKPRVTKVVVCDPRKNALLKAGNKNDRVDARKLSDLLRAGLLTPVYHGESGVRTLRELSRSYLAASKDLTRVMNRLKAIYRSWAIPCAGQQVYSPRHRAAWLERLREVGVRRRAERTYQQLDFLMEIRKETRKELLAESRKHPARKLLEQIPRLGPIRVALLIALIQTPHRFRTKRQLWNYCGLGLRTRSSGEYRYTGGQLQHARKPPALRGLNVNHNHDLKNLFKSAATQAGACKDDPLGEFYQNLLARGMEPPMARLTLARKIAAIALKIWKKGERFDPAKLKQQAA

SEQ ID NO: 467821 - protein, 419 aa, unidentified
MKKIKPKRPYAVNKKVLIATVDGGKEKHYGYFRCPDGIEGKSQPFENNGRGFQEFLERITLAAGTHGLEEIIVGFESTGPYMEPLAQFLKSKRGVRLVQVNPMHTKRLKELSGNSPLKTDRKDPKVIADIIELGHALTVVIPEGPAAELRRLTQGRERTITSRTRLFNQMQCLLASFFPEFLQVMKDVTTASAQHLLKHHPTPQDIVTLGEPALATVLRKVSRGKLREDRARALFEASSASVGIRDGRDSMLLEIRLILETIASYDRFIDDSEAEMVRQLEQIPYSRIILSLKGIGPVTAAGLIGEVGDFTKFGTISEVMKLAGLDLYEVSSGKHRGKLRISKRGRPLMRKLLYLAALSAVRKGGVMHAWYQQALNRGMKKTKALVAVSRKLLVLIFALVRDHNVYVENYAKPILQEAA

SEQ ID NO: 467822 - protein, 486 aa, unidentified
MANRKQSTFERLSSGRLNRQQRKELARKLTAEHPGLEIVNRNVAGIDVGNESHYVAVAPDCDPQPVREFGSWTADLERMAEWLKACGVEMVVMQSTGVYWMALYDILEARKFKVCLTNARHTKNLPGRKSDVQESQWLLKLHTYGLLRDSFHPPEEIRALRSLWRLRDRHVKDAGRAVLHMQKTMTVMNVQLSNAISDISGATGQAIIRAILAGERDPWKLAKLRDRRIRATEEEIARSLEGNWRADMLFELKQAVDAYDFIQNQIAECDQRLQTLLAALPQREVKRTEVQAEAPLRESVKRKQKRKKSRADGNAPRFDLQAELKRICGVNLTSIDGIDIMTAQTIVAELGTDFSRWKNESHFTSWLGLTPSRDISGGKIVKQESRKIKSPVAMMLRMAASSLIRSESYLGARYRSLRTRLGAGKAIKAMARYLACLVYRMFTHGQDWVDRGTKEFESKRTQRELSSLQRRAANFGYTIVPQPASA

SEQ ID NO: 467823 - protein, 417 aa, unidentified
MRMDEALYVGTDVSEAVNRTRFYRASGEEVGRPLETANDLPGSEHLAREALDRAARVGAGRILWGLEATNLFWWHLACFLTTHPDLLARGLRLYAFNPRQVAGFREAYPDLGKGDWVDAMVIADRLRFGRLPAECYLDERYMPLQRLTRHRRHVVQTLVREKQVALGYVYLKLSAYSLEQPLADTFGAASQVILTDYLTPDEIAAAPLEELARVVAREGRGKVADPRAVAEALHRAARRSYRLPARMVEPVNLVLSSALSAIRALRAELKPLDRAIERELEAAPPQTLRSVPGLGAVYAAGIVAEVGDVSRFPGEEALAKFAGLTWRRRQSGGFEAEDRPLTKTGNAYLRYYLVEGANAVRTHCPEFGSYYRRKFHEATRHHHRRALSLTARKLVRLVHSLLQSGQLYRPPRAPAPR

SEQ ID NO: 467824 - protein, 445 aa, unidentified
MKTIGKEVHPRALTENSGGTEPAGVPLYIGIDAGRRHHVVVGIGQERMENGSWERASARRVSSNSAGFSEMLDWLQAFGLRPDQVRIGCEPTGGWCAETLVAFLERHGYRVSWLQNWALHERRRLAIGKQTKTDALDARLIARLLYERDCHGQTKGFLGRPPRTTDGLRLLVRNRARLVVQRTRYRLQLTQIQDILFPELKDFFKDSNTGPAARRLLELYPTPANIAAASEEELFDLIARQAHSHIHGARIGELQRLARGSAGLTAGLEPVLQTQRWLLENLRRVDEQVDDLEETILSVVESWPESQRLVLDSFPCMSKLRQAVLIAMMGDISGFRHDGQLRKLFGWYPETRESGTSVFSQHLGSSGNRLARREVWLWAMQLISPRCSPTPFRTYYERLRKRNMKGNVAVGHLASKLITVLFFCLRSEQPYDPRRHAVDLGLRDA

SEQ ID NO: 467825 - protein, 327 aa, unidentified
MMFIGIDISKEKIDLSWLRDQLTNKIKTKVFKNKHQDFEKIEKWLLNTTKSVASELVITLEPTGVYHEALMYFLHEQGFNIILANTGKAKKYADALNIIHKTDKSDATMLAHYGCAKHAVVDYWQPEALEVRELKALIRRLDALESNRQREANRLEASEFSNVSARVRQSIKVTIAFLDDEIKQLKSDIDDHIDNEPGLKRNRKLLESIPGIGHVLSRELTYLFAAKKFNKAKEAAAYCGLIPRHNESGKLKGRTSISKLGPARIRCKLYMAAIVAGQWNKTIKRHKLTLINNGKTPMQTVCANMRKLIHICFGVIKNQEAFKLQVS

SEQ ID NO: 467826 - protein, 421 aa, unidentified
MYNTRIKHQKRSFVNDKTLISTVDIAQDELMVYIRCPFGEEVKPFNVTNNYQGLKEYWATIMLYQKRYHLQDIIVGFESTGIYSEPLKNFMMDKAVKLVQINPMHTKKMKDITDNSPGQTDRKDTRVIADIIQLGHYLSLIVPEGAAAQLRELAHARENQMVHQTRLINQLEALIFKIFPEFVQIIKNLSTKTAQYLMSKYPTPQRLKGVSLEQLTSEIKMVSRGQLGKDLAQRIYQASRESLGTKEAQESILLEVNYLLGQLIQTAQFIKVLEKKMATALDQIPYAGNLLSIKGIGVVLLGGVIGEVGDFRRYRRQSDLVKLAGLDLYEMSSGKYHGWRRISKRGRWFLRKLLFYGALNTVRTGGILRDYYQGLIGRGMKKIKALIAVSRKLLRIMFALVRDNTHYHQKEEQINSIKVPA

SEQ ID NO: 467827 - protein, 317 aa, unidentified
MEETSVGIDVSKSKLDIYLLPEKRYLTVSNDKKGFQKLIKFLKGYNTRLIILESTGGYELLCAYALSEANLPVSIINPKRIRKFAGAKDLNCKTDKVDAKLIAEFAHVMKPEQRELLSKELRELKELISRRTQIVDQITAEKNRCETVTNQYVIKDLQQTISLLNVKVKAIEEEIFKNIEKTTEYKSLYEYLISLKGIGKITAATLIADFPELGYLGREEAAALLGVAPYNSDSGLKQGKRSVKGGRKQARDVFYMATLSACQWDDRIKEFYQRLVSKNKPKKLAITACMRKFIVIINARVKELRIFNHFFDFLACI

SEQ ID NO: 467828 - protein, 379 aa, unidentified
MEISSSTLPAVAAEHATMFVALELSKSSWLVALHSPVADKVSLHRFVGGDVAGLLALIARKQTQAKARLGRTIRVLSCYEAGYDGFWLHRLLCARGIDNRILDAASILVDRRSRRAKTDRLDAAGLLRTLMALDRGESRVCRVVRVPSVAQEDARRRSRERTRLVVERGQHSNRIKGILMTLGVRDFEPTRRDWQQRLGGLRTADGRELPACLKAEITRECRRLHQVIVMIAEVEAEQAAALDAEEGRAAQLIRLRGIGLVSATVLADEVFYRDFRNRREVAGYLGLASSPWASGRVQRDQGITKSGNPRARRTAIELAWLWLRHQPGSLLTQWFRQRVGTTRGRMRRIMLVALARKLIVALWRYLSDGLVPDGAELKA

SEQ ID NO: 467829 - protein, 423 aa, unidentified
MDKYDDSRLAEFRQLKREIRGSTQHLVVGIDIAKERHYAFFGTPAGKVLLRRLVFDNSKEGFEKLRFQADILKTQHSLTKVVFGMEPTADYHKPLGEYLIRQGHQVVLVSGNAVKNNRELLDSRWDKNDTKDAANVADLITQGKCLFYEFASSPLQELRSLLSLQRRLKKQEQGYRVRTRNHLIAQYLPELDPYFGYSEGPAIVKWCLDPKELVSLPFEEFVRMVSSRTGGQKQRRRLQEIREKAVSSIGCEAHPSVAFEGRVLVEEVRRFQDLLRETQARIREVCLCFPEYFFLLTIPGFGPDISAKVLGAIGNPHRFENHRQVLKIAGLDLSADRSGKKQDVTPVISKKGKVDLRYGLYQAAFIASTRNTQFMTYFTGKLKGREREKGIGTKMRVKLAAKMLVIAWTLMKKQEKFDPGCIA

SEQ ID NO: 467830 - protein, 366 aa, unidentified
MTMVAHAHPFVIGVDTHARNHALSVLATPHGEVVDEGEFPATAAGMARAIEWVGRRTGGDLGVLWVVECAATYGAQLARAVAGSGYQVVEAARMNAKAHRGIGKSDSLDARRIAAAVLPLQVDRQRHLRRDDGARAALRILMAARDHMTSERTASINALTALLRVLDLGIDARKPLTGHQITEVAKWRTRTEDIAAVIARTEAVRLAKRIVDLDDELAENVKATTALLKQSPARVLLDKPGIGPVTAAVAMTAWSHDGRLHSEAAFASLAGVSPVPASSGNTVRHRLNRGGDRRLNKALHMAVIVRMTHDADTKAYVERRLAEGLTKREIRRILKRYLARQIHRALTAASRADAAQDTITDTPLSV

SEQ ID NO: 467831 - protein, 425 aa, unidentified
MDFKQNQKINQVTEKTLVVGIDIAKRTHYACFVDDRGRVIQKSFSVSQSGDGFEHFYQRVLAAMKENEKTEVIVGIEPTGHYWLNLAYFLEERGIPLVMTNPMHVKRSKELDDNLPTKHDRKDALVIARLVKDGRFSYPRILKGMEAELRAGSTFRSKLTEELGAVKNMIIRWLDRYFPEFTQVFPSFGKMAMAVLECTPFPSDLHQKQPDEVLSLYRKVEGLKSPQRPKAVRLIEVAASSIGVTEGREMARIEIATLVRRYHQLEQDIESITQHLVELVKTSVEYEWLSTVPGLGDTTIVDLLAEIGSFSHYEDPRQLIKLAGLTLRENSSGLHKGQKRISKRGRRKLRALLFRVMMPMIRYNEAFRRLHEYYTNRKVNPLRKKQSIVVLCGKLLKVLHGISTKHKAFDAQRMMRDIPSLVEAA

SEQ ID NO: 467832 - protein, 342 aa, unidentified
MTTLLKQTVGIDVAQKELVVSLGRMNEQINIEIYAYKVFTNNQKGFSNLVTWVEKNTLAEIEVRYVMEATGVYHESLAYYLFGIEKQVSIVLPNKISNYSRTLDIKTITDKSASQAIARFGLERQLELWQPPSKIFNELRQLCREREQLVQERTMLKNQLHAERTSAIPNSRSIERISKRISLLDTQEKEIKEDIAGLIQADGYLMGKMKILSSIPGIGNLTAVTIIAETNGFELIRNKRQLVSYAGLDVREKISGTSVKSKPRISKRGNRNLRKVMHFQALAAIRTDERFKGIFARMVSKHGIKMKAAVAIQRKLLELTFILWKTDTFYDTEYLHQNIEVK

SEQ ID NO: 467833 - protein, 402 aa, unidentified
MNCVGIDVSKGKSMIAVMRPFGEVVVSPFEVRHTASELSELARLLKNLDGETRVVMESTGNYHAPVAWLLHGAGFYVSVVNAMLVHDYGNNSLRRGKTDKKDAVKLANYGLDHWLTLPRYVPEEDTRLMLKTCYRQYQQYSKVQTMLKNNLISLLDTAFPDANRLFTSPPRADGSEKWVDFVATFWHCECVCGLSKKAFTAKYQKWCRKHGYNFSQDKALDIYASACGRFGVMPKTNTAKLLVEQAISQLQTTSAALAALKQEMQSLAASLPEYPVVMEMFGVGSTLGPQLIAEIGDVRRFHSKKALVAFAGIDAPPYQSGQIDVRSRSISKRGSASLRRTLFLVMGVLLQCAPMDEPVYQFMNKKRSEGKPYRVYMMASANKFLRIYYASVKAYLDSLEHD

SEQ ID NO: 467834 - protein, 341 aa, unidentified
MSNANTYIGVDLHKKTCFITIMNGLGKIKKQTEIATDTDKVSKFFKKYNGVNVAVESTMNWIPFYENLESLGCSVVLSNPLQTKDIASARIKNDKVDSKILADLLRTNLLPTAYIQPREIRDLKELVRQRMSYVEWRTRVKNKIHSVLFKNNLKHDFTNLYGQAGMEWLKQLALRDVYQQELDRYLITLNLLDGQIEEISNRIMETAKADYDCKLLMTIPGISYFTALVIKSEIGDISRFANARKLCSYAGLIPSTYASADKVRHGRITKRGSKWLRKSLIDAITSGAKHPSRLCFTYRRLKKSKGTGKAKVATARKLCTVIFAMLSDKQPFREFAPVKQR

SEQ ID NO: 467835 - protein, 316 aa, unidentified
MSNQSARVIGIDVAKDAVEVACSSGEHWSSPNDLKGQRALRDRLVGMNCELIVLEASGGYEAALVGLLAQAKLPAVVVNPRQVRQFARAVGKLAKTDRIDAEMLVRFGVHTSPEVRPLPDEQTRLLDALLTRRQQLLEMIQAERNRLLQAAGPVRTDIRQHVAFLVKRLKQTDADLDSELRNSPVWREKDKLLKAIPGVGRQMVLTVFATLPELGRIPCKKLSALVGVAPYNCDSGTLRGQRHCWGGRAQTRRVLYMAALSASRCNPQIRTYYQRLLAAGKPKKVALTACMHKLLLIMNAIVRESVAWNPPMQGAN

SEQ ID NO: 467836 - protein, 405 aa, unidentified
MACDMITINIHHEVGAALAVSGNMYQSTPSVIKLGVDVHQGSYTVVAQEDHATLQPAQRFAPAAFVPWVARLVARGHRVFVVYEACGFGFGLQRALVAVGAECYVVAPCRLDERGQRVKTDDRDATALCQRLSRFVDGNRKELAIIRVPTEEEERLRAEHRQRETIVRARTRLAAQGRALVVNHSGESHRTAPIPARWWRAAGWKVMACTLPAWLRERLEMLRPVLAILDTQIAALTGTLEDAAPEGLPAGQGKMTSVILTREVCDWHRFNNRRQVSSYTGLCPGEYSSGGKRVTGSVTKHGNPRLRAALVELGWRMVRFQPGYPPVAKRIHILGKGAKATGAARKKAIVAVARQLAVDLWRLNTGRCTAAQLGLRVTGGEPTQAPEEVVDSGGTVPPPAPEAAP

SEQ ID NO: 467837 - protein, 435 aa, unidentified
MQKIRTNVAGIDIGAKKVFTSVEGQPVVSHFTFTQDFLQLKDYLLKHGVKTVAMEATGVYWVILYAILEEAGIDVWLVDGRQTKQVPGRKTDVKDCQWIQELHSYGLLNRCLVVNADINELRSYLRLREDHIESSSMHINHMQKALTLMNIRLKEVISQIHGASGIAIIEAILNGERDKQVLVNMCHEKILKTKKEAVLKSLEGRYTESGLFALKQAYDGYKFYLGQIEQCDSKIDVIMNRIGNNGKPQNQTTDKKLKRKPIRHHAPRIDNLSANLIKTFEGKDATLISGITDYTWLQLLSETGNDLTKWISEKHFTSWLGLSPGQNNSGKKQRNAKKKGRPTAGQIFRTIAMGLINSKNIAIGEFGRRLRGRKGPGIAIKAMARKLAVLYWRVMVKGLDYVETGIKKYELQLQQNKLKTFNRLAKELKIYSTDN

SEQ ID NO: 467838 - protein, 320 aa, unidentified
MMAQDDRVVVGLDVAKDKVDACIRPLSLRRTEPSTAEGRRKLVAWLRKHKVGKAVMEASGGYEREWATALRKAGIEVRIVDPKRVRNFARSAGRLAKNDVIDAEMIAWFAETFGEAPAQAYDAAREQLAQIVNARQALLELRTKLQNQGEHAAPEPVQKMQARLLKKVAFELAKLEAAIAALVKLTPHFAERAAIIESVPGLGEITSAGLIAAMPELGQVSNKIAPALLGVAPYDDDSGKRRGERQIKGGRRKVRNLFYMACLGAATRHNPVLKAFYRRLIAKGKPPKVALVACMRKLIVILNTMIARRQKWDANLYASS

SEQ ID NO: 467839 - protein, 370 aa, unidentified
MKQDSVFYVGVDVSKAKHAIAVAESGRNGEVRFFGEIEARPAAVERFVRRLEKKHPRLHFCYEAGPTGYGLCRQIVELGQRCDVVAPSLIPKRPGERVKTNRRDAVSLARLLRAGELKGIWVPDAVHEAVRDMVRVRAAASEDLRKKRQMLLSFLLRHGRVFTGFKNWTRAHARWLAAQKFDHPAQQIVFQDQVDVITDAQARLERLDAQLAELVPSWSMAPVVAAYQALRGVSFIVSVTFVSEVGDVRRFDNPRQLMAFLGLVPSERSTGETVKRGGLTLAGNRRARRVLIEGAWAYRYPARVTEPIRVRLEGLPKAVREIAWKAQTRLCARYRRLMAAGKKKPIVVAAIAREMAAFLWAIGHQVEPVN

SEQ ID NO: 467840 - protein, 340 aa, unidentified
MNVTTIGLDLAKNVFQVHGADAKGRMVFKKRLSRSKVLSFFANLPSCLVGMEACGGAHYWARELQALGHEVRLMPPQYVKPYVKRNKHDQADAEAICEAVTRPSMRFVAIKSTDQQSVLMLHRSRELLVRQRTMLANALRGHLSEFGMVVAKGLQNVQKLVAIVGDYGDSRLPDVAREVLATVIEQLRDTTRKIDDLEKRLQGWHRSNEASQRLATTPGIGPMTATALIATVGDPRHFKSGRQFAAWLGITPREDSTGGKTRPGKISKRGDGYLRCLLIHGARSVVQAHRRKATEASSSSWLGQLLARRHVNVATVAMANRNARIAWALMVHGTVYQPRA

SEQ ID NO: 467841 - protein, 446 aa, unidentified
MMQKVMAMTSIHHSRRTLMNCTQNEKLNQVTPHTLIVGVDIAKFKHVARAQDDRGKILGKALVFTNTKEGFEAFFSWLEEMQHKHEKSDVLVGMEPTGHYWLNLAYTLKERLVSFGVVNPLHVKRSKELDDNSPTKNDIKDARVIAQLIKDGRFSYPRLPMDEDAEIKAGITIRNQIVGDLQVLQGRVHNWLDKYFPEFLTVFKDWSGKMALATLEHIPLPGQLNQTTPERVAEIWSTYGGVQRPSLKRIQRLQEAAARSVGLNVGLQMAQREIATNIKRYKMLKEELCALEKELETLVLTLPGIAEMLTVPGVGMVTVIELYSELGDIKNFKNPRQILKYAGLNLRESSSGKHKGQARITKRGRAKLRALLFRTVMPLVRHNRAFKALHQYYTTRQENPLRKKQSLIVLCGKLVRVLHTVGQKQCPFDEERMIQDIPHLSLALKV

SEQ ID NO: 467842 - protein, 344 aa, unidentified
MNHYAGIDVSLECSSVCVVDASGKIMREAKVASEPEALVGWFSSLGLALERIGLEAGPLSQWLYAEMKKAGLAVELLETRHVRDAFKAMPVKTDRKDARGIAQLVRLGWFRPVHCKSMEAQETRAMLTSRKLVQSKLQDVENHLRGILRGFGLKVGKVSDRTFAPRVRELVDGHPSLQTIAEALLAVHAVLQREFKAFEKRVLAMARADARTRLLMSAPGVGAIVSLTYVSGIDDPGRFKSSKAVGAHFGITPKKYQSGETDVTGRISKIGDASVRTALYEAANVILTRVVKGGALKSWAARIARRAGMNKAKVALARKLAVILHRMLVDGKPFDFAAAAAARQ

SEQ ID NO: 467843 - protein, 411 aa, unidentified
MEAIIEKCCGLDVHQATVVACVLVGEGQKRPKKQVRTFRTVGRELRALRNWLTELGITHVGMESTGVYWVPVFRALEGNFELVIGNAHHIKTVPGRKTDVKDSEWIAHLVRCGLIRPSFVPPLPIRELRELTRCRRGLMNDQARIRNRVQKLLETASIKLASVASDVFGLSGRAMLRALADGETDAKVLAQLAKSTLRKKLPALVEALEGNFDAHHRFLLRFQLDRLDEVERALGALDEHIDHKLEPYAAELALLTKIPGFSRVTAASFIAETGGDMSVFPTVRHLAAWAGIAPGNNESAGKRRAAGTRKGNIHLVTTLVQAALGAARTKGSYYKDKFWRLRARRGAMRAMVAIAHKLLIAAYEVLAHRKPFVDLGDQYLTRRSQTDVARRHVRRLESLGFDVALTPRVVA

SEQ ID NO: 467844 - protein, 313 aa, unidentified
MDVFVGIDVSKAVLDVSVSPTGEKWSVPNSTEGMLQLVQRLAELAPVLIVLEATGGLERRAVAALAGAALPVVAVNPRQVRDFAKATGQLAKTDAIDAAVLAHFADRIRPPLRPLPDAEAQELEALVVRRRQVIDMITAEKNRLSAAPPSKRVRTAIGKTIKWLQKQLEEIDSDLDDAVKGSPAWREKDDLLRTVPGVGKVLARTLISLAPELGTLGRNQIAALIGVAPLNRDSGTQRGRRCVWGGRAQVRSVLYMAALAAARFNPTIRLFYARLVAAGKPRKVALVACMRKLLSILNAVLRTKSPWTQELPA

SEQ ID NO: 467845 - protein, 369 aa, unidentified
MKQLITYIGLDVHKETIAVALAEAGKRNEVREYGKIANTPAAVKALVAKLARNGHELRFCYEAGPCGYGIQRQLTASKHDCIVVAPSLIPRRPGERIKTDRRDAINLAKLHRAGELTPVWVPDEAHEAIRDLVRARLAAVRTLRQARQQLSSFLLRHGHHYNRPAWTLMHRRWLAGLRFEHAVHHVVLEDCIAAVEAATARRDRLEAHIAAALPDWSLAMVVHALQALRGMALVAAATLVAELGDITRFANPRQLMGYLGLVPSEHSSGGTRRQGGITKAGNGAARRMLIEAAWSYRFPARISREQLLRQEGLAKPIRDTAWKAQERLCRRYRKLAREGKLPTVVTAAVARELVGFVWAIAKQVHAISA

SEQ ID NO: 467846 - protein, 353 aa, unidentified
MCTRATRRQQPCSRGSGEVFKAQLPGSPAAAIEWLQTLPGPVRAVYEAGPTGFGLARAAQAAGVQVMVCSPGAIPRQPGDRIKTDARDALKLARLLAAGQLRPVVVPALELEALRDLVRAREDLRGDLMGARHRVGKLLLRRGLIWDGPGAAWSQRHLRWLSTIRFDDELVELVFGEYLAHHEVLLARRDRLDAMLLEQSTQGSWAPTVARLRCLRGVDTLTAVGLVAEIGDITAFKHPKQLASFLGLVPSEHSSGTKRRQGAITKAGSAHARRLLVEAAWQYRRPPRVSEPLRRRQAGQPTGAIDAAWRAQIRLHRRWVHLDAARAKKRTTVVVAVARELACFVWEIAQQPD

SEQ ID NO: 467847 - protein, 443 aa, unidentified
MERSESMPTSSAVEPAFAELAHYAGLDWAKDGHQVAVVDRRGKLVLELNFADTAAGWAALREKLAPLAPLGVALETCCGPAVERLLAAGWSVYPLNPKAAERYRDRKAPSGGKSDRLDARSFADALRTDGHGWRRLQPQDPRTHELRLLCRDEIGLIAQRTALVNQLQEALHEYYPTARAAFDDWTAPGAWAFVVAFPTPAELGRAGRRRWEKFLHVHKLYRPETTARRLELFAQAEAFVNPNPAVTKAKSFLAASLARQLQFLEKQLDQYRQRIEQLFREHPDHDIFGSLPGAGPKLGPRLLAELGGNRAEFATAQDLQCYTGTAPVLSQSGTRRKRPDVRMRRACNHWLRATVHLWADKSRQQCAWAQAYYAEKKRRGMEHAAALRCLGQRWLKILWRMWQDGVAYDEALHLRNQVAHGSWVLALAAPEPAPHAKADRQHN

SEQ ID NO: 467848 - protein, 340 aa, unidentified
MNHYVGIDVSLEASSVCVVDGTGKIVCEGKIASEPDALITWLKGRKLELTRIGLEAGPLSQWLYAAMRQAGLAVELLETRHVRNALKTMPVKTDRNDARGIAQLMRLGWFRPVHCKSIAAQETRALLTARKLAQVKLHDVEMSLRGILRGFGLKVGPTTPARFEGRIRELVAGHPSLEAIAQGLLAVRVALRREFDRFEKQVRAMARCDRRARLLMSVPGVGAIVSLTFAAAIDDPARFKSSKQVGAYFGLTPTKYQSGETDIDGRISKIGDAGVRAALYEAANIILTKPLKGCTALKSWAMKLARRSGMKKAKVALARKVAVIMHRMLADGTTFTTQPA

SEQ ID NO: 467849 - protein, 355 aa, unidentified
MDSTKYIGMDVHKESISIAVRNAASKVVMECVIETKANMILEFFAGLRGDVQVTFEEGTWAAWLYDLLKPHVTKLVVCDPRRNALLQEGNQNDRVDARKLAELLQNNQLRPVYHGDHGLRTLKELVRSYLTITKDLSRVMTRVKAIYRSWAIPCSGKQVYAPRHRAEWLTKLSEPGVHRRAEFYYQQLDALRSLRQQVRRDLLAESKKHKVWKRLCQIPSIGPIRAAVLLGILQTPHRFRTNRQLWTYSGFGVEVHSSADHQVIKGHLQRKKKHVEIRGLNENCNHYLKNLFKGAAVVASTKPGPFAEFYAALLAKGMRPEMARLTLARKIATIVLIVWKKGVCFDANHLKPQTA

SEQ ID NO: 467850 - protein, 352 aa, unidentified
MELYVGGDLSRKRLDWFAVWPDGAECGQGAVSPDGDGLARLAGELGLLGERVCVVIESMTGARFVHDELESHGVEVRIADARRAKFAVELLGLARGAKTDRLDARRLAELGRLDLVPEIWLADPQTRAARELARFRLHLVRQRTMLKNRIHQTLIAHGIGRVETDLFGRAGRARLERLDLPEPWREQVRVSLALIDHLDEQINELERSLRRVGGEHPYLPLLLTVPGIGWVLGFTIASEIGPIERFPTARKLVGYTGLCPRVDQSGDSDRRGPLTKNGPKWLRWALVEAAQNAARHPAYKDRYQRTKKRLGRQRGPRVAQVELARSLAEAIWHMLSRGEPFAPAGAKPCLAP

SEQ ID NO: 467851 - protein, 345 aa, unidentified
MDHFAGLDVSVKATSVCIVDDTGRLVREVKVASEPAALLAALANRAYHFKRIGLEAGPLSQWLYSALSEAGLPVICVETRHMRAVLQAQINKTDRNDARGVAQMMRAGLYRPVHVKTLRSQKLRMLLTHRKLLQSKAIAIDNDLRGTLRNFGLKVGIVGAVKFETRIKELVDNLPDLAILVEPLLIVRRVLREQLGILHRRLLAIVRDDDVCRRLMTVPGVGPVVALTYRATVDVPARFRHSKSVGAVFGLTPSRYQSGEINRSGAISRCGDEMMRAMLYEAAHIMLVRLAKWSWLKAWAMKIARQRGMKKAIVALARRLAVILHRIWVDGTEFRWTREQAAAAA

SEQ ID NO: 467852 - protein, 376 aa, unidentified
MTTIGAERQDAEVAVVLGVDTHLDFHVAVAIDHLGRHLGETSVPTIPKGYERLLRWAEGFGSLRCAGIEGTSSYGAGLARYLRSRGIEVLEVERPKHRRPSSRRNLQKSDLSDAEAAARAVLAGEASGVPKSGEGCVEMIRALRAARRSAIKARTQAANQLQALRVTAPEELRHRLRGLSTKDLVCVAARFRLAGDPGDVPAATKFALRSVARRYEALSEEISELEAHLDRLVAEAAPELVSLPGIGTDNAATLLVVAGDNPQRLGSEASFASLCGVSPIEASSGKVVRHRLNRGGNREANRALYMTCLARMRRDPRTQEYIARRTQEGKSKREIIRCLKRYVAREVYRVLVSCGPRSLPTSPKEEAQIAAGSNAA

SEQ ID NO: 467853 - protein, 259 aa, unidentified
MSASPLFVGIDVAKAELVISLGPSSDLLTAPNDESGIRHALEQLQAERPELIVLEATGGYETAVVAALAAAGLPVVVANPRQVRAFARAMGKLAKTDSIDARILALFAERVRPPIRPLPDEALRMLDALLTRRRQLIEMLVAERNRLAHALPPVEKSLKQHIRWLERRLADVDSDLDQTVQQSPVWRAKEDLLRSVPGVGPIVSRTLLADLPELGALNRKQIAALVGVAPLAKDSGTLRGKRMVWGGRAPFGQPFTWGP

SEQ ID NO: 467854 - protein, 460 aa, unidentified
MEIVNPNAAGIDVGSRSHYVGIGQGLSDVREFGVYSVQLKELVAWLLENDIDTVAMESTGDYWQNLFSEIINAGIKVYLVNGKYTKNPSRKKTDVLDCQHIQKMHALGLLNASFLPDEATEKLRTFCRQRLNMIELRSRTNMKIQKYLKLLNLRLDTVVKDITALTGMKIIRSIVSGESDPKVLASYRHYNCKKTEEEIAMALVSNGRADYLYCLEKELDLYDFHTSQLLEQDKRISIEISNYISSMEEVVDDLPSEKKHKKLNKNSIRTIDLNIASYQYFNGVDLMDIPGVSYSTILTLMSEIGPKGMKKFPSAKHFASWLRLSPNNKVSGGRVMSSKVQKGSNRLKIAFRNAAYSISRLKNSPLHKFYKKIAFKKGSTKAITATARKLAVIIWNMITKKVPYKAQEAYVYLDQKRKQLADLRKKMIKLGLDPNEHDIFTRPEYREKWLQQQVSKQSIS

SEQ ID NO: 467855 - protein, 423 aa, unidentified
MEVMHKRVAGLDVHKETVVACVRLMVGRKPTRECRTFATTTEGLLSLLAWLTASRCTHVAMEATGVYWTPVWKILSEGDFTLIVANAAHIKQVPGRKTDINDAMWIADLLACGLIKASFVPEEDIQELRALMRTRKQLVREQTRHVQRLQKTLEEANIKLDSVISDIMGVSGRRMIEAMIAGERDPHRLAALAERSIKASPQALRDALHGRLREQHRFLLKLHLQQWDGLDAAIRQIDRQVAGQIERMDEEAADGSSPFRELIVRLSAIPGVSRLSATAILAEIGRDMSRFPTAGHLVAWAGLCPGQNESAGKRKSARLRKGAPWLKTMLVQCAWAAKRAKDSYYMAQFHRLRSRRGPQKAICAVAASILTAIYHMLKSGAPHRDLGADYFDRRSPEAKAKRLVTQLTKLGFDVKLQPLAVAA

SEQ ID NO: 467856 - protein, 352 aa, unidentified
MMLIGVDPHKSTSTATAVEPESNREVASIRIEATLREYRRLLTWAGRWPERRWAIENAEGLGRHLVSWLLARGEQVVDVSTNATARVRQLSRGGGRKNDRIDAAAAACVAALQGDARQLEAEGAAEAIGVLDEQRANLSQARVRSVNQLHAVFRALLAGGAPTGLTAGAAAALLRTVRPVGEVERVRKHIASDLVAEIRSLDARLKGNAEVMAELVKASGSTLEQTVGIGPVTAGRLIGRTGSPSRFPTPAAYAAYTGVAPIEVASGERSRHRLSRSGDRQLNATLHTIAVTQIRTAGSLGNIYYLTKIAERKTPREARRCLKRRLANHIWRTMIADEKRQRAKTSNVADAA

SEQ ID NO: 467857 - protein, 367 aa, unidentified
MKKDNTVRKSSGVKTRASGRLTIGLDLGDRSSRYCILDAQGEVLSEGSVATTKKGLAEVFASKPRSRIALEVGTHSPWVSRYLAGLGHEVIVANARRVRLITDSSRKDDRLDAKTLGRLARIDPELLSPIRHRSEQAQADLMVIRARAALVEARTMLVNSARGLTKSYGERLPSCGTGQVGENLAEPLSAPLQGALKPLLATVESLSERIREYDGQIEQTGKQRYPETELLKQVHGVGTLTALTYVLTVEDPHRFRRSLDAGAYFGLRPRRRESGASRPQLRITKEGDAYVRKLLVQCAHHILGPFGQDSDLRRWGLELALRGGKNAKKRALVAVARKLAVILHKLWVSGEVYEPLHVRKDGKAVAA

SEQ ID NO: 467858 - protein, 366 aa, unidentified
MVAMHYVGLDVHAKRSSLCILDSCGKTVKQLEVKGNWPVLLERVAAEVPRPFAVCFEASCGYGYLHEKLSAMARAVSVAHPGQLRLIFKSKKKNDRVDAGKLAKILYLDTVPAVHVPSVDVRAWRGLIECRRRLMDRRVAVKNQARALLRSLGIMALAAKTLWSKKGLAWLEAQTLSEADSLRRDLLVQELSELNQKIKRVEKELAQRADTHPGVTLLRTIPGVGIRTAEAFVAYVDNVQRFSRNKKVASYLGLVPCQDSSAGKDRLGHITKDGPGTVRKMLCEAAWQGIRHSPSLKSFFDRVMGADPDRKKIALVATARHLATVMAAMLRSGEVWQEQTVVEKKIEKDGCAGGDSASPLRKTPMP

SEQ ID NO: 467859 - protein, 311 aa, unidentified
MSEIIVGIDISKAELQGAERPSGTHWTSPNAAPALPALVERLQAQVPALIVLEATGGLEGPVATALALAGLPVVIVNPRQVRDFARAVGQLAKTDRIDADVLALFGERLRPMPRPLRDADTRRLEALVVRRRQVVDMLTAEHNRLAGAPTPAVRQRIAAHVHWLQGELRSVDQDLDGAIRQSPLWRAKESLLRSVPGVGRVLTLSVLTQLPELGTLNRKQIAALAGVAPLNRDSGRFRGRRTIWGGRAPLRAVLYMAALVATRRNPVLAAFYRRLLAAGKPKKLALVACMRKLLTILNAMLATNTAWQAAH

SEQ ID NO: 467860 - protein, 337 aa, unidentified
MTRYVGVDLHRRRSVIVVLDADGTELWTRGIDNDPLTLGLEIEKAGPDPEVVLEATWGWYWAADVITQAGGSVHLAHPLGIAGFENRRVKNDRIDARLLADLLRMGRLPESWIAPEGIRHQRELVRYRRKLSQLRAGLKAQVHAVLGKEGLRPPITHLWGPGGSAWLDETDMAEAYETRVRSLRRLIKTYDAEITKLDARIASVFEDHEGYEVIQQLNGVGPVLAAIFCAELGDVTRFGSAKQVTSWTGLTPRHRESDTTVHRGSITKQGPPLVRWAAIEAISKNHGDDPIKNHYRRVSERRGRNKGRVAAARKLLTLVYYGLRDGEIRSLAPPEAT

SEQ ID NO: 467861 - protein, 379 aa, unidentified
MNDIIRIGMDTSKSVFQLHGVNSAEQPALRKRLRRRQVMGFFEKLPATRIGIEACGGSHYWAREIASLGHEVVLLPPQYVKPYVERNKNDAADAEAICEAMSRPRVQKRLVPVKTAEQQAALMLVGVRDQLIGRCTQLTNTIRGYAAEFGLTAARGLDKIEPLLARIAADTAVPALARALFTMLGEDYVQLKIRLRKIEAELMAWHRGNELSRRLAEIPSVGPLNGLLLVMKTPNPRAFRSGRDFAAWLGLTPKDHSTAGRQRLGVITRAGDETLRRTLVVGATSVVQQAAKGRGKPSPWLLALIKRKPPKLAAVALANKTARIAWKLMVSGARYDRNRAVAARKGCDAPPAKGSAAHPARSARVTAHKATSQTEAREG

SEQ ID NO: 467862 - protein, 412 aa, unidentified
MLDSSEVESTAADGVFIGLDWGNSHHQLCILDAAGRMVHQGKFAHDIAGARGLTERLHRHGPVQGIAIERSEGLLVEALQQQGHRLFCVSPKMSARARERYRLAPSKSDAFDAFVLADSLRHEHRHWRPLAAPSSLLAELRALTRDRERLIWNQRDVENQLRAVVLAFHPGVLHLFSSLDRDITLAFLRDYPTPAHAGRVGVARMAAFCARHGYSGRTRPELLVERLRANLLSASAGTTAGKAFTAALFVEQLELLNTQVRAITKRIRERLAEHPDAAIFLSFPGMGEVTAAIMLAEMGEDRARFPTAGVLLAETGTAPVTRSSGRSRTVKFRYAANKRMRHAIDWWAFVAVRENDWAHEAYWQARARGQLHNRAVRGVGARWTRILWRCWTDHTIYDSALHLKGPPASITA

SEQ ID NO: 467863 - protein, 247 aa, unidentified
MTKTIMTTAGIDTSKATLDIAVHGRPERWQFANDLPGWRALATTLAKAGVARIGIEATGGYERGVARHLRAAGFTVLVLQPIQVRAYARFRLRRAKNDALDAALIAACAANLDPPEIETDPRLADLAGPLTFVEQMEEDIARFKIRLEHIDDRRLRRLVTNDIARLKARRKAELRRIVERLRAHDALALRLDLVLSVPGIGERTAIALIVRMPELGRISREQAAALAGLAPFDDDSGKHKGQPCLSG

SEQ ID NO: 467864 - protein, 411 aa, unidentified
MPKIVYPICCGIDVHKSFVMACIAKTDENLVTTYSKSMRFSTFKNDLRRLADWLAQNGCRDVCMESTGKYWIPVWNILEPTCNLVLAHPKYLKAIKGKKTDKRDAKWIANIFKHDLLHGSFIPPHDIRQIRDLVRYHVKLTSYTTGEKNRAQNCLTVSNIKLDDVFSDVFGKAASAITERLLENNEPFDVTPYLTKNIKASPEDIQAAVDGMMCAQQAEKLRIIRSHMDSLKLCKLNLESEILTLAQKFLPQIDFVSTVPGIQLFSAISIIGEIGVDMSVFETSRHLCSWAGLAPQNDNSAGKKKTTRISRAGVYIKPILVQCANAAIKSNKHPEIKNRYQNIKKRRGHKKAIIAIARMLLTAIYNILKKNEPYNAELYRLSDKPPIQREVTVEQAIFILQRQGYLVNTPD

SEQ ID NO: 467865 - protein, 407 aa, unidentified
MLEVKVERCAGIDVHKKFVMVCVMIGEAHQKPTSEVRRFGTSVPELERLRAWLLEKACTDVGMESTGSYWKPVFNILERDFKVILANAEKVKALRGKKTDPNDSRWLASLLRHGLIQPSFIPPRDIRELRDLTRRRRTLMQQGAAERNRVQKILEDANVKIGNVLTDVFGMSGQAMLEALLENKMTAEQMAELAQGRLRPKIPQITEALEGHSMRDHHRMLLRQILKHMAYIEDMVEELDKEIWRKLQPYEEEVQLACSVPGIGRDAAASILAEIGPDMSADGPFSGCHQLASWAGICPGNNESGGKRKSGRTRKANRWLRATLAQTTWAGIAKKNSAFRDRYHRLKPRRGPQRAATAVAHGQLIAIYWVLRNRVPYQEQEQTLDDRRRDAMIHHHLSRLKELGYTA

SEQ ID NO: 467866 - protein, 339 aa, unidentified
MRLYAAIDLHSNNCVLVILDERDRVVYERRLRNDLSLILVELAPYRDSIQAVAVESTFNWYWLVDGLMEAGYTVKLVNTAAVKVYDGLKYSADEHDARHLAHLLRTGLLPTGYIYPKEERAVRDLLRKRAQLVRHRTAQILSVQNLVSRNRGVGISKRDARELDDRAIADICGGDEARAMALRSNLAVLRCLDKEIETLETAALERAKLKPAFKLLLSAHGIGKILALTIMYEAGTMDRFKKVGQFASYARCVGSSRWSNGKKKGEGNRKNGNKYLAWAFVEATHHSIRFSERIRRYYDRKKAKTNGAVATKAVAHKLARACYHMLRDQVPFKEELAFA

SEQ ID NO: 467867 - protein, 314 aa, unidentified
MEKITVGIDVSKDRLDVAVRPSGEDFAVPRTGAGLDELVARLKVLKPNLIVLEATGGLETVVAATLAGAGLPVAVANPGQIRAFAKAIGQRAKTDPIDAAVIAHFGEATGIVARPLPDQATQQLADLVARRRQIIDMIGAERQRESRANPRIKKSIGRLLKSLERELSSVDRDIDDAVRGSPAWREKEDLLSSVPSVGPAISRTLIAELPELGSLNRKQIAALVGLAPFTRQSGQWRGKSFIGGGRTSVRKTLFMGAMVAARYNPVLKAFYERLVAAGKPKKVALIAVARKLLTILNAIVRDSTPWKGTVGAVS

SEQ ID NO: 467868 - protein, 343 aa, unidentified
MNITTVGIDLAKNVFQIHGVDERGKVVLRRSVKRAELTKVFVNLPACLIGLEACGSAHYWARRLMELGHTVKLMAPQFVKPYVKTNKNDARDAEAICEAVARPNMRFVPVKSVEQQTVLAVHRARQGFVAARTAQSNQIRGLLYELGIVIPKGIRHLEQRLPGILEDAQNGLPDPSRELFARLLEHFRELDAHVRDLEHQIKAWHRENEASRRLEAIPGIGALTASALVASIGDAKTFKNGRQLAAWLGLVPRQASSGGKEQLLGISKRGDTYLRTLLIHGARAVMSHRIRGAADADSWLMKLLARRNRNIAAVALANKNARIVWALLAHQREYRASPIAAAA

SEQ ID NO: 467869 - protein, 370 aa, unidentified
MKKPTTLFVGLDVHKDSIAVAYVPQDRRAEVAYLGRVGTRSADLDKLFRRLQEKADRLQVAYEAGPCGYVLYRQLSARGIPCRVVAPSLIPRRAGDRVKTDRRDAVQLARLLRSGDLNPVHVPSVDDEAIRDLSRAREATVLTLKAAKFRLKSFLLRLGLHYTGRANWNDAHRRYLAKIVCPTPAQQVVFQEAIRAVDEQVERLHRLEGEIAELVPAWRLAPLVRAYQALRGVQDTVAITLAAEIGVLTRFDTPRQLAAFLGLIPSEYSSGNSRRQGAITKAGNSHARRALVEGAWAYRYPAKVSPSIQKRLEGLSPAVREIAWKAQVRLCKRFRRLVAKGKHPNVVVTAIARELAAFMWAIAREIQIPA

SEQ ID NO: 467870 - protein, 331 aa, unidentified
MNYFVGIDVGAETCVAAMCSSATEQNLPLLTFANTPSGIRTFEDWLLQKGVKRELATICMESCGVYAEVLCYAFHENGWRVHVEPPHKVRRAMPVNGPKSDELDAQNIARYAVRFFDELHQWQPRSNALELVSVLLTLREGFTEQSARLQNQLQSFKRKKVRSKFAESMLTKDIQRVTTELKKIDAEIKKLIDSDSSMQDMHGKIDSVPGVGSTLAAFLMVQTNCFTTGHNAKELSSFLGIAPLLHQSGTSVNRVPRSRGFGHDAIRRLLYLAAMSACTHNDHFKEYFSRMVGMGKKKRLVINNVENKIIAVICAIAKSNRPYDKEYVVAS

SEQ ID NO: 467871 - protein, 343 aa, unidentified
MQAITTIGFDIAKSVFQVHGVDAAGQVIVRRQLKRRQVIAFFQKLPPCLVGIEACASSHYWSRELQALGHRVRLMPPAYVKPYVKRQKNDMADAEAICEAVTRANMRFVPSKTPEQQSGLVLHRTRHLFIRQQTSVINAIRAHLAEFGVIAPVGRKGVEELLCVVADANDKRVPEVVRACVAALGSQLLSLKKQILDFDRMIMAWHRSNQTSKRLNCIPGVGPLLATALVASVADPKTFRSGRNFSAWIGLVPKQHSSGGRDRLGSISKQGDRYLRSLFVAGALAVIRYAKIHGTKHRPWLTALLARRPTKLVAIALANKLARMAWAMMATGARYNYPTSLRV

SEQ ID NO: 467872 - protein, 318 aa, unidentified
MLIHYIDIAKRNFVIAVSSLSKTKTETNNPKGIAHTIEYLKKHKVALVVTESTGGLEIPAAKAIRRAGIAVIIANPRQTHQFAQSQPLTKTDAKDAKMPAFFAQMTAQKEDSQTMPYQPPTEAEEVLEALVNRRNQPADMRTAEKNRLHQVHETQVGSVKQLIAHFDRLIDELDKQIDNHTHTHFDGKDQVAEQIKGIGSITTATLMAMLPELGRLSHKRIASLVGIAPHPRESGETKFKSRCFGGRSAVRKALYMATVAATRFEPLIRDFHQRPLSKGKPYKVAVAAYMRKLLTISNARMRDYFAENDTAENGIRTA

SEQ ID NO: 467873 - protein, 456 aa, unidentified
MPQRRKKSRKINSPKGLPKHLRHININAAGIDVGSDRHVVAVPEGRDAVSVREFGTFTADLQAIGDWLEKCGVTTVAMESTGVYWIPLFEVLEQRGFEVKLVDARHVKNVSGRKSDILDCQWIQQLHTYGLLAGAYRPPDEICTLRGYMRQREMLIQASSMHVQHMQKALQQMNVLLHNVVSDITGLTGMTILKAIIAGERDPKRLAENRHENCRNSKETIAKSLEGNFREEHLFALKQALELYEIYQCKIAECEKAIVAQLAKQPDVTDDERPDGGKRVPTSKCIRGDMDVREKMYKLTGVDLFSIPGLGADTLLTLTSEVGVDMKPWKTGKHFTSWLSLCPGTKISGGKVLSKRTKRNANRAAQAFRMAAASLARSQNALGAFYRRIRSRSTAIQAVTATAHKIARIYYAMLTTRKPYVEAGLHAYEERYKQRRIAALRKQARSLGFELSACAD

SEQ ID NO: 467874 - protein, 432 aa, unidentified
MEKMHHHAAGIDIGSRKVFVGLEDSPVRWFETFTSDLELLKDYLLEHKVTTVAMEATGVYWYVLYDILLDAGLDVWLVDGRQTRQLPGRKTDVKDCQWIQQLHSYGLLNRCYVSDGLVKELRSYQRLREDHLRSAAMHVQHMQKALIAMNVRLPEVLSQVHGVSGMALIEAILAGERDVEKLVSLCHSKVRENKGEELRKALEGHYTPQGLFALSQALKAYQFYQDQIFECDRQIDATLQKINRDKSLPPGAGSGKRKPIRHNKPNINGLGDHLLKIFDGRDATKLPGFTDYNWLQLYAEVGSDLSKWPSEKHFTSWLGLSPGQNSSGKKNKSKSKGKPTVGQIFKQMAHGLLNSKYIGWGAFARRLRGRKGPAVAIKATARKLAAQYWRLIVKGTEFVERGMEAYQNILIQQKKRRLETLAFELNMELIPA

SEQ ID NO: 467875 - protein, 356 aa, unidentified
MSTIAYNEPSRVIVGVDTHQDEHVAIAINGDGAYLGEYRIETTLAGYADLERWSSNFGTIAAFGVEGTGSYGAGLSRFLTGEKYQVFEVNRPDRSTRRRLGKSDSIDAEAAARSVRAGMAEGTPKSGDGNVEMIRMLKVTRDSAIKARSQAKNQMKSLILTAPAELRERFEGLKASKLVDRCLRLRPAEMTTPTTIAKFALRSLARRQGQLDTEISKIDVELTRLTKQTAPALVEAFGMGPNTAATLLVAAGDNVERITSESAFAALCGVSPIPASSGKTTRWRLSRGGNRQANSALHQIVIVRLKSDRRTRDYMERRIREGKSKLEVIRCLKRYVAREVFNILKNLPTSQAKMVA

SEQ ID NO: 467876 - protein, 353 aa, unidentified
MKPRMKSNTSSAVVIGVDIGKDIFHLVGFAADGKTAFRRRIRRLGLKDAFEKLSPCIVAMEACLSAHFVSRTLRALGHEPRIVPAIYVKPFVKGQKNDYNDAEAIAEAALRPNLRFVQEKSQDQLDLQACHRVRSRLVSRRTATINQIRAFLIEQGIAVRIGPRALRKSLFAILENRKDEISPRTAKLIRGLYEDWCCLDERIETVTSEIEALSRAEAKCRQLMSVPGVGPLISTAMVAAIGSGEAFERGRDFAAWLGLVPRQYSTGGRSILGRISKRGSKYLRTLLIQAAKVLLMRPYNWARYSFGPWLNSASERLHRNKLAVALANKLARIAWSVLRHDKAFDTHLEAAAI

SEQ ID NO: 467877 - protein, 411 aa, unidentified
MNAVGIDVSKGKSTVAIMRPNGEVVQPPFEVVHTGSELSALAKQLKKLRGETKVIMEYTGTYYHPIAYELYDAGIFVSILHAQLIHKFSNDSIRKIKTDSKDAIKIANYGLEKWYKLRGWVPEEDLRRQLKLFSRQYNKYSKLRAMLVNNFIGLTDQTFPGVNELFTSQPRKRDGHQKWLDFAMEFWHCECVCGGTPAAFEKRYQKWCKKAGYNFSKEKAWDIFVSACGHCCVLPKDSATKLLMQQAIRQITAISETLAAIGNEMKSIAEQLPEYSIVMGFFGVGEILGPQLIAEIGDVYRFPKKGSLVCFAGLEAPPYQSGKFESKDRKISKKGSPHLRKALFQVMVSILQNAPAEDPIFQFLDRKRAEGKHYYSYMTAGCAKFLRIYYARVKELQDKLEDEFEANELPA

SEQ ID NO: 467878 - protein, 355 aa, unidentified
MPSKADTAVARTIGIDTGKNTLHMIGLDEKGAIVLREKVSRTRIAARFVNLPPCLVGIEAGMASHHVARELVALGHEVKQVPPAYSKPFRQGHKNDFRDAHAVAEAVERPSTRCVPIKTDGQLDLQALHRVRSRLIGNRTAVINQIRGFLLEHGIPVRQGYRFLRQQLPQILATRTDVLSPRMIRIVGDLMADWKYLDERIERVTDEIEALAHADEGCQQLITVPGIGPIISSAMVAAIGNGAAFCKGRDFAAWLGLVPKQMSTGDRTILGRITKRGNRYLRMLFIQGARAVLLRPASWAKHSFGSWLTAATRRLHRNVLTVALANKLARIAWTVLAQGRRYEARVEPRVEPAAA

SEQ ID NO: 467879 - protein, 398 aa, unidentified
MASVGWADARPMGSTRSRVSLASAWDFRSRVSGSTTMQGSRPTHPTETTTMRFYSDQHRFYCGADLHTRTRSLCVLDNAGVIVREAPLPPGPERFLEPLAPYRGGLVVGCECLFASSWLADLCAAEGIPFVLGHALYLKAVHGGKTKTDTIDAQRLARLPRGGTFAEAYVYPQAMRATRDLLRRRTYFVRKRAELLAHLQMTFLQYNLAPPAQKLCYAANRAGLDLAVFADPSTRSMLAADLAIVTALDQQIKRLEAELVRTAKVHDPQTFHRLRTVPGIGPVLALILLDEVHTIGRFADEGRFLSYARLVGGVRESAGKSKGTGGRKIGNAHLRWAFGEATCLMLRESPKAKTWLARRERKLGKKRALGALAARLGRTVYHLWRKKEAFDEAKFLAS

SEQ ID NO: 467880 - protein, 316 aa, unidentified
MSEPVFAGIDIAKNSFEVAVTGEAQTLSLGNDDAGHAELCQVLVPLAPRLVLLEATGGYEQDLALALAAAGLRVSVVNPRQARDFARCTGRLAKTDRIDAQALCAFAAMLDAQGHEPRTLADEQQRELTALVVRRRQLVGMLVAERQRLAVAHPKAKPSILQIMDAIAAQLHDVDGELKIHIRAHHADLAKLLTSVKGVGPTTASTLLAQLPELGKLNRKQITSLVGLAPINRDSGTLRGQRHIFGGRADVRRVLYVAALVGTRFNPVLKAFYARLLAAGKPKKVALVACMHKLLVILNAIARTKSPWNGEIATVV

SEQ ID NO: 467881 - protein, 349 aa, unidentified
MKEISIIGIDTAKNVMQLHGIDKTGKVSLKKQVTRDKFLTTLSNMPKCLIGMEACGGAHYWARKLMEMGHEVKLMSAEAVKRYAEHQKNDANDAKACAIAVERKDMRFIPIRTEEQLELQSLHRIRTYYVKRHTGMMNMIRGLLLEHGIAIRQGKTALIKRLRELLAEEERRMELRSSMSDLLEELNHLQSKIDGHTGKIEKIAKEEERCKQIQTIEGIGPISATAIIAKIGNGSEFKKGRELSAFLGLVPRQSSSGNQKRLLGISKHGDRYIRQLLIHGGRSVVRASQRINKETGAYCKSDKHSEWVRKLTERVGINKASVAVANKNARMIVSILKTGIEYKAELAHA

SEQ ID NO: 467882 - protein, 323 aa, unidentified
MFQTIIGIDVSKHTLDVVMLRPKGQWHKVIDNSPQGHQWLQNWIIRTKQGTIHACLEATGQYGEPVAEYLYAQGHQISVVNPARIKRYGESKLHRNKTDKADAALIAEFCSKEKPALWMPSPPAQKHLRCLVRYLADLESMCRQEQNRLASGLQDEFVIHELETHIAYMQQRRTVIREAIQQQVETHTDLKKQQDLLVSIPGIGKFTAARLLAELGDISAFENAPQLAAFAGLNPKGKRSGTSVYRKTHVSKEGRPFLRSILYMPGIVARRHNPIVHAFCDRLAAHNLPKKAVISAAMRKLLHIVYGVLKRNQPFDPNYLSTA

SEQ ID NO: 467883 - protein, 346 aa, unidentified
MEQISRIGMDTSKRFFQLHGVNTAETVVLRKKLRRKEMVTFFEKLAPTVVGIEACGASHHWARLLQSFGHTVKLIPAQLVKPYVKRGKNDMADAEALCEAMSRPTMRFVPIKTAEQQAALMLVGLRDRLIRNRTQLSNAIRGYAAEFGFTAAKGVANLRPLLERIQADEGVPDLARELFAAQAEEYAQLEEQIAEISGKLMAWHKADECSRRLAKIPGIGPIGAALLMMKTPAPELFRSGRQFAAWIGLTPRDHSTAGKVKLGVITRAGDEALRAVLVSGATAVIRHAVGRKGRASPWLIDLLKRKPPKLAAVALANKLARIAWKLMVTGENYAATSTPIASAAAV

SEQ ID NO: 467884 - protein, 356 aa, unidentified
MREIKGTDFRNQDFHIGIDVHRKNWLVTIRNNQMELRTFSMNPSPEELHHHMEHNYPGGRYLSAYEAGFCGFWIHRKLQSYGFKNIVIHAADIPSTNKERSTKTDKVDSRKIARELEKQSLNSIYIPEEFHQQLRSLCRLRHRAVQSQTRVKNRIKSHLYFYGTVIPSHEEMPHWSGRFINWLKSQKFSYYSAKDYLLFCIEELTQHRHRIAEIIRALRRHIKEQGQSEQIDLLRSVPGVGPIIATSFYTEVMDINRFRTFDHLASYVGLVPSVHSSGDKSIEQGLTKRRNSYLRYLIVEAAWVAIRKDPALLLAFNQLTRRMKKQDAIIRIAKKLLRRIHHVWKNQTTYVTAVVK

SEQ ID NO: 467885 - protein, 329 aa, unidentified
MFVGLDLHKNYLQTAVMDEQGRLLSQERIPNRDENIEEFASKRLRDSRAEIVIESSSTWYHVYELLSKNQNCHVVLSNPVKTKAIASAKVKTDKVDALTLANLLRTGYIPESYIPPRHIMDLREMVRYRTSLVRMRVEAKNKIHAILLQNGTRITEKPFTIGFVEELRRLGDYRIDGYLNIISSLSRQIQTVSNTIKREATEDESTRLLMTIPGVGYFSALLIQSELGDVNRFPDSHHLCSYAGLTPSTHSSGGVTYHGSITRSGSRYLRWILTESAKAHIRTRRDSQLTRFYTRQAKRRGGSKATVATASKLLRIVYWILKEKRPYHS

SEQ ID NO: 467886 - protein, 458 aa, unidentified
MRTRKGRRTKGIEKEHPFAGMSQVNENAAGVDIGAVEIVACVAGDAETQIVKAFGNYTVDLQNIGKWLSEHQVKTIAMESTGVYWIPLFEELERQGFECLLISSRSLRRVPGRKSDIEDAQWIQTLHSYGLLESSFRPQGELVALRTLLRHRGQMLDHRSPHIQHMQKALLQMNVQLSQALSDVTGETGLRIIRAIVAGERDPEKLALMRDRNCKNSAEEIAKALTGTWREEHLFILKQSLEVYDFYTQQIEVCDAEVAHVYALTRPDWEMGELPGKPKRKRNSHSKNAPQEQEETRKHLKRISGVDLSVVDGFGVSLAQTVITEVGTDMSKFPTEKHFCSWLGLAPKHEISGGKVLKNKTLKTKNRAGQAFRMAAQSVKRSDTVFGSLYRRLRTRLDKAQATVATAHAIARVVYRMLKYKVEYETISIEEYEKKYKEEQIKYMKKKAAKLGFQLVPA

SEQ ID NO: 467887 - protein, 419 aa, unidentified
MSFKILKNNCCGLDVHKTWIYACIGITDSNKRTEYKQARFSSFTKGLNELCDWLAKYNCNDVCMESTGKYWIPVFNILEKNNIWVTLSHPKYTKPQKGNKTDRKDAKWICDLYMCGMVNPSFIPPADIRELRDLVRYRFKLTCMITSEKNRAHNCLTVSNLKLDDVFSDIFGKSSRSITEQILQHPGETFDVTPFVDGRCKTPMEEIQAAVDGAVSQEQAVKLRQCLNHIDELELHKAEIEREIFRLSEKYESVLNLIRTVPGFDKNPLTAIQVLSEIGGDMSVFPTAKNLVSWAGCCPRNDQSNCKIKSTRISRAGSYFKPVLVQVANALIKSKKHPEFAIRYRRIKARRGHKKAIIAICRMILTAIWHILTDLKPYTPEGFLESRPVNKEKVLTTSQALNLLKQRGYTIKDDVVTVI

SEQ ID NO: 467888 - protein, 333 aa, unidentified
MTPCFVGADIAADTVTLVWQTQRRQFSDPLVIDQTAAGFAHLRRQLRRQATPEQTWVVMEATGSYWMALAYHLHQHGFVVSVVNPLHAHHFALAQGGRSKTDAIDARSLSELGQVLQLPRWSPPPAICEQLEQRLTERDQLVQTRSRWKNQLRALRRRPEADATLVARWQQRLAALTTEIKALDAELKTLLLGAHEWHDSARRLLQVKGFGLIAAAWLLVATHNFAHCQTAEEVAAYAGLAPHPHESGKSVRGKRQTGHGGHAALRRTLYMAAGSALQHNPPLRDFYQRLVARGKLKNVARVAVARKLAVLGWAVVTKERDFDPNYRQSAQAA

SEQ ID NO: 467889 - protein, 420 aa, unidentified
MHASTDKPFTAYVGIDWADSKHDICLQAAGSEQREFDCFPHRVERIEEWASSLYQRFGGPIAVALELVKGPLVYALQKHDFFVLFPVNPSMLAKYREAFKPSRAKDDPTDAELALDLLVRHPERFKALQPQSVEMRTLMSLVEQRRRLVNDRIRLTNRLRNTLKQYYPQTLEWFDHIDTPIFCDFISRWPTLTQVKRARRSTLERFFHEHNMRFAHLLQARLKSIKAATALTFDDAVITPHRLQALVLVDLLRVTLQAIQRFDEEIAQLAPKHADYALFSALPGAGPSLAPRLLVAFGEQRERFRSAAELQKYSGIAPVTERSGKKHWVHWRWQCPTFLRQTFVEWAAQTINKSFWAGAYYRQQRAKGCSYQVALRALAFKWIRILYRCWQTRTPYNEAEYLRSLERRGSPLLKQFATSE

SEQ ID NO: 467890 - protein, 416 aa, unidentified
MNAVGIDVSSRKSTVAVLRPLGEVVCLPFDVSHDADGLASLAEKLKALDGETRVVMEHTGRYYEAVAKALHEAGFFVCAVNPLLIKEYGANSLRRVKTDKADAVKIARYALDNWADLRDFTPMDAIRYDLKTLNRQFQLASKQRTASANNLIALLEQSFPGIRKCFDSPVRSDGTQKWVDFAHSFWHVDCVRKQPFAAFCERYRKWCKRHAYFFKLSNAEEVYALAKRAVVLTPKSKVVKVLVQEAANQLISISRSVEVYRAEMDRLAAMLPEYPVVMAMYGVGKSYGPQLMAEIGDVRRFERKQALVAFAGIDPMPNQSGDKNVRSNKSSKRGSPYLRKTLFNVIRTYLQCAPQDEPVFQFLNRKRAEGKPFYVYMLAAANKFLRRYYAKLRDFFASLDTLQPVAPIPTILKATL

SEQ ID NO: 467891 - protein, 347 aa, unidentified
MLYLGIDQHKNHSTFCCINSSGHVIESRKIYNSKEMIESFLNNLPTDEPIMAVVEAGSFWHVMYDTLEEIDRIDKIILANPSKVKIIASSKIKTDKIDAEKLAQLLRGNLIPEVWIQPKDIRVKKYTARFRIFVVKEKTKLKNRIHNLISRNHLQSPEVTDLFGKHGIEWLKTVSLDETERKLLDEHLKIYEFIEEEQKIIEKELHKQFDDDEDISYLRSIPGIGFVFSALITLEIGDINRFPDVSRLHSYCGLVPSTFSSGEKTYHGHLLKSSNSYLKWVFIEAALAAVKRSIYFSSHYYRIRSRNGSQAAAVSTARKLASVVFSILKDKRNYVENYSALSPSSQF

SEQ ID NO: 467892 - protein, 313 aa, unidentified
MFSLGFDVAKDHHDVALTNKSGQLKQRWQIANTSSAITELLTTIHVAHSKLTVGCEATGSYQQSLLQACLELGIPCRLLNPLTTKQYTKSTIRGRKTDRDDALSIARLVLRGEGNLVTPELLNPARNYVRLATKVQQHIHALKLEQRYLSEITGLPAEPGFTTAIVALEQLTTDLRERATETVDQRDYDLLQSLVGIGPTIAVSLCAEISDIHRFPGPKQLVAYAGLDPRVRQSGTVLNRNTRLTKRGSAELRHSLFLAANIARQHDPELKAYYQKKRAEGRTYTAATVATARKVCYRVFAVLSRGTPYVKST

SEQ ID NO: 467893 - protein, 343 aa, unidentified
MAYFAGLDVSVKETSVCIVDDAGKIVREVRVASEPEALLQVLANNAYRFKRIGLEAGPLSQWLYSVLAEAGLPVICVETRHMRAVLKAQINKTDRNDARGIAQMMRVGLYRPVHVKTLRSQKLRMLLTHRKLLQSKAIAIENDLRASLRNFGLKVGMIGTVKFEARIRELVGNLPDLAVLVEPLLIVRRVLREQLGILHRRVLAIVRDDDVCRRLMTIPGVGPVVALTYRVTVDVPARFRNSKAVGAVFGLTPAKYQSGENDRTGAISRCGDGMMRMMLYEAAQSMLVRSTKWSWLKAWAMKIARHRGIKKAIVALARRLAVIMHRVWVDGTEFRWTREVAVA

SEQ ID NO: 467894 - protein, 342 aa, unidentified
MDHFAGLDVSVKETSICIVDDTGRIVREVKVASEPEALLSVLKNPAYHFKRIGLEAGPLSQWLFSALAEAGLPVICVETRHMRAVLKAQINKTDRNDARGMAQMMRAGLYRPVHVKTLRSQKLRMLLTHRKLLQSKAIAIDNDLRGTLRNFGLKVGMVGKVRFEARIKELVENLPDLAAMVEPLLIVRRTLREQFCVLHRRLLAIVRDDEVCRRLMTTPGVGPVVSLTYRATVDVPARFRRSKSVGAVFGLTCAKYQSGEVDWSGRISRCGDEMMRVMLYEAAQAMMRSKKWSWLKAWAMQIARRRGMKKAIVALARRLAVIMHRIWVDGTEFRWTREAAAA

SEQ ID NO: 467895 - protein, 412 aa, unidentified
MIVGIDVGSETHYARAFNWRNYEYSKKPFAFSNDEAGFPSFKDWMDDIAEKHGMETVIPGMEPTGHYWLNLGAYLQEQGMKPVHVNPHHVKKSKELDDNNQSKNDRKDPKTIAGLVNEGRFSYPYIPTGIYAEIRNLSNLRIQTQEEITRIKNRIARWFSIYFPEIKDVYRNPDAVSGLMVIKQAPLPCDIKELGVDGVNKIWRDARLKGAGIKRARTLVTAAEHSIGNTEAPRSARKEIRNLLEDYEGYKKRMDELMEEIEKTLSEIPYIDKLMEINGIGIKAVSCFIAEVGDIGRFDNPKQVQKLAGYSIVADSSGKHKGESRISHRGRTRLRYALYEATISVIGKNKEFKEIHSYYRTREKNPLKKMQSVIAVACKLIRIFYTILTKGVDYDGQKMLNDIVRPEIQPAA

SEQ ID NO: 467896 - protein, 341 aa, unidentified
MRKTLYCGVDLHSNNALYVITDEKDKQLLHKRLPNELPVVLKTLAAYRPRLKVVAVESTYNWYWLVDGLMDHEYPVVLAHPSEMEQYDGIKEADDLTDAAFLARLARLNVLPTGYIYPKEDRPVRDLLRRRMLVVQHRTGVILSLENMAQRQTGQKIGWRTLRKLSAEERTELLGEHDCLAFVTAEQVEMIEQLSEKIKRFEQKVLEHAQLRPAYACLQTLPGVGTILALTIMLETGDLGRFQTVGDYTSYCRCVRATHSSNGKKKAHNNAKNGNPYLAWAFVEAVHHALRVCPQAKSFYDKKRAKRNGALATKALAAKWSKAAYYMMKRQEVFNLTRVFG

SEQ ID NO: 467897 - protein, 389 aa, unidentified
MIYLGIDVSKFKHNCYLADEENFDEGCHFEIKNSRDDFEYLLKKLLNFDKDKIRIGLESTGHYHLNLSRFLLDLNFNIHFFNPYQTSLYRKADSFRNTKTDKVDAFFIAKLLRATDSNPTHNELYHNYELKSLTRYKSSLKNDRVKLKNTIVGHIDLVFPELYEVCKDVFCKYTLEILKEYPSADNISKANLTRLTNLIKKASNGNHSKEKAIEIREAARKSIGINSPAMSFRLVQDIKALEFLIGQINDVNEQIKPLLNEMDNPIMTIPGVGIEIGPSLISEIGNIENFESPSKLLAYAGLDPSINQSGTMHSNYSSMSKRGSSYLRQALFLAAFLICQNDETFRTYYEKKKSEGKHHYVALTHVARKLTRVIFHLLKTNQKFVSQTT

SEQ ID NO: 467898 - protein, 427 aa, unidentified
MPYRIAGIDVHKTMVAVAVADVEVEGDWQFERRRFGASPSQLRLLTAWLVERQVEEVVMESTAQYWRPVWDALERDWQPTQRTRVDDKPTSGALHLAQAQSNSGRHGRKRDFPDAERLVKRLSAHELTLSFVPDVTQRLWRTATRRKYQLTRNRVQLQNRLECLLEEAHIKLSSLVSDLLGSSARRMLRALASGETDPATIAALGSARLHATAEQLCDALGAATDLHPLYRRLLAMTLAELEVIETHMQQLDEELAGLLRAHQDAVQRLAAVPGLGVDSAQQIIAEVGPTAETFSTAKRLVSWVGACPGHDESAGINHSHRSPNGNRQMRRLLNQAAHAAVKTKGSIFELLYRRFVVRLGHAQAIGAIAHRLCRLVWKILHEGVTYEERGPFVTKARAQRRAAKMIRELRSLGYRVEPVLAPSSNRA

SEQ ID NO: 467899 - protein, 324 aa, unidentified
MYAALDLHEKSIQCVLKDDTGKVMKESKLAKDEEKILEFLDGTYAHVVMESGYNHQHIRDVLKEKGYDVKVAHPLMVKAIAYAKVKTDKVDARTLADLLRADMIPESYVPDEKTREVRDLVRRRHHLVETRTEFKNKVKAELAKRWVKHEGDVFTQEGRRYLRSLHIDAVDDYMDTIEFLDGKIRALDVKVKGVAQNDRYAKLLVTIPGFSHYSALLISSEIADVNRFADHEHLCSYAGLVPGLRQSADKSHSTHNRTRSAMLNWIMIQCTRVHVRWCDSSITKFYMELAKRRGEKVAIVAAARKLMRAMYIMLKEEKTFRLDG

SEQ ID NO: 467900 - protein, 346 aa, unidentified
MTTKRKVNRMRYIGLDVHKNNIAACVISVGGKVVKSLEVRADERGLQSIHDSIGTTDYCVMMESSTYSYRTYRFFESLGVEAHVIHAQSLKVVTDTDKKTDKKDAESIGKYLRLWKRGEIELSMSYIPTPEECRLKDICRYKEEISFNLGDEVRRIRSHMERNLEVLPGQYDNISTIKSREYIRKTWPNDLTLMERLSHYASRLDDSDRTKRKVESMLRGDNSVELLMTIPGIARQTAVQIMSMIIDIHRFESPEKLCAYFGMVPRVRDSGGKEHHGRMTKSGDAMMRSIMERVTVSHLNHCDSSVNEFYLRKEKEMGRKKALISASRKMLAVIWSVLTNGRPFHA

SEQ ID NO: 467901 - protein, 447 aa, unidentified
MRPSRLDTGPRPLTETEIGFQRQRPEMAHQRTLVRGERAPLGSTKQKEGAMSAVVGIDVGAYKHAVAVCRSGEREAERAVFRLAANRAGFDELDGWLERQGPVERVVLEASGHYYWPLASHLHRRGYQVAVVNPLQAKYFAKSRMQRSKSDPADARTLAALGMSEEPRVKDPLLGAEAKEAARFWGGLVKEQGQVRQKLLRLVEIGFPELKECFEDPLCETALAVLREAPTARAAARKRVSTLAEATRPGGRRRLGENKARRLHELAKDTIAPPELDTQMGFEVELLIKQFDLLEKQIEIAELRVSEVLDSELAQRLQTIPGVGPALAATFIAEIGDIWRFDEFDQLAAYAGIHPKEQSSGTKGQNPETSWHMAKTGNAFIRSAAYRMAVVGTQHNPVIRAHYLRKRAQGKTAMNALGHCMSKSLAIVWGVWRSGRAFDPTLGGPRT

SEQ ID NO: 467902 - protein, 405 aa, unidentified
MSVYGASESSCAVVVAVDVGKNTVALSVTDAGRRRLFGPVDFAMTGPGLADVVDRVRGVLPGGASVRVGVEAAGHYHRPLVAPSAWPAGWEVVELNPAHVSEQRRVQGRRRVKTDAIDLEAITDLVLAGRGVPVTARAAVIGELAAWSAHRTRRVATRTATKNQLLGQLDRCFPGLTLALPDVLGTKVGRLVAEHFADPHRLASLGAARFVRFAQTRGLQVRRTVAERIVGAARNALPTLDAAVARQVLAADLALLGDLDAQVCSAETAVAALLPTSSFATLTSVPGWGTVRAGNYGAAIGDPARWPGHRQVYRASGLSPAQYESAGRRRDGAISREGSVELRRALIDLGNGLWLNDTASRGYAAELRTRGKPGKVIACAMANRANRIAFALVRDQTCYDPTRWT

SEQ ID NO: 467903 - protein, 334 aa, unidentified
MFYAAIDIHKHAFQAAVLDLESGEVVEQRFAADRESLARWAEPWRGRVAAVAIEATTGWRWVWRELVERGFDVRLAEPVQTRALLGRRRSAKTDRLDARWLARLLAKEMLPESWIPPAQIQELRDRTRLRKALAEDRRRWGQRLHAYLLHEGWPCSRSNLLRPPGLRWAAALQLSEHARLQVDSLLSVMAALQTQLDTVDAELRRFARADERCQALQSIYGIGPILACHLLAEIGEARRFCRAEQITRLAGLDPVVDESGETRRRGHLAKAGSPHLRWALVEAAVHAHRTTAPDLALYRATRQRRDTTVARLTVARKIGKRAFHALHELELTTT

SEQ ID NO: 467904 - protein, 338 aa, unidentified
MEREYVGIDLHRRRSVIYRMNSDGEKLGCVRIDNDPVTFAAEVVKAGPGAEVVIEATYGWYWAVDLLETLDVNVHLAHPAGNDWGKRRVKNDERDARDLADLLRLGRLAEAWIAPRDVRELRELVRYRHKLVELRTGLKAQLQAVLAKEGVTVKLSEWWGPTGVKELDALNLAPVYTNKVESLRDLVALYNREIAMFEREIHQRVKHDPGFWAIQAIHGVGPTLAAIFVAEIGDVTRFPTPDALSCWAGMTPRHHESDTTVHRGAITKQGSPLLRWAAIEAVSRYHGGEHLAVTFHRIAERRGRNKARTAVARKVLTLVYYGLRDGEIRCLRQPADAA

SEQ ID NO: 467905 - protein, 383 aa, unidentified
MKILALDLGKFNTMACIYHAKNRKYRFQCIATERCYVEALFKSEHFDLVVMEACGPCGWISDLAQSMNLKTFVCSTNEEAWKWSNVKRKTDRDDALKLARMATMGELKPVHIPTQAHREFRSLVKYRKTLDWRINKIKSTIRAWFVNHGIPIARGSAAWHSGFEFIESYRKPLAECSASELWKGALDIELTQLDALTKQHDAVVKRLEAIGQQDPRIKRLRTIPGVGPRTAEILVACLDDPHRFSNGRQVSSYFGLVPRQYQSGETDRNGRITKRGNALARTILVECAWCSLRYNPWAKAVYDRIHGKQKTRKKKAGIALARKIAVIAWAMLRDEKDWDPDRMIQITESFGGKLPLEKETFRGKKATADLAKPKRARKPVGAA

SEQ ID NO: 467906 - protein, 421 aa, unidentified
MKQWKEITHYAGFDWARDHHAVVIVNGQGEIVADFEFKHSLGGWKGFGQKTAAWPDLAVAIETNQGAAVDQLLQGGYTVYPVNPVASESYRKRKAPSGTKTDHVDAWGLADALRMDGHSWKTLQPMDPLTEQLRLLCRDEVSLIEQRTVLINKLQQALVEYYPAALEAFEDWSCPFTWDFIIAFPTPQGLVQAGQRRWQKFLHLHKLWRPETVQKRLGIFAQADQFKASEPITKAKSQLALSLCKLLRTLDQQLDQYRKQIEALFKEHPDHDLFGSLPGAKEVLGPRLLAAIGNAPQRYGTHQVLQCFAGTAPVSYQSGQISKAQMRWACDKFLRHTVHLWADCFRKATLWGQTYYKKKREQGMSHACALRCLGQRLLKILFKMLTDKKPYDGELHARNQQKHGSWVLNLLNENPSSKPCQ

SEQ ID NO: 467907 - protein, 424 aa, unidentified
MTTLLQVGIDPGPKECVGRAVDQYGVVCGKPIRFRPNREGVERLVARISALAPEAERRFYVEASGSHWYGLVGWLRAHNEPVSLISPSYTKAQRRVSSRYAKSDARDAEALARAAFQMGERAQHPADLPEGPRLNLRLLCRHRYRLQRDATAIKLRLLGWLGFTTPGLAEWLGGDFSPADRALIARYPVVAKAVRRGKARVREFLERHAEGAVDDATLDALFELARQAYAPRDLDDGLVAEQFRMELERLALNEKLIRQLDVRIAQVLPQCDPHGWARSLPGVGAVIAPILVAEAGTDLSRFANPHRFAAWAGVVGRAHGSAGRQTQGLPITKAGRGIVKSALFLAANVARQRDPHLRAVYEGLRAKGRHHNQAVIAVARRLAELYWWIMTEQRPYAVEPPRDPSRAAGQPTPPSGTLAPPDGG

SEQ ID NO: 467908 - protein, 310 aa, unidentified
MNIHPGVVGIDVSKHHLDVFDAKLGRSERLANTPAALVPKLAAWRESEAFVLFEATGSYDRALARMLVAAGIAFARVNPGRARDFARAAGFLAKTDAVDARMLAAMAQCLRPKAQAAADPQREAMATLHKRRDQLVAARQQERTRKHECQDEDIAADLAAHLAFLDQAIARITQRIKTLIASSQTLEQAASLLTSVPGVGLITAATLLALMPEFGNGTPKSIAALAGLAPFNTDSGAFRGTRCVRGGRKRIRDALYMAAVSAAHSKSRFAAFYKALRSAGKPPKLAFIALARKLLVTLNAILRDKLAFQP

SEQ ID NO: 467909 - protein, 347 aa, unidentified
MEQNEVILGVDTHLDTHVGAVISDTGRLLGTLSVTTDTAGYLNLLTWANSFGSLRRAGVEGTGTYGAGLARVLRDHEIEVLEVNRPDRAMRRSRGKSDPTDAENAARAVLSGRATAIPKEQSGAAEAMRAVSVARRSAVKAKTQAINQLRALLVSAPQEIRDRLLKAKTAECVESCARVRSLGKTPMLQTLTATLRLLAKRWLTLAEELKALDAMLESLTSQHARRLRERFGVGPQTAAVLVAVAGDNPERLKSEAALAALCGTSPLQASSGKTVRHRLNRGGDRSANNALWTIAMVRMRSDPRTRAYVDRRTKEGMSNKEIHRCLKRYIVRELYLNRPGISGGSTS

SEQ ID NO: 467910 - protein, 338 aa, unidentified
MERQYVAIDLHLNRSVVVTENEAGEKVGVTRIDNEPLTLAEALREAGEAPEVAIEATYGWYWAVDTLQELGATVHLVNPSGLNWEGRRVKNDYRDCCDLLDRMRLGKLPEAWIAPHAVRELRELVRYRARLVMLRTGLKAQLKAVLAKHGLRPPVKDLWGVVGPAWLDKLDLPRAYTTRIESIRDLVEVYDREIDMLEREIHRELKDHPGYKAIQAIPGVGRTIAAIMIAEIGDVTRFKSPEALCSWAGLTPKHHESDTKVRRGRITKQGSKLVRWAAIEAVSNGRGGPKLKADYHRIAERRPKTVARVAVARKLVIMVFYGLRDGHIRCLAPGEQAG

SEQ ID NO: 467911 - protein, 427 aa, unidentified
MEVIHPRCAGIDVSKRDAKVCVRIQGRGRKATSSTVTTWTSMTASIMALREHLIAEKVTCVVIESTAAYWKPFYFLLDDVLNVMLVNARHARNVPGRKTDVSDAAWLAELGAHGLVRASFVPPEPIRALRDLTRARTTIAQARTKEIGRLETLLEDTGIKLSTVACEIIGVSGRLMLEALIAGQRDPAVLADLAKGQLRKKIPALTEALAGRFNGHHAFMVRFYLDRIDAHDADIARLDARIEELIVPFQAVRELLVSIPGFSYTVANVFIAETGADMSVFPTANHLASWAGVASGSNESAGRVKSAKTPPGNHHLKAALGVAALSASRSANTYFGIRYRRIAGSRPSRSGTTKSRRQSLAGQIAIVAIEHKMLTCAWHMIVNGTFYQDPGPDYYTRHQPAKAKARAIKQLQALGYSVTLQPRTDAA

SEQ ID NO: 467912 - protein, 433 aa, unidentified
MLKINYMSTLFVGIDVSSKTNAVYAMDFEENKYISSSFGNNQPGADQLADMIAACMQKHKNLDTLLIVLEATSVYSVHISNFLATSEVLMPYKPYVFCVNPKATSNYRKSYIGMEKTDPTDAYLIADFGRVGRTKKLEPWRGGQFIALKRLTRHRMHLAECITREKTYMVSNLYLKFSELQLFEGDDKPFGNLYGATSSAILTEFLSPQEIIDMPEEDLLAFLAEKSRNRISDISKTSGLLRKAARDSYRLDKCMYEPLNISLASSFNCIHAYQKEIRLIEQAIGKCINGMNPNALIILQSIPGIGPVWASGILSEIGDITAFHSSDALAKYAGLYWPKGDSGDFTSEDNQMSKAGNPYLRYYLGEAANSVRKHIPEYADFYAKKYAEVTKHQHKRALALTSRKFVRLVFGLLAKNQLYTGEKLDPEYHTESN

SEQ ID NO: 467913 - protein, 434 aa, unidentified
MSKLQKVHGASAGIDIGSCKFFVGTEESEVQNFDTFTSGCHQVVEYLQQKNITSVAMEATGVYWITLYDMLVAAGIETYVVNGRHVKHVPGRKTDVRDCLWIKELHSYGLLRNSFIPRSEILQMRHYMRIREKDIENKVAAVQRMDKALVMMNIRLSSVVSAIQLVSVMKIIEAILAGQRDAKALAALCDVRIQNNKEEAILKSLEGFYKEEQLYALQHAYDEYKFYEIKIKECDARMGVILKNTVKDKEAPQVKPTGKRVYHHRPAIAELDKMMIQLYDGKDLTILPGLTCYSVLKLYSVIGNDFNAWRNEKAFTAYLGLAPTKYQTGKSRKYRKVKTNTEGGQILKECVQPLLRSKHNALGAFGKRISGRRGASVAIKAMARKLAVWIYNIVTKGMAFVNNGIEQYEEKLKKQKLKWLQKQAKELNLTLTPR

SEQ ID NO: 467914 - protein, 402 aa, unidentified
MKKSSRMSVIHPHAAGVDIGAEFHVVAVPPDADAAPVRTFQRFTGDLHRMSGWLKTCHITTIAMESTGVYWLPAFEIPEAAGFNVILVNARDAKNVPGRKTDVNDAQWLQKLHSFGLLRASFRPEHDISVLRSYLRQRERLTEYRAAHIQHMQKALMQMNVQLHHAVSDITGVTGLSIVRAIVSGERDPSVLIQYRDVRCKKTPEVLQQALTGNWQPEHLFAPEQSVAFFDFYQEKIRECDDQIETSLLQLSTGTEEPEGVLPSARHRTKQPNQLSFDVRPLLWKITGADLTQIHGFGPYLALKFVAECGTDMNRWPDASHFTSWLCLSPGNKISGGKVLSPKTRRSSSRIAAALRLAATTIGRSDTALGAFYRRLSSRIGKAKAVTATARKLAILFYNALK

SEQ ID NO: 467915 - protein, 401 aa, unidentified
MKVSGLDVHKDSIFCGIYDGKKSTEVKKFTTFTQGIKEMGELLKNQGIQKVAMESTSIYWIPIWNILEEMGFSLMLVNPYLIKQMPGRKSDIKDAQWIATLLHKGLLRGSLIPDKTIRQLRSYSRKYVKMQAMITSVFQEMERILEMCNIRITSLVSKNNSVSIKRVIEQIIQGKDSLEELACCIHGRILNSKGDMVKQSLEGYVQDHHRFTLELAWERYQLYSRQLSQIEKQMEAICQEHYSQHMELLISIPGIQRKAAMQIIAETGADMNAFQNSRKLTGWAGLRPKNDESAGKLKSTSVTKGNRFLRRIMVQCAWAASREKGSFYKTKFEQLCIRKSRKKALIAISRKLLTVVWHVLEEKSPYNPKIVPVYNPEKIKQKMKYFQRELDKLQALGYSLT

SEQ ID NO: 467916 - protein, 411 aa, unidentified
MELIRERVAGLDVHRDEVAACLRAAGPRGGVRVEKARFTTTTGGLAVLAGWLAEHEVALVAMEATGVYWKPVYYALEDRFELWLCNAHHVKNVPGRKTDMSDAEWLADVAAHGMVRPSFVPPPAIRELRVLTRYRQKQTRIRAGEIARLEKVLQDAGIKLTSVASKVLTQSGRAMIEALIAGERDPRALAGLAKGKLRPKIPQLAAALDGHFGSHHTVAAARILAHLDFLDATLAELDAQIAGRVAAGYQSAARLLREVPGIDRAAAEVIIAETGADMNRFPSPAHLAAWAGLCPGNHESAGKRRAVATRPGNPWLRHTLIESARAAARTKGSYFGAQYRQIARRRGPNKAAVAVAHSLLDVTWHLLTTGEAFADLGEDYFTSRYDKQHQTRRLITQLEKLGYTVELTPAA

SEQ ID NO: 467917 - protein, 412 aa, unidentified
MSDVTRSWFAGVDWGSEKHQVCLRDVAGTVVGERAFAHNGAGLVAMCDWLVSVAGRPSTVAVAIEVPHGPVVDVLLDRGFAVHAINPKQLDRLRDRFSVAGAKDDRRDARVAAAGLRTDPHLFRPVQASDPAVVELREWSRLAEELQQERLRLANRIRQQLWRYYPQLLELGEDVTAEWVLALWSVAPTPAKAAQLREATVARLLARHRIRRLDAASVLGVLRQPAITVAAGVTEAAVLHLRSLVARLRLANTEFHQAEQKLDELCARLSQDATVAAHGPCDAAILRSLPGVGLVVLATLLTEAGDPLARRDYAALRTLSGVAPVTKRSGKTCLVVMRYAAQDRLRQAMFHWARVAAVHDPKSRSRYAALRARGHSYGRALRGVADRLLGVTCVLLRRQVLFDPDHGKPVAA

SEQ ID NO: 467918 - protein, 417 aa, unidentified
MVERCAGLDVHRDNVVATTRVPGQGRRRFEQQTQTFTATLPGLTELAAWLAAAGVTLVGMEATGVYWKTVFQALEGQFECWLLNAHHLRNVPGRKTDVKDSEWICQLVQHGLVRPSFVPPPEIRRLRDLTRLRAAQNNERTRTIQRLEKVLQDAGIKISSVASTSYSKSARAMLEALLSGVSDPDQLAELSKGRMRAKIPQLREALQNRFTIEHHGVMVAQLLAHIDTLDTELQHLSERIELVLAPHAHIIELLSTIPGVQAHAAQVLIAECGLDMSVFPTVGHFASWAGACPGHHQSAGRRKSGRTRPGPKWLTSQLTECARAAVRTKETYLASHFAQLRGRRGEPKAIGAIRHDLLVAYYHIVRDQVPYRDLGPNWQRKRYSVEHRASRLQRQLEALGYTVTLDKTDPAEVEQTA

SEQ ID NO: 467919 - protein, 312 aa, unidentified
MTLSHLTDNIFVGIDVGGAGLDVAWHRGDSAHYANRPDAIATLVERLRTGPRLTRIVLEPTGGYEKPLVKALRQAQLPVEIIHTTRFKAYRQLVGVKAKSDTSDARILASYAAAPDEVRGRKAGHVELPEDAIREALSELANRRDQLKHMIHAETCRLGTVRMAELREAIESHLETLKTEDKQVHQMMLALVRQRLDLRRDQRLLRTIKGIGPKSALAFLASVPELGRIDNKAAAALIGVAPFVRNSGTMTARHESTAGEPPCAVSSTWRPSLPAGTIRCCALSTNASSQKANRQKSPSSPSSGALSFSPMP

SEQ ID NO: 467920 - protein, 409 aa, unidentified
MKLFVGIDVSSQDMKACVMNFEGKALTALTVDNNLTGASYLKDLIVKIAQSNSISEIQIGMEATSVYSWHPAMFFHEDESLKEFKTTVFTINPKLIKKFKESYVDLDKTDQVDAWIIADRLRFGRLPLTAVMQEQFIALQRLTRMRYHLVHNLTREKQYFLQHLFYKCSSFTTEVDSSVFGNAMLELFLEQYSLDEISSMDLQELANYLQDKGKNRFTDAECVAKSIQKAARSSYRLSKCVEDSIDLLLGTSIESIRSITKQIKELDKAIQKLLEGIPNTLQTIPGIGPVYTAGILAEIGQIDRFDNQASIAKYSGLTWSKHQSGKFQAEETKMIRSGNRFLRYYLVEAANSVQRNEPEFRAYYLKKYREVPKHQHKRALVLTARKLVRLVDALLRNDQVYTPRRKVNN

SEQ ID NO: 467921 - protein, 328 aa, unidentified
MSYCGIDTGNQSLDVVIRKKGKSLKCIHFKNTPGGHHAILTYLRKHEVTRVGIEATGYYHLDLALDLDEASDIEVMIINPRASKHFAMAMMQRNKSDAMDADVLAQFVERMDFVKWHCPESNVFAIRACGRRMVSLSKDKTKAKNQLHAFSKTRRTTQFLVKDLQLSIRQIENQMDQIITHALKLIHESDRLKQRYQRLISIKGVADITAIKLLGELGVLAVDMSAKQWVAHAGLFPRSFESGSSVRKRTTIGKIGNHYVREALYMGALSATRYDKHIRAFYLHMINDNGLTKLQAVCAVMRKILVAMHGMLNADKDFNGQRFYALNK

SEQ ID NO: 467922 - protein, 339 aa, unidentified
MKYTPVGVDIAKHVIQIHFINEHTGEVVDKQLRRQDFLTFFGNREPCLIGMEACGGSQHWARELTKLGHNVRLLQARFVKAFVMGNKNDVMDARAIWMAVQQPGKEIAVKTEEQQSVLVLHRTRMQLVKFRTAQINALHGTLLEFGETIHKGRAAMEREFPEALERMKERLPPYLITVLENQYKRLNELDSLIEDIEKQLASVAKQNETCKRLLDIPGVGPLIATAAVATMGEASAFKSGREFAAYVGLVPKQTGSGGKVRLLGISKRGDTYLRTLFIHGARAAALLTKEPGPWITELKKRRPASVAIVAMANKLARTVWAITAHDRKYDRNHVSIRPY

SEQ ID NO: 467923 - protein, 307 aa, unidentified
MGTNVGVDVSKHSLDWATGPEEKIQHARNEPRAIAAFVRRLVALDPERVVVESTGGYERALVAKLAEAGLPVVVVNPRRVRSFGEGMGFLAKTDAIDARLLALFAEKAQPEIRPILQGTDRLLADLVARRRQLTAMIVAEKNRKETAARPIQKTIDPVLRTLKKLVRDLEKKIDAALLQDAEKAELFELLQTVPGVGPGVARTLLIDLPELGHLGRREIASLVGVAPYARDSGTLRGHRRIRGGRASVRTVLYLAAMTAARFNPTLRDVYQRLRLAGKPPKLAFVAVERKLLVILNAIARERTAWQA

SEQ ID NO: 467924 - protein, 367 aa, unidentified
MKKLSTAVVKAAKDFSQRRLTIGLDLGDRSSWYCVLDETGEVLLEQKLSTTPKAMREVFGAMPRCRIALETGMHSPWVSRLLSELGHEVIVAHARNVRLIGESRKKDDRLDARTLARLARIDPQLLSPVKHRSAKAQADLTVIRARAGLVRSRTALVNTARGLTKSYGERLRGCNPRNVNPEKAQGLSPELQAALQPLLAAIESLSERIYEYNQQIDKIAKESYPQVARLEQVKGVGTLIALTYLLTLEDPHRFRKSRDVGCYVGLQPGRRNSGQSEPQMHISKEGDPYLRTLLVQGAHHILGPFGADSDLRRWGLKLAERGGKNGKKRAVIATARKLAVLLHRLWVSGEAYEPLRNSHQAAMPAAA

SEQ ID NO: 467925 - protein, 482 aa, unidentified
MKKRNIYQNQSQELLHLFEEAGSSEKVMCVPMDYAKNDHLVMFCNGHGDILRKPFSVKNTPEGIGYIDEQVTRSCRRRGIKKKHVFFGGEDANSFAKNFVSTLRSKGFVVANVNAHDAKKQRGNVQASTDRIDLMGIATMLLNCRANCCPAQSGLYRNLRILVRHRRKLVEMLTEVKNRVHAIVDELFPGFLKEKNSGIIPFTQTSLYLMQDRFSPKQIRRRRRQKLIEILKRLGTSKAEKTAAKLQQYAAKVLHAPVEYVDTMQISLAQHVKHIRCLKESVAQMDKEIALNLAQTQGAFLTSVRGIGLVLAAGVTAEIGDLNQQKPLNNLASYSGIIPRVKQTGGFDGKTYTGPVAKRCNRILKDYVVKSAYHLGLHGPQDLMTDYKRRDACGQHADFGMGRRYLRMAIGLMRTSQVYLPPNLRNDDYTLQQRASYYLMSWPYLKEKWKKVGALEAAFANNRPLGLWRQIVQELYDIKLKL

SEQ ID NO: 467926 - protein, 327 aa, unidentified
MRSKAVGIDISKDKFDVALYDTETYQEAVFTNDKKGFRSLYNWLKKMKARDAVICMEATGRHAEAAAMYLYERGVSVSIVNPARIKAYRESQLKRNKTDREDAKAIAHFAITQDFSLWTPPPPEVQELQALVRRLKTLKEERTRETNRKKSIVTSKAVLKSIEKHIKFINEQINQIEKQIEDLFDQHPDLKEQKELLESIPGIGPVTAANFIAEVGDIKRFESAKQLAAYAGLTPRWYQSGTSVNKPGRLSKRGNIRLRTVFYMAAMAAIRSNPFVISLATRMEKQGKSRMSIIGASMRKLVHLAYGVLKNQQPFDPHHLDNMLDIA

SEQ ID NO: 467927 - protein, 348 aa, unidentified
MLADQVDHVIGVDTHRDEHVLAVVAAPTGAVVAQRSVAATSRGYAQAFQFVAEHAPAARVWAVEGAGHYGAGLARHLGDRGEAVLEAARGSRGERRLQGKVDKLDAIRAARTVLSTETLALPREGQRREAPRLLMVARRSAVDVRREALVQLRSVIVTAPDELREELRGLPVGRLLERCSRFRRSTSRTPDAQATAIVLRTLARRVRAATEEAAELQTEIIAHVRALAPRLLDEPGVDPIVAAQVIVSWSHEGRVRSEAAFARLAGVAPIPASSGLTTRYRLSRGGDRQLNRALHPVILHRCLHDPAARDYIARRVAEGKTRRDATRLLKHYLARHLYRVLNQEPTMT

SEQ ID NO: 467928 - protein, 387 aa, unidentified
MIYVGIDIAKHDHYCAITNELGEILYKPFLVKNDLASFKDLELILSQYPISEIPIGYESTAHYANNLSYYFLKKGYHCQIINPYRTAHLRKIIGNPNSKNDKIDSLHICHAVQLNLGSSVSRNVLMNDLKSLCLSYQNTMTSRSRAKIQLVSYLDYAFPELASYFKGNLHLNTAYQLLKKYPLPTDISKTRLATLTNLLSTNSHGRYKADKATELKSLAKNSIGISSSSVGFQIQLAISQIEFYTKQLEDVRDKISVIMTDLDSPIMSIVGINTVMAAMILSSIKDINFFSAPCKLISFAGLNPRVIQSGQFQASSTRMSKRGSSLLRYALIYSAHNLVKYNRTFHDFYTLKRSQGKSHWNALGHCATKLTRIIYKLLSEDISFDLV

SEQ ID NO: 467929 - protein, 412 aa, unidentified
MEGCITWVGIDAHKKTLAVAVLGPNGGAREQFTIDNEEKAIRKLARRLQKSGGEVRACYEAGTCGFTLQRRLEAHGIVCEVIAPSLIPRKPGERIKTDRRDALKLAELQRANVLTTVSPPSLEQEAVRDLCRCREAARADLGRCRHRLVKMLVRRGYVFNVNKHLWSAAHRSWIDGLKFDNEIDRIVFDEYKTAIEQTERRLRALEKEIEKAAQLPLYRDHVAWLRCFRGIDTTIAMIIVSELHGVERFASPRALAAYLGLIPKLYSSGDTARRGGITKTGNTHVRRALVQASWQYRRRGVGAAMRKRREGQPERVLTIADNAERRLNLRYTRLKARGKHVNKVVIAVARELVGFLWDALRPDRETARHGARTSAHLKGAKATAAPRSKPKLQKVVGPKVSPPHKPNKQTAA

SEQ ID NO: 467930 - protein, 386 aa, unidentified
MQASNRSTPIANDLSTIFVAIELSRKSWLVTMHSPDKDRMSHHKVESGDHAGLLALIERIRERAARALGAAPAVVSCYEAGYDGFWLHRLLLAAGITNHVFDPASIMVDQRARRAKTDRIDGEQMLRTLMAYCRGEPRVVRVVRVPSPEQEDARRASRERDRLVKEQTAHTTRIKALLRLLGMAVGNPHRRDWLSWLSAQRDWQGQAVPPRIKAELEREHARLMLVRQQLDALAQAAAEAELTPAAAEMAQRSDLLLRLKSLGPVFATTLTNEAFYKDFRNRREVASYFGLTPSPWQSGGTDREQGISKAGNRRAREKTIELAWLWLRHQPDSALTQWFRQRTLNASKRIKRIAIVALARKLIVALWRFLTTGLVPAGAVLKAAKA

SEQ ID NO: 467931 - protein, 426 aa, unidentified
MKKLDFLSTLFVGIDVSSKSNVVCALDFQSNKLLQFSVPNNQPGAEEFAAKIISILEDSKFKTVIFALESTSFYGIHIANFLSSSSLLMPYNPYVYCLNPKMIHNYGKSFIGLSKTDPSDAFVIADFARVGRINIEPWRGSQYLALQRLTRHRLHLVECITREKTYMVSNIFLKFSELSILKNEEHPFTSNHTSTANAILTEMLSLEELVSMPIEELVNFVCKASKNRFNNPEKIADILMQAARNSYRLDKCLYEPLTISIASSFNCISAYQAEIKIIDKAIEKTIKGLNPVEYQCLISIPGIGPVYASGILAEIGTISAFRSHEALAMYAGIVWKQKQSGDFRADETKMSKAGNKFLRYYLIEAANSVKNNIPEYADFYLKKYVEVKTHQHKRALALTSRKLIRLIFGLLANNQLYSSKRVKQTE

SEQ ID NO: 467932 - protein, 340 aa, unidentified
MKLYGAIDLHSTNSVLVVIDEEDKIVYQKRLPNDLALILKELCVYQSRLEGIVVESTYNWYWLVDGLMEQGYKVHLANTAAIQQYEGLKYTDDHSDARWLAHLLRLEVLPEGYIYPKAERPVRDLLRKRSQLVRQRTMNLLSIQNLMTRNTGSSMTANQIKGLDKPQVEGLLPDADLSLAVQANWSVMCSADEQVERLEQRVTERVKLRAQFSFLKTVPGIGQILALTIMLETGDIGRFATVGNYASYCRCVGSQKISNGKRKGSGNTKNGNKYLAWAFVEAANFAIRFNSKIKSFYQRKKAKTKAVVAIKAVAHKLCRACYHIMKDRVAFDVTKAFGQK

SEQ ID NO: 467933 - protein, 400 aa, unidentified
MISVGIDVSKGKSTVCILKPYGEIVSKPFNITHTQKDLSELSSMLFRLNDEVKIVMEATGIYHLPVLTYLQEKGFFVSVINPYLMKSYRNESLRKAKTDKIDSRIIANYGIDHWFKMKEFQISGVIYEELKLLGQQYRHYMKLHLLSLAELTHLLDLTMPGIKNLLASWNETNRKDKRSDFVERFWHYDVITSMSEQEFTEEYILWAKEKKYVPSQEKAKVIYTLAQESIPTLPSETSSVKILVTEAVRVLKEVDATLGLILSRMQEIAKTLPEYSVVREMGGVGNTLAPKLIAEIGDVRRFRNGKALVAFAGIDPPPYESGQFVGCNRKISKRGSASLRKVGYETMRSLKMRSRPEDPVYRYVVKKESEGKSKKSAKIAGLNKFLRIYYARVTELYKNI

SEQ ID NO: 467934 - protein, 347 aa, unidentified
MKFYTQMHQHYCGIDLHARCLYVCILDQQGNKLVHKNIKANPQALMRIVQPYRDGLVIGVECMFSWYWVADLCRDEQIKFILGHALYMKAIHGGKAKNDRIDSKKIAVLMRGGMFPQAYVYPREMRGTRDLMRRRMHLMRKRSELLAHIHNTNSQYNLPEINKDLRYVVHRNGIAERFNDPSVQKSIELDLNLIEVYDQQLGKVERYIYQHAKTCDQHSLVLLRTVPGIGKILSLVILYEIHTIARFPSVQDFASYCRLIKCKKESAGKSYGYSGKKIGNAYLKWAFSEAAVLFLRGNPEAQAWLQRMSNKHNKPRALTILAHKLGRAVYFILQRQKMFDQKRFLNS

SEQ ID NO: 467935 - protein, 359 aa, unidentified
MVVERTCVGLDVHARSVAAAAIDGVTGELCQARLTPSHDHIRSWVEQFDGPVAVAYEAGPTGFGLYRALNAVGVRCVVAAPSKLQRPPGDRVKTDAKDAVHLARLLRLGEITAVTVPTVDQEAARDLVRAREDCRGELMRARHRLSKLLLRYGFVYSGGQAWTGVHDQWLRRQRFDHRATTMAFESGYEAVTVITARRGRLDKAIGELAAASEFTPIVHRLGCLRGIATLTAFALAVEIGDWDRFTGTSIASFVGLVPSEHSSGASRVQGSITKTGNTHVRRLLVEAAWHHRAAYRPGKVMRDRWDLADPAARARGDAGNRRLHQRWVQFNLRRKRPVIANIAIARELAGWCWSLAVMG

SEQ ID NO: 467936 - protein, 410 aa, unidentified
MANLMVGIDVSLRSHSVQFMNDSGDALASFSIPNDLNGAETLLQRILQSAVKYQTSLVRVGMEATSNLGWHLAHFLNAGLHEVTDFQSQVFVLNARKVARFKKGYDCLPKNDRIDAWVIADQLRFGRLPHELTSCIQYEALQRLTRTRFHLMQSIARDKTYFLNQVFLKFSGLRQDNPFSNMFGATCLAVLQELEPEQIVSMSITELVDFLKEKGKNRFDNPEELALFLQKLARSSYRLDKAMADPVNLSLSVMLTVIQTMEKEVTKIDKEIGKIMKSVPETLSSVKGIGPVFAAGIIAEIGDINRFDNHNALAKYTGLVWSQYQSGEFESDETKRLRTGNKYLRYYLVQAANLVRRYDSDYAAFYAKKYSEALKHQHKRALVLTARKLVRLVFMLLKTNKLYTPPERRD

SEQ ID NO: 467937 - protein, 358 aa, unidentified
MQRNKISFKGQKIFIGIDVHAKNWEVAIAPEVGIVKRHSQTPSAKELFDFLKKNYPDGDYQSVYESGFSGYSTYYALKEVGIDCMVIHAADVPTTQYEEVMKTDRVDAVKLVRSLKAGLLKGNYIPEKQYIDDRSVVRIRKTIQKQLSGYKSRVKHLLHCHGVEFPERFSKKQTHWSRAFITWLMNDVRLMSDTRASLDLLIRQVEVLRGTLLEATRQLRMMSQTERYKHRHDLLRTIPGIGIIVTMSILTEVCDVKRFHNENEFAAYLGLIPTSHSSGEKTVHGEKTFRGNKQLGPMIIEAAWITISRDAGLGAQYFQYKQRMEPQEAIVRIARKLSNIIFSVLKNEKEYVPYQTGN

SEQ ID NO: 467938 - protein, 425 aa, unidentified
MPYRIAGIDVHKKMLAIVVADVEVDDDFHFDRQKVGTTPIDLRRLADWLVEHDVEEVVMESTAQYWRPVWEALEQHWRPRRRGRNDAPRLAGTLHLAQAQSNRGPGGRKRDFPDAERLVKRLVAQELTLSFVPDVEQRLWRTVMRRKYQITRNRVQLHNRLEALLEEAHIKVSSIVSDLLGISARRMLQALADGETDPTALAALAAARLRATPEQLCDAFQACPTLHPVYRRLLKLTLEELRVIEDHLGQLDQQMADLLAAHHDAVQRLAEVPGLGVDSAQQIIAEVGATAATFPSPKHLASWMGACPGNEESAGVNYSHRCPKGNRQMRRVLNQAANAAVKAKGTIFAVVYRRIVPRLGHAQAIGAITHRLCRLIWKILHERVRYEERGPAVSVEAKKVRARKMIRELRGLGYRVELVAPSSIV

SEQ ID NO: 467939 - protein, 440 aa, unidentified
MTPRAGKAFRRSAQAEDLAIRHRHAAGIDVHSREHFVAVAAEDVPAGFINADDKLPAGVRKFGTNTGDLEAIAAWLKDCGVTTVAMESTGVYWIPLYDLLASQGFEVLLVDPRQTKHAPGRPKTDVVDCQWIRRLHSYGLLTGSFRPGDEIIRWRGLQRQREMLIRYAAMHVQHMQKVLEEMNVKLTEVVSDIVGQTGMKIIKDIVRGERDPLKLAKHRHESCKRTEAEIASALYGNWRPELLFALKQALALYEFYQKQLRECEGQIEACLRSLKDKSDGRPLPPSLRQRKPEKNEVRFGARALLFRMSGVDLTQIEGISEATALVVLSELGTDLSAFAHEKNFVSWLGLCPQHRGSGGKIFKRRIRRGANRVARALRMAAQGCHHAKNALGAFYRRIQSRAGGPKAIVATARKIAERVYRMLKYGQEYVRQSEEAYEQK

SEQ ID NO: 467940 - protein, 335 aa, unidentified
MHYLYYVGLDVSKETFDASLVAFEDANEMAHRKFANSRKGICSCLHWVEKRHGIRLDDVIFCAEDMGSYISEMAVCASDRTLNFNFSLISPLVIKYSMGIARGKTDRVDARRIAEYAITHYRKIALYLPAEKELCQLRTWLILRAHLAKQRVAKLVLLEKLDYKEKFADVSIQRSMLQEEIAYAETHMKTIEREMKELIAADSNICRNYKLLTSIKGVGPITAIVMLCSTLNFTKITDHRKFACYCGLAPFEHSSGTSVRGGCHTSSMANRDIKVQLNRSALIAIRCDPQLKAYYERKAAEGKHKFSVLNAVRAKIAARCFAVVRRGTPYVALQI

SEQ ID NO: 467941 - protein, 345 aa, unidentified
MKHYVGLDVSMKKTSVCIINEQGKIVHESEVKTDPHTLADAIEKTGLKVELVGFESGSLGHYLTQGFKERALPAVCMDARKMSAILSIRVNKTDKNDARGIADALRTGMFTRVHEKPQEAINRGAVLSMRRCLVKQRTDIKNHVRGILKTYGIRLGAVGPTKFSDAVKRRIEEQDPLVRQTMEGMLEVFDMLTRKITRFDQQLLKIAHQDKDVRLLMTTQGIGPITALTYKAEIFDPSRFPNSRTVGAYLGMTPTQYSSGEMQKQGRISKCGSMELRSLLTEAGVVVLTRSQKWSKLKAWGLKLMRKKGLKKASLAVGRKLAVIMHRMLLEQKEFAWGETPVKAA

SEQ ID NO: 467942 - protein, 313 aa, unidentified
MDAIAPIVGIDVSKDRLDVHVHGPDERFDVPRDTEGIAALVERLRAVAPKAIGLEATGGLETVVVASLAEAGLPVLVVNPAQVRSFANALGKRAKTDAIDAAVIARFVEATAPEIRPLADAETRLLADLVARRRQIVAMITSERQRRASAPERVRKSIDRLLKALARELDSLDGDIDGAVRRSPAWREKENLLTSVPGVGSVIARTLIAEMPELGTLDRRKVAALAGLAPWTRQSGRWRGKSFIGGGRASVRTALYMGALVATRHNPALKAFRDKLVAQGKPKMVALVATARKLLTILNAIIRDRTPWRTQDA

SEQ ID NO: 467943 - protein, 495 aa, unidentified
MSKKTPQKKAPPVAPVAPAAPAASPATPRSAPAPKRPSKGRRRASAKKRGAALPAAEWQVVHPRAAGIDIGTREHWVSAGPGEGEANRRPFGTNTPDLEAMAAWLQERGVTHVAMESTGLYWLPVYERLEEAGFAVILVDARQTKHTAGRKSDLLDCEWIAQLHTYGLLRAAFRPTDAVCRLRTLQRHRKTLVEASARSVLHMQKALDGMNLHVHHALSHLAGISGLAMIDAILRGQRDPQKLAALADRRVQKSPAQLAAALTGNYRAEELFVLGQARATHQHYEAQLARCEEQIEAQLEALGAACPEPVAAAPLAPARRRESPQNQKRAALLRRLFGVDLTRIPGLAVLAVLTLLSEIGTDMSRWRHAQAFASWLGLCPNHRISGGRVLSAGTRKVVNRAATVFRLAALAVSRTDTPLGCFYRRKAAQLGAPKAITATARKMACLVYEMIRTGREYHAIETSTYQKHYDEHRLQAFRKRARELGYDLVQLPKAA

SEQ ID NO: 467944 - protein, 366 aa, unidentified
MKKGSTAAAKQSSNLWQQKLTIGLDLGDRSSWYCVLDKAGNVLEERRVSTTAKAMREGFSRMARSRIALETGTHSPWVSRLLSELGHEVIVAHARNVRLIGESRRKDDRLDAQTLARLARIDPQLLCPVKHRSAKAQADLTLIRARAGLVRARTALVNTARGLAKSYGERLRSCNVRNMNPEKAEQLSPELQTALAPLLAGIETLSEQIREYNQRIEALAQQSYPEVALLTQIKGVGTLIALTFLLTLEDAHRFGKSRDVGCYLGLQPGRRSSGQSEPQMHISKQGDPYLRTLLVQGAQHILGPFGADCDLRRWGLKLAERGGKNGKKRAIIATARKLAVLLHRLWVSGDVYEPFHNRQPMLVTAA

SEQ ID NO: 467945 - protein, 316 aa, unidentified
MSETANEKFVGIDVSKATLDAHIEPAGETLHVGYDEAGIGRLVERLKEVGPALIVTEATGGLEVRLASELASAGLPVAIINPRQARDFAKATGQLAKTDQVDAAMLAAFARAIRPQARPLKDADTRALDEMVSRRRQLIAMRVQETLRLGTATSKPMQKSLKVHIAWLEKQITEIDGDLNRRLRESDIWRAKDDLLRAIPGIGAVTSLTMLAKCPELGTLNRREIAALTGVAPLANDSGKHRGKRFIWGGRAEVRVVLYMAAVSAIRCNEAIKAFAERLKQAGKPPKVVIVACMRKLLTIMNAMLKNNAPWCPKHP

SEQ ID NO: 467946 - protein, 311 aa, unidentified
MNPQEFFIGIDVSKDTLDVAVRPTGEKMVFANTEEGLVMMTDFSKPFAPRLVVLEATGGWERSAVGALAAKGLPVVVVNPRQVRDFAKAKGILAKTDKIDAQVIAQFAESIRPEVRPLKTEEAQKLEALLSRRRQIVQMLTAEKNRLHSAPVWIRKDIQIHIQWLEKILDKFNKELDRLVKKSPIWQAKDKILQSAKGVGPILSLTLISGLPELGTLNRKKIAALVGVAPLNRDSGKFRGRRTIWGGRSAIRSVLLMATRVGIRFNPVIRAFYERLEKAGKKRKVAETACMRKLLTILNAMMKNRTCWQSV

SEQ ID NO: 467947 - protein, 385 aa, unidentified
MIGVDPAKHSHTMAVLDGAERQLAALQVANDNDGYQGMLRLARRWPQRTWAVEGASGVGTHLAQRLVAGGETVLDVPPKLATRARIFDTGHGRKNDPTDARTIAVVGLRTPGLRQVLADGDAVALKLMSERRRELVRSRTQTVNRLHQLLMELIPAGASKDLTVGKAKALLATVRPRDVAGRTRRQLAADFIDDVAALDRKVKDIDNRLAEAVAATGTTLPEIVGIGSVTAAAILGEVGDIRRFASRHHFATYTGTAPTEISSGDITRHRLSRAGNRRLNHALHMAALSNKRHDDRGRDYYARKVAAGKGKKGALRCLKRRLSDAVYRALAGAERNAAGPGGHSGAATKSSAADRSPMISTSDKSLPGPAATEVTPQPLLAAAPS

SEQ ID NO: 467948 - protein, 356 aa, unidentified
MESTKYIGMDVHKEATTIAVLDPSGRLVMESIVETKAATIVQLVQGLRGDLHVTFEEGTWAAWLYDLLKPYVTKVVVCDPRKNALLQSGNKSDRIDARKLAELFRAGLVSGVYHGQISLRTLKELARSYLTISKDLTRTMNRLKALYRSWSIPCAGTSVYAPRHRAEWLSKIQEAGVRRRGELFYQQLDSLQLLRQQARQDLVAESRQQEATKLLRQIPYIGPIRAALLVAMIQTPHRFRTKRQLWAYSGLALETRNSAEYRYVKGRLERSHKPVALRGLNQNHNHDLKGIFKGAAVKASSAVGPFQDFYLALLTKGMKPTMARLTLARKIATISLLVWKKGVCFDAGQLKRQESV

SEQ ID NO: 467949 - protein, 338 aa, unidentified
MNHNVVGLDIAKNIFHCYSLSAEGKAIRKKLKRAELLAFFANYPASLIGLEACGGAHHWGRELTKLGHQVVLLNARYVKNFVVGNKNDFNDAQAIFDAVTRPNKRVVAIKTLEQQDVQLVHHIRQDLVDKRTALVNQLRGLLSERGIVIAQGIDRVRKELPLILEEAENGLTPLSREVLAEQYQQLKALDQAIKDQDRRISRLCNSNALSRRFLEVPGVGPITATIVAADLGQGKGYASSRDYAASLGVVPRQHSSGDKAVYLGISKRGNRYIRTKLIHGARSVVKYCSGKTDPLNRWLQALVERRGFNKAAVALANKNARILWAMATKEQAYEPKVA

SEQ ID NO: 467950 - protein, 417 aa, unidentified
MNSPPETIPIVRYIGIDIHKHYLMIGGQNRHQEWTLRPRKVQVSRFRDWAEKNFQPGDAVVIETTGSVWDIYDIVAPLVSKTVVAHARKVRQIAEARVKTDKEDIKRLITLLIADIVPEVWVPPMHVRELRSLISFRWRLTKQITMSKNRLHSVVQRFNLDPPEGGLLTDKNKSWWDRQDFSDLTGFEVERDLEIVKILESQKAAIDQKLAELSNTDPWASDMVYLMQIPGFGPIFSMVILSAIGNIKRFSHPKKLVGYAGLGAGVHDSGKKHQGKSITKEGRKELRWALVEAAWRAVGSDPYWKAQLKRLEKRMHRNKAIVAIARRLLVSIWHILTKRESYRHFDEETIAYKMLIWSWAMDEKSRDGMTPQQFAKYGLLRLGIGQDLERIKRGGALRRIAPTEEILALKPELVPPR

SEQ ID NO: 467951 - protein, 427 aa, unidentified
MYRIAGIDVHKKKLAVVVSDVEVHGEYQFERCWFGANPEQLRFLSQWLAEHQVEEVVMESTALYWKPVWGALERYWQPICQKREGAGATSGILHLAQAQSNRGPRGRKKDFRDAERLVKRLVADELKLSFVPDWEQRLWRTLTRRRYQLTRARVQLQNQLEALLEEAHLKLSSLVSDLLGVSARRMLQAIADGETNPEALAGLADRRLRATPEQLSDALGACTELHAVYRRLIKMMLGELKVIEEHTAELNQELATLLRPHQDAVERLAEVPGLGVDSAQQILAEVGTNAAVFASDKNLCSWVGVCPGDEESAGESSSHRSPQGNRQMRRLLNQAANAAVKTKGSIFEIVYRRLVPRLGHNQTIGAVAHRLCRLIWLILRKGVRYEERGPAVRQRSRQNRTSKMIRELRTLGYRVEFLNAAPSNPMP

SEQ ID NO: 467952 - protein, 420 aa, unidentified
MELVVERCAGLDVHKDLVVACVRYSGPDGVRKTEIASFSAFTADLLALRDWLCSYNVSRVAMEATGVYWKPIFYVLEDAMECWLLNARHMRNVPGRKTDIGDAEWICQLTEHGLVRPSFVAPKEIRDLREFTRYRRTLAEERTREAQRLDKVLQDAGVKLSSVASDVLGASSRAMLAALVEGTRDPAALADLAKGKLRSKLPALRTALEVRFGPRHAVLVSEILSHLDYLDEAIGRMTSAIEEAIAPFAEARDRLCSIPGIDRRIAEAVIGEIGVDMGRFPTAAHLASWAGMCPGQHESAGKQKRGTARHGDSWLQRHLAVAAMAAVCSKDTYLRAQYRRLSPRRGKQRARKAVGHSILVACWHVLASDDATYLDLGPDWFDRRNAPAVRARRKLSELRALGCQLYVNDDGTTTVVLPAA

SEQ ID NO: 467953 - protein, 358 aa, unidentified
MQKNSKQITDGKAVVAGIDLGKRSSEICLMDRDGAIIERRKIGTTKKNFERLFGALPRLRAALETGPSSNWVARLLDELGHETVVADAQRVKIITDTHSKDDKRDAGWLSEIALRWPELLNPVKQRSLETQQHRAMLRLREGLVEARTKLINAVRGVMTSFGERLPASNGDYFARKAMPHLPQLLRDQVQPAVLAIEAISAQVQVYDHMVKKLCRERYRAATERMQTIPGVGPTTALAFTLELDGDPSWLRSSRSAGALVGLRPKRRDSGEKSPELSITKKGNRMLRRLLVQCSHHILGPFGPDTALRLWGSSLVARSGTKRGKRKAIVAVARKLAVLLHTLWRRDEDDPLYGLSQKT

SEQ ID NO: 467954 - protein, 415 aa, unidentified
MALKIVYQICCGIDVHKTFVVACIASTNKQGVTIYKRHRFSTFTQGLKELLQWLLDNHCKDVCMESTGKYWIPIYNVLEKDCNIVLAHPKYVKAIRGKKTDKKDAKWIADLFKHDLVAGSFMPPADIRQLRDLMRYRFKLTCFMSSEKNRLQNCLTVSNIQLASVVSDPFGKSSQRILDKILENPDDTSFDIEPLIHGSMKKKLPELELAIDGFITPEQAGKLKVIKKHFEDLESRKAELEKLILALASPYQQELDLILTAPSFKNKFTAIGIISEIGVNMEAFPSAKHLCSWAGLTPTNNESAGKKKSVRVSKAGCYIKPLLVQCANSVVKSEKHPEIRNRYLRLRKRRGHKKAIIAIARMLLTALYNMLKNKEPYNAELYRKSDALPVNREITIEQAILIAQFQGYKIKSATE

SEQ ID NO: 467955 - protein, 350 aa, unidentified
MNATTVAVDLAKNVFELALADARWKIVERARLTRAQFERWFDNRKVDRVVMEACGSAHHWARTLRARGIEVRLLPAQYVRAYVKRNKTDAADAQALLEAARANDIRPVAIKSVEQQALQALHRTRSGWMSTRTRRINTLRGFCREFGLVVPEGAATGLACMARYLADPHSGLPELLRPSMRLMIDEIRLMEARIGQLEQALSQIAKHSPACQVLQSVPGIGLLTSTAMVAAVSDPRSFASGRRYSSFLGLTPREYSSGNTRYLGRISKRGDRYIRMLLTHGARSVLRAATVAHRAGRPIDRLKSWALAVQARTNHNKAACALANKLARIAWAVWVKQEKYQSASIAALSV

SEQ ID NO: 467956 - protein, 335 aa, unidentified
MAVDQNGRQLAQKTLLATKAGHLEALQWAARWSQRKWALEDCRHVSRRFEADLLAAGELVVRVPSKLTGGARKVARTSGKSDPIDTLAVARAALREPDLPVAKLEGAGREVRLLLDHREDLVGERTRIQNRLRWHLHELEPEAVIPARMLSRYHTLAELEGRLRSQHGVVVEIAIELVVRIRELTRCINRLEADIAGRVSGLAPTLMQLTGCGALCAAKVVGEAAGVSRFRSKAAFAMNNGTAPVPASSGNQMRHRLNRGGNRQLNAAMHRIAVTQLSRPGPAKDYVARRLANGNTKTDAVRALKRRISDEVYRRLLHDERAVLASPSGSVEVAA

SEQ ID NO: 467957 - protein, 346 aa, unidentified
MRFYQQQHRFYCGVDLHARSMHACIVDAEGRTIVHKNIDAHPDRFLPLIRPYREGLVVAAECMFAWYWLADLCAAEEIPFVLGHALYMKAIHGGKAKNDKIDSHKIALLLKGGMLPIAYAYPKAMRATRDLLRRRTKLVRTRAEALAHIQNTVSQYNLPPLAKKLSYAANRSGVAERFADESVRRMVASDLALIGHADEQLQSLELYLVRHAKIDDPQAYHLLQTIPGVGKILALVLLYEMHDASRFGDQRHFVSYCRLVRPTHESAGKKSASKGHKIGNAQLRWAFGEAACLMLRELPAAQTYVARLEKHHGKAKAITILAARLARTAWLMLKRKEAFDATKFLK

SEQ ID NO: 467958 - protein, 301 aa, unidentified
MIKPTHNKHTMNKELLFVGLDVHAQNIAMALAEGGGGEARSYGTIPNDLHALEKVFARLRKAHPGTALRVCYEAGPTGFVLARRLAQLKIHCTVVAPSLIPSRSGDRIKTDRRDALKLARLHRAGELTAVHVPEASDEAMRDRCRARTDAVQDLRRARAQLKAFLLRNGYRYTGKSAWTEAHRRYLRELVLPHPAQRVVLEDAIAAIAAAGERIGRLEEQMHALLESWPMKPVVEAVMGLRGFAVVGAMVLVSELGGAWRFDHPRQLMAYLGLVPTENTSDQKRRQGGITKPRTITGSAPR

SEQ ID NO: 467959 - protein, 315 aa, unidentified
MRDRQPQTALYVGIDVSKATLTIALYPTAQVWDIPNQPDQWQALAAQLQKPPVQRVLLESSGGYEQGVAQTLQQAGLPVMVVPAQRARHFAKSMRGNLKTDRVDAQLLAYFACCYPAPEATAVPEGQAQLRALWARREQLVQMLEAEKKRRQGAPETVRASLERLIAVLEEEIAQIEAEVAALIEADAPLSQKAALLQTAVGVGAVVAYGLLAELPELGQVSREAIAALAGLAPVRRESGRWRGSARIGGGRWRVRRLLYLAAVVAVSHDARWRAVYAGLLAKGKPKKVALCAVARRLLVVLNAMVRDGRCYERV

SEQ ID NO: 467960 - protein, 324 aa, unidentified
MTDAVLGIDVSKNTFDTNLGAGTKARSKSFANSPDGWHHLIAWLGEHKIGQVHACLEATGRYGLGIALALHEAGHVVSIVNPAQIRDFARTKLGRNKTDQVDAVHIREYAELFKPRPWTPPSPAMRRLCELQTIRAGTVAGLTEWKNRRGSGITDDLTRSLAETTIRHFTSQLEAVDQAIAETIDNDVELSAKRDLLVSINGVGKALAGIVLAELPGPDILGSSAAAAAYAGLNPQQHQSGISVNRPVRISKIGNAVLRTALYMPALSAMRYNPAVAALVDRLKAQGRLKGKQIVIAAMRKLLVLCFGVLKTGKEFDPAMAMGK

SEQ ID NO: 467961 - protein, 389 aa, unidentified
MSQPNDLSRSLVALEQDKTLIAVIEMSQSNWLAAAIVPGVERQPLKKVDPDADVLLKLLHRWRGEAVQAGREIKRIAVAYEAGRDGFWLARWLRVHDIEAYVIHPSSVAVSREHRRAKTDRLDTELLMRAFLGWLRGEKRHCSMAAIPTIENEDARRPNRERESLVGERTRLVNRIKATLARFGLRTFKPTLRKAEEKLAGLRTAEQTSLPENTLAELRRSMARLRIVCEHIKQIEHERLRQLEATASVAKGPHAMVRLIARVIGVGIETADMLVNEILSRDLRDYKAVARYVGLTGSPDESGRKRREKGLARAGNARVRRGMIQLAWRFLMFQKDSALAQWYRERTANGRGDTRKTMIVALARKLLVALWRMVTSGEVPEGVLVRQTA

SEQ ID NO: 467962 - protein, 341 aa, unidentified
MRKTLFCGVDLHSNNAMYVITDERDKQLLRKRLPNELPVVLKTLAPFRARLKVVAVESTYNWYWLVDGLVDHEYPAVLAHPSEMEQYHGIKEADDLTDAAFLARLARLNILPTGYIYPREDRPVRDLLRRRMLVVQHRTGVILSLQNMAERQTGQKVGWRTLRKLSEEERAELLGDHDCLAFVTAEQVELIELLGKKIRRFEQKVLEHAQLRPAYACLQTLPGVGPILALTIMLETGDIGRFPTVGDYTSYCRCVRATHTSNGKKKAHNNGKNGNPYLAWAFVEAVHHALRTCPQAQSFYEKKRAKRNGALATKALAAKWSKAAYYMMQRQEVFDLARVFG

SEQ ID NO: 467963 - protein, 403 aa, unidentified
MLNAVGIDVSKGRSTVAVLQPGGVVIRKPFDVYHNQIDLNNLVAYIKSMEGDTKVVLECTGRYHRPIVEVLHKAAIFVSAVNPHLIKNFGNNTIRKVKTDPANAKKIARYALDNWHELREYSDMDSKREQLKTMNTQFDFFMKQKTAAKSNLIALLDQTYPGVNNLFDSPVRADGSEKWVDFAYSFWHVDCVRKLSLNAFKERYKAFCKKHHYIFNESKAEEIHSAAKSLVAPLPKENGYRDLIHYSIKQLNLESEHVEKLRTDMNTLASQLPEYPVVMSMYGIGTTFGPQLMAEIGDVMRFTHREALTAFAGVDPGRDDSGKRVAKSVKASKCGSARLRKTLFQIMSCLLKNMPEDDPVYQFLDKKRSEGKEYYVYMTAGANKFLRIYYGKVKEYMRNLQAD

SEQ ID NO: 467964 - protein, 409 aa, unidentified
MDKFIERCVGLDVHRDSVTACVRFPDDNGERRQEIRTFATTTAELLALRDWLAAYQVTVVGMESTGVYWKAPFYLLEEDFTCWLINAQHIKIVPGRKTDVKDAEWICQLVEHGLVRPSFVPPPPIRDLRDLTRYRKALINERTRAVQRLEKVLQDAGIKLSSVASKVLGVSGRAMLEALLAGSTDPEALADLAKGRLRSKIPALKEALRGYFRAHHAVMVGEILAHVDYLEEAIERLSVEIERVIAPFSRQVMLLDTIPGVERRTAEAIIAEIGVDMSRFPSDAHLASWAGMCPGNNDSAGKHRTGKTRKGSKSLRTALVQAANAAARTKNTYLRALYQRIKSRHGHNKAVVAVGHSMLVASFHILSKEVPYQDLGGDYFQTRDTDAHIRRLVRQLERLGQKVNLEPAA

SEQ ID NO: 467965 - protein, 332 aa, unidentified
MNMHPQGGVANRNQRPNAGIDVCKQHLDVCLGTLEQRVANEASGWNELIAKCKAAEVDLVVLEATGGYERGLVCALQDAGITVARVNPRQARDFAKSMGVLAKTDQVDARTLRDFADVLARHKDRAKYITPMIEEHRRQLAELMTRRRQLVDMRVAENNHLEHAGKRSVRSITSVLKTLDKQLAAIDREIDDHIDRHFKDQRTLLDSVKGVGPVTILTLTAALPELGRLGRRQISKLVGVAPLADDSGPRKGKRRIWGGRADVRAVVYMSAVVAMKHNPVIRDFHSRLIAAGKPKKVAIVACMRKLLTILNAMLRDQKLWDAAKHIHSPIAA

SEQ ID NO: 467966 - protein, 356 aa, unidentified
MKTGTVRQSIGIDCAKDEFVAAYCCSSELRGSECKETRAFKNSKQGIARFMAWQGKLREKGLALPMVMEATGVYHEQLACALYDGAHQVHVVLPNKAKAFTKSINLRSVDDGSSARTLALMGMERKLDAWEKPRELYSRMKHLTREREDIQQTLASTKNQLHAEETSAFTNPGTVKRLRGRIRFLTKQISEVETDLRSLIKAEKDVKERIDRVCTAPGIGWLTMAVLLAETNGFHHVRNQRQLTKYAGLDVEKQDSGTSVHKPGRLSKKGNRHIRKALYMPALSRIRSEAKSKEFFKRLVSKHGVKMKAVAAVQRKTLVLAYTLWKNNATYDQQYQASAGAKERGQPLEAALNELA

SEQ ID NO: 467967 - protein, 341 aa, unidentified
MSIVTVGIDLAKNVFAVHGVDDNGKAVLVKPKVSREQLLPLMAQLPPCVIGMEACSGAHHWARQFRPHGHTIRLMAPKFVTPYRMSGKRGKNDAADAAAICEAVTRPNMRFVPVKEEHQQIILCLHRTRQGFVEERTATYNRLRGLLSEFGIVLPQKVACLRREIGAHLEDLPGYANQCVGDLLAHADQLDARIETYDRIIAKAARDDARSKRLMTLPGIGPNTASAMLASIGGGHDFKNGRQVAAWIGLTPGQYSSGGKARLGRITKAGDNYLRSLLVMGARAVLSGLGEKQDRFSRWARNLLERRGYWRAVVAIAAKNARLAWAVLKYGEDFRLNQSAA

SEQ ID NO: 467968 - protein, 419 aa, unidentified
MTDCDIAAFTPVLAAIDVSKERHEVLIEAPDKKRRRRVSVLNNLDEFDRLIGLLRSYQRPVRVAFEATGNYHRALAYRLGLAGFEIKLISSIALARTREALHNSWDKNDPKDAQVILHMMTIGAEQFYHDPLMRGTNDIQELSKTHDMISRSKTELWHRILTHYLPLYFPEADRFHRSSRSDWFFAFLELFPSPHFIAAMNKDAFIKAAWEVVGRKVGKERLLADIYATSARSIGLPVAPDSDAICMFRMILAEGRSLIAQRNEIEARAVAMLKDNADYQLLCTIPGIGPINALTIMAEAGDLRRFQHHRQFLKFCGMDLATIQSGMFRGQTKLSKYGNARLRRTLWMAAQVAILQRANSFRDKFERYITKDRHNTHLRRKASTAIAAKMARTVHAVIKSGEPYRPFFEGTIHSGRTLL

SEQ ID NO: 467969 - protein, 318 aa, unidentified
MSHGYDTFVGIDISKDALDVHGLPDGSPSQFDNTAAGRAMLLSLLPQAGACLSVVEATGGYERDLVAEAVTAGHHIAVVNPRQVRDFAKALGLLAKTDQIDAAVIARFAETTRPVPKGYEERQEQLRELIVRRRQLLDHRTAEKNRAEMAHSPLVRKSVLKLIEMLNKDIQRIEKAILQLVESNDDWRGRFERLKGVPGVGEQTAATLMAELPELGRLNRQQVAALVGVAPFNRDSGQFRGRRAIWGGRQSVRNALYMAALSAKKHNPVIRAFAARLLAKGKPPKLVLTACMRKLLIILNAMLQSGDSWSPRVATLTP

SEQ ID NO: 467970 - protein, 340 aa, unidentified
MHYGAIDLHSRFSQVRIVDADGTVLRERRVVTSRETLRKVCAGLGRLRILIEASTESEWVARLLESEGHEVIVADPNYAPMYGARQRRIKTDTRDVAALAEACRLGIFRRAHRVTPAHRQVRQQLAVRRQLVRMRTGLISQLRALLRQDGFCLSSGSSTTVPDRVARLELPPSVRLVVTPVLDALTALAPVIATTTRALTAQAQADPVAVRLQTVPGVGPLVALTYRATLDEVGRFPSAGHVSSALGLVPAEDSSGERCRRGHITKVGSGEARAMLIQAAWTYWRSRSVRRAPLRAWTDQVAARRGKRIAVVALARRLSRILYALWRDQTEYRMPITAAA

SEQ ID NO: 467971 - protein, 316 aa, unidentified
MLQRRFIGIDVCKARLDVAFRPGGDALTVSNDARGIARLLKIVKSAEPECIVLEATGGFELRLLEELSANSAPVVLVNPRQVRQFARASGRLAKTDTIDAAVLAHFAEVMQPSERLLPDAKTRELRALLSRRRQLVEMITAETNRRTHALELVRQGIAVTIRCLRRQVAILDRKLAAFIQQTPVWQRKAELLRTTPGVGPITSATLIAQLPELGTLNRKQIAALVGVAPFNRDSGIMRGQRRIWGGRSQVRTVLYMCTVAALGRNPVIHAFYQRLRAAGKPGHLAVVACMHKLIIILNAMLNQGTSWSPPLLANQV

SEQ ID NO: 467972 - protein, 396 aa, unidentified
MHFLGIDIGKNNHKASLIDESGKPVFKGFSFSNTTEGGESLLARLAEKGVALAGLEVGLEATGHYWLSVYSFLLGKGCKLHVINPIQTDGWRKGTEIRKRKTDAIDATLIAELVRYGDFVEARLPNEATLSLKHLTRFRSYLVDSVSDLKRKVICVLDQVFPEYQRVFSGVFGVTSKELLLQFSSPAELESVSADTLAELLAKLSRQKLGELKAEELRQAAANSFGVTFCRGSFSFQLRMLIEQIKYIESQVKDTEAEIKRIMDLLDSPIQTIPGIGPVLGAVILGEIGDIACFENPKQLVAFAGIDATVQQSGESEGQNNRMSKRGSPYLRRALYQAAVVAATARGADPILAAFYQKKKQEGKHHSACVGAVSRKLCGIIFAVLKENRPFETRSP

SEQ ID NO: 467973 - protein, 396 aa, unidentified
MAKLWIGVDIGKTHHHVAAVDGDGRLVYSRRVANDESALLTVMAEVSAVGRPVCWAVDVTTGLSALLLTLLWRRQVQVRYVSGTVAFHMAAAFAGENKIDARDALVIAHTIRMHPDIPILEPSDRLLAELTVLTGYRADLVGQRVATLFRLQELLTGISPALERAVDLNRKGRMMVLACWQTPAAIRHAGVDRIAALLRRGHVKNAAQVAEAMVAAARQQTVTLPGQRAAAVVVGQMATEILAIEQGIAAVDDLIADQLDQHPLAPIIGSLPGMGSLLTAELLVHTAGMTEYDSPAKLAAHAGLAPISRDSGAVSGNHRQPRRYHRSLRHILWMAAFTAVRECPTSRAYYEKKRAEGKHHRQAMLALARRRVDVLWALVRDRKAFTRPATAVLAAA

SEQ ID NO: 467974 - protein, 351 aa, unidentified
MVYVGLDVHKEFCQAAVIDDSGRVLSNEKFSSTREELDRFLAGFKDAKFVLESTGMWEFIFEGIEKRGFEAQLAHPLRVRAIAEAKVKTDKVDAETLAQLLRADLIPRSWVPSRDIRDLRQLVRQRAYLVQQSTSFKNRIHAELLRRGVRRPQNFVMPFSKKSIDWMRSLEIPTVISCLNCLESVQVQIEEMNIKLLDEFNRRPDAQLIATVPGIGFYGALLIHAEIDDIKRFSHPEKLCAYAGLVPTVRQSASSVHYGAISKDGSSYLRWMLTEAVHTHTHCEPGSRLSRFHAKVARRRGKQKATIATARKLLLIIYWMLVRHEPYHSQGLDPGFPPARNECDIGIGAGP

SEQ ID NO: 467975 - protein, 375 aa, unidentified
MIAYVGIDAHTTNYTLSTYLEGSAAPVNTNAYSPSVSNIVNYCKGIRKKIGNDTEIIVGYEAGCLGFKLKRDLEEKGLTVKILAPASITGTEINRRRRKKTDKRDAEAIARSLKNHEYSEVYTPDEEDESVRDFIRMQQDHKKQLRVIKQQICAFTTRHGYKFTDGRNYWTKKHLKWLKELPLEGINKETLDSYLLSYETVSDRIEQMNKRIEEIAETDKYREAVHKLICFKSVKVLTALAVIVEIGDFTRFVKAKNFAAFLGLVAGELSSSDDQNQTGITKQGNTFLRKLLVECAQSFSRASSGKSEALKKRQEGNAPEVIAYADRANERLRKRYMRLVLHNRKNHNKATVAIARELACFIWGMMTGNIHTVLA

SEQ ID NO: 467976 - protein, 345 aa, unidentified
MHIASIGIDLGKTTFHLVALGEHNKILLRKKFSRPQLLAYTANLPASLIGPEACAGAHFMGAALGEQGHQVRLIPAQFVKPYRKSNKNDFIDAEAIAEAVTKQNMRFAQLKTQEQLDWQAMHRVRDRLVRRRTALINEIRGFLLERGITFAAQPIHLRKNLPTVIEDAEQNLSPRLRWLLDRMWQEWKQTETEIEAITDEIERISNDDARCRQLRQIPGFGPLVSTATVAAIGNGAAFRRGRDFAAWVGVVPRQYSTGGKQKLYGISKRGNVCLRRMLIHGARAVLFRVKYNTGGFGQWVQRLAQRAPSNKVVVAIANKLARIAWAVLSSGQDYRHQPLLQLAAA

SEQ ID NO: 467977 - protein, 399 aa, unidentified
MLLDRPVAEPAAIRTQLGAIFVSLELSRKTWLMTSLSPGGGEKMSKRTVEGGDVAALLALLEELRQKALTRTGVTHKIIVIQEAGLDGFWLHRILEEEGCESHVVDPASIAVPRRRKRAKTDNIDGETLLRTLLAYKRGEPRVCSMVRAPTPEAEDERRICREREALIEERIRHVNRIKGLLFSQGVRDYAPLRRDRRKRLDALRTGDGRPLAPHLKAAVEREIDRLELLLKQIKAVEDARDRLLDRLAGRAGMDAPAPAGAQPSPVAQLAGLKGLGEELAVSLWTEGLSRPFANRRQAGAYPGLTPTPWRSGQLDHEQGVSKAGNQRLRRKMLELAWLWPIHQPDSALARWYRERLPTMTGKAARKRLAVALARKLFVALWKFVSAGVVIEGAVMKAA

SEQ ID NO: 467978 - protein, 317 aa, unidentified
MDKHNTFCAGIDIGKRKLDAALNGSKARLEVDNASDGHQKMVAWLKRHKVERIGVEATGGYEKDVVRALRSAGFVVVVLQPLQVRAYAQFRLQLAKNDKIDAAIIADCTASVDEVRLPPDPRFEAFAAAQTLIDQLNDDIVVYKTRLETSRDGISRTFWRREIAARMAQVRSARKTLRTEMRAHVDLAAKLDLIISVQGIAEKTAMAILIRMPEIGTLSREEVAALAGLAPYDDDSGKRTGRRHIKGGRTRLRGSIYAASFAATFHWNPQLKTFYERLRAKGKTHKMALVACARKLLIFANTVVARGTPWQLSSATI

SEQ ID NO: 467979 - protein, 352 aa, unidentified
MAEKLNSVIAVIGIDIGKNWFHVVGLDERGAIVLRQKWSRSQVETRFANMPRCLIGMEACVGAHHLSRRLRALGHEARLMPAKYVRPYSKGQKNDFRDAEAIAEAVQRPTMKFVATKTADQLDLQALHRVRERLVGQRTGISNQIRAFLLERGVAVRQGLRFLRAELPGILARRCDVLSPRMVRLIEDLAGDWRRLDERIESLSGEINALARQDAGCERLMSVPGIGPIISSAMVAAIGAGDAFTKGRDFAAWLGLVPKQISTGDRTILGKISKRGNRYLRVLFVQAAWVVLIKPKSWERHGLKPWLEAARKRLHRNVLAIALANKLARIAWSVLARARGFEARSVATAQPI

SEQ ID NO: 467980 - protein, 414 aa, unidentified
MGMPRWVGRAIGLDVHREFCEVAICEDGRTRSAGRVSATPEGIAVLARSLLPSDRVALEVTGGCWEVARILEPRVNRVVVVSPDDTGITSARAKTDKLDARALASLLWKGELEAVWMPDERCRVLRRRLARRQQLVWSRSRAKNEIHAALQRRLQPKPPCSDLFGVKGRAWLSSLELPLEERESVDAGMRHIEFLDAEIAAVEKLIAKQALSWPEIRRLMTVPGVNLICAASFIAAVGNPNRFLTSRKLVAYLGLDPRVKQSGEGPARSGRISKRGSPSARWALVEAAWTAVLQPGPLHAFYVRTRNRRGHGKAIVATARKLAVLFWCMLTRGEDYAHQQPSLTRKKLRRLEITAGAPKYTRRAAGIWSTNDLMREAELELARQAETSYLRLVQDQLAGAPAKKAGASVTLERA

SEQ ID NO: 467981 - protein, 348 aa, unidentified
MRFYTNQHKFYCGIDLHARTMYLCILTQEGKIVLHRDIKTDPDIFLKTIAPFREDIVVAVECIFTWYWLADLCSQENIPFVLGHALYMKAIHGGKAKNDKIDAYKIAALLRGGMMPMAYVYPSDMRSTRDLLRRRTHLARKRAELIAHIQNTNHQYNFTDMGRIARKCDRIKIGVADRFTDPSVQKSIELDIALIEHYDKLLNHLEHELSLIAKVHDADSYFRLRSIPGIGRILGLVILYEIHDINRFPSVQDFVSYCRLVKSAKESAGKIIGSSGKKIGNAHLKWAFSEAAVLFLRRNPEAVKYRAKLERKHGKAKSLTILAHKLARAVYNILKKKEVFNPTIFFAK

SEQ ID NO: 467982 - protein, 386 aa, unidentified
MNTGHERLWVGIDVGKGHHWAVAVDDMGEAVFSRKIPNDETEILQLIATACDAAEHVQWAVDLRGKTATLLLVLLTAHGQQVTYVPGRSVNRAAEGYRGEGKTDAKDALVIADMARIRRDFTTITIPPEQVCTLRLLTANRRDLIAERVRLINRMRDLLCGISPALEGAFDYARSKGAVTMLTRYQTPAALRRTGVKRLATWLQRRKVRNPQNIAEKAVAAADRQHTALPGETRAAALLGGLAHQLLALDERIASNDREIRETFRSDDRAEIIESLPGMGPILGAEFVAIAGDLSTYRDAGRLAAHAGLAPVPRDSGRRTGNLHLHRAANPAAARRRAARPRWRPAHRRSGAWSAHTTSRAAGCRPPCRPWAACSPPAHGTPEVRL

SEQ ID NO: 467983 - protein, 439 aa, unidentified
MKGYLGIDVSKGYADFILLSEELTELESCFQLDDSAKGHEALIDWITVTVEKHKLAELRCGLESTGGFEDNWFSLLLRLGDRLPVRVARLNPSVVKHGAKASLRYTKTDAISAENIASYLVRFDEQVRYQVADNKYRSYRSLYNHISLLNRQKTQLINELKQLLYTSFPELQRFCKSSIPGWVLELLKQYPSASALSKARPEKLCKINAITTAKASQLIGQATLSVASRHQSTDSFLIKHMATGILQAQQQLALYKEHLEQTCQGPEVDLLTTIKGVGRYSAAAIIIQIEDIRRFPSPKHLAGFFGLHPTVDQSGDKKIKSRMSKKGRPALRAALFMCANSAVLFDPHLKAIYARHRAKGNNHKAALVVIMHKMLRIIWGVLTHQKAYNSDIDLKNQQAVKEVAPDKNETENKRRLQDYDEQAPISRIETKKRKAYQSP

SEQ ID NO: 467984 - protein, 409 aa, unidentified
MQAFCGIDWAEDHHDIAIIDDAGTLLARARIGNDPAGLRRLLQLLADAGDNPEQPIPVAIETARGLLVACLRATGRPVYAINPVAVARYRERHTVARSKSDQRDALVLAHILRTDAAAHRPLPADSERAQAITVLARGQQDAVWACQQLANQLRTVLLAFFPAAVAVFCVKHVGLTSREARTVLAAAPTPTRAATLTRAQLRALLRRTGRQRNLDQWVQRLQAAFRAEQLHQPPLVEQAMGQHTAALVAQLSAACRAAEQLAEATTTTFRRHPDAWIITSLPGLGELTGARMLAETGDDCARFADARALKAYAGAAPVTRASGKRRFVMARKVKNQRLASVGYVWAFAALTASPGARAHYDRRRAAGDWHPAAQRHLFNRLLGVLHHCRTTRQVYAEDKAFPTAQPATA

SEQ ID NO: 467985 - protein, 322 aa, unidentified
MITLGIDVSKAKIDCCIFPSGLTGKRKTKRFDNAQSGFVKLVKWLTELDVNLSDTRAVMEATSVYHENLAHFLYDMELTICIANPARVRAFAKGLSMLNKTDKADSEALVYYANTVKLATWQPEKENVRILKALINRYAVLEEDLQREKNRLEKAQSTQTFPQVLLSINIRIQQLEQEIIRLDETISSHVNGDSELKNDLALLTTIPAVGRKTGLLMLGLLRSHHFEKASQVAAYVGLVPIHFQSGSSVNKRSRLSKAGDSKIRSSLFMPSIVALQYNPHIKALYQRLREKGKPKMLIVSAAMRKLVHLCYGVLKHQTAYQI

SEQ ID NO: 467986 - protein, 453 aa, unidentified
MARKAEKERTKDGLKLKIVNPNAAGIDIAYGEMQVCVPEDRDGENNRCFGSFTCDYEEIASWLKACGITTVAMESTGSYWVGLYFFLEEKGFDVLLANAKDVKNVSGKKTDEADAEWIMLMHSYGLLKPSFHPDAAARSIRELARHRDNMLRSAGKEIQHMQKSLVLMNIKVDTVISDILGKSGKAIIEAILAGNHDPKSLAQLADSRCKASKETIEKSLEGTWDSVHLFELKQSYDLYKYIHTQIADCEAEMDRLLTDYTDGSSTDMQGYVPTKKRVAKKNAISFDAEKHAFSLWGVNVMEVPGMSLGALAVLMGELGSGFAEKFTSAKSFCKWCNLVPNNKISGGKLLSSKVPKQKNRVGQVFRLCANSVKSVKTGLGVYFRRQKSKGGHLQAIVATANKIARIFYVMVTTKTPFDESRVGPDEKELLQRKIALAQRTLDRLNLRLSVAEG

SEQ ID NO: 467987 - protein, 370 aa, unidentified
MSQKLDTSPAVIGIDIGKNSFHIVGQNQRGAIVLRQKWSRGQVEARLANLPPCRIGMEACVGAHHLSRTLKALGHDARLMPAKYVRPYSKGQKNDYRDAEAIAEAVQRPTMKFVATKTADQLDLQALHRVRERFVGQRTGIINQIRAFLLERGIAVRQGLRFLRAELPGILATRGDALSPRMLRMLEDMSADWRRLDARIEGLSSEIEALARQDQGCERLMTIPGIGPIISSAMVAAIGAGDAFSKGRDFGAWLGLVPKQLSTGDRTILGSISRRGNRYLRSLFVQAAWVVLVKVGPKHWDRYGLKSWIEAAKRRLVRTPSSRPRGDIPLQPRRPPQPVADLQLLPDIGFRQVKQMQAREGTNTLTHPQS

SEQ ID NO: 467988 - protein, 391 aa, unidentified
MPQSNDLSRSLTALDQDSTLIAVVEMSQSSWLVGAIIPGVERRPAKKLEASEGMLLALLHRWRDEAAKAGCTIDRIAVAFEAGRDGFWLARWLRQRGIEAHVIHATSIAVSREHRRAKTDRLDAALLQRAFLGWLRGERGHCTMVAIASLAEEDAKRPSREREALVGERTRIGNRMKSTLARLGIRGIRPGLRKAAERLEQLRTPEGAPLPPNTLAELRRDLARLRLINDQIGEIEAARLERLRQQPDEARHPMILLLARVVGIGIETADMLVQEVLSRKLRDRRAVARYGGLTGSPEESGARRREKGLARAGNARVRRGMLQLAWRFLMFQKDSALAQWYRARTADARGATRKTMIVALARKLLVALWKLVTTGELPNGVVLRPAIQAVL

SEQ ID NO: 467989 - protein, 350 aa, unidentified
MDTSVVPLASIGIDIGKEVFHLVGFGTDGKIAFRRKIKRLALVDTFKKLAPCVVGMEACLSAHFVSRALRQLGHEPRIIPAVYVKPFVKGQKNDYNDAEAIAEAALRPNLRTVREKSQDQLDLQACHRVRSRLVSRRTATINQIRAFLIEQGITIRTGSRALRNSLFDVLKNREDEISPRMSDLIVGLYEDWLWLDERIETITKEIEEISQREVNCIRMMSVPGVGPLISTAVVAAIGTGEAFDRGRDFGAWLGLVPRQYSTGGRSILGGISKRGSRYLRTLFIQAAKVLLMRPQNWEKFSFGQWLTNAAPRMHRNKLATALANKLARIAWSVLSTGKAFDTHRLEVEAI

SEQ ID NO: 467990 - protein, 376 aa, unidentified
MKRQGEAFVGIDTAKARNAVAVAEGDRNGEVRYLGEFDNTPDAVAKLVRRLAERYGVVHYCYEAGPTGYGLYRQIRALGQDCGVVAPSLIPRRPGDRVKTNRRDATSLARLLRAGELTTVWVPDETHEAVRDLVRTRAMAIEDYRRKRQHVSSFLLRHGRSYEGSPTWKGLHLRWLDRQAFAHPAQRLAFQELLNAVRAAVERIGRLEAALLEVVPAWTMAPVVAAFQAMRGVSFLTATTLVAEAGDIRRFDHPRQLMAFLGLVPSERSTGETKRQGALTKTGNIRARRALIEAAWTYRHSAGIGDKHQSRQRHLPERIRDIAWKAQVRLCARYRRLAARGKRVTVVVAAIAREIAAFLWAIARHIDPGSQGASEA

SEQ ID NO: 467991 - protein, 330 aa, unidentified
MNYQEFVGIDVSKSVIDVVLYSKKLHVQLKNNEQGFSKLIAWLKKHISCSMDQVLFVFEHTGLYSLWLSAFLDEHKYAFSVVSGLAIKRSMGLVRGKSDKVDARRIAEYAYEKKDKLKLYQMPSKTILTLKRLLSYRERLVKERAAFKTRSKEYKTFLVEQENKVLFEAQVRMIDYLNKEIKIVEKELYRLIKEDKELARQYELINTIKGVGPQTAMMMIVLTKGFTSFPTWRKFACYAGIAPFPDESGTIIKRHKINHLANKRIKALLSCCASTAIQHNPEMRMYYQRRIGQGKNEMSTLNIVRNKLLARIFAVVQRNTPYVETLKYAA

SEQ ID NO: 467992 - protein, 377 aa, unidentified
MKRIKFVGLDVHAETIAVAVAELDGEVRSIGVIPNRCESVRKLVKKLGPVEELRFCYEAGPTGYVLCWQLTALDAKCEVVAPTLVPVRAGDRVKTDRRDALKLARSYRAGELTAVWVPDAAHEALRDLVRAREAAKRDQLRARNRLTKFLLRHGKRPPEGVNPWTLNYMNWVRKEVHFEPLAQQASLLDYLHEVEHMAARVTRLEQAIEEAVQLAPHQMREVIEALQALRGIAKVSAVTIVAELGELSRFGEARQLMAYSGTVSREHSSGESCKRGGITKTGNVHLRRIVVEAAWAYRHAPAVTTCLRKRQERVSEEVKEIAWKAQHRFHGRYRKLTARGKNTGKVITAVGRELLGFIWAIGVKVEAEQRKALGQAA

SEQ ID NO: 467993 - protein, 318 aa, unidentified
MHTKTNQNVNVGVDTGKFQLDIYIRPLDIYFTVSNDEKGIKEAIKIIRKHSPGRIIVEATGRLEMPFIVACANASLPFVVANPVHIKRFAGAIGQRAKTDKLDAQLIAHYGEAIQPKLSQLKPDTMQAMSDLVARRNQLLVMQTMEKNRLQILPKELAMTIKPILTVFKNQITKIENKIVALIESCPDYQAKNCILQSMKGIGKIASASIISNLPELGYMTNKQASALVGVAPMNRESGRYKGLRKIQGGRHQVRTVLYMAMMSAIQSNPLFKETYQRLVAAGKPKKVAIIACIRKMVVILNSMLRDGVMWEAPEATN

SEQ ID NO: 467994 - protein, 353 aa, unidentified
MKQHNEKAREGAEMDVRTLGIDLAKNLFQVHGVDGQGRTVVQRQLRRRQLLPFVAQLQPSLVAMEACGSAHYWAREIAKRGHQVKLMSPRFVRPYVKSNKNDARDAEAICEAVGRPSMRFVAVKSQAQQDMLALHRVRSLLIRERTALMNQMRGLLAEYGIVVARGAIPLRRALPLLLEDRDNGISELLRELLAEMSERLRWLEERLKRYDQRIAECAGTDERAGRLMAVEGVGPLIATALIAAIGDARQFHSGRDLSAWLGLVPRQHSSGGRSVLLGISKRGDRYLRTLLIHGGRAALRFAARKRDPRSRWIQAVRERRGANIAAVALANKNARVLWALLARDEDYRVPAAA

SEQ ID NO: 467995 - protein, 315 aa, unidentified
MVIAGVDVSKAALDVHVDGVDRTFANDRTGFRALAKWLRQCAVARVVMEATGRMHRGVHRSLHDRGFAVFVINPRQSRDFAKALGELAKTDRVDARILAAYGRILSDAAAPTAPLSAFVDELSDLLVMREQLDDARTALNGTKREVACREAVAAGAGAVDAVTAAIVALEDRIQARIEDDPEPRRIFEILTSIPGLGTITAAAFMCWMPELGRLENRQAAALIGVAPYAKESGQSARSRHIRGGRRRPRDVLYMAALSATTCNPELKALYDRLKARGKHHKVALVAVMRKLVILANVLLRRDRTWTAEPTSAPTG

SEQ ID NO: 467996 - protein, 328 aa, unidentified
MFEHYIGVDLHQAFFQACAVTASGDRAWEGRFPRTDAGMTALLARCDQRTAMAVEASTPTWHFADAVCPRVGALRIVDPVKTKLKAGYAAKTDRLAARRLADALRRDSVVGIYYPPVAIRELRELCRFRHAVVQVRTALINRVRAVLLRQGLVDRRRLARTVSDAWLETLTLPPRAAASVAGLRRVLAAVRTEAAAADREVLTLAAADPIAIAVQQIPGIGPVLALLIRAEVGDMRRFPTPGHLSSYAGLVPRVDASVGRVRYGRITRRGSPWLRWALVEAAMHGTRRRDRIGRWGRSLAIRKGALKARVALARALCDEIYRQWLAVV

SEQ ID NO: 467997 - protein, 369 aa, unidentified
MEKSVLYVGLDVHKMSVDVAIAEPGTGETRYYGRIGGDLDSLDRVTRKLKAKGAKLRFAYEAGPCGYQVYRHLTAQGYSCLVAAPALIPRRPGDRLKNDRRDALALARLLRAGELTPIKVPDPDDEAMRDLTRAREDAISVERRAKQRTAAFLLRHGRVYPGKTTWGRGHWGWLLQQVMDHPAQQIVLQEYLDAVREASARVLRLTGQIRELIPLWRRAPLVAAYQALRGVSLIVAVTVVAEVGDLSRFNNPKELMAYLGLVPSEHSSGASVRRGHITKTGNGHARRVLVEAAWAYRLRARVTRPLLQRQEGLPESLRQLAWKAQLRLCARYRRFLARGKAKQTIVTAIARELAAFIWAIGQAVEPVTT

SEQ ID NO: 467998 - protein, 322 aa, unidentified
MTLYIGVDFHPHQQTVSYCNNEEGEVHQASLVHNVEQVRRFYKQLPKAVVGIEASCTAQWFEQLLFELGHELKVGNPTSIRARARSRHKSDRRDADLLLDLLVKDEFPELWRRPLPSQSVLEQLRFRHHLVKLRTQICNRLQALAHAAGLPKKGIQTKRARIALMEAQFSETQSYQRAGLFELLEDLTVRIKEVEQWLESKATGDAKVQLLLTHKGIGLLSALAVAHTLGDISRFPSSKEAVAYTGLDPLEQSSAGKVRYGSISKAGSSVLRHLLGQAMHVAARYDGELKAFYKRLASRRSKSIATRCHDTKTASETLYHVA

SEQ ID NO: 467999 - protein, 331 aa, unidentified
MDTDSGEYQEKRLAHREDAETFYRALKGQKVRVGMEASGHARWFERLVAELQFELRIGDAAEIRTKRVRKQKTDRQDAHLILRLLLEDRFPQIWVPSWENRDLRQLLWHRHRMVQARTRMMNQLQAVALNEGLRCKKRLWRERGRQQLESFLLAPWASRRRRDLLELLDRLNPTIAELSQAVEQEVQKCPEAQRLRTHPGVGALTALAFVLIIGRAERFGSGKQVASYLGLVPVEESSGNRRRLGHITKQGSSMLRFLLVEAAQVTVRSVPEWRSQYFHLAMRRGRKIAKVAMARRLAVRLYWMMRQGWGYEQVKKFGSHAGQPGHRDGAQ

SEQ ID NO: 468000 - protein, 363 aa, unidentified
MEEEQRRYVGIDLGKREYTMAIIRKDGKMNIHQGKTSIQGRGALYNKLEMTDKVALEAGNLAFIMAKELMERVGCEVRILNAAKLPFIWDAPTKTDKEDAMKLAHLVEERRDEKLPIVPLPSKQELERRKLLAQYRREMNGRTKMINLLHVLFVHQGHTTVVRSNLATDVKRIQAIELLGGQEREEAEWLLRHLALYEQRLQELKVKIHQEAKTDEDMKRLQSIAGVGPIVAFGYVAHVGDGSRFSKGAQVSNYLGFVPRLDYSGTIRRQGHITKHGNGYVRGLIVQAAWSMVRSRQGGSLKERFMYVTGFQGKSKKKTIVSIGRRLAEMMYSVLKNKTEYEPRPWNGPMDRTALLAEKALCA

SEQ ID NO: 468001 - protein, 391 aa, unidentified
MVCVGIDVAKDKHDCCILDSDGTVRADCFTIPNNMDGFKQLLQTIRDCTKKSDKIKVGLEATGHYSYNILGFLLDNGLPTYVINPLHTNLYRKSLSLRKTKTDRVDARTIATMLLSDVDLKSYTDIAYHNEELKSLTRYRFDKVQERAKLKQSVSRLATILFPELEQLVSSIHGTSIYALLSEYPGAKQISEVHLTKLTNLLTTASKGRYGKEKAIQIREAARTSIGSVMPAKSLELKHTIKLIQELASEINEIEDSIQKIIDELNPPILSIPGMGVNSAAVILAEIGDFSNFSSPDKILAYAGCSPSTYQSGKLTNCYAHMEKRGSRYLRHALYNATKYVCYWNPVFAEYLAKKRAEGKHYNVALSHAMKKLVRLIYALQKSGKAYLAAA

SEQ ID NO: 468002 - protein, 430 aa, unidentified
MMEEVDDAELVVERIAALDLGKAGLEACVRVPSPYRPGRRMQELRGYGTTTAQLLEMVAWLRHWGVQRAVMESTSTYWKGVYYLLEAEGFECWLVNAREVKNVPGRAKTDRADAIWLAKVAERGMCRPSLVHPAEIRRLRDLTRYRRALVQDRTREQQRIEKLLEDAQIKISSVLSELHGVTARAMMDALIAGQRDPRALAQLAKGRARKKTAQLEEALRGFFTDHHAAILRMMLDNTDRISAQIAALDARIEKEIGPFSGQAARLAEIPGVDAVAAAELIAEIGVDMTRFPSDAHLVSWAKFCPQTHESAGKSKSKGRGRGNPWLAGTLGRIAFANSRADTFLGARYRRLARRRGKQKAIVATGNSVLTVVYYLLSDPMATFCDLGPGYYESRINVHRRARDLVTQLQALTGQHIVIRDGKAVITDAAA

SEQ ID NO: 468003 - protein, 409 aa, unidentified
MGLYCGIDWATAHHDVAVINDEGKVVARGRVNNDAAGFTALLALLAEVGDSAEHPIPVGIETDRGLFVAALRETGRVIYPINPLAASRYRARYSVSGAKSDATDAVLLANIIRTDPTAHRALPADTELAQAIRVLARAQQDAVWARGQVGNQIRDLLKEFYPAALVAFDGLDGGLARPDARAILTAAPTPAQAAKLTPARLRRLLIKAGRQRYLDRDVTRLREVFGDTYLHQPAVVENAMGIHLTALLGQFDAACAATDALTEAATAHFDQHPDAAIITSFPGLGMLAGARVLAEIGDDRTRFPDARGLKAFAGSAPITRASGKKTVVLHRHIKNRRLNAVGPIWALASLRASPGARRHFDARRAAGDWNHQAQRHLFNKFLGQLHHCLHTGQLYNEHQAFPPPLPAAA

SEQ ID NO: 468004 - protein, 392 aa, unidentified
MSFKIFRKNCCGLDVHKTWIYACIGITDTNGRTDYKQTRFSSFSKGLKELSDWLAKYHCTEVCMESTGKYWIPVFNVLEKAYVSVILSHPKYTKPQKGNKTDRKDAKWICDLFMCDMVKPSFIPPADIRHLRDLVRYRFKLICMITGEKNRAQNCLTVSNLKLDDVFSDVFGKSSRSITEYILEHPGDLFDVTPFVDRRCKTPIEEIQAAVDGAISPEQAVKLRQCLNHIDELEKHLEEIEQEILRLSDKYQAALDLIRTVPGFDKNPMTAIQVLSEIGGDMSVFPSAKHLVSWAGCCPRNDQSNKKIKSTRISRAGSYFKPVLVQVANALIKSKKHLEFTNRYKRIKARRGHKKAIIAICRMILTAIWHILSDLKPYTAEGFRESRPVNES

SEQ ID NO: 468005 - protein, 378 aa, unidentified
MIEHTAEALDVWLTELHQKVKGRIAIALELKKGPVVYALQKYPFITVFPVHALSLARYRQAFSPSGAKDDPQDAELALELMLRYPQKIKAIEPDNADIRLLQQLVEQRRQLVEDKRRFVNRLINTLKQYYPQPLEWFSHRGSLLLCELIMRWPSLQQLKRARHDTIRNFLNAKGGRAMALTEQRVVSIDNSIPLTTDPSVIEANALMATALATQIKVVSEIIKTYDERIETLFDSLPDAGLFKSLPGMGPCMGPRMLAALGDNRDRFNSAEEIQNYAGIAPVTERSGQKSWVHWRWQCAKFVRQTFVEWTAKTVNSSYWARLYYQGQREKGKSHQSAIRALAFKWIRIIYRCWKTRTRYDEAKYLLALEARKSPLLKP

SEQ ID NO: 468006 - protein, 392 aa, unidentified
MEPSYQKKRFSTFNNSILHFKEWLVKNQCRDVCMESTGKYWVPVFNLLENEINVTIANPKWVKAVKGNKDDTKDSKWIGDLFRLGLVPGSYIPCKPIRILREYTRYRYKLTSCRTSEKNRYQNALTVCNVALDSVVSDIFGKLATSVIDYLIEQSDNSINHEEIASRLLRSLKKKSDSVIESIEGYQMTDSQKYRMRLVRAHMDYITSTINDIDTMLDSLIAPYENAVQLLCTIPGVDRNSAITVISEIGTDMAPFSNSKRLCCWAGLTPGNNESAGKKKSVRIARAGVYLKPALVQVAHAAVKSDKSPYYKQKYERIMKRRGKKRAIIAIARMILTAIYQMLSTGETWNPTDLFKIDMPEPMKEKQKEKAIKQAMKLLIREGKISKSQLAS

SEQ ID NO: 468007 - protein, 338 aa, unidentified
MAIVTVGIDTAKSVFAVHGVDEAGKVQLRQPKVARAKLNALMAELPPCTIGIEACTGAHYWARQFQAHGHTVKLMAPKLVAPYRMSGKRGKNDAADAAAICEAVSRANMRFVPAKTEDQQARLMVHRARQGYVTARTATINRIRGLLAEFGVVLPLKAEVVRREAANKLEELPGYANLVIGDLLSEVHHLDERIGQYDIHIRTMARQSTPAQQLMQLMGIGEVTATALVATVGNAREFGSSRQFAAWLGLVPGQYSSGGKTRLGGITKAGDAYLRGLLVIGARAVLNAAASKNDRLSRWAMKVAQRRGYWKAVVAIAAKNARMAWAVLTKAENFKVPA

SEQ ID NO: 468008 - protein, 460 aa, unidentified
MNQYYLGIDASKGYSDFVMLNAKKQPVIENFQLDDTFEGHARLYELLRSFNQDHPEATIYAAVESTGGYENNWFQSLLKFQGSLPINTAHLNPLGVSYNHKADLKRNVTDKISAQNVAEYMIAHPEKVSYQHQDSLASLRKQWGFITMLTKQSTQLLNQLESLVYNANPEILTYCKNGTPQWVLKLLTRYPTALRLSKAKAKSVARIPYVSKDRAQQLVATAKKSVASADDEVTEQLIMATVKQILDRNNTIKAQTKILTDKCAVPEVELLKTFIGISDYSAIGLMLEIQSVQRFLSSKKIASFFGIHPAYKKSGDGIWKYRMSKKGRKEPRRILFMVAMSAIKSNPLVRSIYQQAVQRGMKKKAAVGLCMHKILRIIYGMLKHNKAFDPEIDRKNRQKKPLRQRRVHQDKDRRYQDFDSKAPISRRQKMKREERKQSQNVSNVEYGINEASVPVTELAN

SEQ ID NO: 468009 - protein, 423 aa, unidentified
MAGVMIGIDPHKGSHTAFVIDGREKPLGQLRVRASCEQAEALLGWAGRWRQRTWAIEGARGLGQLLAQQLLAAGERVLDVPPKLTARVRLLESGQINKTDENDARAVAIAALRARQLPQLTVEDQTIVMRVWARRYHDLGRLRTQAVCRLHTVLCELVPGGVRKQLRTSQAIAVVDSITAESPVAQPKLELAHDLVADLQRLDAQRREVKRRVSRAVAAAPTSITEVYGVGPIVAACVLGYVRDIRRFPSRDRFASYNGTAPIEVSSGDRKIYRLSRRGNRQLNHAIHIAAVSQISHRGSEGHAYYQRKRAKGMTGKCALRALKRKISDTLYERMLHDIRQRKDPGGHSGNDAVSSAAGSHPDGPALRTSHSRATANSKTATTNQRPLTSPPAPDKRRTSRSGTGVKLQPRPRPRRGRGQERA

SEQ ID NO: 468010 - protein, 337 aa, unidentified
MKYCGIDLHSNNSLVSVVDEEDHVVAEKRLPNDLEKIIGLMKPWHAELAGVVVESTFNWYWLVDGLKDAGFTVHLAHTTAIKKYAGLKHSGDETDARFLAHLLRLGILPTGTILPPEHRAVRDLARKRMQLVHNRTTHILAVENITARQYGARMTSNQVKELTVEMVDEMPFPKDVGLAVKTNVAVITTLSAQIELLERRLLSDMKARPDYALLTTAPGIGKVLATTILLETGPIERFSGAGNFASYARCVDSVHTSNGKKKGEGNTKNGNKYLAWAFVEAAVYAMRFNTEAKRFYEKKKAKTNNVVAIKALAHKLARACFHMLKEGKPFDAARCFA

SEQ ID NO: 468011 - protein, 356 aa, unidentified
MSREVKYIGMDVHKEAIVIAVQNARGHLVMESIVETKASSILQFIHGLQGELHITWEEGTWAAWLYDLLQPYVHQVLVCNPRRNALLKEGSKNDKVDAGKLADLLRTGMLRPVYHGEHGLRTLRELARTYQTLSQDLNRVMNRLKALYRGWGIACGGTQVYAPRYREEWLGKIKHVGVRRRAELLYQQLDGLQVLRRTLRPELLAESRKHKAAKLLRQIPCIGPIRAARLLALMQTPHRFRSKRQLWTYSGLGIETRDSAQYRFVRGQLQRAKKPQQIRGLNQNHNHEMKEIFKGAATRASCGMGPFREFYVSLLDKGMKPEMARLTLARKIAAITLILWKKEERFDAQQVKTQAA

SEQ ID NO: 468012 - protein, 402 aa, unidentified
MLPKRACIALDVSKGNSHMQAFYSAGFKATDVMIIQHDKNGFNTLNELIKKIEVETNDTVAIVFESTGSYSKPLEHFLWSIHKKYYLVPPLLSAKVRKSDIRPTKTDSIDCETIANVYYLKNLKEADRLNKISLRLKNYSSYYLFYINREVETKIKYRQYLDIVYPKIDEYFDVMALSFIEFIKNNSDPNKLLKRSHEDIYKRFLKFSYCGEIKSKARATSMKRYLSEAMITIDSDNPEITILADVAKVLLEDLNHLDNMLNEIVVLAMKTEEYKYIVTIPGLSKNTAARISAEIAGIDRFSSASKFVAYIGIDPTVCQSGKLTGEHLNITHKGNQRLRCLLYLVCVGSLKNRSDYNPIRDFIIKKKNDGLAPKAAIVAGCNKLARIIYAVCTKREVFSIQQ

SEQ ID NO: 468013 - protein, 354 aa, unidentified
MKKIFIGIDFSKEKFDATLIQAEGLKECAPSVHEVFDNKTSGYRRLVKWVKAHAESFMPETWLFCGENTGGYSIGLSNFLYASGYNMWLECAYKIKHSAGIQRVKNDKADSRTIAEYAMRNYDKMILHKPQSASLTCLREIFLYRHSLVRQKVALQVRRDEKRLTQEKSDARAFMSFTSKHLITEVNKAIDKCDQKIKDIIVSDDELREIFDIITSMPGIGVQNATCLMVYTDNFQKFDLDSRKIACYYGIAPFGQQSGTSVKSKPQVSPFANRMIKSLLSQAALAAIKFDMNIHNYYQRLIERGKHPLLVHNNIKNKMLHILVAMVRNRVKYNPDNVYRTSNEINLAPQMLNV

SEQ ID NO: 468014 - protein, 427 aa, unidentified
MPYRIAGIDVHKKMLAVVVADVEVEDDYHFEQLKVGTSPAQLRALADWLVEREVEEVVMESTAQYWRPVWEALEQYWRPVRRTRAGASPVSGTLHLAQAQSNRGAGGRKRDFPDAERLVKRLAAQELTLSFVPDAEQRLWRTVMRRKYQVTRNRVQLHNRLESLLEEAHIKLSSLVSDLLGTSARRMLQALADGESDPATLASLADQRLRATAAQLCDAFRACTTLNPVYRRLVKLTLEELRLIEDHLAQLDHQMAQLLAQHHDAVQRLAEVPGLGADSAQQLIAEVGATAATFPSPKHLASWMGACPGSEESAGVNYSHRCPKGNRQMRRVVNQAANAAAKAKGTIFAIVYRRLVPRLGHAQAIGAIAHRLCRLIWKILHQGIRYEERGPAVSAEAKKVRARKMIRELRSLGYRVEQLPAPSSSPA

SEQ ID NO: 468015 - protein, 398 aa, unidentified
MKPCISIDVSKGKSYYQGFRGLNDPLAKARPMEHDKKGYEELVSFEEKLNAKPGNVTYVFESTGIYHRSLQNYLETRSKEYVILNPLTAAKVRKSKLRSTKTDQKDCQSIALAYYAQEYKPHDQRDTKYEELRARNREYLHQIQILRQLKVHFHNLLDIVFPKWDEAYPNPYTETSLALLKKYPHPEDMEKTKEESIAHYLEKTTRHRQVACVIEARKAKQYASRTISGCARNTVEAELLREAVNQVEEQMKRLDKCMEAMKSMVHEDPFLHQLKSIPGVGEILSIQLMAELGDLSRFLSSKKLVAYAGIDPIVYQSGKQTGEHLSITKKGNKNLRTLLYLAVASNIRSRNSNSILDFYNKKRQQAIPLAYRAAVIACANKLLRILYSMYRSGEDFKF

SEQ ID NO: 468016 - protein, 464 aa, unidentified
MPKAKKGARRNSRKQKDVTEGLPPLNLNAAGIDVGNAEHYVAVPPGRVSQPVQKFGSFTADVHRLAQWLKACGVDTVVMQATGVYWVGLYEILEQQGLDVKVVNARYTKTLPGRKSDVQECQWLQKLHTFGLLNNSFLPPPEIRRLRTYLRQRENLVAAAATCIQHLQKALTEMNVQLANVLSDLSGVTGMAILRAIVKGERDPQRLAMLKNERVKASREEIARSLEGNWREELLFVLTQTLDLYDIYLGKIADCDQEIEAQLKTMKGKVDVEAQPIPEPRQVKRPRRQKHQPCYDLRGELYRVTGVDLTQIDSLDVQTVQVVISEVGVDMSAWKTEKHFASWLGLCPDNRTSGGKILHRGTRKVVNRASTALRLAASNLLRSDSALGANFRRLRARLGAPKAITALAHKLACLIYRMLKFGKAYLDRGVAYYEAQYQRRRLNWLKKQAAALNLQLVPMAELAH

SEQ ID NO: 468017 - protein, 345 aa, unidentified
MNITRIGLDLAKSVFQVHAVDHKGHCLFSRALKREKMMAFFQNLSPCLIGMEACASAHFWARTLMSMGHEVKLIAPQFVKPYVKGNKNDANDAEAICEAVSRPNMRFVPVKTVAQQDIQALHRIRQEQVRQRTALVNQIRGLLSEYGIVISRRVESLRNALPDILEDVENRLTADFRILLKGLQEDLMHLDDRIDTQDQAIKRLAQEHEGAKRLQQLRGIGPITATALIAAIGDGRQFARGRDAAAWCGLVPGQRSSGGKSKLLGISKRGDTYLRTLLIHGARAVLKTAQSKDDRLSQWLQSLCSRRNMNIAAVALANKTMRMAWALLVRGQDYDPNFGYKTGSA

SEQ ID NO: 468018 - protein, 350 aa, unidentified
MKTTHPVIIGIDTHKASHVAVAIDTQGTRLAMLSIPTNPKGYLELERWSQSLGKVQAFGIEGTGSYGAGLSRSLLAHGHNVIEVTRPNRQLRYTQGKTDSLDAEGAARSVLSGQATARPKTQTGSSEMIRHLKIARDTAVKSRSQAMVTLKTLIINAPADLRDALDHIRGKVALIRHIAAFRPGDIDNPLASAKAAMRALARRWLWLHEEIIAHDKELERLVTERAPELMASHGIATLTVAEMLILVGDDPTRIRSEAAFAKLCGVCPIPASSGKTHRFRLNRGGNRQANAALYRVAIVRMRSHEPTLAYVKKRTKDGKSKSEIIRCLKRYIVREIYSQLCVPKSSQIKA

SEQ ID NO: 468019 - protein, 346 aa, unidentified
MEHYAGIDVSLELSSVCVVDAQGKIVKEAKIASEPEAFIAFFKELGFAVKQIGLEAGPLSQWLHAGLKQAGFESVLLETRHVKAALSAMTVKTDRKDARGLAQLIRMGWFRPVHAKAMGSQEVRALLVARKQLLGRLIDVELSIRGILRGFGLKVGPVTRKGFEARIRELVTGQATLERIAGAMLPARAALKAEYEKLHKAVLAIVREDAVCRRLMTVPSVGPLVAITYKSAMDDPSRITKSKAAGALFGLTPRKYQSGEKDITGGITRAGDEMVRTALYEAANVLLSRITRFSKLKRWGMDVAKRRGSKRAKVALARKIAVILHRMWVDGTTYRWTAVQPIAAQA

SEQ ID NO: 468020 - protein, 324 aa, unidentified
MGKIVREVKVASEPEALLAVLKNPAYHFKRIGLEAGPLSQWLYSALAGAELPVICVETRHMRAVLKAQINKTDRNDARGIAQMMRAGLYRPVHVKTLRSQKLRMLLTHRKLLQAKAIAVENDLRATLRNFGLKVGVVGTVKFEARIKELVEDVPDLAVLVEPLLVVRRVLREQISVLHRRLLAIVRDDDVCRRLMTVPGVGPVVALTYRVTVDVPVRFRKSKSVGAVFGLTPSRHQSGKSDRPGAISRCGDEMMRSMLYEAAQILLVRSTKWSWLKAWAMKIARHRGMKKAIVALARRLAVIMHRIWVNGTAFRWTQEQAAAAT

SEQ ID NO: 468021 - protein, 355 aa, unidentified
MTSTKYIGLDVHKESISIAVRNAAGKVVMECVIETKASMILQFIDGLRGDLQVTFEEGTSAAWLYDLLKPHVTKLVVCDPRKNKSMREGNQSDKIDARRLAELLRLDHLTPVYHGEHGLRTLKELVRSYLTITKDLARVMSRVKAIYRSWAIPCTGKQVYAARHRAEWLGKINEPGVRRRAEFYYQQLDALRVLRQEARRDLLTESKKQKAWKRLCAIPSIGPIRAAVLLGILQTPHRFRTKRPLWNYGGLAIEMHSSADHRRVHGQLERSTKNVLVRGLNRNCNHDLKNLFKGAAAVASSKPGPFQEFYTALVAKGMRPEMARLTLARKIATIALIVWKRGVNFDAQHLKPQTA

SEQ ID NO: 468022 - protein, 352 aa, unidentified
MKIIGCDFHPSFQQISMLDLETRQRVRKKLEHASGEAEQFYRSLQGEAVKVGIEACGNTGWFEGLLAECGHELVMGNAARIRAMAVRRQKTDERDAEHLLELLESGKFPVVWVPSAENRDLRQLLLHRHKLVQMRTRIKNQLQHLAMNQGLQKKRQLWTVRGRQWLEQLSLPPWSERRRCDLLVLLDGLQARITELSQAVEEQAGQNERAQLLQTHPGVGPITALAFVLVIGEVSRFERSRKLTSYLGLIPSEDSSGKRRRLGAISKQGNTLLRTLLVEAGQSAARCDPELRRAYRRLCHKKQHTGIAKVMVARKLAVRLYWMLKSNQPYAPARMPGIPSHSVNPREGGSTI

SEQ ID NO: 468023 - protein, 487 aa, unidentified
MSVVTGHVCDIGEAAKAAIPFERVSITTYPNRCGIPNEMMEEGMAQRKRTVLELAHPNGAGIDIGSASHFVAVSSDRDDEPVREFKSFTENLEELADWLVCCGVDTVAMESTGVYWIPLYEILEARGFAVNLVNARHVKNVSGRKSDVLDCQWLQQLMSYGLLSGAFRPTDEICMLRAVSRQRDMLLASQGRHIQHMQKALTQMNVQLANVISDIVGETGQKIVRGIIAGERDGHVLAKMKNARIRASEEEIAKSLQGNWREEHLFALKQAMALYDNYGTLLTECDTKLESMLATLVGDNDSDPGRGRRASNSKNAPQFDVRTYLFRLCGVDLTRINGINPTTALKVIAEVGPDMSRFKSAKHFASWLGLCPGTKISGGKILSGASKRTTNRAAQSLRLAAAALHKSQSALGAYFRRLAARLDRAKAITAVAHKLARLIYTMLTKGAEYTDQGQDYYEERYRQRVMHHLAKRAEKLGMQLVPAPQST

SEQ ID NO: 468024 - protein, 416 aa, unidentified
MRLEQLLFQIQEVGMISVGVDVSKGKSTVCILKPYGEIVCSPFEVKHVEKELEDLAGLLNKLDGEIRVVMEATGVYHLPILTFLQEKGYFVSVINPYSMKKYAKDNSLRRAKTDRLDSIMIANYGIDRWFKLQKYEGDENTYAELKLLGRRYRYYMELHVKSLQELTHILDYVMPGIKAMFNSWDEASNKDKLSDFVERYWHYDLITSMSREEFTEDYLAWAKEKKYHQSSAKAEAVYEMASDGIPTLSSDTPSTKMLVQEAIAVLRAVDSSLFRIISRMQELAKTLPEYSTVRSMGGVGDVLAPKLIAEIGDVRRLHNAKALIAWAGIDPPPYESGQFVGSQRRITKRGSSTLRKVGYEVMRVLKSHREPEDNVVYNYILKKEAEGKNKKAAKIAGLNKFLRIYYARVMAVYQQQ

SEQ ID NO: 468025 - protein, 436 aa, unidentified
MKTKRTYKTVDVEKVSLARLLAAIAGTVVVAIDVAKTAMVAGFADAAGKTQELVRFSHPRQTLVFVELLARLREAGRAVEVAMEPTGVYGNSLRFQLRARDFPVFQVDPKRVHDASSFLDGSPSQHDPKACTLIAFLHAQKLSKPWREKSSEERRARILLKEHQMHAAPEMDAYNELEALSAASWPELNELMSHDLRWPLELLSLYPSPSRVRQAPASEVKSLLVTVSRGRLSEETIARVLSSARTTAGERLDAEEEGFISKLCRLILEHRRQLDEVSERMRALVAAQPELSAVAETVGPAATTALFALVGNPSAYESAGALEKACGMTLKERSSGMKRGQLTLTKRGPAKVRQLLYLAALRLVRDEPLARAWYEARTAFKGGIKIKAVVAVMRKLLRAVFHVARGQPFDVGKLFDARRLAPAPQPSLSDTTSSAG

SEQ ID NO: 468026 - protein, 383 aa, unidentified
MDAPDTALRGQNTTVAARLYVAFELGDKSWKLSLGDGRRAPSRCTVVAGDTSAVLTAIANARVRCHLSAEAPVYSCYEAGRDGFWLHRWLAQQGIVNLVVDSASIEVNRRSRRAKTDRLDSDKLLSMLMRYYAGEHRLWAVARIPTPEQEDDRRLHRELERLRQERTAHTNRIRSLLVLHNLRVRYVGGRIWTHWWAQQREQLAPGLRAEIERECERLAVVRKQVSLLEALQDQQVRSGSHPGMALLAQLAGIGTGSAWTLMRELFGWRQFHNRREVAGCLGLTPTPYASGTSQVELGISKAGNKRCRWLMVELAWSWLRFQPSSQLSRWFNQRFADTGKRLRRIGIVALARRLAIALWRYLEHGEIPDGAILKPRDVNMANA

SEQ ID NO: 468027 - protein, 316 aa, unidentified
MSSNVKYIGLDVHKEAISIAVRNGAGKLAMESIIETKAATVVQFLQGLRGELPVTLEEGTWAAWLYDVLQPHVQEIVVCNPRRNALLKEGSKSDRVDASKLSELLRAGLLRPVYHGENGLRTLRELARSYQTFSKDLRRVMNRLKALYRSWGIPCAGTQVYSPRYREEWLNRIREAGVRRRAELFYQHLEGLQVLRRQVRGEFLAESRKHKAVKVLSQIPCIGPIRAALLLALMQTPHRFRSKRQLWSYSGLGVETHDSAQHRYVEGQLQTFQKATASSWSESKSQPCDEGDLQKYGHERQSLCWTVAGLLRRFSG

SEQ ID NO: 468028 - protein, 412 aa, unidentified
MERIYERCCGLDVHKATVVACLRMPGERGQRRIEVRTFGTTTPELLAFGDWLTEHRCTHVAMESTGVYWKPVFNLLESVCEVLLVNARHIKMVPGRKTDVRDCEWIAELLELGLLKSSFIPPEPIRDLRDVTRYRKTLIHQRAAEANRVQKLLELANIKLGNVATDVLGASGRAMLDALMAGERDGERLARLAKGKLKRKRAALGPALTGRFTEHHAFLLGQLLTHIDELGEHIDRCDRKVDEYLRPFANEAELLQTIPGVGRRTAEVIIAEVGVEMDRFPSAAHLASWAGLCPGNNESAGKRKSGKTRKGNQWLRRALVEAAWSATRSRDTYLSSLYSRVARRRGAKKAAVAVAHSTLVAVWHILRNHVPYQDLGPSHFDKLNTERLTRHYLRRLEDLGLKVTVQPLGEAA

SEQ ID NO: 468029 - protein, 383 aa, unidentified
MNDLIRIGVDTSKSVFQLHGVNAAEQPVLRKKLRRRQFIEFFQKLPATRVGIEACGAAHHWGRELSALGHEVVLLPPQRVKPYVERNKNDAADAEAICEAMSRPRMSFVPVKTAEQQAALMLVGVRDQLVGRRTQLSNAIRGYAAEFGLVAAKGTDKIEPLLVRIASDENLPPLAKDLFGTLGNEYVRLKPELRKIEARLMAWHRGNELSRRLAEIPSVGPIGATLSVMKVGNPHAFRSGRDFSAWLGMTPKDHSTAGKVRLGAITKAGDEALRSVLVAGATSVIQQVRKGRGRPSPWLVALVKRKPPKLAAVALANKTARIIWKLMVSGERYNPQRARQRFVPPTDSLAPGTRRQGQAACGGDLRSALTAPALRAPSAPPSA

SEQ ID NO: 468030 - protein, 339 aa, unidentified
MKVSTLGIDLAKNVFQLHGVGCNGQTVLKKKLTRDKFLPFLMQLEPCLIGMEACASSHHFARVLRQYGHEVKLIPPQYVKPYVKTNKTDAADAEAICEAVARPNMRFVQIKTAEQQAILVLHTERNILIRERTACANSMRAILAEFGIIMPRTLSQLYKKIPEILEEYDNELSPFVRCSVARQLEHLQGVEDQITFIEQELSRWAKTQPACQRVMKVPGVGLMTATYLVASVGNGQQFHSAKQFAAWLGLVPREFSSGGKQRLGRISKRGDRYFRYLLVHGARAVAAVIERHKDNMPWLYRLLNKKAYNVAVVAQANKTARILWSMLVHHTEYRTLSVV

SEQ ID NO: 468031 - protein, 346 aa, unidentified
MEHYAGLDVSLKEISICVVDHDGKPIARGTCPADPEGVAGWFRNRSLTPRRIVHESGMLSIWLQRGMTRLGLPTTCIDARKAHKSLSARLNKSDATDAEGLAQLARTNWFTPVHIRSEEADRLRSLIGARERLIRLRKDLEGHIRGVLKTFGIRMIGIGQGRQRQAFRDQLAAAGETDPILRTIADGFIAAHSTLCQAADDLDKAVKRKAKAHPVARRLMTIPGVGPVNALSFIALVDDPNRFSRSSDVGAFLGLTPKRHQSGEMDWSGRVSKCGDGTMRGLLFEAASCLIRQVKRFSPLKSWAVRLAGRRGFRKAAGATARKIAVLMLTIWKSGADYQWTKEATA

SEQ ID NO: 468032 - protein, 306 aa, unidentified
MTIGVDVSQATLVWCTLETHPADLPNTPAAIRTWLASLPAETTVAMEATGRYHRALADLAYAHGCRVLVLNPCDVHHFAKSRAPRATNDPVMARVIAQYAATPPHLLPYAPAPAFVESVRSLMRLRAGLVQQQVRLRHQLRAAPDLAESVAPLRTALRRTIQQVTQQLTAYVRTEATFARLLAIPGVGELSAAYLRSLLATHAFATSDAFVAFLGLDLRIKDSGKLKGTRALTKRGDPEARRLLYLCARSAVRQPGPFRTLYEREKAKGLGSIAAAVVVARKLARIAWSLDAHAANYDPARVLTQG

SEQ ID NO: 468033 - protein, 338 aa, unidentified
MIAVGVDTHKEKHLAVALDELGQLLAETAITADLAGYRRFAGWLAGFDGQVLVGIEGAGSYGAGLCEYLQAEEIEVFEVERPRRRERRTGKSDRLDALTAAKKVLAREGLSTPRGSGTRLALQMLLVAYRSIVGERSRLYNQLQALHVGAPGALRERIGPARNGAKLAERLTGMRTRPTASLQENTTLHVLRDIANRTRTLDAQADSYTREIDALVRSLSPKLLDEPGVGPICAGKLLAFNPARFTSEAAFARANGTAPQPASSGKTVRHRLSRGGDRQINAAIYTIALSRSVHHAQSRAYIKRRIDEGKTKREAMRSLKRHLSRYLYNQLAKTPLTT

SEQ ID NO: 468034 - protein, 450 aa, unidentified
MGCRYAGIDWATEKHDVRVADETGEKLLAATFAHDEAGLLALCRTLVKMEVDLVAIERPEGVLVERLLDAGVKVLALHPNKVAAARDRFRVSGGKSDRFDAFVLCELARTDNHRFRVLEPDSDQTKALRALTRAREDLVHTRTAVVNQLRAELDRCWPGPLRLFSHMDSEILLAFLERYPSPVDAQGLGIVRMQAFLKRECYSGRQKPEALLAKLRSAPEGRVGELELAARRQLVLTYVAMVRTLNGQIKGLERDIRTAVRAHPDGRLFLSLFKQAHSVITAAELLAEIGDCRARYPNRDALAADAGQSAVAKESGKRKTAQFRWGCNKRLRVAFSRLADSTRHWHPWAQAVYAQARDRGLEHPRAIRTLGRAWCRIVWQCWRSRTAYDPTKHRSLQRHITVTIPSPSGPITDLAATTRMAADLSPAPSALEPSAQHLTTGLHPIIHNGS

SEQ ID NO: 468035 - protein, 346 aa, unidentified
MNYYAGIDVSLEQSSVCVRDGDGKIVREAKVASEPEALIAWFASLGLVMERIGLEAGPLSQWLYAAMEEASLAVELLETRHVRTAFKTMPVKTDRKDARGIAELMRMGWFRPVHCKSIPAQETRAILSTRRLIESKLRDIEMSLRGVLRGFGLKVGKTTPTNFADRIRELVSGHSTLEVIAASLLAVREVLLREFRAYEKRVRTTARHSEDARLLMTTTGVGAVISLTYSSAMDDPERFKRSKQVGAHYGITPKRYQSGDTDYTGRISKIGDKSVRTALYQAAHIILTRPVKPSALKTWAMQLAKRIGMAKAKVALARKLAVIMHRMLVDRKPFDHKLLANQPAAA

SEQ ID NO: 468036 - protein, 371 aa, unidentified
MKSILSVGMDVHKNSFSLCACDGYTGEIVSESTFASDVKLVIKFIEKLKSRYENDVEIKCGYEAGCLGYSLYKSLTSRGVDCVILAPTTMQVSAKNKMVKNDRMDALNIAKNLASGSYKAVYVPDEEDVEIKEYIRMIHDFKKELKRVKQEIYAFVLRHGYQYDGKSKWTIRYMNWIRELEMSEIQRETLDEYLAEMDNLNDKIERFMNRIDEMYQSDRYNEKVSELRCFKGIDTFAAMTIQVETADFERFPNAKAYASYTGLTTGEHSSGDKNNRIGITKQGNTVIRKTLVECAQSLVKGNVYTPKSKRPKSRQKGMDVNIIAYADKATERLKKKYQKLIERNVPRNKAIVAVARELACFIWGMETGNIH

SEQ ID NO: 468037 - protein, 342 aa, unidentified
MKEVSIVGLDLAKRVFQVHAARSDGSVVLRRKLSRGQVVTFFTELPKCIVAMEACATAHYWAREIGKLGHDVRLIPPAYVKPFVKRQKNDAADAEAIVEAATRPSMRFVVPKSESQQACSMLFRTRDLFVRQRTQLINALRAHLAEHGVIAPQGIASLALLAEIVEDHDTGLDLIVVETARLYLEQIGVLSSRIASLEKALRSEAKRSQSTARLMSMPGMGPITAMAVEAFAPTMVTFRRGRDFAAWLGLVPKQHSSGGKQVLGRTSKMGQRDIRRLLIIGAMTVIRWACRKAPPEHSWLARMLARKPRMLVAIALANKMARSVWAMMTKNEDYKDSALAAA

SEQ ID NO: 468038 - protein, 322 aa, unidentified
MKMLSFCGIDVSKDRLDVMVLPDEYSSSVPNDPAGWAILVEQLRGFSITAIGIEASGGYERGAVRSLQAAGMPVRQVNPFKLRQFAKASGVLAKNDPLDARMIASFVGIMPTRPAQRTTPAAEQLVEMLAVRRQLSAEKTAAENASRLLEDLMLQRLSRRRIARLAADIELLDKRLVEIVATDATLAHRYRLLTSMPGVGPVLACTLIALLPELGGMSRKQVAALVGVAPYAFESGTLKGRRCIWGGRANVRQVLYMAAMSASNWNPVLKLFHDRLKGAGKLPKVVIVAVMRKMITTLNAMVRDDIAWADRLSGRHSVTTAR

SEQ ID NO: 468039 - protein, 344 aa, unidentified
MDHFAGLDVSVKETSICIVDDAGKIVREVKVASEPEALLAVLKNPAYHFKRIGLEAGPLSQWLFGALAEAELPVVCVETRHMQAVLKAQINKTDRNDARGIAQMMRVGIYRPVHVKTLRSQKLRMLLTHRKLLQSKAIAIENDLRGTLRNFGLKVGTVGKVRFEARIKELVENLPDLAVLVEPLLLVRRTLREQIIILHRRLLAIVRDDDVCRRLMTTPGVGPVVALTYRATVDVPARFRKSKAVGAVFGLTCAKYQSGEIDRNGRISRCGDEMMRVMLYEAAQAMLRSKKWSWLKAWAMQIARRRGMKKAIVALARRLAVIMHRIWVDGTEFRWTREQAAAAA

SEQ ID NO: 468040 - protein, 342 aa, unidentified
MEYCGIDLHTEYSQICILDEDGEVMETSRIRTSRPGLTRFFGSREPMRVVLEAGGSSPWVSRLLESLDHEVVVCSPRRVRLIAESKLKNDRVDAEVLARLVRLDPEFLRPIQHRSEEAQLLRANLKVRSAMVEARTKWINTVRGLLRSFGYKVAGKAPHTFVDRVNRMKLPDELRAVIEPMLEQLDLLSGEIKRRNEHLEEMVKDLPEVDHLREIPGIGPVVATYFVLTIDDPHRFRNSRDVASFFGLRPSMRESASVSHFGRITKEGDPEMRRLLVQAAHACLLTKADSELKTWALALAERKGKGKAAVALARKLAVLMHRLWVTGEVYQAFPKEETSEAA

SEQ ID NO: 468041 - protein, 403 aa, unidentified
MSPEHSIDIFLGLDVGKSEHHACALDRDGNKVFDKPLPQLESELAGVFHQLQKLGTVLVIVDQPNTIGALPIAVARDCGCEVGYLPGLAMRKAADLYPGRAKTDKRDAFIIADTARTMPHTLRAVDRNDEVLSVLKMLSGFDDDIARDCTRTVNRLRSVLTQIYPSLERVFAGSTLTRTPILELLIHYKGPQGLKRAGYQRVLNWMIKRTRKDPTPLVDDIFTALKAQTVTVPGSDAAELVIPQLAANIQALKEQRNTIAEQVEEMLADFPLCEVLMSMPGVGIKTAAQILLAIGDGSDFASAGHLAAYAGIAPVTRRSGSSIRGEFPARSGNKRLKNALFYSAFAVIRSHEPSRRYYERKRAEGKRHNAAVICLARRRCNVIYAMLKNKEFFREIPPRPVAA

SEQ ID NO: 468042 - protein, 360 aa, unidentified
MEPEGKTSRITGGVDTHKDTHTAAALDATGRVLGNATFPASAVGYEELLAWLRRFGPLDRVGVEGTGSYGAGLMRYLRESEVPVIDVNRPNRQARRQHGKSDPADAEAAARATLSGDASGVPKSQDGTVEVIRMLRLERRSAIHARTQAANQLHAVVSTAPEPLRTKLRALSLAALLDHARKCRDVLPTDTVSATQRVLRGLTARWQHLDREVNQLDAQLAALVKTAAPDLVALRGVGIDVAGALLVAAGDNPERLAHEASFAALCGVSPVDASSGRQRRHRLNRGGNRDANRALWVVALVRMQRDPRTRAYVLRRTGQGLGKREILRCLKRYIAREVFKLLRAPSVVAGDGETRLEHVA

SEQ ID NO: 468043 - protein, 355 aa, unidentified
MSQEKYIGMDVHQATICAAVVDAQGKVLMECVLETKASTIIEFVQGLQGTLSLTFEEGTWAAWLHDLLKAHVSRLVVCDPRKAALLKEGNKSDRIDARKLAEMLRTNQLRPVYHGEHGFGTLKELGRCYLTLSKDVTRTMNRIKSLYRSWAIPCQGSSVYAPRQRAEWLAKIVEPGVRMRAEYLYQQLDGLQPLRLQARRELLRESHQHAAVERLRQIPSIGPIRAALLVALLQTPHRFRSKRQLWAYSGFAVESHDSGEYRWVRGKLQRNRERITVRGLNDNHNRDLKNLFKGAAISASTRPGPLQDFYLARVAQGIRPTMARLTLARKIATITLTMWKKGASFDPEQLRRQAV

SEQ ID NO: 468044 - protein, 400 aa, unidentified
MISVGIDVSKGKSTVCILKPYGEIVSKPFNITHTQKDLSELSSMLFRLNDEVKIVMEATGIYHLPVLTYLQEKGFFVSVINPYLMKSYRNESLRKAKTDKIDSRIIANYGIDHWFKMKEFQTSGEIYEELKLLGQQYRHYMKLHLLSLAELTHLLDLTMPGIKNLLASWNETNRKDKRSDFVERFWHYDVITSMSEQEFTEEYILWAKEKKYVPSQEKAKVIYTLAQESIPTLPSETSSFKMLVTEAVRVLKEVDATLGLILSRMQEIAKTLPEYSVVREMGGVGNTLAPKLIAEIGDVRRFRNGKALVAFAGIDPPPYESGQFVGCNRKISKRGSASLRKVGYETMRSLKMRSRPEDPVYRYVVKKESEGKSKKSAKIAGLNKFLRIYYARVTELYKNI

SEQ ID NO: 468045 - protein, 320 aa, unidentified
MATQRTKNHIGIDVSKAELEVAVHDRDYDFCCANNPNAFPGLITELLAWRPALIVLEATGGLEKPLVNALHAARLPVVVINPRQVRDFAKALGLLAKTDRLDAQVLARYAAVIKPPLRPIKSADEQELDALTGRRGQLVEILAGEKNRLKSATSPTVREEIKAHIEWLEGRIAALDKQLKTFLKKSATWQRRDDIFQSVPGIGPVVSLSLLAELPELGSLNRHQISKLVGVAPLNRDSGKHRGTRHIFGGRASVRSMLYMATFNAIRSNPVIKAFYQQLRARNKLYKVAITACMRKLLTILNVMVRDNSTWKLNVRSLSV

SEQ ID NO: 468046 - protein, 424 aa, unidentified
MLEEDQRAEETVARVAACDIGKAELVCCVRVPHPQHPDRRLQEVVTYSTMTRSLLVMADRLAELGVSKVVMEATSDYWKPVYYLLEAYGHGLSPELVNARDVKHLPGRPKTDRLDAVWLCKVAERGMIRPSFVPPPEIRRLRDVTRYRADLVEARTAEKQRVEKLLEDAQIKLSVTVSDIFGTSGRDMLAALIAGQRDPRVLAGLARTRMRGKLAELEEAFTGYFTDHHAALLTKMLARVDGLSADIADLEATIEQMIAPFAAIVAKLDEVPGIGRVAAATILAEVGPDMSRFPTPAHLCAWARFAPGTKESAGKKVGQGTTGHGNRYLAKIIGEAAVGAGRTNTFLGERYRRLARRRGRKKALVAVGRSILVIIWHLLADPDAHFIDLGPDFHVRRNDPERRKRAHIQQLEALGYTVTLSPAA

SEQ ID NO: 468047 - protein, 347 aa, unidentified
MTLYIGVDFHPHQQTVSYCRSDEGEVHQASLVHNVEQVRRFYGQLPKAVVGIEASCTAQWFEQLLIELGHELRVGNPTEIRARARSRHKSDKRDADLLLDLLLKDEFPALWRRSMQGQSVLEQLRFRHALVKHRTQICNRLQALAHAAGLPKKGIQTKRARLALMEANFTETQSFQRDHLFELLNDLTERIKEVEQWLESKAEGDAKVQLLLTHKGIGLLSALAVVHTLGDINRFSSSKEAVAYTGLDPLEKSSAGKVRYGSISKAGSSVLRHLLGQAMHVAARYDGQLKTFYQRLASRRTKSIAKVAATRKLLIRLFIMLRDEIDYAEFKRRGSTVGMPGMFHGLQ

SEQ ID NO: 468048 - protein, 409 aa, unidentified
MEVIYPRCCGVDVHKREVVACVVSTGPDGTPSKTIRAFGTMTPDILALADWLATHEVSHVAMESTGVYWKPIWNLLEDQFALLLVNARHVKAVPGRKTDIRDCEWLAELLRHGLLTGSFVPDRPQRELRELTRYRTSLVRERTAAANRLQKTLEGANIKLASVATDILGKSGREILAALVAGETDGAVLAQFAQGRLREKIPQLERALVGCVGPHQRFLVAEQVAHINFLDEAIARVTAEIAERVRPDEDAVARLDTIPGVGRSVAEALVAEIGADLTRFPGPKHLASWAGLCPGNHESAGKRRGGATRKGSPWLRACLVQAAHAAARTKGTYLAAQYRRLAARRGRAKAAVAVAHSILIIAYHVLMKGTVYCDLGGNYFDERDRQAVERRLVHRLEGLGYTVSLTPAA

SEQ ID NO: 468049 - protein, 372 aa, unidentified
MNEASMATVFVGLDVHKKTIAVATVEARASADVRFYGTIANTPLAIRSLLKKLGKGGQRLHLAYEAGPMGYTLYRMSTGLGHRCDVVAPSLIPRRVGDKVKTDRRDAMTLAQTLRAGQLTEVWVPDEAHEAMRDLVRMRALAMKDQRKARQQLHSFLLRHGRSFFGKHWTKMHRRWLGELQFSQPAQHLVLEELLARIERAEELCGRLKQAIVDLVPQWTLAPVVAAVQALRGVSILVAATVVAEVGNFSRFQNPRQLMAYLGLNPSEHSSGATIKRGPITKTGNSLARTCLVEAAWTYRHPARVTQIIRERMKGLPEPIRAIAWKAQVRLAGRYRKLTASGKAPPKAIVAVARELVGFIWAIARLVEPKVA

SEQ ID NO: 468050 - protein, 536 aa, unidentified
MGKRRRKGRGKGTKCRKKIDNSLRKRVREIGGDKFGVLVVDSSKKNGEFWFTDFYGEPMWNESRTFPITRGHLDQMVNVVGGTCREHGLKDLVVGIEQTGRYHRPIKRALEKLWEVKTIHPFVTKQLRQPASPGVKTDGIDLEAMTRAIICGYGDTPQPFPSIYVKWQLINRAREDSVDRRKRLKQQCQERLHAFMPGYPALFKDIWKDRAPLAIAELYGSAKRLLATDVESIRERLRGKGMRIMRPTINRVLAWAADAPSPDPGGALNRRIWSDNLRLLEHLGRDITRYERQLAGYLVQTPFVLLLSIPGINVVSASGYGSEAGPITNYLKPSHINGRAGIFPSRYQSDETDCADGPMVGGRNARLRDAVMEITMNLILHNDYFQGWSDLRKNRGWSKKKIHVAIANRFNRIAFHIVAGQTLFDHPCLKKRHPLLKKVAGFALSHGIKPETVMSLVAKAARQLPADAVAGELSALQDGLADLRKSDGIPASVLKEVVPLIPALVDQINHEYKNQGDGDEEAIKETPYCVKVEKLA

SEQ ID NO: 468051 - protein, 404 aa, unidentified
MWYVGLDWADTHHDVEVLDEAGKRVGARRFAHSHEGLNELKQFLLSIAASPENLACIVETNHGLLITFLLEAGIPVYPVNPKTANQLRKAAGAKTDQIDAHLLAKIGRLDLAELRRLEPDSPTVAELKTLTRDQDALIQTQTRLVNQLTACLKEYYPAALHLFAKLQQRSALVFLQAYPTPQAAQAATLEEITATLRAGKHTNPTRAAPKIFEEVHRPQLVAKEVIVRAKQRLMLSLVKQLLVVIADIATYDKEISPLFLTHKDQEIWSSLPRAGKRLAPRLLAEWGDDRARYADATSVQSLAGTAPVPFQSGNYAKAHKRFACLKPLRNALHQFAWQSTRQEAWALDYYRRKRAEGKSHSMAIRALANIWVRIIYRMWQNKTCYLAATFEVAKLAHAPRQHVA

SEQ ID NO: 468052 - protein, 399 aa, unidentified
MLTSQSLQLRVGVDVGTQSHSVAVGLTDGSLLDEFEIPHTAAGFEDFFARIERHAKHYPDPIAVAMEGYNGHARPLDSLVKVRGWRLFNVNNLKLARFKEIFPAAAKSDRIDSTKTLELFQLRDHLPMARDVLQEVMATPAENDILKRLSRRRRRLVNERTRVINSLHADLQAVAPGLLQITRYVGNLWFLSFLTCRKDIRKLARLRRTSLLKLPAIGATYADRIQAWQQSAYFGPDACLVGDMIRQDAERILELNRQIKALEDEMARVAATSAIACQLASIPGCGSVCSAELAGEIGTIARFQSEASLALYLGMATLDNSSGKFRGSKAPKHVNARAKAAMMAAVDHHRKRVPQSQRYYERKRAEGKKHNQAIRALGRHLCRVIFKMLSQERLYRIDP

SEQ ID NO: 468053 - protein, 418 aa, unidentified
MFKILKNNCCGLDVHKTWIYACIGITDSNKRTEYKQARFSSFTKVLNELCDWLAKYNCNDVCMESTGKYWIPVFNILEKNNIWVTLSHPKYTKPQKGNKTDRKDAKWICDLYMCGMVKPSFIPPADIRELRALVRYRFKLTCMITSEKNRAHNCLTVSNLKLDDVFSDVFGKSSRSITEQILQHPGETFDVAPFVDGRCKTPIEEIQAAVDGAISKEQAVKLRQCLNHIDELEMHKAEIEREIFRLSDKYESVLNLIRTVPGFDKNPLTAIQVLSEIGGDMSVFPTAKNLVSWAGCCPRNDQSNHKIKSTRISRAGSYFKPVLVQVANALIKSKKHPEFTTRYRRIKARRGHKKAIIAICRIILTAIWHILTDLKPYTPEGFLESRPVNEAKILTTSQALNLMKQRGYIIKDDVVPVT

SEQ ID NO: 468054 - protein, 367 aa, unidentified
MKEQENKRNKITIGLDLGDRRHRFCVLGEKGEVLEEGSVGNNRAALSELGGRYPEALVVMEAGCHSPWVSRHLEQAGCEVVVSNPRKTRAIYQHERKSDRRDALMLARIARMEPALLYPVRHGSEEAQQDLLRIKLRDSLVRARVALINSLRFTLKSLGYSIANPSTERFHKVIQSALPQSVAQVIAPSVQALEELTLRIKLLEREISDQARSKYPDTAWLEQIPGVGPITALYFVLKIEDPARFKRARDVGAFLGLCPRRDQSGENDPQLRISKRGDAYLRRLLVSSAQYILGPFAPPSALRQYGLALASGATARAKKRAVVAVARKLAVLLLTLWKNKSSYQAFPQRSSREKMRTNDLERLRCIA

SEQ ID NO: 468055 - protein, 332 aa, unidentified
MTSSIIHIGLDISKRFLDLDLPNSSASLPYDPKGCKTLIARLRALKASVQVICEATGGWEHQIVAALHEANIPVSVVNPRQVRDYARSMGKLAKTDKIDKQILTAFGKVVLPRPTPPPTALQAEISAWVTRRQQLRGMLAAEQCRMMPGLPKAVAKSITASIAQLTKELEAITAQLAKLIEEDAQLAAGKERLCCFQGVGFVTAAVILGHLPELGKVDNNQIAALAGLAPFNNDSGPRRGLRHISGGRHSVRSAIYMAAFNASRCNPVLKPFYDRLRAKGKAFKVAIIAVARKLLIALNTAFANPRFTPLITTPECSPRTPAAASGAGFGGA

SEQ ID NO: 468056 - protein, 338 aa, unidentified
MNFYTRQHKHYCGIDLHAKAMYVCILDQAGTILVHKNLPTTPEAFLRVLAPYREDVVVGVECMFTWYWLADLCSKEGIAFVLGHALYMKAIHGGKAKNDKIDAHKIAVLLRGGMVPQAYVYPAEMRATRDLLRRRCHLVRKRAELLAHIHNTNSQYNLPEIGKKLAYKANRDGVEEHFPDPSVRKSIEVDVSLIDHYDKLLGEVELYITRSAKAHDVQTFARLQSVPGIGQILALVILYELQDIARFPRVQDFVSYCRLVKCAKESGGKRLGTSGKKIGNVHLRWAFAEAAVLFLRHNQPGKEYFTKLEHKHGKATALTVLAHKLARAVYYIHAGTRL

SEQ ID NO: 468057 - protein, 369 aa, unidentified
MADSSTTRFVGLDVHKETIAIAVADGSLPAKVLSTIPHDLATLLKTLRRLGPPESIVCCYEAGPTGYGLYRQLKAAGYTCHVVAPSMVPVQSGCRIKTDRRDAAKLAHYLRSGDLTSIYVPDEITEAIRGLERARDDAKIAERVARHHLSKFLLRHGRIYPGKTTWNPAHMAWIVKQDFEQLADRHVLADYREAVELAGARVGRLTLRMSEAVETWEQAPLAKAFQALRGVDMVSAVTLVAEVGDFRRFASAGELMAFVGLVPSEHSSGGSRRQGRITRTGNGHVRRIVVESAWHYRRQPRMSKAIQRRNDLVSPGVRGIAWKAQKRLHERLGRLLGRNKPACQAVVAVARELVGFVWAISREEVLLAG

SEQ ID NO: 468058 - protein, 496 aa, unidentified
MTQETIIPVEKRLTQLEGHYTDQVMAFRQRLAHIGPEQVLIVLLDVGKNIHWASASTAAGVELVRPHRLPTSQQGLSDFMGQVDHFVREQQPQLVLLGHEPSGVYHETWARALMERYAPHLNGQAKPAFEYKFFNPYQVKLARQQTHLRHRKTDPRDLAAMLDLALRGLGYPAFLATDTELLIRQEVNFIRAQTRLLLRLEQQLRQQLDRLWPGAVVNLKQFQRAHPGMPLPTPLIQTDPFQRERLRVLLAHCPNPYQLKAMSDDQILALYRQHVGRAGPVLLNTLHTWADNAVLPPPDVAAPLAEQLHRLFQQYIHTETLIEEGRGHLIPLVPKTSARHIVPIPGLGEYDAACYMAGVGSIQRFRRAAEVWSFVGYDPIQDGSGDRPDRVGHISKHGDPPFRDSLFQMGFRTALHYAPLTLTFLEAFDRGLSEIEATIHAAHRINRICFHLMLYDEPFENRSTPQLEAEMARRWKLFKAAKKHRKSRRKRGRRRP

SEQ ID NO: 468059 - protein, 320 aa, unidentified
MRNTVGLDISKLTFDATAIVGNAEYSAKFDNDSKGLNQFSDRLKSLGCQNLHICMEATGNYYEEVADYFAQYYSVYVVNPLKISKYAESRFKRTKTDKQDAKLIAQYCRLAKESELVKRQKPTDEQYRLSRMTAAYAQIKSECAAMKNRHHAAKDEEAAKAYAQIIKAMNEQLEVLKEKIKEQTEKPNCKEGVKRLETIPAIGRMTAAVLFHHLTSSKFETSNKFAAFAGLSPQQKESGTSVRGKGKLTKFGNRKLRAVLFMPAMVAYRIRAFPGFIARLEEKKKPKKVIIAALMRKLAVIAYHVHKKGGDYDPSRYKSA

SEQ ID NO: 468060 - protein, 385 aa, unidentified
MANQNDLSRSVVAFEQHNTIIAVIEMSLNSWLVAGIVPGIERHPLKKLSINEEVLLKLLHRWRDEAVKAGHTISRIVVAFEAGRDGFWLARWLRARDIEAYVIHPTSVAVSREHRRAKTDRLDTELLKRAFLGWLRGEPDHCNMVAIPSLQEEDAKRPTRERENLVGERTRIINRMKACLVRFGIRNFNPTLRTAPERLNALCTPEGVSLPPNTLAELRRDLARLRFVMDQINEIEVARLQRLERAPTAEPHAMVRLLARVIGVGIETADMLVHEILSRKLRDRRAVARYAGLTGAPDESGSKRREKGLAKAGNARVRRGMIQLAWRFLLFQKDSALSQWYRTRTESAGKKRKTMIVALARKLLIALWRLVTTGEVPAGVVLRAA

SEQ ID NO: 468061 - protein, 431 aa, unidentified
MEQKRHPYLSVGIDIGADFSLMAIALPTQEIMGKPYKILHSNNRSVQGAVERILSMGQAYELPVRIYMESTGIYHLPLYHRLKNAGLDVYVLNPLVTHANQNINIRNIHNDKLDARRIALLGLRPDLKTSIVPADDVAAVKALLREYHAMKKETSMYICRLKNQLRQIFPQYLPLFSKVNGKASLEVLSHYPSPSAVLSAGADALAKLIQEASGKGRTMAEKKAEAILSAARESLSFGHGNSGITFLIGHYVEMIRILDEKTAAILKQIKRSVQEQPDSLLARQTRLLESIPGAGFLTAVTIVCEIGDFRAFRRPKQLYSYFGLDPVVRQSGNSAGANLRISKRGSPYARRCFYILALQSVSLRKNGEPKNHVLRTYYLEKCKSKAKMTALGAIMHKLCNIVFAVLRDERPFVLISPQEHRQNYLSLPKAA

SEQ ID NO: 468062 - protein, 355 aa, unidentified
MSQEKYIGMDVHQATISVAVRDVQGKLIMESLLETKATTILEFVQGLRGTLALTFEEGTSAAWLHDLLKPHVSRLVVCDPRKNALLKDGNKNDRVDARKLAELLRTNQVKSVYHGEHGTRALKELGRSYLTLTQDTTRVMNRIKSVYRSWALPCAGTSVYTRRHRAEWLAKLVEPGVRIRAEHLYQQLDSLEPVRQEARRQLLLESKKHAAVKLLRQIPSIGPIRAALLVALLQTPHRFRSKRQLWAYCGFAVEVHDSGEYRWVRGKLQRNRERITVRGLNDNHNSDLKNLFKGAAISASTRPGPLQDFYLARVAKGMRPTMARLTLARKIAAITLTMWKKGANFDSQQLQRQAA

SEQ ID NO: 468063 - protein, 368 aa, unidentified
MGDGVDAPRRHPVCQGDGVELPPKEASMGQATTIGLDIAKHVFQLHGADAAGHVLFRKRITRVKLLGFLAAQTRCVVAMEACAGAHYWAREIAKLGHHVRLIAPAYVKPFIKRQKNDAADAEAICEAAQRPSVRFVPVKTEEQQANGIVFRARDLLVRQRTQCVNALRGHLMEYGYVFPKGITHVETLIALVEDLQSSLPDSVRVILKLLIDTFTALEAQIAVLDAEINQRSKSDPTARRLMTIPGVGPIASTAITALVPAAEGFPAGRDFAAWLGLTPLQKSTGGRQKLGAVSKRGERTIRRLLIIGASAVVQQASRRGAPKGSWLAQMLARKPKMLVTVALANKTARIIWALLVKGGTYRTPAAAA

SEQ ID NO: 468064 - protein, 370 aa, unidentified
MVVNMNVVVGVDAHKLSHTLVAVDPAGLKLAQKTVATTSAAHAEALRWAAAQFGSDILWAVEDCRTMTSRLEDDLLAAGQRVVRVPPHLMSRTRSSARERGKSDPIDALAVARTVLSEPNLPVAVHDPISMELRLLVDRRDDLVSECTATINRLMGRIHLLDPGHPTPRNWKVQKAHRELHDWLITQDGLVAELARDELDDIIRISAVILDLRRRIERTVRPVAPALIALQGCGELTAARIIAEVANVDRFRSEAAFARYAGLAPVPHTSGSSTVRLRPTRQGNRRLNAALHRIAITQTIHDGPGRTYYQRRIAEGDSRHRALRSLKRRLARVVFNRLKPCPPAAEDHSRNGRTLPSVFLLPLVDFHAVP

SEQ ID NO: 468065 - protein, 369 aa, unidentified
MKKIIKSIGLDVHKNSISIGIADEGRDGEVRYYGKIDNDMNQLDNVIRKLISKGAELRFVYEAGPCGYAIYRYLTKNAMDCVVIAPSKIPQQSGNRIKNDKRDCLTLARLHRAGELTPVYVPTEEDEALRDLVRAREDATRAVRTAKQQLGAFLLRHDIVYSGRTKWTTAHFNWLADIAMPHPAQQIVFQEYIDTVTNCCNRVQRLTEQVRFQSRQGRQHKLIEALQSMRGISLIIAATIAAELSDLTRFENPEKLMAFLGLIPSEHSSGDRVSKGSITKTGNGHARKALVAAAHAYRFPARKSRAIRKRQEELPEGVIDISWKAQCRLCTRYQYLTAKGKNVNVTKTAIAREIAGFSWAIAQELSKAA

SEQ ID NO: 468066 - protein, 423 aa, unidentified
MKALSQIRPEEVLPEAMKNPAEVLFIGIDISSKDHVVRAVLGNMNELKDKFIFTSTFDNLIYFCDWVYKIKKRYNAKHVFIGIEPTGQYWLPVYEFIRDNLPEVGIYEVATRAVSWYRKMKNSNSSKTDPRDAYNIAELVATGNCCRPIQHTCLTRNLRETMRLYDEASTRLQQARQQLMAMVQKSFPEALSSVSSPEGIDGIFNILQDSIEPKIITKIPLEQWIKLKSRRGVAHKKLQNLYLMAQHSLGQTDNNEIRNHLWKIQWASWKNAVQRCNDLENILKEIIDAHDATPFLLTIDGVATITIAAFLAGIGDINQYSSVKQVEKVFGLDFFRWQSGKMDCQPHITKRGYSIGRHYMVLAAKRFIKYPEPNEWYNKRPKKNKNGKPGMAGVIALTAKLIRIMFAVAKSKKPYDASLAFKS

SEQ ID NO: 468067 - protein, 429 aa, unidentified
MQNESTPGARGPVFCGVDTHADSHWLCVLDWRGRKVLSRRFPADAAGYEALAGAIAAAGEPACVAMEGTSSYGAGLTRHLASLGMPVREALSPARTQRRRPGQGKCDESDAERAARAAMSGSKLGTPKSQDGWVDGVRCMLAARSGAVKARTSAINTARSLLTTAPEGLRSRFRGMAGPRLMEELPSVRAEGALGAALGALADLWAAARDAALDMERAIEASLEENCPALLAMYGCGPVSAAKLAVAAGDNPGRLRSEASFAAICGACPIPASSGKTVRHRLNRGGDRQANSALHEIARQRVMRDPETAEYAERARARGKSDREVMRCLKRYVAREAYRALMRPHEVRRPEDASGLVAARRAARVSQVRAASILGTSEKYISMLERGQRELKPIRRAYEAWVEAGLPLDWDRQAFEAERKMDSKKHLAK

SEQ ID NO: 468068 - protein, 334 aa, unidentified
MTFELLAIDLGKSSFHLHSIASDGTILSRKVSRSKLAEIVNAIAPKTVAMEACASAHHWGRQFKGDGREVLLINPRFVKPFVRGSKNDAVDAAAIYEAATRPTMRFVPLKSAAQQDLQSLHRIRERLIVQRTSLINHARGLLAEYGIVLPQGPWRFASQAPSAVKDAALSDLGRELFLELLDQLTDVNDRVGRLDRKISEICRERDDCRRLSELPGVGPIIATAIVASVEDGRHFKSGRELAAWIGLVPRQYTTGGKPRLGGIGRRANHYLRRQMIHGARAVISRLASHDDRRSQWLKELVARRGFNRAIVALANKTARVAWALLTRQERYAAQ

SEQ ID NO: 468069 - protein, 339 aa, unidentified
MEVTTVGLDLGKDVFQAHGITSDGTVVFNRTIRRKQLLKFFEKLPSCLVGIEACGSAHHWARELTAIGHDVRLMPAAYVKPYVKRGKTDAVDAEAICEAVTRPTMRFVAVKSKEQQALLSIHRVRQLVVRQKTQMLNVIRGLLREFGHVIGNGPVAAMRFIKAFETEDCLDIPDVAKSMLKTLCDQVVALDDRVTFYDKLIEYHAQIDERAKRIRTVPGVGPITASAIVATIGDGKQFKNGREFAAWLGLTPLNRSSGGKERLGRISKKGDRYLRRLLVIGMTSQVQRARGYPERVHPWIMQLLERKPVRLATIAMANKAARIIWAILTKETYYRQTAA

SEQ ID NO: 468070 - protein, 422 aa, unidentified
MSYCPVAGIDVSKQFSDMCILSPDNKIFAQEKIYHDETSINRANALLQKAERLFFSKPVIVMESTSHYHLILFQFFSEHGYDVIVVNPLQSNSMKDFSIRKRKTDRVDAFKLAMMYRTKTLRPSQIPQTATRALRQLCRHRAELLNDVSSYKNRLTALLDQTFPGYDKVFSDVGGVTSCAVLVRFPTPTILLVEEESELVEVIAVASKSGYSFAKKKAGLLISAAQKAQTLGIHSCADETLIVCTIQMLRTLSESVLQIETAIDNLLAQIKEMRNNVSLLQSIPGVGSHSAALLLGEIGDISLFKKPKQLAAYFGLDPTERQSGSFRGTKNKLSKRGFPYARAALHMGVVNSICKRGKDSAANPVLLSYYEKKCKNKPAKVAQAASMHKLVFIVFAVLRDQMPFELKTPEQHAVEQGFVKAA

SEQ ID NO: 468071 - protein, 425 aa, unidentified
MNKDILSTLFVGIDVSSASNYFCAINFEGKHLLDFSIANNLPSSELAIERIFNTLKQNNLKFVTIVLESTNVFSFHIANLLASNNSLFNFNSKVFVINPKESSNFRKTYSDMDKTDPKDAFVLADMARCGRIKQQPYKASQLFALQRLTRQRFHLVKTIMREKAYMMSNIYLKFSSLYISKKEDEPFSNMFGNTSKSIISDFTPDDIVNMSDEDMINFIMDKGKSRFSNPEENVKLLKKIARDSYRLDKVAYDPINVAISSSFNTIKALEDNLKVIDKAIEKNIKGLCDNEFTILKSIPGIGDVYAAGIISEIGSIEFFKDNNALAKYAGLTWRKTQSGYFESETTRMTKTGNKYLRYYLIEAVSSVKNHSIEFKDFYTRKYNEVSHGAHKRALALSARKLVRLIFGLLHHNQLYSATKLDNRKN

SEQ ID NO: 468072 - protein, 407 aa, unidentified
MQATPTNSAFAGIDWSWQHHALCIVDDVGHRIEEATVPHSRPGLAKITQLLRRHRVTRVGIERGDGPVVEHLLRDGFEVVVISARQVKSLRARYGTAGNKDDRFDAFVLADALRTDAGRWALVRPDSAETVALRMLVRARHDLIDHRIAVHNQLLAVLQHNFPGAIGLFSQLDIPISLAFLRRFPTEAKAAWLSELRMAHWLKANGYCGRHTPTRLVDHLHQAATGRVAGAAAEASEVIVLTLVDLLTTLREEQARLETRIKEALLAHPDGQIFQSLPRAGVVRAATLLAEIGDCRARFPDPAALAAAAGVAPSTRQSGKHLNVTYRRGCNKQLRAALVDWAQDTPRANAWARDTYDRARARGCRHPHAARILAQNWTRILWRCWHDHQPYNPDLHGRLSTLLQEAA

SEQ ID NO: 468073 - protein, 421 aa, unidentified
MSQVIIGMDPRKRSATIEVMAADEAVLGGGRYGADAAGYAAMLAGVRRWPERIWAVEGSRGVGRYLASRLVATGERVVDVPPKLSARTRVFTAGQGRKTDATGAHAVALAATGMKGLRLVSDDTQLAVLRVLAGRRRALGEDHTRMICQLRQLLADLIPGGAKKSLSAAQARALLGRVRPRDRAGQARRRVAAGLIADLERIYQRKKAADKELAAALKETGSTLMTLEGIGPSGAARLLVEAGDITRFPDRGHFASWNGTAPIDASSGDHVRHRLSRAGNRQINRVLHIMAVVQLRHPTTGRAYYDRKVAAGKTPNEAMRALKRRLSDVVFRQMRADARAVRTGPGGHPGAATDSSAAGCNPDAGTSDKSLPGPATSDPTPPSHPIPPVVPADPDTRRPAAGVKRAVLDGGEDRRTLARRE

SEQ ID NO: 468074 - protein, 337 aa, unidentified
MKFCGIDLHSNNSVVVITDETDRILVSRRSPNDLSIIIQLLEPHRIELQGVVVESTYNWYWLVDGLKDAGFNVMLANTVAMKRYDGLKHSDDQDDAAFLAHLLRLGILPTGYVHPPQERALRDLARKRVQLVRSRTQHILAVENIIARQMGSRISSAAVKRLSATSVAALGLPDDVALSIKANVAVIETLNLQIHCLEERLLRGTRLRPEYALLKSMPGVGEVLATVIMLETGSIERFADVGKFASYARCVNSGHYSNGKKKGEGNTKNGNAYLVWAFVEAANFARRFNEEAKRFFDKKKAKTNNVIATKALAHKLARASYHILKEKQPFDAKRCFA

SEQ ID NO: 468075 - protein, 368 aa, unidentified
MKKNTSKTKKRTTTAEAREKFASFVGIDLGDKHCEVCVFNGAGEVQERLRLPMKGKDLEGYFGKLGRSRVALEAGGQSRWVAEVIERCGHEVYVSNVRKVAYISASDDKDDPGDAYKLAELVHFKPQLLHPIQHRSREAQTDLSWIRAREALVESRTQLVNTVRGMSKAFGERLGKCSVEAFPAKRAEQVPEEIRGAVAPLLEMIDQLNEKIAYYDQMEEHIARQRYEKHGLLRQVDGVGVHTALSFMLTIGEAERFEKSRMVGPFLGLRPRKQDSGESRPQLGITKAGDEYLRKTLTNCAHHILGPLGKDSDLRRAGQRICERGGKNAKKRAVIAVARKLAVLLHRLWITGEVYEPLRNSKKKAVAA

SEQ ID NO: 468076 - protein, 339 aa, unidentified
MYYSGIDQHKRDCMITTYDADGRRVKQQRVPNSRDRLRRYFAGFSGPHQAVVESTGFWYWLADLLEEIGVELTLAHATRLKAIAAAKVKTDRLDSDLLAQLLRADLIPAAHRIAREARGPRDLLRLRLRLVGKRVSCLNSIERIREKYHVSRHDQLDPWYQQQVEVYDTQVALIAQQIHDVEATLCPHLIPNPGIQRLLWIPGIGKVNALTIWTEIDGIARFPTESQFLSYCRLVPGADNSGGRVRQRPGSKQGNRYLKLSFGHASIRAIQYFPVVKAFYQKQRRRKPLVVARAIVAAELARIAYQVLTKQEDFNGNFRGVPLQRTKTRQWPRLATPAV

SEQ ID NO: 468077 - protein, 352 aa, unidentified
MEKSNKLDFGGQHIYVGMDVHKKSWSVSIHTEQFEHKTFTQPPEVEKLTYYLERTFPGATYHTVYEAGFSGFWLHDQLRAKGIDCMVVNPADVPTKDKERAGKRDRVDCRKLARGLRNGEIKGIYVPPRVKVEDRTLVRTRQSMVRKQTRCKNQITSILFFYGIVIPEESRWSRRFIHWIESIRMERASGDFALKAHLEELKHLRQIIANLNRAILSLSRTEEYMADVLLLKSVPGISTLTAMILLTELADISRFSTLDKLASYAGLVPDIRSSGETEYDAGITFRRNAVLRALLIESAWVSVRKDPALTMAFNKLSVRMKKTKAIVHIARKLLNRIRFVLKNRQEYVPAVL

SEQ ID NO: 468078 - protein, 340 aa, unidentified
MSEITTIGLDLAKHVFQVHGIDAEGTTVVRKRLRRGQVLAFFSRIPRCLVGLEACATAHYWARELTALGHEVRLMPAQYVKAYIRRNKHDAADAEAICEAVQRPTMRFVPVKTTEQQATQLLHRGREQLVRQRTMLVNALRAHLAEFGMVAAQGLRNVGELIAIVRDDDDTRVPDMARQVLQVLADQIEQIETAVAGLERQLLAWHKTNPVSQRLASIPGIGPIIATAIATTVADPKVFRSGREFAAWLGLVPRQNSTGGKTRLGGITKRGNRYLRRLLINGASANLLRSKATKADPWVIGLRRRRPPLVVAVALANKTARIAWAVMLREKEYQRRAVAA

SEQ ID NO: 468079 - protein, 321 aa, unidentified
MTYVGIDVSKVTFVVAYSSVKTNKTRTFKNTVNGVHEFVQTISASEHNCVLEATGNYSALLVYLLSEAGITISLENPLKIKNFARVMLTVTKTDEIDARLIALYGEKMQPAPYKLRSDAILVLKQKRTVLRQLKKQLVATRNLKGSMEVLPFFDPKCKKTIEKTITFLEKQIKEMEEELASLAQGEYKKQMDLLTSIKGIGVTLAAPLIVATGRFSYFDNAKQLTRYLGLSPTYQQSGTSVNVKGHINRNGDSSLRSQLYVAAFSSLRCNTECKACFDRLRSNGKPGKVVVIAVANKLVRQAFAVVTQGKPYVDGFKSEKP

SEQ ID NO: 468080 - protein, 422 aa, unidentified
MSYCPVAGIDVSKRFSDMCILSPDNKIFAQEKIYHDETSINRANALLQKAERLFFRKPVIVMESTSHYHLILFQFFSEHGYDVIVVNPLQSNSMKDFSIRKRKTDRVDAFKLAMMYRTKTLRPSQIPQTATRALRQLCRHRAELLNDVSSYKNRLTALLDQTFPGYDKVFSDVGGVTSCAVLVRFPTPTILLVEEESELVEVIAAASKSGYSFAKKKAGLLISAAQKAQTLGIHSCADETLIVCTIQMLRTLSESVLQIETAIDNLLAQIKEMRNNVSLLQSIPGIGSHSAALLLGEIGDISLFKKPKQLAAYFGLDPTERQSGSFRGTKNKLSKRGSPYARAALHMGVVNSICKRGKDSAANPVLLSYYEKKCKNKPAKVAQAASMHKLVFIVFAILRDQKPFELKTPEQHAVEQGFVKAA

SEQ ID NO: 468081 - protein, 341 aa, unidentified
MKNKSFIGIDISKNVIDVSIFCEETPIKDFSHDVFDNSRKGFGEMCTWLKKNHVVLSNCLFGMEFTGSYSMELEKFLNARNYQFCMLSTHVVKHYPMGPKDKSDKIDSAKIADFLYRYNDTECVKPYKMPDKTMQRLKTLMNERKFLVEQRTCFMNRRQLCITKEDAQLYDGYIKKFSRDIENIELEEQKLLATDDSLLATYKNLLTIPGIGFVNAINVIVITRNFTAFETARQYASYVGVAPHFRTSGTSVKWRPRPSARCDGQAKADLSMAATVVVQYDAELQSFYNRKLGGKQDSDTKRKALNAVKFKLVLRMFAIGKQNRKWEPLDSKSSNEKLAIS

SEQ ID NO: 468082 - protein, 346 aa, unidentified
MEHYAGIDVSLELSSVCVVDAQGKIVKETKVASEPEALVSFFEALGFAVKQIGLEAGPLSQWLHTGLTPAGFETVLLETRHVKAALSAMTVKTDRKDARGLAQLIRMGWFRPVHAKSMRSQAVRALLVARKQLLGRLIDVELSIRGILRGFGLKVGPVTRKGFEARIRELVTGQVTLERIATAMLSARAALKVEYEKLHKAVLSIVRDDAVCRRLMTVPGVGPLVAVTYKSAMDDPNRIMKSKAAGALFGLTPRKYQSGEKDITGGITRAGDEMVRTALYEAANVLLARITRFSKLKRWGMDVAKRRGSKRAKVALARKIAVILHRMWVDGTTYRWTEAKPIAAQA

SEQ ID NO: 468083 - protein, 417 aa, unidentified
MKERTKVCGIDVHKEFLQVCILSRSGEYSQYRFHHTLDGILALKDLVLTEGCEVVALESTGIYWYRLYLELELDIQVIVANARQIKSIPGRKTDMNDARWIAELALNSLIRPSRIFPRRDREFRDLTRNRETLVRARTTIKNRIHKILDSAGLRLKAALKDIFGKSGRHLLFGIAEEKDLETTLATIPSPRILRRTDQLREVLRDGPLSSLQLHLLKTQLQLLEEIEEKIVHLESLILASLEDSRTEAISICTSVPGVSITAATTILAEVGDVRDFASADRLVSWAGLAPSVYQSADTLICGKITKQGSKHLRWILVQAAQAASRTKDTVFSRFFRRIAYRRGRNKAIVALARKILCILWHLLVNREPYVEPGVKRTRKLPASAAMSKISLDEAVEMLLKAGYRVYSPENRTQPSRG

SEQ ID NO: 468084 - protein, 397 aa, unidentified
MIAVGIDISKAKSTVAVIDSDGTVLASPFTMAHTQPEMEAFVTYLKGLGEPTTILMEYTGHYHYPGLKKLQGEGFPVCIVNPYQMKKYGDVEIHKAKTDKKDALRIAAYALEKSYKLVPYSSMEQKYEDLKFLSRQYSQRITYVAKLKVQLIALLDQTMPGITRILPLNSRNPEKCALLLFIKRFKSFDEIQRIGKARFLASYDVLAKKASERSASSKGLSIYELAVDSITTRGEDPYIWLSQNQCVDLLSATQNAADEIISQMRNIAETIPEYKVLRAMHGVGDRLGPIILAEIGDVHRFHSGKALNSYAGNDAPPYQSGQFESRNRHISKRGSSTLRKACYEVMQALKLIKPQDDPVYLFMLKKEQEGKPFNVAKMAGVNKFLRIYYARAMELYK

SEQ ID NO: 468085 - protein, 386 aa, unidentified
MQTLNDLSRSLIALEPTSTLIAVIEMGLSSWLVAGIVPGIERQPLKKLAVDESALLRLLHRWREEAEKAGCRIERIVVAFEAGRDGFWLARWLKARSIEAHVIHAASVAVSREHRRAKTDRLDAELLKRAFLGWLRGERDHCKVVAIPTLKEEDAKRPSRERQSLVGEQSRIVNRMKAALTRLGIRGFNPKLKRAAGRLDTLRTPEGEPIPPNTLAELRRDMERRRLISNQIRQIEEARLNHFKQASNDGPHAMVRLLARVIGVGIETADMLVHEVLSRNMHDRRAIACYAGLTGSPDESGRKRREKGLARSGNGRVRRGMIQLAWRFLTYQKESALAQWYRTRTENALGARKPMIVALARKLLIDLWRFVRQGVVPDGVVLRPAQ

SEQ ID NO: 468086 - protein, 343 aa, unidentified
MVVIGVDAHKRTHTMVAVDELGRTLGERTVAATSDGHLQAVQWAARWPGARFALEDCRHLTRRLEGDLLRAGFAVVRVHTRLMAAARRGGRQRGKSDPIDALAVAHAALREPDLPVACLDGPARTVKLLSDHRQDLVAERTRLCNRLRWHLHELDPGLDVPSRGLRRYHVLDGLAARLAVMDGVVARIAAGLVARCRELTSQVNALERELGTLVRQLAPALLAIPGCGVLSAAVIIGETATASRFRSRDAYARFTGTAPIPVWSGNTVRVRLNRGGNRAVNCALHMIAVTQARGIGPGKDYIAKQLAAGKTTTEALRLLRRQLSDTVFRALLADEHRQAHRTA

SEQ ID NO: 468087 - protein, 336 aa, unidentified
MNAVREVLGIDVSKSKLDVALLINGKAKSKVVQNTPDGHQLLLEWLGKSKATLPELHVCMEATGVYHEAVATVLHGAGFKVSVVNPACIKGFGHSENIRNKNDEIDAGLIARYCLVMAPDLWTPPPLEQRQLRGWTLRLQALKDIRQQETNRLEAHEVSGLQDVAAHVTEHIVWLDAEIKKLENEIDDHIDRHPTLKNDAQLIASIPGIARTTVARVLGHLGDIRRFKNAKAFAAFLGVTPKQRTSGSSVRGRTMVSKAGNASLRAALFMPSMSARRHNPILRQFAERLLATGMEKRAVIGAVMHKLTHLIYGVIKTGKPFDANYLSNRLAIQDGI

SEQ ID NO: 468088 - protein, 397 aa, unidentified
MNIKGSKKKNQVLSVNIFEQQEIIAKAEAIKAELKASTWHELETKGKFDKNDKLSFVSDDMLILGCDIGSETHYVRAIDTRGRELSKSAFGFSNTAEGFESMLDWSTKLAAANDKKQIVLGLEPTGHYWFCLTTWLVVKGISVVQVNPYAVKQTKEVEDNSQLKDDKKDPKLIANLVKDGNFGMPYLPEKLYADIRRLSMFRDQLNEDRIRNLNRLHREMKIYFPEYKDAFGKIDGAFSLELLKAAPFPDELAALGTEGMKQIWHEAKLRGRGYANASSILEYARKSVGIKDGADASRQAVKWFVSRIIELDEQLSDIENQLNQRCNEIPYAKNILAISGIGENILSGILAEMGDISRFDNVKEIQKLSGLGLVACSSGKHTGETKMDCQHFFRQLF

SEQ ID NO: 468089 - protein, 343 aa, unidentified
MKYIGLDLHKKSIFATVLGEDGNILSRTKIGPNTRDICYYLKSQGSRDELSVAMEASYNWPYYYRAVEEAADTIVLAHPLKTSKIGEAKIKTDKIDSKVLAYMLKADMLPAAYVPSRDTMENKLLLRARISLVRIRTQVKNKIHAIVDRNRDSYHGLENMADIFTKTGIKILRDTTICPTDHKILIGYLDLMDEIDKKIKDTETQIDKRSIKDRDIELLKTIPGIGTFTAFLVKSEIDDISRFSSKEKLSSYAGLIPSTHSSGERLHHGRIVKQGNKFLRWALTEAAQTSIRCSEYFRYHYSKIRSRKNGNSATIAIARRMLEVIYVMLKENREYIEKPVDIK

SEQ ID NO: 468090 - protein, 410 aa, unidentified
MNSPPETIPIQRYIGIDIHKHYVMIGGQNRHQEWTLRPRQVQMARFRSWAEQNLKPEDKVVVEATSNVWDIYDIVAPLVRKTVVANAYKVRQIAEARVKTDKEDIKRLITLLIADIVPEVWVPPCHVRELRSLISFRWRLTKQITMSKNRLHSVVQRFNLDPPEGGLLTDKNKSWWDRQAFTELTGFQVDRDLEIVEHLEEQKEAIDRKLMELTEMVYLMQIPGFGLIFSMVILSAIGDIKRFPHPKKLVGYAGLGAGVHASGEKYQEKSITKAGRKELRWALVEAAWVAVRSDPYWKAQFIRLKKRMHVNKAIVSIARRMLVSIWYILTRREPYRHFDEETIAYKMLIWSWAMDEKSRHGMTPQQFAKYGLLRLGVGQDLERIERGGALRRIAPTEEILALKPELAPPR

SEQ ID NO: 468091 - protein, 361 aa, unidentified
MKIIGVDLHTRQQSIAMLDDQTGELVERELSHEGEQVRNFYSALPRPVLVGLEATGSMRWFLQLLEELQIDFRVGHPAQIRAAEPRKQKNDRRDARLLLTLLAEKRFPAIWMPSGEQRDLQILLRHRDQLVRLRTRVQLSLQAVALSHGLRRGHALWNRAGQHMLHALPLAPQAALQRDTLLTLHPQLQTPIAALDREVAQQAEQRPLARRLMTHPGVGPITALATEVFLGDPCRFADGKAVASYVGMIPSERSSGGRQRGGKLSKQGNALLRFLWGEAALHAVRCDPELQRFYRRKLLQKGLGKARMAAARKLGIRLWIMLRDEIDYTEFCRRGQSRRQSSGAACAGMPAVGQWSNGPSV

SEQ ID NO: 468092 - protein, 342 aa, unidentified
MQITTIGLDIAKNVFQVHGIDAKEKVVARKQLRRSQVITFFKALPPCLIGMEACATAHYWARELTKLGHEVRLMPAKDVKAYVKRNKNDAADAEAICEAVRRPTMRFVRIKSAEQQGQLMQHRTRDVLIRQRTQIINALRAHLAELGVVAAQGNAGVNELRAIVTDEQDTRLPIDARASVIVLAAQLEALESVIGAIEKRIKMQHRSSEASQRVEAIPGIGVIGASAIVATVADPTIFRSGRDFAAWIGLVPRQDSTGGKQKLGPISKQGDRYLRRILVVGAIAVLRRAQENPGKYPWLTQLLARRPFKVVAVALANKMARMAWALLAHGGTYRAPELAETA

SEQ ID NO: 468093 - protein, 356 aa, unidentified
MLNDKKYIGMDVHKESISIAVRNGAGKIVMECVIETKASMIVQCINGLRGDLQVTFEEGTSAAWLYDLLKPHVTKLVVCDPRKNASMREGNQNDKIDARRLAELLRLDHLSPVYHGEHGLRSLKELVRSYLTITKDLGRVMSRVKAIYRSWAIPCTGKQVYAPRHRVEWLGKISEAGVRRRAEFYYQQLDALRSLRREVRRELLQECKKHQAWKRLCQIPSIGPIRAAVLLGVLQTPHRFRTKRQLWTYSGFGIETQSSADHRSVHGQLERVKKASSIRGLNRNCNHDLKNLFKGAAIVASSKPGPFQEFYTALLTKGMRPEMARLTLARKIATIALIVWKRGVNFDAQHLKPQTA

SEQ ID NO: 468094 - protein, 336 aa, unidentified
MYIGLDVHKESIDVALAPEGQGEVRSYGKILGDLEAVDKVIRKLGAERGRLNIVYEAGPCGYALYRHLTKKGIKCSVVAPSMIPKRSGDRIKTDRRDAVNLARLHRAGELKAVFVPGEADEAIRDVSRSREDAVVACRRTRQQLGALLLRQNIRYTGAKAWTQAHQRWLGRLSMPMPVQQVVFQEYLNAVEEAHERVERITEQLKEAATTWRMAPVVEALQALRGVSVVAAASILSELGDLSRFDDPRSLMAFVGLVPSQYSSGPRQRLGAITKTGNSHARRMLVEAAWAYRFPARVSRGLRDRQETVSQKVREIAWKAQVRLCTKYRRLAAKGKI

SEQ ID NO: 468095 - protein, 397 aa, unidentified
MSRTVALDIHKRFAEVAVHEDGHVGRLGRVEVDELEAFAESLRPDDHVVIESTSQTWAVVELIGRNVGRVTVSNPMRTRAIASAKVKTDQIDARVLAELGAADFLPPVWTPDAETQELRRRVAHRAGLVRQRTRLRNQVHAVLARNLVTIDVSDVFGRKGRRALGEVALPGHEREQVDSALRLHDALDTEIKLAERTLAERALADSDVRLLMSIPGVGAMTSLAIVSVIGHVGRFPSSRELVSYFGLDPRVRQSGDRAARHGHISREGQAHARGLLIEAAHSAVRTPGPLRAFYQRIKARRGTKIAICATGRKLLTVCWQLLSKQEPYRYEAPSGTRRKTRLLQRAAGHTDLVSLAGERDARAIERRVLDNLQRHYEAHVAERTARDRKHVARLART

SEQ ID NO: 468096 - protein, 375 aa, unidentified
MSSAATIYLGLDVHKESVTIAVLPSGAVAPTRVDKLPNDLAKRRRFCERQASAGTVRACYEASGAGYVIQRAMTAWGYHCDVIAPSLIPTKPGQQRKHDTGDAIQLARLYRAGELTIVRIPTEAEERVRDVVRCRETFQREVLRSRHYLLKFLARRGFVYREGTPWRQAHYEWLRQLARADSPLAPEDRQVFGEYLGLLEYKLSRRDALDEQIEALALTPSLATAVATLQCFRGIQQQAAMVLATEISDWQRFASPRQLMAYLGLVPREHSSGDRERRGSITKAGNTHCRHVLVQAAWAYRFQPKIGVALTARQRGQSPVAIAHAWKAQHRLHTFYQRLAFRRRPLIAVVAVARELVGFLWAVMRDVTPRTTATA

SEQ ID NO: 468097 - protein, 387 aa, unidentified
MAGVIIGMDPHKRSATIEIVNDREEILAQGRFGTDRDGYRAMLKLGRQHKDRIWAVEGCHGIGRHLAQRLIADGETVVDVPAKLSARVRVFDTGHGRKTDPVDAHSVAIAALRSKGLRQVAVDDQAVVLRLLVDRRDGLGRSRTDLVNRLHTLLLELVPGGAKEGLSARQARALLTTIRPRDLVGRTRRRLASELITELVQIDKKIKTANTELTELVATTGSSLQELHGIGPSGAARLIGDVGDIHRFASRAHFASWNGTAPLEASSGDQKRHRLSRAGNRRINRTLHIMAIVQLRHDTEGRAYYRRKLAAGKTSMEAIRCLKRRLSDLVYKQMVNDAAAVKTGPGGQSGATLQSSAADPIPMADTSDKSLPGPAGTQPRTPLPARH

SEQ ID NO: 468098 - protein, 355 aa, unidentified
MNDAKYIGLDVHQATISVAVLDSAGKLVMECILETKAATILQFIHGLRGSLHVTFEEGTCAAWLHDLLKPNVTQVLVCDPRKNALINAGNKSDRIDAGKLADLLYLNKLNPVYHGETGIRALRELARSYLALTRDTTRVMNRLKALYRSWAIPCAGQRVYAPRDRSEWLAKITEAGVHRRAEIYYQQLDALRSLREQVRRDLLAEGRRHSAMKLLRQIPSIGPIRAVLLIALMQTPHRFRTKRQLWAYCGLALKTSTSGEYRIVEGRLKRAKKFVAIRGLNANHNHDLKNIFKGAATRAAAVPGPFQEFHAGLVAKGMKPTMARLTLARKIAAITLIVWKNGVVFDAEHLKQQAA

SEQ ID NO: 468099 - protein, 430 aa, unidentified
MSPSLQLNELTLGKETFMALKIVYPTCCGIDVHKTFVVACIASTNHNGVTTYKNHRFSTYTSGLRTLLQWLLENNCEDVCMESTGKYWIPVFNILEKKCQITLAHPKYVKAIRGKKTDKKDAKWIADLFKHDLVAGSFMPPADIRQLRDLMRYRTKLTNVTSSEKNRLQNCLTVSNIQLGNVVSDTLGKSSAKIIDKLLENTGEPLDLESLIHSSLKKKLPELALAVDGFITPEQAGKIRVIRNHMNDLKTRKEELELLIYKLAAPYSAQIDIILTAPSFKNTLTAITIISEIGVNMEAFPSAKHLCSWAGLVPTNNESAGKKKSVRVSKAGCYLKPLLVQCANAAVRGEKHPEIRNRYLRLKKRRGHKKAIIAIARMLLTALYNMLKNNEAYNAELYKKSDSIPIDREITVEQAIIIAKQQGYKVKSAS

SEQ ID NO: 468100 - protein, 354 aa, unidentified
MSLAPSIKGETTMEHYAGIDVSLECSSVCVVDAKGKILREARVASEPEALIVWFRSCGFELERIGLEAGPLSQWLFAAMRQAGLAVELLETRHVRKAFEAMPVKSDRNDARGIAQLMRLGWFRPVHCKSMSAQETRTLLTARKLVQSKLRDVENSLRGILRGFGLKVGKTTERGFAGRIEELVVGHPHLQVIAKALLAVRSVLRREFAAFEKQVRQMARSDKRARLLMSMPAVGPIVSLTYASAIDDPGRFKSSKQAGAHFGLTPKKHQSGETDYTGRISKIGDSSVRTALYEAAHIMLTKPLKGCSELKSWAMRIARRAGMSKAKVALARRLAVIMHRMLADGTTFNAAAAAA

SEQ ID NO: 468101 - protein, 349 aa, unidentified
MKKYSTYIGMDCGDRTHRVVVLDKDGEEITRKIVENRGDIVVKVLGEFPGSMIAIEVGTHSRWLQRTLEEAGHTVVVGNSRKLPAITRSEKKTDWRDAEMLARLVRFDPRLLFPITHRGLRAQVDLAMLKARDAVVRTRTLLINSVRGVLKSEGFRVPKCSAEAFVKKATPCIPGILKPSLAPLLEEIAGMTQRIREYDAHIEAIAEQYPETEVLRQIPGVGPITALAYVLTLEDPHRFTSSRKVGAYLGMTPKLDQSGETNKELRITKHGDGFLRRLLVSAAQYILGRLNKHDSALRQFGLRLAQGGKRAKKRAVVAVARKLAVLLHRLWLNGEVYKAFPKPKVASAA

SEQ ID NO: 468102 - protein, 392 aa, unidentified
MVVSVGIDVSKDKHDCFIVSSEGGVLADVFTIPNTMDGFCCLLQRIRDCTAPQDKIKVGLEATGHYSYNLLGFLLDNGLATYVLNPLRTNLYRKSLSLRKTKTDRVDARTIASMLLSDAGLKPYTDTAYHNEELKSLTRYRFDKVKERAKLKSSIARLVCILFPELEKLVPSLHIASVYALLEEFPGAKQVAAAHLTRLKALLETTSKGHYKRDMALEIRDAAKNSIGSQMPAKSLELQHTIRLICELNREIDEIEEQIRSILDELHSPITTIPGLGFRMAAMILAEVGDFTRFDSPDKLLAYAGMSPSTYQSGQLKNCYPHMEKRGSRYLRYALYNATKYVCHWDPAFADYLAKKRAEGKHYNIAISHAAKKLVRLMFAMEKSRQPYYSAA

SEQ ID NO: 468103 - protein, 349 aa, unidentified
MIVIGIDPHMQTHTAVAVDGATGQVLQELTIKARTPGFERLVEWARELDEERLFAVEDGRHVSGHLERHLIARGERSVRVAPRMMGVSRRADRVRGKSDPIDATAVARAALAHPDLPQATLAGVEREIGLLVSHRESLVNERTDRICKLRWLLHDIDPDLAPEPRSLGRYRTLDQLTETLHGLESSVQVRICCELVARCREITVRAGELEREISSLVKAHAPALLVIPGCASLTAAKIVAETAQVGRFPTEGHFARYAGTAPVPASSGATHRHRFNRRGNRQLNAALHRIAVTQLRIHEPAKDYIAKKRSEGKSKTEAIRCLKRRLSRVVFKTMTSMDQPTDRLTAVAA

SEQ ID NO: 468104 - protein, 351 aa, unidentified
MVYIGVDLHRKKSQVAALDQDGNLVFNRKVGTGPGEMQQLIDELRPQPIQVAFEATFGWGWFADLLSGLGIEAHMAHPLATKAISSARVKNDAVDAKTLAHLLRTNLLPEGWIAPPAVREARRLVRMRAALVRVRAKLKAQVHALLGEHGLQPEVVDLFCNKGRQLLRDLQMPAISRSRLEACMRLIDEVSLEIVIAEREIYQTIKEDERVKRLLPIPGIGPIIAATILSEIGDITRFSSPDKLCAWAGLTPSEHSSADNVRRGHISKQGSRWLRWVMVEAAVHAFRDVELRQLFIRIARRRGAKIARVAVARRLLTLVYYALRSETGCRSYPVSSNPKVEARSMAVMASH

SEQ ID NO: 468105 - protein, 342 aa, unidentified
MKELKQVVGIDVAQKELVVTIGRLLEDLSVDLFSYKVFKNNDKGFLSLVEWVAKLVENPKEVHYVMEATGVYHQKIAYFLDTNQLKVSIVLPNKISNYFRTLEVKTITDKTCSQVIARFGLERKLDLWKRPKTVYKKLQQLTRERDQIVAERVIVKNQLHAEKIEAEPNLMTLKRISERMKLLNKQENEIKNDISQILKNNAELKKETDRMMTIPGIGELTAVIILAETNGFELIRNKKQLTSYAGLDVKEKQSGTSIKGKPKISKKGNRSIRKAMHFPSLVAVKWDENFKELYARLVSKHGIKMKALVSIQRKLLEMSYVLYKDQTIYDKEYKNSVQTQMA

SEQ ID NO: 468106 - protein, 308 aa, unidentified
MIAQNYVGCDISKQWLDFFDETSGRCRRIDNQADAIAAYVAGLDPSRDFVVMEATGVHDRLLRHALAKAGVPFSRHNPAHTHHYAKSTRRRAKTDPLDARMLSDYGRRYQPEAEPAPREEGEQLQSLAGHRDQLVEMRATLKKQLAETFNEIVITSLKDLIADLDTRIKALEGRIAEVIRQAEDTARDYTLMVSVPGVSKVGAFSLLALLPELGQRSPKSIAALAGLAPFDNKSGKLNRRSQIQGGRSRVRRALYMAALSAIRTCERFKSFYTALAARSGSKKLAIIAVARKLLVVLNAIIRDKTAFA

SEQ ID NO: 468107 - protein, 374 aa, unidentified
MRDHSEAYVAIDTSKSRNSVAIAEGGRQGEVRFIGEVDNTPAATSKLVKKLAAKYDRVVFCYEAGPTGYELYRQITGLGHDCMVVAPSLIPKKPGDRVKTNRRDALALARQFRAGELTAVWVPDPRHEAMRDLTRARMAAVEDVQRKRQQISAFLLRLGRSYAGVKTWTKAHLKWLASQKLEHAEQRIAFEEMLLAVHQAQDRVARLETAIRAAVPDWSLAEVVAALMAMRGIDMVSATAFLAEIGDLSRFKTPRELMAYLGLVPSEHSTGETVKHGPITKAGNRRARRTLVECAWSYRHPPRVGRKKQDKVAAAPRAVREIAWKAQTRLYARYRALLRRGKLKTVIVTAIARELAGFIWAISREVVPAPVMAR

SEQ ID NO: 468108 - protein, 344 aa, unidentified
MDHYAGIDVSLECSSVCVVDASGKVVREAKVVSEPEALIGWFGSLGFELARIGLEAGPLSQWLYAAMKQAGLAVELLETRHVSDAFKAMPVKSDRNDARKIAQLMRLGWFRPVHCKSITAQEIRAMLTARKLVQSKLLDFENSLRGILRGFGLKVGKTTRTNFAGRIEELVKGHPNLQTIGQALLRARAVLLAEFNGFEKRVRAMSRLHDKAKLLMSAPAVGPIVSLTFACAIDDPSRFTSSKQAGPHFGLTPKKYQSGETDYTGRISKHGDASVREALYEAAHIMLTKPIKGCSELKSWAMRIARRAGTNKAKVALARKLAVIMLRMLKDNVPFNPAAKAATA

SEQ ID NO: 468109 - protein, 347 aa, unidentified
MNQITRIGMDTSKYIFQVHGVDASEQPVLRKRLGRKQMLGFFAELPPTVIGMEACGSSHYWARELKQLGHEVKLIAPQHVKPYVTRNKNDGRDAEGLCEAMSRPTMRFVAVKTPEQQAALMLAGLREQMITRRTQISNAIRGYAAEFGITVAQGLNQIEPLLARLAQDESVPELARDLFALQGRDYAQLQMELKAIEARLMAWHRANADSRRLAKIPAIGPIGATTLVMKTTDPGAFASGRHFAAWIGLTPKDHSTAGKTRHGKITRAGDERLRSVLVAGATAVIQQAKQGRGHPSPWLIALLKRKPPKLAAVALANKTARIAWKLMVTGESYDGARMSKAPLIAAT

SEQ ID NO: 468110 - protein, 351 aa, unidentified
MKVTTIGLDLAKSVIQVHGVDKDGNPVLRRQLRREQVLAFFVKLQPCVIGMEACTGAHYWSRKLQAQGHTVRIMPAQFVKPYVKTNKNDVADAEAICEAVGRKNMRFVPIKSPEQQAVLALHRARQAMIKARTAQANQIRGLLAEFGIVFAQGIKQIPKRVPALLEQAGDELPGTLAALIPGLVEHLKYLDRQVQELENEIKRWHRRSEPSRQLERVPGIGALTASALVASIADARQFKNGRQMGAWLGIVPAQHSSGGKTHLLGISKRGDPYLRTLLVHGARAVIGQATRPSAKHRDPWLQRLLARRGKNVAAVALANRNARIVWAMLAHGRPYEPRVGTLEPRDNPTEA

SEQ ID NO: 468111 - protein, 416 aa, unidentified
MKLFVGDDWAEAHHDVEVMDASGRRLAKARLPEGVAGIARLHAMIGEQLGEDAEDEDAGQVTVGIETDRGPWVQALIAAGYTVFAINPLQASRYRERHGVSGARSDAADAHVLADMVRTDSHQLRPVAGDSAQAAAVKVVTRTHKTLIWERTRHAQRLRHALRDYFPAALEAFEDLDAPDTLELLARAPDPASAARLTTAQISAALKHARRRHVPAKAEAIQAALRAAHLGQPAVVTAAYAASARALIAVLVTLNEQVKVLQGQVEAYFGQHPDAEIIMSQPGLGPVLGARVLAELGDAPGRYVSAKARKNYAGTSPITRASGKKKTVLARYVHNDRLIDALMTQAFSALQSSPGARACYDRQRARGSEHNAALRQLANRLTGILHGCLKTRTRYDEATAWPQHAAKPEKAEKAAA

SEQ ID NO: 468112 - protein, 483 aa, unidentified
MAAEQKAETGTRPRKSNRKQRREQQRKVWTDNPGLDVVHPHAAGIDVGNSEHYVAIAPAKSVEAVRRFGCFTADLRDLAEFLKAHGIVSVVMQSTGVYWIPLYDVLEEAGFQVYLVNARDTKNLPGRKSDVQESQWLLKLHTYGLLRNSFHPSSEIRVLRTYWRQRSEHVHTAAECVQRMQKALTQMNLQLANVITDIMGMTGQKILRAILAGERDADKLAEMRNWRIRASHEEIVASLTGNWRPELLFALKQEVDRYDFCQRQIAECDQEIEKQLNALPSRPRETVSPLEPAVPPRNSKKSKKAQGNSPEFDLEQELVRIAGVDFTRIDGINVLTAQTILSEVGLDMERWKTEAHFASWLGLCPYNAVSGGKVLRRGTRKVVNRAATAFRIAAFTLRRSDSYLGAQYRRFRSKLGAPKAITAMAHKLAVLFYRMLRFGQEYVDRGQQFYDAKYRQQQISLLNRKAAQLGFSIIPAANPLPPA

SEQ ID NO: 468113 - protein, 410 aa, unidentified
METIFERVAGLDVHKAQVTACVRVPTPKGGREQLLAEFQTTVRGLVALRDWLEAHRVTHVAMEASGVYWQPVWHVLEDSVELTLCNARHVKQVPGRKTDVSDAAWLCQLMEAGLLRGSFVPPKPQRQLRTLTRYRKTQIQERQREANRLHKALEDTGIKLDCVASDILGASGRAMLDALVAGTTDPEVLAELAKGKLRRKLPQLREALEGRFERHHALVIGAILAHLDFLDEQIDQLSDAIEEQLGPFASGVRLASTIPGVKARTGEVMVAEIGTDMHRFPSPGHLASWAGRCPGNDQSAGKRRSGRSRKGSKWLGIALEEAALAAVATKDSYLQAQYQRLRPRIGHGRALGAVKHSILIAYWHMFTNGEVYRELGGDYYQRRDPERQIRRLITQLERLGQHVTVEAATA

SEQ ID NO: 468114 - protein, 375 aa, unidentified
MEGAPMLDTTTFIGLDVHARSIKAVSLDVMTGEVRCATFGYDAGAVAGWVRSVDPRARCVYESGVTGFDLQKRLSGLGVDCVVGAVSKMIKPSADRRRKNDRNDAEFLARMLSVGNVVEVWVPDDECEAARDLTRALEDARDDLSRSKQRLSKFLLRHGLAFDERTPTGRRKGNWTRAHWSWIESIRFAEGADNDVLAYYVDAVRRAAEEKARLEGLVEDEARKPRWRRRVDSLRCLKGVDTATAADLVFEAGEFSRFRNARSFAAWVGLTPSEHSGGESDRRGAITKAGNKHLRKALVEAAWHYLTCSGRPKDLAKGQAPDRVARRHAAKGVRRLVERREALLARGVHNNKANVATARELACWVWAVGLMAEEA

SEQ ID NO: 468115 - protein, 394 aa, unidentified
MRVIGVDIGAETHVVAVVDEDGRTLLKPTPVTEDAQGYARLLELIGEAADTLVVMEATGHYWQNLFAALAAHGFAIALVNPLRTRRFGEEELRRTKTDAIDALGLAHFGRQKRPQPTRLPDPATEELRELVHLRDRLVQDIGDRVRQLHRLVDLGFPEFTRHVPDLESMLATAILRAYPTATAFRGLSVRVLADVRYDGRHRVGEALAAALMAAAAASVGRHHGEPYRLQVRYACEDLELWRARLRIAERDIERLLRAHEVGQLLTTIPGIGPQTAARLVARVGDPAEFRSAGALAAFVGVVPGLRQSGKRQSQRAGLHPLGHGRLRAQLWMPTLSAVRFNPWLRAYYERLIARGKVRKVAVVAAMRKLLGAIYSVAKNRRPFVPHLSPQETPA

SEQ ID NO: 468116 - protein, 343 aa, unidentified
MHFKFKLGTDISKGWLDFCMLNNKLDQLIQQRIDNDCDSIQKFIDELIESNQIDSIDEILLVAEHTGIYSNHLIRTWIANGGQLCLVPADKISEGLNGTSSFEEKTDPMDAHRIAEYACRFSDKLKLHSLCTFNLDSIKLLRSQRSRIVKVINILEVPVNEIKSFELKEHSDLVEKLQEVPIEALKTSLKNVEKEIKQIINQDSGLKELMRILCSVAGIGKVTACELIITTNGFTDFAPNQAKSYARNCAVVPLPKSSGKYKRKGRISKKGNSKMKSLLTVCALSLINTNTDLGRYYKRKRESGKKHMSVLNAMRNKLILRAFAVVRNNSMYKRNMNVSLVLP

SEQ ID NO: 468117 - protein, 347 aa, unidentified
MRFYTKQHRFYCGIDLHARTMYVCILNGDGEILLHRNMKAAPEPFLQAIAPYRADLVVCVECIFTWYWLADLCAQEGIPFVLGHALYMKAIHGGKAKNDKIDAYKIAVLLRGGMLPQAYVYPAAMRATRDLLRRRMYLTRKRAELLAHIQNTNSQYNLPEIGKKLAYKANRDGVTARFPDPAVQKSMEVDLTLLGSYDPLLSDLELHIVKAAKQHDANTLYLLQTVPGIGKILSLVLLYEIHDIQRFPSVQDFVSYCRLVKCAKESAGKRYGTAGAKMGNASLKWAFSEAAVLFLRDNPAGQKYLTRLEKKHGQGKALTLLAQKLGRAVYYMLKRQQAFDMHKFLQA

SEQ ID NO: 468118 - protein, 356 aa, unidentified
MEKLTTVGIDLAKDVIAVCVLDVRGAAIERRVFKREAFERWAEQLPASNVAMEACGSAHHWGRWFAARGHTTRLIAAEFVVPFRKGGKNDTADAEAVAIAARQPTMRFVPIKTVDQQAILAWHSVREGWKEERTALLNRMRGLLAEYGVVIARSADRFLAALPKLSEDNRLPDPVRALVLEAREQFAALHARLARCDAQIAAHARNSPAARRAGELLGVGPVTSSALVATVPDARVFRNGRQFGAWLGLTPRQHSSGGKTRLGRISLRGNVYLRTLLIQGARSTLQAAINTQPSRASRLQRWIIELYARKGYYKTLIAIANKHARILWAMLAKDERYDAAAWQRHPMHQPPLAGNV

SEQ ID NO: 468119 - protein, 342 aa, unidentified
MTTIQYSVGVDIASSTFTAAVGEIPWKVILKPQTFENTEDGYQTLLEWLAQHHLSVSETVVCMEATGVYSEGLAYFLYAKGYRVAVQSPLEVKRTFKPYGPKSDAVDSLQIAEYACRHTDKLAFWKPKNEILEQVKALLAVREQFVTQNTAHKNALQAIQRKVVRTPFAEQSYLQLIEQLKKQIQAIDSEVRRLIESDPTFKEMLLLLLSVPGVGLLLAAHFILLAQFSLEYKVLASFLGISPNEHSSGSSVFKHATSRHFGPPSIRKLLYLAACSVCTHRPQFGMYLARKTKQGKPARLVLNNVENKLVRIMCAVLQSKTAFVENYHSVQPFVFQNSLTKS

SEQ ID NO: 468120 - protein, 347 aa, unidentified
MKFYTKQHQFYCGIDLHARTMFVCILDQSGKICLEKNLHSSPDEFLTTIEPFRSDIVVSVECLFTWYWLADLCSEQGIPFVLGHALYMKAIHGGKAKNDRIDAHKIAVLLRGGMIPQAYVYPPGMRSTRDVMRRRLYLVRKRGQLLAHIQNTNHQYNLPEITAKLAHKAHREGFVDRFEDPSVRKSMEIDLELVAHFDRIIRDLELFIVRQAKQHDADMFHRLRSIPGIGKVLALTILYEIHDITRFERVQDFASYSRLVKCAKESAGKKYGTGGKKIGNVHLKWAFSEAAVLFLRNNPEGQKWLARLTQKHGKGKALSILAHKLGRAAYFLMSRKRSFNMDKFLAA

SEQ ID NO: 468121 - protein, 393 aa, unidentified
MVCVGIDVAKDKHDCFIISSEGEILADVFTIPNNAEGFDTLLQAIRRSTRPEDKIKVGLEATGHYSYNILGFLLDKGLPTYVINPLHTNLYRKSLSLRKTKTDRVDARTIAAMLMSDVNLKSYTDTVYHNEELKSLTRYRFDKVRERAKLKQSVSRLVTILFPELEKLVSSLHSASVYALLSEFPGAKQISSTHMTHLKAVLKNASQGRYGQEMAETIRNAARSSVGSVMPAKSLELQHTIRLIRELDAEIEDIETAIQAIVDEMQSPITTIPGMGVRMGAVILAEIGDFSRFDSPDKILAYAGMSPSTYQSGQLSLSGAYSHMEKRGSRYLRYALYNATKHVCHWDPTFAAYLAKKRAEGKHYNVALSHAAKKLVRLIFAMEKSQRPYCAAA

SEQ ID NO: 468122 - protein, 419 aa, unidentified
MFSDTALIVGVDVHQHTNVALVMDGGGDVVDTHQHFANNGTGTDRFVRYLARMAETGGFATIHIAAEATNNFWLPFFCQLERQPPPSVSPVTLYPFNPRLVHNFKKALGEEEKTDLRDAGAIAERLRFGKKLPRPFAMEEMYLPLRTLTRYRYHLVQELVRVKSYCLSLIYLKATDYTDKKKRPFSDTFGATSQAVLRQFATLDEIAAMPFDELVEWLDVKGKRRFPNPEENARKLQQVATDAYHLPNEWAAVIHDIIALNFRHIDLLENLIDRVETAIAQQMESIPHTLETIPGIGPVFAAGIIAEIGDLARFEYDEAKVAGYAGLRWPRSQSDEFEADDRPMSRSGNRFLRYYFCEAAQAVRLHAPEYRDYYNRKYKEVRKHQHKRAVVLTARKLVRLVVRLLTTNEPYRLRQASIE

SEQ ID NO: 468123 - protein, 504 aa, unidentified
MPWAASPDFSVFLPPGLSRGTTWHFDAVLDKADDSWTKFILPIKETVMKNFYLGADVSKGYSDFMLLDAKKRRIEEDFQMDDTFDGHQKLYHILSALCDQHPDAHIYAAVESTGGYENNWFGALVKFQSSLPLKIARLNPCGVHNNSKAGLERNITDPISAENVAKYMIEHPENVTYQQQDPLASLRKQWSFVKMLSKQKTQMLNQLESNLYGANPEILAYCKNGVANWVLSLLLRFPTAAKLAKAKKSSLVLIPYVTEQKATELIQIAKKSVASATDQITAQIIKATVKQIQQLTKAIEAQEKILTETCSIPEVQLLKTFPGISDISAIGLILEIGYVERFATAKKLASFFGLHPIYKKSGDGSWGFHMSKKGRVVPRQILYMVAMVAVQCNPLIAEIYLKHTEKGMKKKAALGLCMHKICRIIYGMLKHNMAFDANIDRNNRKKSIKADTKKIRRDKRRRYQSFDAKAPISGRHNKKRKERKQSQSDNIANSGIIKASVPIS

SEQ ID NO: 468124 - protein, 407 aa, unidentified
MLRKHTGALPQTPHCRGQQLREKQEAKPTAWASSVLWCGKVLVAAIKVFKQYFNQNHWLISPLTFLPEDDMLFCGIDLHSNNCFVVVSDENDKVLYSRRHGNDLDQIRAALSPYRSELYGVVVESTFNWYWLVDGLQEQGYCVHLANTTAIKQYDGLKHRGDESDARHLAHLLRLGLLPEGHIMPKALRGARDLARKRMQLVQQRTTQILSIETSFDQQTGAHLSSNNIKKLSAEEVDGIGLGKMEALCIKANLAVMQAIQSQLDVLENELARYCRDNPAFRLLKSVNGIGDILATVILLETGNIERFADVGNYASYCRCVGSVHVSNGKKKGEGNTKNGNRYLAWAYVEAANFAIRYCDAAKKFYQRKKAKRNAVVAIKAVAHKLARACFHILKTGEVFPVERCFT

SEQ ID NO: 468125 - protein, 461 aa, unidentified
MRKKRAASKRKESVQKKVDWKALEIVHPDAAGIDVGGSEHWVAISPDRDPEPVRRFGCFTADLREMAVWLVEKGVRSVAMQSTGVYWMPVLEVLEQHGLEVYLVNARHTKNVPGRKTDVQECQWLLKLHAFGLLNNSFQPTDEIRVARTLWRQRGNLVADASSTIQRMQKVLIEMNVQLSNVLSDISGVSGMCMIGAILEGERDPEVLMALVQPGVKATPQDILKSLEGNWRKELLFVLRQQVELYRMYQEKIQDCDQQLREHLESFGSVVDLQARPIGPKPKGKKGSKNAPQFDLRTELYRITGIDWAQVNGIDVLTAQTVIAECGADLSAFPSEKRYTSWLGLVPTNEQSGGKILRRRTRKVVNRAAAAFRNAATTLLRSESYLGAQYRRLRTRLGAPKAITAMARKLACLFYRLIKHGQQYVDKGNEYYETKYREQQIRALAKRAQKLGLELVIPKTA

SEQ ID NO: 468126 - protein, 453 aa, unidentified
MDVIDPRCAGLDVHTETIVACALWEEEGEIQKEIQTFSTFSKGLGDLLEWLEDHGVTHVAMESTGVYWKPVFAFLEGYVDLTLANPQRIKNVPGRKTDVSDAEWIAKLLRHGLMEKSFVPPADIRELRDFTRLRKKWVGQLSSEKNRIQKVLESSNVKLGSVLSDLFGVSGRNILARLLEKGYVDKDELDQCLRGRLKTKKQAVYDSLLGTLTEHELCLLRLLWKHVEELEQLIEEVDQHIDRLLEPYREEVDLLMTMPGIKKQTAAVIIAEMGTDMSVFETPERAASWTGLSLGNHESAGKRKSTRTTKGNPHLRSALCEAAWSAARSKTHPLSRKFWSLAARCGKKKALIATARRMLVIIFCMISRKESFRQPQLISYSQQAARSYEMSENRAPLLSYCLLWPFSVYPHGSGAYTALTQWWGFSQKTDGPCLRFGMNITACCTTFLRKKAA

SEQ ID NO: 468127 - protein, 346 aa, unidentified
MKITTIGIDLAKEVFQIHGVDEHGRALLRKQLRRNGMGKFFANLSPCLIGMEACGSSHYWGRKLCELGHTVKLMSPQFVKPYVKTNKHDMADAEAICEAVKRPNMRFVPIKTVEQQSILSIHRARQGFVKARTAQANQIRGLLSEFGIVMPRGIQSISKRIPDILEDAENGLPETMRHLLKRLIDHLRELDRQVGKLELQIKQWHKDNEASQRLEAIPGIGPITASTIVATVGDVKVFKNGRQLSAWLGLVPKQRSSGGRQMLLGISKRGDIYLRTLLIHGARAVIRFAERKVEPENWLRKLIMRRNKNIAAVALANKNVRIIWALLAKNTTFRPNHVSAAYAADT

SEQ ID NO: 468128 - protein, 424 aa, unidentified
MPYKIAGIDVHKRMLAVVVSDVEIDGEYQFERCQFASNPAQLRLLAEWLLEQRVEEVVMESTAQYWKPVWGALERYWKPVCQKREGARPMSGTLYLAQAQSNRARQGRKRDFPDAERLVKRLVAQELTLSFVPEPEQRLWRTVTRAKHQQTRNRVQLQNRLEALLEEAHLKLSSLVSDLLGISARRMLKALAKGETDPAALADYRLRATPEQLSDALGACQELHPVYRRLLKAALEELELIAQQIGQFDRETADLLHPYQDQVERLAEVPGLGVDSAQQIIAQVGATAATFPSERHLSSWVGVCPGDTQSAGVNYSHRSPKGNRPMRRILNQAANAAVKYKGSIFEILYRRYVPRFGHNQTIGLIAHRLCRLIWKILHQGVRYEERGPALSQRSKQRRTARMSCELRMLGYRVELANFQSAVRA

SEQ ID NO: 468129 - protein, 344 aa, unidentified
MNIASIGIDLGKTTFHLVALGERNKILLRRKFSRSQLLAYTANLPASLIGLEACAGSHFIGTVLREQGHQVRLIPAQFVKPYRKSNKNDFIDAEAIAEAVTKQNMRFVQIKTQEQLDWQAMHRVRDRLMQRRTALINEIRGFLLERGLTFAARPIYLRKNLPTVIEDAEQNLTPRLRWLLDRLWQEWKQTEIDIKAITDQIEHISNNDARCRRLRQIPGFGPLVSTATVAAIGNGAAFRRGRDFAAWVGVVPRQYSTGGKQKLFGISKRGNIYLRRMLIHGARAVLLRVKYDTGGFGQWVHRLAQRAPRNKVVVAIANKLARMAWAVLSSGQEYRHQPVQLPAA

SEQ ID NO: 468130 - protein, 320 aa, unidentified
MAMQVDNFIIGIDVAKAELVCYYEDSAQQQAVRNTKPEIQKWLALQPVNTAICVEATNVYHLDLVEMAYDKGFAVYVVDGFQLSNYRKGVGGRVKTDASDACLLARFLDREGSALRPWSPPPAVYGKLQSLLRRRAALVSARTSLTQSWGNEMSLKEAFNSFAKHFESLDLLIQKRLKILVREAGLAEQVARCQKVEGIGFLTAVALVTAFIRGEFKSSDSYIAFLGMDLKVADSGQKAGRRRLTKRGCSEIRRLLHNAAMAASRSAAWKDVYEHYRRAGKTTTQALVILSRKLARVAFALMKTQGEYVSKGAKKLCPQP

SEQ ID NO: 468131 - protein, 421 aa, unidentified
MQVIYERCAAVDVGKDVIAVAVRLPGGGPDGRQIIKRTFKTFCGVPAEAARWLTSLGVTHVAMEATGIYSMPAYHALIEHGSSEQVLACNAGHVKNVPGRKTDFSDAEWLVHLLECGLLAGSFIPPAEIKAARDVLRYRAKVAQQRVSEIARLGNVLQDAGIKIDSVASSIATKSGRAMIEALIGGERRGPVLAGLARGKMRAKIPDLAMALEGRFGDHHALMCRLHLDHTGHLEAMIARLDVQIEAMMTPFQAARDLLITAPGIGPLSAAAVISEIGADVTGFFPDDAHLASWTGLCPGNHESAGRRRSGKRRKGNQHLQSVLVECAWAAVRHDGYLKSLYHRHVMKRGGYRSQTAKNKAIVVVAHALIVIIWHILATGKPYEELGADYFTRRLDPDRETRRLIARLEALGHQVTLQPAA

SEQ ID NO: 468132 - protein, 418 aa, unidentified
MSEELIASLSRRYMALDIHKHYCVVAAVNREGQEVLQAVRVEHQDLEAWLKKNLRVSDHVVIESTTNAWHVYDLLEPLVERVLVANPIKVKQIAYARVKTDIRDTLILARLLAANLVPVVWVPPLHVRQLRQLLSQRRQMVETHTQIVNRMHSVAHRHHLSHPKGKRFNEKNTAWQKDKILSQLEQFQLGLEMENRAYIEKQINKIGKEITKMSHHKPWAEGMTYIMQLPGFGVITAMTVLAAIGEIGRFETPKKLGSYSGLTPGLEQSGTKNRGKGITKEGRRELRWALVEVAQRAVKSDPLWKRRFQELQHRMHRNQAIVVIAHRLLELVWYVLTRRQAYRHFSQERIAYKYLTWGWQMDDEARDGLTRQQFARYYRMRLGIGHALTRVALNPKYPRRLASEAELLALRPELQKIE

SEQ ID NO: 468133 - protein, 350 aa, unidentified
MEKRITTFVGLDVSDKFTEMCVLDGKGAVVDQDRMRTTKGSLEKRLSKFQDARVILEVGTHSRWMAELIGTLGHEVIVANPRQVRLIWKRRTKTDRSDALVLARLGRLDVDLLAPVQHRSRGAQVDLACARSRDILVRNRSQLISHVRGMLKPFGHRVRDCSSNTFVDEAEAVVPAELVPALGPVLAVMRVLNEQIAAQDRQIEQLVTTVHPATKRLTQVPGVGSITALAYYLTIEDPTRFKKSRFVAAFLGLVPGKNQSGESDPQQHITKTGDPFVRKLLVQCAQYMLGPLGPDSELKRWGLALAGRGGKNAKKRAVVAVARKLAVLLHRLWLSGAPYQPLGYGRAHAG

SEQ ID NO: 468134 - protein, 409 aa, unidentified
MTTTVFGGDRLISVGIDVSKGKSVVCILKPYGEIVKEPFEVSHTKEQLEALATLLKSFEKEVRVVCEATGIYHEPVVESLHGAGIFVSVVNPLTMKKYGDRSIRKVKTDKADAIKIASYGIDYWFNLASFQPREQIYTELQLLNSSYEFYLNGHTRAKVNLSVVLEKTMPGITSTVCHQSNHSGDAKLGAIVSRYWHYDNITKLSERRFVESFCKWAKKQRYQQNEKSARRIYALASAGIPSLSSSTPSTKMIVQEAVNILLEYNRILARILSQMQALASTLREYDMLLAMPGIGKILASRLIASIGDVRRFHSGSALVAQAGIDIPSYQSGQYTGTQRKISKRGTPAIRKTAFQIVSSMLRVTPKEDNAVYEFVCKKLAEGKPRKVAKVAGINKLLRIYYARASELYS

SEQ ID NO: 468135 - protein, 463 aa, unidentified
MAKKNTTSRKSKSKARKSVLERINPNAAGIDIGANFHLVAIPEDRAEENIRKFGPFTSDLHRLADWLTEHHIETVVMESTGVYWIPVFQILEQRGFEVKLVNAAHVKNLPGRKSDVSDCQWLQQLHTFGLLNGSFRPKDEVCILRTFLRLRDTLVKDCSSHVLRMQKALTEMNVQIHRVLSDITGYTGMAIIRAILTGERNALTLAQMKHPQVKASTEQIVKALEGDYRTEHLFALQTAVELYDVYQLKITGCENKIEQQLEQFESKLDFEQVLEQSGALKVRSAKVRLELQRQAYLTSVCGVDLTRLPGLSTLAVEVIISETGLDMNCWKSEKHFCSWLKVCPDNRISGGKVLSSKSRKTKNRAAGMFRLAAQGAMQSKTAIGAFIRRIRARLGAPTAINAGANKLARLFYRMLKFGAAYVEQGQTYYEERYKDRLLHNLSKRAKEFGFQLTPFEPATVSVS

SEQ ID NO: 468136 - protein, 364 aa, unidentified
MKKSIKKPQAKETKPNRTMGIDIGDRWCHYCWLNEDGEAVETGKIRTREKDLREFFEGEKRMRIAMECGTHSPWISRLLEALGQEVIVANARKIEAITGSESKDDDHDAEQLAVFAHFDPRLLYPIQHRSAERQRDLSLIQARRTLVQARTMIINSARGLVKSMGGRLPQCSSESFGQKARAAVPANLVGLVTPLLEQVTLLNQQIKRMDQQIGELEKRYPEIIRLRSAPGVGPLVAAAYVLTLNGSDSVTHSRQAGAFLGLRPRRKQSGDSDPQCRITKTGNNYLRALLVQSAQHILGRFGPDSALRRWGLKLAASGGKRGKKRAVVAVARKLAVILHRMWASGQNYQPFPPATAGTQTVTAK

SEQ ID NO: 468137 - protein, 458 aa, unidentified
MLEGDAVKKAQKIAKLPILNPNAAGIDIGATQIFVAVPPDRDAESVRCFGTFTADLEKLADWLAACKIQTAAMESTGVYWIPLFQILEKRKIEPVLVNAQHLKNVPGRKKTDVEDCQWIQHLHAVGLLRGSFRPADEICTIRSLWRHRENLIQLASIHVQHMQKSLDQMNIQLHHVISDLTGTTGLAIVNAILSGERDPAKLAKLCDPHIRASQQTVRESLVGDYRPEHLFVLRQSLESYRHFQRLIQEVDLEVKQMVKELPSKVDIQERPLPKAKNPRKTPWRNEPPQLREELYRAFGVDLTQVPGLNTLTTQILLTEIGPDFSCFPTSGDFCSWLRICPNPKITGGKVISSKTRPSKNRAALALRMAAQGLHRSQSFLGNYFRRMKARLGAPKAITAAAHKLARIVYHMVTTRQEFDATIFEALERRSRDHKHLRLRAQARELGFDLVKISSEAAS

SEQ ID NO: 468138 - protein, 389 aa, unidentified
MPPVGPQRRDHSNQDAILKIPLPAPAMPTFTGLDLHKRTVTATTLDAAGTVLATAKLPCRADALRAYFAQLPAEAGHAATVECTSGWYWVRDALADSVDLHLAHAKGVKAISAAKVKTDAADSAMLAHLLRTDLLPEAHMISDEMRPLRDVLRTRLRLVERRVAAQNSIARLLEKHNVRDVADLDAFGRLQAEAHIEQAELLHAQVKRLESALVPHLVPDADVQRLLRIPGIGKAVAFSIRLEVDDIARFASDRAFFSYCRLVTGADNSGDRVRHKRSRDGNRYLKLAFSHAGVRAIQYYPEVRDWYRAKKRKKPEAVARALVAKEIARIVYHVLRKQEDFNGRFKGRVLSRTKKEQWPLLASPAGITGAGEETHRESPAPPSVGMGSE

SEQ ID NO: 468139 - protein, 390 aa, unidentified
MEHPMQKLNDLSRSLAPLEPDGTLIAVVEMSQSSWLVAGIVPGVERQPLKKLAVDENALLKLLHRWREEAEKAGRRIERTAVAFEAGRDGFWLARWLRTRSIEAHVIHASSVAVSREHRRAKTDRLDTELLKRAFLGWLRGERDHCKMVAIPTTKDEDAKRPNRERESLVGEQTRIVNRMKATLIRLGIRGFNPKLKKAAGRLENLRTPEDEPIPPNTMAELRRDMDRRRLVSDQIRQIEAARLDRLKQAPDDGPHAMLRLLARVIGVGIETADMLVQEVLARNMRDRRAIARYAGLTGSPDESGTKRREKGLARSGNARVRRGMIQLAWRFLMFQKDSALAKWFRARTENARGTRKLMIVALARKLLIALWRLVREGVVPDGVVLRPTQ

SEQ ID NO: 468140 - protein, 397 aa, unidentified
MISVGIDVSKEKSTVCIMKPYGEVLASPYDIAHTESSMEKLIGTIESYTEETRVVLEATGAYHLPVLLSLQHAGIFVSVINPLTMKKYASQSLRRGKTDKLDALKIASYGLDNWFHLQEFLLPEKLYGELKLLGRGYSHYVKLKIQSKLSLINILDRTMPGIKRLLPVKPSGKDKLCDFVKRYLHYDNIVKMSEIKFIKSYCEWAKRKGYHANENKAKQIYALAKAGIPTLSSKAPSTKMLTLEAVRILSEINKTLNIILSRMQELAKTLPEYEIVHNMHGVGDILAPRLIAEIGDVRRFHSGSALIAYAGIDAPPYQSGNFYGTNRKISKRGSALLRKTGYEVMKCLKTVKPTVDSAVYDYMIKKENEGKHKRCAKIAALNKFLRIYYARVVEVYQ

SEQ ID NO: 468141 - protein, 411 aa, unidentified
MEQIHDRVAGLDVHRDQVAACVRTPGPRGGAQTEKARFDTTTGGLAALAEWLAGHAVALAAMEATGVYWKPVYYALEGRFLVWLCNAHHVKNVPGRKTDMSDAEWLADVAAHGMVRPSFVPPPPIRELRELTRYRKTQIDVRAAEIARLEKVLQDAGIKLTSVASKVLTQSGRAMIEALIAGQRDPAALAELAKGKLRPKIPQLTAALRGHFGAHHAIVAARILAHLDFLDETIAELDREVAARVAERYQSAARLLADVPGLERRSVEVIIAETGADMSRFPSPAHLASWAGLCPGNHESAGKRRRVATTPGNQWLRRALIESARAAARTKDSYFGAQYRQIARRRGPNKAAVAVAHSLLDVIWHMLTTGEVFTDLGADYFTSRQDKEHQTRRLVSQLEKLGYTVQLTAAA

SEQ ID NO: 468142 - protein, 316 aa, unidentified
MSGEDQAQVGIDVSKATLDVAIEPSHAHWQVANDERGIQQLVERLGQLRPERIVLEATGGYELPVLAALGCADLPAVAVNPRQVRNFAKAIGRLAKTDALDAQLLAQFAAVVKPALRPLPDAATRDLAGLLARRRQLVEMRTAESTRLHMAVEQVRPEIREHLRWLDKRIAQLDRDLHDRLRASPLWREKDDLLRTIPGVGPVLSVTLLADVTELGTISHRQLAALVGVAPFNCESGKWKGTRRIWGGRAAVRAVLYMATCAAVRHNPVVRAVYERLVAAGKRKKVALVACMRKLLTICNAVIAQRTPWRYLPLDN

SEQ ID NO: 468143 - protein, 369 aa, unidentified
MEQDTTYVAFDTSKETIAVAIAESGARKEVRFFGTIASRPDAVRKLVEKLAKRHGRLTFCYEAGPTGYGLYRQLQSLGYDCQVVAPSMVPVRPGGHVKTDRRDATTLAALMRAGELTAIWVPDDAHEAMRDLARARNAATAGVRRARQQLLSFLLRHGRAYPTKRHWTRGHRRWLAEQRFEHAAQQIVFEELIQAIEQVLARRDRLEQQMVALLPNWSLRPVVTALQALRGVAVIAAITLAAEIGDFRRFANPRQLMAWLGLVPSEHSSGASTVRGPITKAGNTRARRILVESAWTYRLPARVGRALLVRSEALPEAVKAIAWKAQVRLCARYRRLQRAGKPTNIITVAIARELAAFAWAIATTSMPLA

SEQ ID NO: 468144 - protein, 324 aa, unidentified
MSTVVGIDIAKHTFDIATLQANGKHRTKAKLANDPKGFEVLLQWLNEHAEAQAWIVMEATGIYHEALAEWLYERGYQICVLNPAQIAFYARSQLQRVKTDKVDAKLIADYGHRHQEELRAWKPEQPSIKRLKALTHRLKDLQELEQMEQNRLDVTSDAKVAASIQSVLRHIHQQIADTLEAIKQHVDDNDDLRGQRDLLKSIDGIADRTAALLLAELGDVQRFEGSRAVTAFAGLNPRLQESGKHKGHVRISRMGSALLRGGLYLPAVVSMSHNSAIRAMADRLRAKGKSGKQIVCAAMRKLLCIAYGVLKSGKPFNPELALAK

SEQ ID NO: 468145 - protein, 385 aa, unidentified
MQKLNDLSRSLTPLNPDGTLIAVIEMSQSSWLVAAIVPGIERHPLKKLEPNEGELLRLLMRWRAEATKMGCTITRIAVAYEAGRDGFWLARWLRARDIEAYVIHPTSVAVSREHRRAKTDRLDTGLLKRVFIGWLRGEPDHCHMAAIPTLAEEDAKRPNREREGIVRERTRIVNRMKSCLVRFGVRNFKPTLRKAPERLATLVTPEGIPLPPNTLLELRRDLARLRFVMDQIKEVEEARAQRLEQAPQEKTHAKVRLLARVIGVGIETADMLVHEILSRSLRDRRAVARYAGLTGAPDESGSKRQEKGLAKAGNARVRRGMIQLAWRFLLFQKDSALAQWYWARTESGGKKRKTMIVALARKLLIALWRLVTTGEVPAGVVLRAA

SEQ ID NO: 468146 - protein, 330 aa, unidentified
MKNYHDVIGIDVSKLTIDAHIHKRGLHRVFSNTPKGYKALLLWIDRCLGAQFYFLCFENTGHYSTNLSVYLSENTIDYVEENPLAIKRSTGIVRGKTDRLDAGMIARYAWLHKEELVLSTPKEQDIQELGRLLSFREQLVRDRTGKISSLKEMQSLLSSPSTDSCCKIITKTIHYLTKQIEALEDRIKVLMKKEASLKKNFELLNTLKGVGLVLSCQLLYHTNNFKRFNSWRQFSSYCGVAPFEHSSGTSIRRKNRIHHIGDRKMKTLLTLASVSAIQCDKELKYYYKKKVAEGKPKLVALNNVRNKILSRAFAVVKRGTPYVPMQQFAA

SEQ ID NO: 468147 - protein, 316 aa, unidentified
MVPPPLFVGIDVAKETLDVAVRPTAETWSVANDEAGITALVAQVGALAPTLVVLEATGSFHGPLTAAVAAAGLPVVVVNPRQVRAFAQATGLLAKTDRLDARVLAHFADAVRPTPRPLPDTATQELRAVLLRRRQLVEMLTAERTRLAMAPRRIHAAIQQHLTWLTHPLTALDHELTRLIQASPLWRATDDVLRSIPGVGPVLAHTLLAQGPELGTLGQKQIAALIGVAPFNRESGTLRGRRMGYGGRAEVRAVLDMGTLVATRHKPVIKAFSARLCAAGKAKKVALTACMRKLLIIMHAMVRDLKPWQPREVPIA

SEQ ID NO: 468148 - protein, 343 aa, unidentified
MQAVTTIGLDIAKSVFQVHGVDATGQVVIRRQLKRRYVLAFFERLRPCLVGIEACASSHHWSRELQALGHTVRLMPPAYVKPYVKRQKNDMADAEAICEAVTRANMRFVPTKTPEQQGGLMLHRTRHLLIRQQSSVINAIRAHLAEFGIVAPVGRKGIEELLGVIADPSDKRVSDVVRACLAALGSQLLGLKKQILDFDRMIMAWHRSNQTSKRLNCIPGVGPLLATALVASVADPKAFRSGRNFSAWIGLVPRQHSSGGRNRLGSISKQGDRYLRSLFVAGAFAVIRYAKLHGTKYRPWVAALLARRPTKVAAIALANKLARMAWALMARGERYNYPAGLRV

SEQ ID NO: 468149 - protein, 357 aa, unidentified
MSKNRQLDFSGQDIFIGLDTHLKTWKVSIIVGETSFKTYVQDPEVEVLNKYLSKNLPGGNYYSAYEASFSGFAAHRELLKSGIKNIVVNPADIPTTDKERKQKEDKRDSRKIAKQLSNNSLVPIYIPEVETEGDRNLIRYRKSLAKDTARAKNRIKSLLYYYGIKIPPQLDEKKYWSKKLINWIEELEMPTPSAKMVLNKRLNWLQVHREEILSTNRVIRELSKKDIYKANVNLLISVPGVGLLTAMIILTEIGDIKRFKNTDKLNAYLGLIPTTNSSGQKDKTGNITPRTNKLLRSTIIESAWVAIRNDAALMMAYQELIKRMESQNAIIRIAKKLVNRIVFVLREQEPYVSNIVK

SEQ ID NO: 468150 - protein, 331 aa, unidentified
MDPAVVIGIDVSKAELVIAAHPVAETWTSETTPAAIDTLVARLRDTRPQLIVMEATAGYELPLAAACAAAQLPVAIVNPRQVRAFAQAIGRTAKTDAIDAAVLALFGARVQPAPRAVADAATRALAGLITRRRQLLEMLGAERRRLEQAPPTGPITRDLRTHIRWLERRLGDVDDEIGTAIHQSPVWRVQEDLLRSVPGIGPTTARTLLAELPELGRLDRRAIAALVGVAPFNCDSGQFRGQRRIWGGRASVRASLYMAALVAARHNPVLAPFYRRLRQAGKRAKVALVAVMRRLLTILNAMLKHQSRWNPKVASTPASPSRPARAATVGA

SEQ ID NO: 468151 - protein, 355 aa, unidentified
MDSVKYIGMDVHKEAISIAVLNSSGKLVMECVIETKAITILDFLKGLRGSLHVTFEEGTWAAWLYDLIKPHVTELVVCNPRRNALLKEGSKSDRIDARKLAELLRSNMLRSVYHGEQGVRKLKELARSYLAISKDLGRVMSRVKAIYRSWGIPCGGKQVYAQRYRSEWLGKIQEAGVRRRAEFYYQQLDALRPLRQQVRQELLAEAKKHSAWKLLRAIPFIGPIRAALLIALIQTPHRFRTKRQLWSYSGFGIETHSSAEQRFINGELRRAKKPVSIRGLNRNHNHELKNLFKSVATVAAAKAGPFQEYYDALVAKGMRPEMARLTLARKIAAITLIIWKKGVRFEAQHLKPQTA

SEQ ID NO: 468152 - protein, 409 aa, unidentified
MLHDDFQFFAGIDWGSERHRVCLMNSQGNVCDERWIDHSGSSLAQLVDWFRQQTRDSPSLLAAAIEVPHGAIVETLLEHGFAVFSINPKQLDRFRDRYSPAGAKDDRRDAFVLADSLRTDPHCFRAVRLDDPLMIRLRELSRLEDELTSEQNRVLNRFREQLHRYFPQLLQLCEAGDETWLWTLFELAPSPDRAAKLSQAKIARILVQHRIRRIAAEQVRAVLKTKPLTLAPGAAEAATEHALLLLPHLRLLHSQRSDLARRIGAILEELAAPAEDKSKHRDAAILLSLPGLGRKVAATMLSEASHAIASRDYHALRCYGGAAPITQQSGKKKIVVMRRGINQRLRNALYHWSRTSVVWDPPSKKTYAQLRARGHSHGRALRGMSDRWLKVLMAMLRNQTLYDPQRKAA

SEQ ID NO: 468153 - protein, 398 aa, unidentified
MKTSGLDVHKDSIFCAIYDGKSYSTVKEFSTTTVSIRELGSYLESERVKKVAMESTSSYWVPIWDILWEMGFDLKLVNPLHIKQMPGRKSDSKDAQWIAELLHKNMLRGSLVPSPLIQELRSYTREYRILVNQRTKVLTQMDRILVMCGIRLSSCISNIDSKSFMQVVEALIRGETNPEALLRLVYANRKNKESGKLKECLTGNMKAHHRLKLNTCKQQFDLFENQIQLYLHEMQNLCSEHFCEEISNLTTLPGVSQISAMIIVAETGGDMSVFENSGKFTGWTGLRPRNDESAGKFKSTATTKGNKHLRAIIVQVAWAASRTKGSFFMDKFTKLAIRKSRKKALVAIARKMLVIMWHILSEKTQYNPKLVHIYDPVKVEHKIKYHEREIEKAKKLIT

SEQ ID NO: 468154 - protein, 356 aa, unidentified
MNTCVRSQTLYVGVDVHKETHTAVGVSPFGEKLFEVRIGNYQKDFAALVSQTETSKGILSPYFGLEDCHGYGERLAEYLVGKYPVIHVPSVLVDRLRKKATHPEKTDSLDAYGVAKVMMNDMDSLPIYTLTEEVKRTKQIREISLDREYLVLERARLKNQLHSLLYRIWNVEYQTKFKSPFNLKSLRYWLRARSVCDPFLLRTMKRKVKRLVDLHYEIIELEKEMATLLETGGYTLQTASGCGPAIASAIIGEVGDIARFKSPASLAKYAGCSPRECSSGKTKRHQKTWAGNRRLNCAFHRMALSQISRMGNEKARAYFTRKVSEGKSKSQALVCLRRQMVNLTWCMLKNKTIYRR

SEQ ID NO: 468155 - protein, 342 aa, unidentified
MHYVGIDLHKRESQICIVDASGTVVDEQRIKTTKEAFEAMFRARARSRIVIESSCESEWVARVLENCGHEVVVADPSYAAMYGHRNRNVKTDKRDARALADAARTGLYRHAHRKSDEQRHRSSLLAVRAGLVRSRAKLITLARALVRRTGQRIRRRTVERFSFFVKELELADDMATELAPILSVLPALDAQIESLDAELEKVATQDPRTVAAQSMQCIGPVTSVAFVAHIDDARRFKTARQVSSYIGLVPREYSSGEKKRRGRITKAGNSQLRSLLVQAALRIRRSRSMSLAHLRAWSERIAARRGKKVAVVALARKLAMILFAIIRDGTLFHAPQLMSEVA

SEQ ID NO: 468156 - protein, 357 aa, unidentified
METAYDGRQIVGMDLHRRRSVLVRMTEDGRRLGTARITNSPQELRAQIARAGKNPKVVLEATYGWYWAADTLEAAGAEVHLAHPLGVKAFTYRRVKNDERDAADLADLLRMGRLAEAWIAPQEVRELREVTRYRHKLVQLRTSCKDQVHAVLAKLGIPVTCTGIFGTAGSAWLDGLGLPQPYAGKITSPRQLTGELTTEITMLSEVIADLLAADRGYQVIQQLPGIGPVLAAVITAEIGDVTRFSNPGQLCSWAGLTPRHRESDTKVTRGRVTKQGSRMLRWALIEAVQRNPADSAAGAVKNAIIARRGKEARNIAKVAAARRMLTLVYYGMRDGQIRALPRSPASQPEAQPPQRAA

SEQ ID NO: 468157 - protein, 413 aa, unidentified
MALDKTGMAHEVIRFVGMDIHRSYATVAAVDGNQQVVLTARRIDYEHFDEWMRKNLRPSDAVTLESTGNAWYFHDLLAPLVASVTVANPIQVALIAKARVKTDPRDALTLARLLAARMLPSVWVPPTEVRELRALVAHRHRLVKQRTQVRNRLRAVLIRHNLVAPASEIFGSGQRAWWEGLDLPTSEKLRVRHDLSILDSLEPLVKEVEAELARQSNLAPWEDLAAFLLQLPGIGVPSAMQLLAAIGDINRFPTPHQLVGYAGLGAGVHSSGQEHYGGRITKQGRRDIRKTMVDIAWVAVANHFYWKAVFDRLADRIGRNKAIVAIARKLLVVVWHVLAKQVADRQAIAERVAGKFLDWSWKVGRVNRRGLTSVQFIRRQLCRVQVGDKLTTVSRGKKTLRLPRPEPVAHAVG

SEQ ID NO: 468158 - protein, 342 aa, unidentified
MDHFAGLDVSVKETSICIVDDAGKIVREVKVASEPEALLAVLKNLAYHFKRIGLEAGPLSQWLFSALAEAGLPVICVETRHMQAVLKAQINKTDRNDARGTAQMMRAGLYRPVHVKTIRSQKLRMLLTHRKLLQSKAIAIENDLRGTLRNFGLKVGMVGKVKFEARIRELVENLPDLAVLVEPMLIVRRTLREQIVILHRRLLAIVRDDEVCRRLMTTPGVGPVVALTYRATVDVPARFRKSKAVGAVFGLTCAKYQSGEVDRNGRISRCGDEMMRVMLYEAAQSMLRSKKWSWLKAWAMQIARRRGMKKAIVALARRLAVIMHRIWVDGTEFRWTREVAAA

SEQ ID NO: 468159 - protein, 370 aa, unidentified
MYVCILNQAGETLLHRNMKTTPEAFLKAIAPYRPDIVVAVECLFTWYWLADLCADEEIPFVLGHALSMKAIHGGKAKNDKIDSQKIAVLLRGGLLPQAYVYPAEMRATRDLLRRRMHLAHKRGELLAHVQNTNSQYNLPALGKNIAYKANRDGVAERFADPAVQKSLEVALSLVSDYDELLRDVELTIVKTAKQHDANTLYRLQTVPGIGKILSLVLLYEIHHIDRFPRVQEFASYCRLVKCAKESNGKRSGTSGAKIGNAHLTWAFSEAAVLFLRENPAGQKFLARLEKKHDKGKALTILAHKLARAVYYMFKRKVAFDMKRFLNDEGRGVGERDVSLDNHGMNLILATLSNASMTASLNAYERLGHYP

SEQ ID NO: 468160 - protein, 410 aa, unidentified
MEVILRCCAGLDVHKDGVEACVRRTSAGGKVEHEVRHWGTTTRERAEMSNWLSSLRVTHVAMESTGVYWKPIFNILEEHFEILLANAQHLKNVPGRKTDIRDCQWIAQLLQHGLLKGSFIPPRPQRELRDLTRQRTQLVDEASRISNRIQKVLEDANVKLGSVASNVVGASGRLMLEAIVAGQDDPSQLADLAKRRLRGKIPQLEQALDGKLTEHHRWMLGLLLDQWKSTQLFIARLDERIAERTRPQQAVLEKLDAIPGVDRRVAEVLLAEIGPDVTPFPTHAHLASWAGICPGNNESAGKKRSSRTTKGSRWLRQALVQAAWAASHKKDSYFQAHARNLMHRRGRKRGLVAVAHSLLTVIYHMLKEDTSYHDLGSQFLDRLRAKHLVRFHVRRLQNLGLQVTLTSETA

SEQ ID NO: 468161 - protein, 321 aa, unidentified
MIEEAVCVGVDVAKSTLDVAASDSGETRQFANDDEGISQAVRYIASVKPAGIILEATGNLEMPLAAALQAGCLPVAVINPRQVRDFARSTGALAKTDTIDARILALFGARVKPEIRPLPDQKTREMRNLLTRRRQLIEMLTAEHNRLSQAGDDIHPSIEIHIKWLEEALSKINDDLDRRIRLSPSWLEKDTLLKSVPGVGKVVSSSLLIELPELGRLNRRKIAALVGVAPLNRDSGTMRGRRTVWGGRAKLRAVLYMAALVASRRNPIIAAFYQRLLDAGKVKKVALVACMRKLLTILNAMIRTMTVWQPEIILRHVSTEV

SEQ ID NO: 468162 - protein, 414 aa, unidentified
MDVIHPRCAGIDVSKRDAKVCVRIASSGRARARSTVTTWGAVTNQVLALRDHLIAEQVTLVVMEATSDYWKPFYFLLEDGPFEVMLVNARHAKGLPGRKTDVSDAAWLAELGAHGLVRGSFVPPEPIRQLRDLTRTRTTITRDRAREIQRLEKLLEDAGIKLSSVASDITGVSGRAMLEALVAGVREPAELAELAKRRLRSKIPELTEALTGRFGEHHAFLVRLHLDLIDQHTKVIDELTRQIEVVMEPFRSARDLIVTIPGISTGVADVIIAETGGDMSRFPSAGHLASWAGTCPGSNESAGRVKSTHTRPGNPYLKGALGAAAMSASRSKGTYFSAKFRRIASRRGPVKAIVAIEHAMLVAIWNMLATGTLYSDPGDDFYARLNPDKAKGRAIDQLNKMGYSVTLAPLAVAN

SEQ ID NO: 468163 - protein, 365 aa, unidentified
MWEAPVKFQRTSVGLDVHARSIVGCGLDRETGELFQRRLTPSRDEVRDWIRSLPAPAAVVYEAGPTGFGLARYLIDAGIECVVAAPSKLQRPSGDRVKTDARDARHLARLLHLGEIVAVAIPSIEQEAARDLTRAREDCRGDLMTARHRLSKLLLRQGIVYYGGRAWTGKHELWLRTQRFDTPGLQQAYDAAFDAMLTTLDRRDRLDREIEALAADSIFTPVVRRLGCLRGVSTLTAFGLAAEIGDWGRLTGRSIGAYLGLVPTEYSSGSTRVQGGVTKTGNNHARRLLVEAAWHHRARYRPGQDLRRRWDAASPTARARGQAANHRLHARWVSFDQRKKCPVVANAAIARELAGWCWSLAVLDD

SEQ ID NO: 468164 - protein, 343 aa, unidentified
MQSITTIGLDIAKSVFQVHGVDAEGNVVIRRQLKRRHVPAFFEKLPPCLVGIEACASSHHWSRELQALGHNVRLMPPAYVKPYVKRQKNDMADAEAICEAVTRANMRFVPTKTPEQQSGLMLHRTRHLFIRQQTSVINAIRAHLAEFGVIAPVGRKGLEELLRVIADPSDKRVPDVVRACLAALGSQLLSLKKQILDFDRMILAWHRSNQTSKRLNCIPGVGPLLATALVASVADPNAFRSGRNFSAWIGLVPKQHSSGGRARLGSISKQGDRYLRSLFVAGALAVIRYAKLHGTKYRPWVAALLARRPTKVAAIALANKLARMAWVLMARGEQYNYPAALRV

SEQ ID NO: 468165 - protein, 322 aa, unidentified
MQSLQLGIDVAKAKLDCALRLTNGKFRHKVVDNTPAGFKALEDWLAKEGATALQVCMEATGIYWETVAEHLATRPETTVSVVNPGQIKAFGASRMVRTKTDKVDAKLIAQFCAERTPEPWQAPTPAERTLRALVLRLDALQAMRTQESNRFEVARESVAEGIAKHLTWLDDEIARLSKAIRDHIDNDPTLKSKHRLLDSIPGIGERTTAVLLAFLAEPTRFENARQVAAFAGLDPRQHESGSSVRGKPRLSKVGHSFLRKALYMPAMVALYRTDWGKVFHERLAAKGKPPMLIIGAMMRKLVQVSYGVLKSGEVFQPELHGA

SEQ ID NO: 468166 - protein, 316 aa, unidentified
MYLGIDVSKKTIDCCLISDGIFFERRFENGQIGFKKLQDWLTEHGATNKLHCCCEATGKYYEALADFLAESYTMSVENPRKIKGFATAVLLRSKTDKQDAKLIAQYCKAVSPEPWQKPTLEQTRLKELTQYLGRLKRQKASEQTKKQTAPDYLAPYLQSTIDHLAAQIKYVQKLIQDFYRQNPEYRQQREQLKTIDGVGDNAANSLLAVLSRNQRFQSAAQFVAYLGLDPKIRQSGTSVNGKAGISKVGNTQLRTALFIPAMHAYRSETFKTFTTRLKANGKRPKQIIVALMRKLAIIAYHLIKTGKDFERERYTG

SEQ ID NO: 468167 - protein, 338 aa, unidentified
MFIIGIDPHKGSHTAAVLDRTETVIGELRVSADRWQQDQLLEFAARFTPRTWAIESACGLGALLAQQLVAAGETVLDVPPTLSARVRLLDSGCTDKTDPHDARAAAVVALRHTRLRRVTPVDHTAVLRLLADRHHDLTGLRTQAICRLHALLCALTPGGAGRLLSAGQAGRILRGVRPSDPVEVERKRLAHELLGDVRRFDNQLLATNERIVEAVLVSGTTVTDIHGIGPLGAAIIVGHTGDIGRFPTSGHFARYTGTAPIAASSGPTQRHRLNPRGNRQLNRALHVAAVTQIRNNTPGRAYYRRKLDEGKSRKEALRALKRQIAKTVYRHLVANTHH

SEQ ID NO: 468168 - protein, 419 aa, unidentified
MSFKILKNNCCGLDVHKTWIYACIGITDSFKRTEYKQARFSSFTKGLQELCLWLAKYNCIDVCMESTGKYWIPVFNVLEKNNIFVTLSHPKYTKPQKGNKTDRKDAKWICDLYMCGMVKPSFIPPADIRQLRDLVRYRFKLTCMITGEKNRAHNCLTVSNLKLDDVFSDIFGKSSRSITEQILQHPGEVFDVAPFVDSRCKTPIEEIQAAVDGAISHEQAVKLRQCLKHIDELEMHKTEIEREIFRLSQKYESVLDLIRTIPGFDKNPLTAIQVLSEIGADMSVFPTAKNLVSWAGCCPRNDQSSRKIKSTRISRAGSHFKPVLVQIANALIKSKKHPEFTTRYRRIKARRGHKKAIIAICRMILTAIWHILTDLKPYTPEGFLESRPVNKEKVLTISQALNLIKQRGYIIKDDVGPVT

SEQ ID NO: 468169 - protein, 404 aa, unidentified
MIFVGDDWAEDHHDVYLMDADGARLASRRLPEGLTGIGALHELIADHVGEPSQVVIGIETDRGLWVQALGVSGYQVFAVNPLAVARYRERHQDSGTKSDAGDAKVLADLVRTDRHNHRSLAGDSPEAEAIKVLARAHQNLIWARTRHTNMLRSALREYYPAALNAFDDLHDRDALAVLSRAPTPAEGTRLSLSKIRSALKHAGRQRNIDARAHEIAVALRTEQLAAPATVTAAFAATTRATVGIIGELNRQITDLETQLATHFETHPDADIYLSLPGLGVILGARVLGEFGDDPNRYTTAKSRKNYAGTSPLTIASGKKRAILARRVRNRRLYNAIDQWALGAINISPGARTFYDQHRAAGDLHHQALRALGNRLVGILHGCLRHHTHYNEHTAWAHRQTAHAA

SEQ ID NO: 468170 - protein, 338 aa, unidentified
MAIVHVGIDLAKNVFALHGVSDTGAVQLRQPKVVRGKLGEVVAALPPCTIGIEACTGAHHWARLFAQHGHTVRLMAPKLVAPYRMSGKRGKNDAADAAAICEAVQRPNMRFVPVKTHEQQSRLMVHRARQGYVEARTATINRIRGLLSELGIVLPQKAEVVRREAGKHLEDLPGYANLVIGDLLSEVHHLDGRIKQYDVHVRAMAKDCTGAQQLMQLCGVGETTATAIVAMVGNGAEFSSGRQFAAWLGLVPGQYSSGGKARLGRITKAGDAYLRSLLVLGARAVLNAAAAKRDSLSRWALALRERRGYWKAVVAIAAKNARMAWAVLTKGESFRLPA

SEQ ID NO: 468171 - protein, 372 aa, unidentified
MNYNTVYVGMDVHKESFTLCSCKYEDEKASHYQRTQASYKNVLRYLEFLRTIYGDDIRFVCGYEAGCLGYSLYRQLESFNVECVILAPTTMLEQRSKRRIKTDKRDAEIIARSLAQHNYSPVHIPTETDNQTKEFIRMRDDHKAELKKIKQQILSFCLRQGYQYDGSGNWTEKHVKWLRSLKPVGLYKEILDEYLLTYTTLTDKLNRLDHRIEELASKEEYKESVSKLTCFLGIRTHTALSVIVEVGDFQRFASARKFAGYLGLVPGQHSSGDDRNGLGITKAGNTHVRRLLTESAQSYTRGKIGYKSRVLRLRQAGNSPQVINYADRANERLRRRYYKMVLKDGKKYNIAKTAVARELACFIWGMMTDNIY

SEQ ID NO: 468172 - protein, 350 aa, unidentified
MMIGVDYHPSFQTIAFLMEETGECGEQELNHSDGQAEKFYRDLKQRGICVRVGMEATGYSRWFERLLAELGFEVWIGDPAEIKTKRVKKQKTDREDARLLLRLMRQDNFPRIWVPDPENRDLRQLLWHRHRLVQMRTRIMNQLQALAMNEGYRWKKKLFSEQGRAQLEKLSLAPWASRRRQELLELLDRMNPTIEELTAAVEREARKRPEVLRLMTHPGVGPLTALAFVLIIGTWQRFPRGKQIGNYVGMIPSEDSSAGKQRLGHISKQGNSLLRFLLVEAAQAAARIHPDWRRRYIHLAMRRHKSIAKVAMGRRLAVRLYWMWRNGCEYSQSVEFGSYAGQLGTGHGVK

SEQ ID NO: 468173 - protein, 319 aa, unidentified
MAQNAHVVVGIDVAKDKVDACIRALGLRQTLPSTTQGHRKLVAWLRKHQANKAVMEASGGYERAWAKVLREAGIEVRIVDPKRVRNFALSAGRLAKNDTIDAEMIAWFAETFSDAPGQKHDAAHEELQALVKARSSLIDIRMRLVSQSEHAAPGLVRKAHAHILKSLACEIAKLEAAICAKIKSMPDFAERAEIIESVPGFAETSSANLVAGMPELGQVSNEIAAALIGVAPYDDDSGKRRGERHIKGGRRWVRNAIYMPCVGAATLNNPVLKAYYQRLIAKGKEPKVAIIACMRKLIIILNTMIARRQKWDPSRYALS

SEQ ID NO: 468174 - protein, 433 aa, unidentified
MSKRNHLKERLNEKLQAISFSTLVVGIDIAKKNQWARFVDCRGIEHGKALKFENNKNGFEKILTIIYELCKNDGFKNAVVGMEPTGHYWKPLANYLIKKGLTVVLVNPYHTKKSKELDDNSQTKSDIKDALTIAKLVKDGRYFETYLPHDIYAELRSLTATRTGMLKRMKSIKNTIIAVLDEYFPEYESVFKCIFIGKASRHILKTCPLPVLIKELGEDGVLAEIKKAVKKTVGRKKAKQLLEAAQNSIGIDYGESATPFRIKQYMSELEMMEKQLTQIEEEMKKALEKTGLSEYLLSIPGSGVVSMASVLGELGDPLRFENPRQMSRMAGYNLIEDSSGKNKSGTCISKRGRKNLRCVLYKMALIMVAVNPEMKELYKYLKTRESNPLKKMQALVVVSKKILTMIYTLSKKKEYYNPEQVFGKIRKEQLQAA

SEQ ID NO: 468175 - protein, 333 aa, unidentified
MYYSGIDLHSDNSYITTVDDSGAVVKQQRVENNNELVLDYFQSLPGSHQAVVESTTGWYWLNDLLGENGIELVLAHAKYLKAISYAKVKTDKVDSQTLAILLRQGLIPRAHKISRELRGLRDTMRVRLRLVQQRSDTLRRLHSIHAKFNGSVPDPYRFQLAVLEHTRDTLSKEILALEKSLHPVLIPNDDIQRLLNIPGIGKLSAFTIYLEIDGIQRFNSDKHFVSYCRLVPAADNSNRTVHHRSSKDGNKYLKIAFSDAAVHAIQFYPEYKRLCQKLVRRSGEATARTVVAKELAKIVYYVLKNKTAYTGLKGQPMSRQKSQQWPRLSSPLF

SEQ ID NO: 468176 - protein, 370 aa, unidentified
MKYNTQNAKIESITEKTLIVGIDVGSETHYARAFDWRNYEYSKKPLEFSNNEAGFVTFKVWMEELAEKYGKDVVIPGMEPTGHYWFNLGAYLQDNGMKPVHVNPHHVKKSKELDDNNPNKNDRKDPKTIAALVNEGRFSYPYIPTGVYAEIRSLSNLRLQAQEEITRIKNRIARWFSIYFPEIKDVYKNPGAVSGLMILKVAPLPKDIVKLGVDGVNQIWRDAKLRAAGLKRAKTLVTAAEHSIGSQEACDSARIELKILLNDYEIYHQREEELMELIEEKLSEVPYIDKLLEIKGIGMKTVSGFVAEVGDIKRFDNPKQLQKLAGYAIVECSSGKHKGESHISYRGRKRLRYVLYEAAISLIEEEEYRI

SEQ ID NO: 468177 - protein, 370 aa, unidentified
MGNRSMFVGLDVHKETIDVSIAEGARNGEVRHYGVIASDLEPLDKVVRALRARDRTLHFVYEAGPCGFGIYRHLRKRGEDCTVVSPSMIPKRSGDRVKTDRRDSLMLARLHRAGELRAIYVPDDSDEAMRDLVRAREDAVVVGTQAKYRLKAFLLRQGRRYPGREGWTLPYRRWLTDLSFPSAAQHITLQEYRDAIAETEQRLDRLTEQLRQLAPTWRWAPVVAALQALRGVSFITAVALVAELGDLTRFGQPRELMAYLGLVPSEHSSGPSVRRGGITKAGNPHVRRLLAEAAWAYQGIPRIGRQHAYRQEALPKIVCDIAWKAQLRLTARFKRLIARGKAKPKVATAIARELSGFVWAIAREVSPTPR

SEQ ID NO: 468178 - protein, 301 aa, unidentified
MEEGRVKTEEGALRKHFENEERMRVAMECGTHSPWISRLLAKLGHEVIVANARKLKAVTQEEEVRNDRRDAEQLAPLALWSPKLLKGIQPRSAERQRDLTVIQARATLVRAWTMLLNATRGLVKSMGRRLPACSAESFPNKARPLLPAGLAQLIGPMVNQVQALNQQIDQLDQQVEGLVQRYPEIRTLRTVPGVGPLVAATYGRTLKGANVVPHSRSAGAFLGLGPRKKQSGDSDPQGKITRAGNPYLRSLLLPSAHYVLGHFGPDSAVRNEPWWLWPRKLAVILHCLWRWFNIIMPRQNR

SEQ ID NO: 468179 - protein, 329 aa, unidentified
MKLTQFLGADLSKDSIDIFCHDLASHVKIKNSVAGFKEMLRWLAVQRIDRASVFLVMEHTGLYSFHFENFLHQHQIRFAKVSGLRIKRSLGLIRGKNDKIDAQRIARYAFEKSDVLVPEKPMDPGLQRLQILHTTRARLVKQRSSMLCAIKEYLVVLNPGDTLIKLQQKLVADFTKQICAVEQQIKQCINAAGEQLSQGFQLLRSIKGVGPVVATATLVKTRNFSRFKNARKFSCFCGSAPFDHTSGTSIKKRTRISHLADKEMKTLLTQSAKTAIQYDKELKAFYERRIAMGKSKRSTINIVRNKIIFRMFAVIKRQTPFVPEYSKVA

SEQ ID NO: 468180 - protein, 355 aa, unidentified
MDSTKYIGLDVHKETISIAVLNSSGKLVMETILETKASMLVQFVQGLRGNLHVTFEEGTWAAWLYDLLKPQVTKIVVCDPRRNALLKEGNKSDRIDARKLAELLYLNKLKPVYHGEHGVRALKELSRSYLTISGDLARVMTRLKAMYRSWAIPCAGKQVYAPRYRSEWLGKITEAGVRRRAEFYYQQLDALRALRQQVRRELLAESGKHKASKLLCQIPSIGPIRAALLIAILQTPHRFRTKRQLWAYGGLGIETHSSADHRYVEGQLRPSKRPVSLRGLNRNHNHELKNIFKGAALIAATKAGPFQEFYAALVAKGIRPEMARLTVARKIAAITLLVWKKGVCFDAQHLKPQTA

SEQ ID NO: 468181 - protein, 388 aa, unidentified
MTSTRADVGRDAVERICPFVRKGPSVTMTTVAHSYPFVIGVDTHARTHTYAVLTASGEHIDTASFPNTGPGRSRAIAWAARRTGGDLASLWVIEGTGSYGALLAGTVARDGYEVIEAPRVAAYAPARSGAGKSDPLDAAAIAAASLPLERAKWRIPRHDQGARASLRVLLAAREQMTDERTAKVNALIALLRSVDLDIDARHTLTPDQITTVAHWRTRREELSASTARIEATRLAKRITTLDIELKDNHVRITEMLKATPAAALLEETGIGPVNAAVVYTVWSHPGRVRSEAAFAALAGVNPIPASSGNTVRHRLNRGGDRRLNSALHMAVVVRMAHDPGTQEYVDRRTTEGKTPREIRRCLKRYLARHLYRGLNALHASTETGPEVH

SEQ ID NO: 468182 - protein, 386 aa, unidentified
MAKPYDLSKPLVALEHDTTLVAVAEMSGTSWLVLAIVLGVDRRPLQKLPVDENRLLKQLENWREEATGAGKAVQRLVVAFEAGRDGFWLARWLRAHGVEVYVIHPVSVAVPRDMRRAKTDRLDTGMLMRALLGWLRGEPDCCRMVAIPTVAEEDARRPGREREHLVRERTRVINRIKATMARLGIQGFKPGLKKAAERLDALRTAEGEPIPPNTWAELRRHLERLHLLKEQIAAIERPRIAALAETAPSGANAMVQLLAKVRGIGIETAEMLVHEVLSRNLRDRRAVARYAGLTGTPDESGRRRREKGLSRAGNPRVRGGMIQLAWRFLLFQKESALAKWFHERVAGARGSGKKTFIVALARKLLVALWRYATVGEIPEGVVLKTA

SEQ ID NO: 468183 - protein, 420 aa, unidentified
MVYLERGYNLKELPWSKTVSNSFLFKEACMILVGVDVAKDKHDCYIMTSEGEVLFKSFTIANNMEGFNQLYEKILSVIDNFDNVKIGLEATGHYSYNILGYLLDKGLTPYVINPLHSNLYRKSLSLRKTKTDKVDSHIIASMLMSDVSLKPYSNTLYHNEELKSLTRYRFTKVQERAKLKISISRLVTILFPELEKLVPTLQMNSIYALLYEFPSAHAISKAHLTRLTNLLNTTSKGHYTKDKAVLIREAAKNSIGSNMPAKSLELKHTIKLIKELTSEINKIEEEIKIIMNKINSPILTIPGIGLSTGAQILAEIGDFKNFSSPDKLLAFAGLSPSTYQSGNMYSSNAKMEKRGSKYLRFALFNAAIYVSYWEPTFSQYLKKKRVEGKHYYVAISHVVKKLVRVIFHLEKTNERYSTVI

SEQ ID NO: 468184 - protein, 347 aa, unidentified
MFVGIDVHKDTHTAVGVSPFGEKMFEITVGNYKKDFEILTKKVTEISGSLSPYYGLEDCHGYGERLSAYLYDAGHQILAVPSVMVDRDRQKATHPEKSDSLDAFGVAKVMMQNIDSLPAYTISEESKKSKQIKELSMDREYLVEERTRLKNHLHNLLHRIWNTEYQEKFKDPFTLKALRYWSKSKPKCDPFLLRSMKRKTKRLLDIYHEIIDLEKEMEILLDENYTIQTASGCGVTIAGMIVGEIGDIARFHSPGALAKYAGCSPRECSSGKKHRHMKTRSGNRRLNCAFHRMALSQISRSGNDKAKAYFKRKVSEGKSKSQALVCLRRHMVNIIWCIMKNKTVYRF

SEQ ID NO: 468185 - protein, 343 aa, unidentified
MSGAYEGKQIVGMDLHRRRSVVVRMTDTGERLETVRISNDPDYLRAVMARAGDAPEVVLEATYGWYWAADTLAQLGANVHLAHPLGVKMFGLRRVKNDERDAADLADLLRMGRLPESWIAPPATRELRGWVRHRAKLVGLRSSVKNQIYAVLAAAGVAVSMSDLFGVAGRQLLATTLLAVESRSRVDSLLRIIEALDFEIDLYARLIAGRLRTDPGYHAIQTIPGAGPLLGAVFVAEIGDISRFQRPEQLASWAGLTPKHHESDTTVHRGRITKQGSRLVRWAAVEAVQRVPAHTRLGQTRDRVGQRRGRNIGAVAAARELMTLVFYGLRDHHIRCLTSTPAA

SEQ ID NO: 468186 - protein, 351 aa, unidentified
MPRRSTVRAVSTIGIDMGKNTLHMVGLDSLGAIVLRERVSRGRIKSRLANLPPCLIGIEAGMATHYVARELAALGHDVKQVPPAYAKPFRQGHKNDFRDALAVAEAVQRPTTRFVPPKSNEQLDLQALHRVRSRLVSQRTAVINQIRGFLLERGIIVRQGLRFLRQLLPDILAKRTDVHSPRMVRIVSDLSGDWRQLDDRIETVTDEIETLAKADDNCRRVMTVPGIGPIISSAMVAAIGKGSAFAKGRDYSAWLGLVPKQMSTGDRTILGRLSKRGNSYLRMLFIQAARVILVRPANWPRHGFGAWLARAIQRLHPNVLAAALANKLARIAWTVLAQQRSYEARVTKAEA

SEQ ID NO: 468187 - protein, 445 aa, unidentified
MFIQSQDDSQCCYSLFIKVVILMMKLKYSICCGLDVHKNVIVATIVTTNKDGISEYLQKSFSTINSDIQRFHNWLIENNCYHVCMESTGKYWIPIFNYLENDIDVCLTHPKYVKAIKGKKTDKKDSKWIADLYKFDLVRCSFIPPKDFRQLRELSRYRFKLVCMKSSEKNRIQNCMTISNVGIASVLSDPFGKTATEIISYLLEHTADSMDEKAVRKLIKKGAKSKSDEIIEAIKGYTIETDQAKKLELARGHLEYLDDMITQTEVELYVRIKPYYEFVEFVSTMPGMTELSSTIVLAETGVDMDIFDDAKHLCSWCGLSPANNESAGKKKSVRIAKAGDYLKPMMVQCALAAIKSKKQPYFAIKYGRIKKRRGHKKAIIAIARMMMVCIYHMVSEKKPFTPTDYEELMDPQNHVESVVLNENNVFAYLESLGYDSSKLVKRNDN

SEQ ID NO: 468188 - protein, 347 aa, unidentified
MGDRNAVFVGCDVGDKLSEMCVLDRSGAVLERRQVRTTVNGIAKRLARYCCATVVIEVGVHSRWIEEALTAAGHRVVVANARQVQLIWKSRKKTDKADALLLARLARVDLSLLAPVRHRSRAAQVDLAALRSRDILVRMRTALFNHVRGMLKPFGIKPVHCATTAFPERVAKEVPPELIPALEPVLNIMRQLNAQIATHDRQVEQLAAACPTTVRLSQVDSVGELTALAYRLTIEDPSRFRKSRVVPAFLGMTPAKDQSGESDPQKRITKAGNPFLRRLLVQCAHHLLGPFGNDCDLRRWGLRLAERGGKAGKKRATVAVARKMAVLLHRLWVTGKGYQPLYASQRA

SEQ ID NO: 468189 - protein, 401 aa, unidentified
MQQSIPHGWAGVDVGKGHHWVCLIDESGTTIWTGKVVNDEQSIIDAIGQVTALADRVVWAVDVTGTMSGLLLALLVAHGQQVKYAPGRVVNQMATAYRGEAKTDARDSYVIAETARHRGDLAEVDVPTELVVELRLLVAHRTDLIADRVRLVNRLRDVLSGYFPALEREFEFAHSRGAAVLLTGYQTPAAIRRIGVSRLEGWLARRKVRTAGQVAQTAVGAAKAQHTTVPGENVAAGIVADLAAQLLSVDERIGTVERQIRVAFDAHPQAVIIESMPGMGPILGAELIAAAGDLNGYANAGRLASAAGLVPVPRDSGRRTGNLHRPTRYSRKLRRVFYLSAQVAAMHEGPNRDFYLKKRSEGHNHVHALIALSRRRVDVLWALLRDNRPFQIDPHTIAKSA

SEQ ID NO: 468190 - protein, 351 aa, unidentified
MDRYIGLDVHAQSCTLAVLGPSGRRLKTQVVETNGRVLVDAIRAIAGQRHLCLEEGTQSAWLHELLAPHVDELVVTVPAERKGAKDDLRDAMLLADKLRTGTIERRVYKAPKPLLGLLNAVRAYNMVTRDLVRAKNRLKAVFRGRGIATDRTVYERERRGPWLKKLQGAHRRLAEWLSREIDALLPLRDDAEMWVEEEAKAHPIVKTLSTAPGMGTKRSAQTVAIVGTPDRFRTRRQFWSYCGLGIVTRSSSDWVHERNGDWVRKDVYQTRGLNRNRRPQLKVVFKGAATTVIQQLGDHPLNQDYQRMLRAGIKPNLAKLTLARRIAAAVLSMWKHKEAYDPTRIANRSSR

SEQ ID NO: 468191 - protein, 412 aa, unidentified
MQDILTCAMGLDIHRDVIVACLAKGELGTDPEIEIRSFSTLIPEMRKLRDWVLEAECRYVAMESTGIYWQPIYEMLEPCFDGQISILVVNARHMKNVPGRKTDMRDAQWIATLLRAGLLKGSFIPDKTFRELRHLTRYRKSIVRDITAQKNRIDKFLQSSGFRFTAFLSDAFGASGQNIIRHLMEYGNISREALDRCLKTQTRKRIDEILIALNGSLSEHQRGFLRMIFGHLEALEQHRHTVEDAITKEITKHEEALSLLCSIPGIDVTAAAAIIAEIGTDMSAFPDSQHICSWAGLSPGNNESAGKRKSAHINKGNPYLKSMLCEVGWVISGKRSLYLSGWYWRIKQRKGAKRATIALARKLLALIYTMLKTGSPYNEDCFEIRRKQSERKRASRMVNELQKLGYFVVAPG

SEQ ID NO: 468192 - protein, 355 aa, unidentified
MPMLAELVDAVVGADTHRDTHELEIAHPTGAPIAVVSVRNDTRGFAAAVAWIGEHAPGARVVVAIEGTRSYGAGLARALTEAGLTVIECEQPHRSSRRGRGKSDTIDAHLAVRWALELDAAKLPTPRADGDREALRTLLCAREELTTTGTGQTNRLKALLRDGDDTDRALACGKLTDTDLNTLARRRQPREASRAQAVRHGEIRRLALALREQRRELKANRTQLAAIVDDLAPGLTDHKGIGPICAAQVIVSFSHPGRCRNEAAFAALAGTSPLEASSGRTTRHRLNRGGDRALNKAIHTIASSRMRDCPITRAYVTRRTAEGKSTREIRRCLKRYIARQLHRSLSATMTPAAVS

SEQ ID NO: 468193 - protein, 406 aa, unidentified
MLFVGDDWAEDHHDVEVQDETGRRLATARLPEGISGIARLHALVGRFLPEDDNAAAVKIGIETDRGPWVAALVASGYQVYAVNPLQSARARQGNGVSGAKSDAGDAHVLADLVRTGCHQLRTIAGDSEQAGAVKVLTRMHQTLVWDRTRQVLRLRSSLREFFPAALEAYEDLASPDVLELLTKAPEPHSAAALTRAQITAVLKRARRRDRDAKTTAILAALRAEHLTQPSLIAAAYGATVRALAAMITTSNEQITALEGPVEASFGQHPDAEIYLSQPGLGPILGARVLAEFGDDPTRYTGARARKNYAGTSPITRASGKKKVVLARYVRNKRLADALHRQAFCALRRSLGARAYYDALRDRDIGYNAALRQLGNRLVGILHGCLKTHTLYDEAVAWNELAQQVAA

SEQ ID NO: 468194 - protein, 423 aa, unidentified
MDILYERVAGLDVHKDTVVACVRIVAEGKTARECRTFSSTTEQLIELRAWLEECRCTHVAMEATGVYWMPVFKILGEGPFELIVANAAHIKNVPGRKTDVNDATWIADLLACGLIKASFVPGEDIQELRSLTRTRKQLVREQTRHVQRIEKTLAEANIKLNSVISDIMGASGRRIIEAMIKGVRQPRQLAELAGKQIKATPKELYDALHGRLTDHHRFLLDLHLKQWDGLDGTIRKIDREIDQRIGRLHTKGGSGEVSFRTMIELLSTVPGISTLSASAIVSEIGCDMNRFPTAGHLVSWSGLCPGKNESAGKRKPSRLRKGAPWLKTMLVQCAWAAKRKKDSYYRAQFFRLQSKRGPQKAICAVAASILTAVYHILKNGTEHHDLGASYFDRRPLELKAGRLVARLKKLGFNVQLQPVAEAA

SEQ ID NO: 468195 - protein, 336 aa, unidentified
MSKKVTLKQCLGIDVSMKKIDCCLSFYTEDLKIKVVATSSFENNANGFIKLREWLNRKQDNGIALHVNMEATGTYHEEAAYFLAGVGYRLSVIQPTKGKQYAKSLDEKNKTDKIDAGMLARMGLERDLMPWSRPNERLRLLKRMSRERIGLIRDRNALTNQLHALNHSFDAVRDSVERLKERIALATKQLVEIEAQMRVLAESDPDLLKKTRHAITIPGVNFVTAITVIAETDGFANVSNRRQLVSYVGLDVVMKQSGTLSWRPHISKRGNAYVRAGLYMAAVSSIIHNKTLKTYFNRLKDNGKPGKTGIVALERKLLILIYTLYKNEQDFKLEYH

SEQ ID NO: 468196 - protein, 374 aa, unidentified
MIDDIALYVGLDVSKEKIAVGLAEAGRKGELRYYGEIANRADAVRKFVDKLARRHARLCFCYEAGPTGYGLYRQLSGLGHECLVVAPSLVPTRPGLQIKTDRRDAVALAALLRAGELSSIWVPDETHEAMRDLCRARETAVLDLRRARQHLLSFLLRHSRVFEGRSHWSKAHRNWLAMQRFDHRAQQIAMEEYIRAIDQIEERRERLTQQILAILPDWSLNPVVEAIQALRGVAQISAATLVSEIGDFRRFTNPRQFMAWLGLVPKEHSTGASVLRGSITKAGNTRARRMLVEGAWTYRLPARVGREILKRSEALPEEIRAIAWKAQVRLCQRYRRMQAGGRPTNIVIVAIARELAAFVWAIATAIPIKSTTTA

SEQ ID NO: 468197 - protein, 345 aa, unidentified
MDVSIIGLDLAKHVFQVHGVDAEGGVVVRKALRRSQVLPYFAKLPPCLIGIEACGTSHHWARELLALGHEVRLMPPAYVKPYVKRGKTDAVDAAAICEAVTRPTMRFVPVKSREQQAALSMHRACALLVKQRTQLVNMIRGLFAEFGVDIPQGLERALTMARQIAEGEDAPDLPANAARMIAILSRQALDTHGRLREIDRDLAVLSRSDETARRLATIPGIGPIGATAFAAAVTDPGQFRSGRQFAAWLGLTPLQHSSGGKERLGRISKMGDKYLRRLLVIGATALVRQFRSRPEKATPHFVALLARKPVRVATVAMANKMARIVWALMTRGETYRAAHVPVLAT

SEQ ID NO: 468198 - protein, 316 aa, unidentified
MNKKTQVEINVGIDTSQSQLDIYVRPTEDYFSVENTPEGAKQAARKIRKYQPTRVLIEATGRLELNFVCAAHNAGLPVVVCNAGQVRQFARSTGRLAKTDKLDAQDIAHFGEALQPALTIIKPDKLRDISDLITVRRQCLDMSTMQKNRLLRMPKSVQVPIQRILKAIQKEIERIDKKLDKLVDAIPQWREQRDLLMSAKGVGKVVAYTLMSELPELGKLNRKEIAALVGVAPMNRDSGSYRGKRRVSGGRSKVRTVLYISMWSSIQHDPKIKATYERLLSAGKPKKVALVACMRKQLTILNTMMKNGTHWNEKLA

SEQ ID NO: 468199 - protein, 370 aa, unidentified
MNQSMVYVGLDVHKETIAVAVAHQDPPLQVEHLGEIANRREAIRKLIDKLGARYRLRVCYEAGPCGYAVYRQLHAMKVDCIVVAPSLVPVRPGDRVKTDRRDALKLARHFRSGELTPVWVPDPTHEALRNLTRLRATAHHDRTRARHRLSKFLLKGGNVPPAGVRPWTEPDRAWAAAVTLEQPLDLLVRNDYLTQVEHHEDRVRRLDQAIEQAAAASPLAARIAALCCMRGVATVTASTLVAEWGEMSRFAHPRQLMAYAGLVPSESSSGKSTCRGAITKTGSAYLRRVLVEAAFAYRHRPFVGHQLRARQQGQPEAACRIAWKAQQRLHQLYRRLQPRKKHQQVVVAVAREMVGFLWAIDRTLSTPSVA

SEQ ID NO: 468200 - protein, 434 aa, unidentified
MQDVEDEPLFAERVAGIDIAKAGIEVTVRVPSDTRPGGRQQETRPFRTVRKDLLALADWLRAWGVTKVGMEATGDYWKPVYFLLESGGLDCELYHAAQVKALPGRPKTDKLDSAWLARITERGSLPSSFVPPEPIRRLRTHTRYRRHLTQARTAEKGRAEKLLEDAHLKLSSVISDIHGVSGRAMLEAIIAGERDPRVLAQLARGKMRGKIRQLEEALDCSFLTGEHAAVLAMMLATIDYYTTQIDELTAKIEVLCEPYRHQIAQLDAVPGTGVITAQDVIAEIGVDMTVFPTAAHLVSWCRWCPQVAQSGGKRKGANASGRGNPYASAAIGEASISAGRTQSFPGAKYRRLVKRMPKKKALVATGNSLLTIYHALLSDPGAAYQDLGADYYERRMNIRRQARNHLRGLERLGYKVTIEAPDPDPDTIPVTAAS

SEQ ID NO: 468201 - protein, 343 aa, unidentified
MNAIMIGLDLAKSVFQVHGEDARGKIVFQKKLRRGQVEAFFSKHPRCTVGMEACGSAHYWGRSLRALGHEVRLIPAAYVKPFVRRNKTDARDAAAICAAMGRADMRTVAVKSVEQQAMRAVERGRELLIKQRTQLSNCLRGLLAEMGIIAAQGRLGFAALRDVVRAGDERVPGPLKTTLEALGRQIDSLAEDIEGLEAQIMAAAKENPDMRRLCAIPGIGGITAHAIVAAIGDGKRFGSARDFAAWAGLTPRESSSGGKTTKLGITRQGERRLRSLLALGASTIMRGARANTGRANEWQRGVLARRPVKVAVLAQAAKTARIAWAVLTSGEAYRPAAAQAKAA

SEQ ID NO: 468202 - protein, 355 aa, unidentified
MTASYEYHIGVDYHKSYSHLVVQDSGGKTLRSGRVKNDRQSLGSFLERYRENSHAVVEATRNWMVIYDWLDDICDDVVLAHPLKVKAIADAKIKTDKIDATVLAHLLRADLVPQAWAPSDKARELRVALRERMFYVRLRTMTKNRIVTVFDRYPEQTAQLKTLGDLFGKAGRSQLAQIEVSAIDRIQIDRGLAFIGDIDVRIKQAEATIRAMTKGNGNVRLLKTIPGIGEFFARLIDAEIDDISRFRTPKKLAAYAGLVPSTYSSGGKTYHGKIIRQGNKWLRWAFIEAVTPAIASDPELRAQYDHLKFRGVNKARVAIARKLLTIAFQILRDQRAYERRDTSPMESASTISRLS

SEQ ID NO: 468203 - protein, 392 aa, unidentified
MSLCVGIDVSKEKFDACCIGEGGEKIFFVSCPMDRHGFDKLVVQLPADKTSFLLGMESTACYHIALFSYLAAQGCQVVIINPLLIANFAKRSLRKTKTDKKAALTIAQFLMQEKKALCAETPSHLVGELRDLARRREKLTDQVTALKSDMKRILSVTFPELERLTGVFTKSTLRLLAEFPSAHALRQASYAAIAAIVIPRSRGRKSQASVDALMAAAAASVGVTSPAKELALKQEAALLLTVEEQIREATALLKSLCNERIKEDTEILCSMRGIGENTAVNFLVEMGGDIGIYESDKKLIAAAGLDPSTYQSGKYEGKSKISKRGNRHLRRVIWLMTTRVITNNDVFRAYFFKRRREGLPYKKAVLATAHKLIRVMYSMLVNQTYFEPERRK

SEQ ID NO: 468204 - protein, 356 aa, unidentified
MAQNYKKDFNGQNIFVGIDVHLKTWSVSIALPSGYLKTHTQKASAKELFEHLNKNYPNGTYHVVYESGFSGFSTYYEFMELGVDCIVVHAADVPTTQKEKVTKSDPVDSRKLARSLMSGELEGIYVHSKESLDDRALIRHRTILLKLMGGTKSRIKHLLYNNGVSYPDEFSQKSKHWNRRFISWLQHDVQLLSDTRVTLDLLIEELLYFRARILDVNRKIRVLANTDKYRRQYENLISILGIGAIISMCLLTEIDDISRFSNQRQFASFLGIVPVMKASGDDYYVGEKTFRGNKALGPKIIEAAWITIKHDGELAAKFGQLCLRGMKRNKAIVRIARKLSNRIFSILKNDKEYICR

SEQ ID NO: 468205 - protein, 430 aa, unidentified
MSPGPPDASSYWVEQQGSVLSVASAVGPAPAFAGIDWAENNHVACLIDSDGEVTQRVCVGHDKAGIARLITVLAGRVVAGVGIERGDGPLVTALLAAGLPVFVIAPSQVKNLRGRYGSAGNKDDRFDAFVLADVVRTDRRRLHPLTLDRPDTQTLRALVRARRDLVGHRLAVANQLRAHLLTVLPGVVGLFSELDALTSRAFIADFGTQDAIDALTAEQLQPWLTERHYHVKTAAVLLQRLHEAAPGITGPAGQALAGITQAYLAALNTVIAQVEALETQIADAFETHPDAAIFAGLPRAGTVRAARLLAEIGDCRGRFPTAASLAGLAGVTPSTRQSGHTRIVAFRWAVDKQLRDAVCNFAGDSRLSNAWAADLYQQARARGKNHNHAVRILARAWLGVIWKCWTTHTAYNPAEHRALQRLITQHRATG

SEQ ID NO: 468206 - protein, 340 aa, unidentified
MQVTTIGVDLAKNVFQVHGIAENDDVLFNKPLRRAQFLPFFAKLEPCLIGMESCSSAHHWARELTALGHDVKLIPPMYVKPYVKRGKSDAIDAEAICEAVTRPTMRFVAIKTVEQQALLSLHRARDLLVRQRTQLINGLRGLIAEFGVYIPRGLARVIGFAEDITLGEVLDLPDIANEVIRNLSEQLMALHKRIRWYEERLKQVAKEDARVRLLRTIPGVGAVTASAIIASIGDGHQFRNGREFAAWLGLTPANKSSGGKEKLGRITKMGDQYLRWLLVVGMTSLVRQTRSHPERASKWLTSLLERKPARVATVAMANKTARIVWAVLTRDEPYSPRAAA

SEQ ID NO: 468207 - protein, 356 aa, unidentified
MTKKKIIVKSTKDNSYPDLIDQYDHYLALDWSMVNMSIARLTKKMKHPVIIDVPSDLKNLKDYIKNLNGKKIMTIEETTTSQWLFVELVDYLDKIVICDPYRNRLLSDGPKTDKIDAGKLSLLLKNGLLKEVYHTTDSLYDLRMLVSSYDDLVRAGVRLINQKSAIYRAEDKSHKKDKILSKNKIKNFVLTQLDEEIEHYHNKKEKYKKEFEKIIRQNKTLRNLKSIPGIGTISSVTILSSVIDAKRFKKSNNYISYCGLVKHEKFSGGRSYGKRNPRYSRKLKSVYKSAALRSICYNSPIKDYYIYLINEKKLTEQKARNSIARYIAKISLAIIKTGKKYKAYTKRHQIVSESAA

SEQ ID NO: 468208 - protein, 348 aa, unidentified
MVHFVGLDVSVKETSVCVVDDAGKVIFEQKVLTEPADIIALLTSLGVSFGRIGIEAGPLSQWLVNALTAADLPVICVETRHMKALLTAQQINKTDRNDARGIAQMMRVGLFKPVHVKTLVAQEQRMLLTSRKLLQRKLLDVESDLRGTLRNFGLRVGVVSSFRYEGRVRELVAGFPRLAAIVEPLLSVRRVMRQQLAVLHKMLLDTVRGDPVCRRLMTAPGVGAVVALTYRATVDQPQRFVHSRAVGAHLGLTPKRYQSGETDYEGGVSKCGDALLRTMLYEAAHVLLTRSGKWSWLKAWGVRVAQRRGMRRAIVAVARRLAVVLHRMWVDGSEFRWSKDSTAVPAVA

SEQ ID NO: 468209 - protein, 366 aa, unidentified
MRVYVGLDVHSKWSVFVIEQEDGKVLGRGQIPTTPAGLGRLKEEHRLSPGTAVALETGTVAFYVARELTRLGLKAVVIDAHEVRVKAQRPGQKSDRRDAFEICEGLRRGIYRTIVHVPSEEISRLRETLSRRRHFVWVRTGEINAAKRLLRAAGLGHLSKSLGTEAAWKKLLVALPVEGELRSYVAQHGAVWRCVQEQIAVLEEALATQQAPVASTVERLQSVPGVGPIVALTAVAVFSDVSRFGSCKEAASYGGLVPSSNQSGDRDTHGRITKRGSAALRSMLCEAAHHAARPTHPLNPYFAKLCAKGGYKKAVVAVAHRLCRILFAMLRDGAVFDIGKLGVEEGPFRRTRIRHYRLKAVPAVRG

SEQ ID NO: 468210 - protein, 427 aa, unidentified
MNHDPARKCSTPEAEEDFAAWVAIDWADQKHVWALQETGSPRRQQGELKASPEAVDAWVSELLLRIPGRRIAVALEQKRGALLCLLSKYEALVLYPVHPATVSRMRAALYPSNSKDDPKDADLLLDILLHHRKRLRRLDADTVETRKLQILVEDRRQLVDQGTAYSNQLRAKLKLYYPQALRWLPDLHAVVAGEFLKRWPTLPLLQKSRRETIEKFFHQHNCRSEELIQKRLEEIPQAVVATTDAAIVDSSVAMVRALVDLLAVLHTHIAALDREIAATAAVHPELPILASLPGAGPVMVPRLIAALGTQRERFACASELSAATGIAPVKQASGQSEWIHFRWACPKFSRQSFHEWAGHSLAKSTWAQAYYQEQIRKGKGHHAAVRALAFKWQRILFRCWQDGQPYDEQKYLAALRRRGSPYAQAAA

SEQ ID NO: 468211 - protein, 340 aa, unidentified
MSKLYGGIDLHSNNNVLTIIDEQDRVVHEKRLRNNLPTVLEHLSPYRQNLTGLAVESTYNWYWLVDGLMDAGYSVKLVNTAAVVVYAGLKYTNDEHDARHLAHLLRLGLLPEGYICPKELRAVRDLLRKRSQLVRHRTVQILSIQNLWSRNIGTSLSAYKTKTLEEAEVAQVFGAESERAMAIRSNLAVLKCLQEQIRQLEKTVLERVKMRPEYEKLLTVDGIGKILGLTIMLETGDIKRFAEVGQFASYCRCVASSRWSNTKKKGEGNRKNGNKYLAWAFVEAAHYGARFNERIRHFYQRKKAQKNTFVALKATAHKLARACYYIMRDQVPFDAERAFG

SEQ ID NO: 468212 - protein, 372 aa, unidentified
MNNITVYVGMDVHKESFTLAAYTIDEEKSSYIRRTPCDYKEVLKYLEFLRRVYGNDTNFICGYEAGCLGYTLYHQLTDHNVDCVILAPTTMLEQRSRKRIKTDKRDAELIGRCLAQHNYSPVHIPTETDEQVKEFLRMRDDHKEALKKIKQQIQSFCLRHNYRYEGKSSWTSAHLNWLKTLKPEALYKEILDEYLLTYTTLNDKIERLDKRIEELASKDEYKDSVKKLRCFIGVQTHTALSVLVEVGDFKRFASAEKFSSYLGLVPGEDSSGDDKTRLGITKAGNRHVRILLTEASQCYSRGAVGYKSKALKARQAGNTPQVIAYADKANERLKRRFYKMVLGKSKKHNVAKTAIARELACFIWGIMTDNIA

SEQ ID NO: 468213 - protein, 353 aa, unidentified
MDVVVERCAGLDVHKDTVMACVRMPGEEGARAEEVKEFGTTTNELLALRDWLTANGVTLAGMESTGVYWKPVYYVLEEAMECWLLNARHLRNVPGRKTDLKDAQWIAQLVEHGLVRPSFVPPKPIRELRNLTRYRKAQIEERGREAQRLDKVLQDAGVKLSSVATDILGKSGRDMLNALVRGTRDPEVLAELARGKLRAKIPALREALLGRFSNHHALLVSSILAKLDFLEEIIGSLSEEIDRVIAPFGHHVERIVTIPGVDKRVAEALIAEVGVDMAVFGTPDRLASWAGMCPGNHESAGKQRSGRSRKGPKWLQACLTEAAKAAGRTKNTYSGSQYNGCGADEARPRPPRQ

SEQ ID NO: 468214 - protein, 430 aa, unidentified
MNAPPPATPALAGLVGIDWADQEHAVCLSAADGTQVEEFTLKHTPQAIAEFVNGLRARFGGRPVGIALEQSRGGLIQALLGTEFLVLYPVNPATAKRYRDAFAPSGAKGDPPDARLLHEWLAKHRDHLRPWQPDTAVARQLALLCAHRRALVDQATRLVQQLTAALKADYPHALDWAGAELATPSACDFLIRWPTLAAVQQAQPRAVRAFDYAHHVRRADKIQGRLDQIQTARPLTTDSAVIEAHARLVVALARTLRALLPSLRAYDQALAALFATHPDAALLRSFPAAGPVMAPRLAAAFGTDRARYPQADSLAQLSGIAPITRQSGRLKTVHRRRACAKFLRQTFHEWAALTIQFCAWARADYEAQRAFNKGHHTAVRALAFKWLRILWRCWQDRVAYDDAQYTAALRRHGSPLAARLCAPIPSTATV

SEQ ID NO: 468215 - protein, 364 aa, unidentified
MAHSSKPRRQAKTAPTSTPKPTSKGAPESRPESRPEAGTRPVAGIDVGKAFLDIALHPAPPHGSPAKPGSKPWQVANTVEGWDALAAQLTAAGVTCIGLEASGGYERGVADALRARGLEVRLTQPLQVKAFAEMHLRRAKNDRLDARLIAAFTALRAEYQDARAAPDPRLRAFADRLVFIDQAIEDAGRAKLRLEHQLEPRLRRQLEADARRAGDRAARELARLAAELRAQPDLAERLDLLLSIPGLGEKTALRLVVQMPELGRLSREQAASLAGLAPFDHDSGKHAGERHIAGGRARVRTALYTAALPASYRWNPALVALRTRLQARGKTHKQALIACARKLLIYANTVLARGTPWRPTTECA

SEQ ID NO: 468216 - protein, 339 aa, unidentified
MSEHNLISVDLAKNVFQLCAMTDRMKIVFNRQLKRKDLARFMATQKPVDVVMEACYSSHYWGRCFAAMGHQVRLLPAQHVAPFVRGNKSDHNDAVAIAEAAHRPNILPVPIKTLEQSDIQSLHRMRERYVTHRTGLINQTRGLLSEYGVVALQGHRAFTQLLREVSEPEYEDLSVCLKEQLSSIADEYHYQSKRIDEITRTLSDIAHHHPLCRILLSIPGIGPINATAIYCAIGNGSQFKNGREFAVWLGLTPKQSSSGDKMSSAGITKRGNRYLRKQLVHGARAVLSRSKNKSDRLSRWTQQLVARRGVAKASVALAARIARLSWVLLQKQELYQPKD

SEQ ID NO: 468217 - protein, 387 aa, unidentified
MRAVCGLDVHKDSVYLCILHGSGEIFENVYGVLTFQLRDMRRVMQSHDVTEVTMESTSVYWIPIWRVLEPYFRLKLVNPYFIKQLPGRKSDVKDAQWIAECTLKDLVRGSFVPSERIQQLRQYDRRIFDLDAEIVRKLSKLDAVMQRCNIRLSNYVSNTDTKSYKDVVRKLCEGVTDPEELIKEIYSRIINRHGRETILAALTGVVSDAEKDTMRQLRDELDLAEKHKQECMDKMLHICKTYYPEELRRLMTIPGIKERAATSLIAEIGVDMTKFQTAAHLASWSGLKPRNDESNKKIKSRRITHGNVYLRKTIIECAWGASRTKDCFFSRFSYHQTVVRRKNKMKVLVAVARKLLIAVWHVLHDETDYKDFGANNDCDTSAANNNG

SEQ ID NO: 468218 - protein, 348 aa, unidentified
MIIIGVDFHPEFQQMASVDTDTGEFQEKRLAHREDAEKFYRALAGQKVRVGMEASGHGRWFERLLSELHFELWIGDAAKIRTKRVRKQKTDRQDAQLILQLMLEDRFPKIWVPSGENRDLRQLLWHRHRMVQARTRIMNQLQAVALNEGLRCKKKLWRKHGREQLESFRLAPWASRRRRDLLELLDRLSPTIAELSQAIEQEAEKCPEARRLMTHPGVGALTALAFVLIIGQADRFQCGKQIASYLGLVPLEDSSGNRRRLGHITKQGSSMMRFLLVEAAQVTVRSLPEWRSKYFHLMMRRGRKIAKVAMARRLAIGLYWMWRKGWDYEQVKKFGSHAGQLEPGHGVP

SEQ ID NO: 468219 - protein, 353 aa, unidentified
MKGDTTMVIVGIDAHKRSHTAVAIDASGRKLGQRTTGTTSEDHLALLSWAGQFGSQRIWAVEDCRHLSRRLEADLLGAGESIVRVPTKLMAHARDAARSYGKSDPIDALAVARAALRETDLPTAQLDGPARTVRLLADHRDLLIAERTRVINRLRWHLHELDPNHEPPARTLWRPKHLNAIAARLADFDGVVARLARVLIEDCRRLTDQIQALDEELQATMKQLAPALLNICGCAALTAAKIIGETADVRRFRSRHAFARHNGTAPLPVWSSNRPRHRLSRTGNRQLNAAIHRIAITQAHYHGPARQLLERRREGGKNKAESLRILKRRLSDAVYRALLADANLAASPVPLAA

SEQ ID NO: 468220 - protein, 410 aa, unidentified
MDEQQTTSAAGIDWAKDYHALCVVEQTGRVLLERRFSHEEGAIAKLCRVLVEMGVSSVAIERPEGVLVERLLDCGLVVLAIHPNQLKAARPRFRASGARAKSDSFDAFCLAELARTDWHRFRALVPDSDETKALRALSRSREELVGTRVALANRLRAELEAFWPGAAIVFAQIDSAISLAFLARYPSPKEASSLGEKRLSGFLSRHGYPGRKGASELLGRLREAPKGLAGEAETLARRQRVLALVETLETLVGQIRLFEERIAKAVRAHPDGDLFLSLFRSPNSTLTAACLLAEIGDCRESYPTNEAKAADAGMSPVAVESGKRKVAGFRRACDKRLRKAVATVAESTRHHNPWAKDIYRRARARGCDHAHAIRILGRAWVRVIFRMWRDGVPYDRARHGGLRRLQSAGG

SEQ ID NO: 468221 - protein, 412 aa, unidentified
MAQEALSWFAGVDWSSERHQVCLVDAQGNIVGEHEFPHSGVGLAEMGDWLLSIAGAASTVAVAIEVPHGPVVDSLVDRGFIVHAINPKQLDRLRDRFSVAGAKDDRRDAYVLGDGVRTDRRLFRRLHVADPKLIELRAWSRLAEELTEEQRRLSNRVGEQLWRYYPQMRELTDDLAAPWFLELWTIAPTPAKALQLRKPTIEQILKRHRIRRVDADTVLRTLREPAIKVADGVAEAAGIHLRSLVARLRVVNRELREAGVQLDKLCMSIGESEATSGDCLRRQDVLILRSMPGIGRINLAALLCEASGPLGSRDYQALRTLCGAAPVTRRSGKSRIVIMRYAAHVRLRNTVYHWARVATQHDPKCRARYAALRQRGHSHGRALRGVGDRLLALACVLLQRQTLFDPHFAQAG

SEQ ID NO: 468222 - protein, 352 aa, unidentified
MQHFIGCDVHTRIQVVAWIDEQTGEIKKRRLEHEGEEVRKFYAQFPRGTVVGIEATFPAHWFERLLGELGLELWVGDAARIRASEVRYQKNDYLDAELILDLLRTGRFPRLWVPSLEERDLRQLLVHRLKQVRARTQVKNQLHALAISQGVCRKRKLWSAKGRKELESLALLPWAARRRQELLETLDRLDAQIRELDRAVEEAGREREEVALLRTHPGVGMVVGLAFVLTVGPVERFPHSRKLVSYLGLNPSENSSAGHQRLGSISKQGNTMMRWLLIESAQTAARLDPQLRRTYQRLKERKVSGVAKVAVARRLAVRLFWMLRTRHNYTQLVHMSGSPSSAVVPPQGGPNV

SEQ ID NO: 468223 - protein, 422 aa, unidentified
MEAAVVVYAGIDVSKGWLDLALLAPGGQEGEAGKSRAGNEKGSGIERRRFSNDATGRESLVKLLLMKRPCQVVLEASGVYHLPLLTLLLEANVAAFLANPYQIAAFRKAWGARNKTDSQDAVLLARFAKAYEGRLEHRLPPPAKLAYLKQLLVYREQLIKRETMIKGSIEAAGWMAEAVGWTVGEAGNRERDTERDWKTERNGEAEQDGAAHQIRSWLKEDLLRVRERLTEVAQEIDRLLSLFPEAAVLQKQKGVGPQVAAAVLAFLPPALWDSPRRAASFSGLIPEQQHSGSSLHRSRLSKKGPALLRKKLYLAALVAVKHDPEMKAFYLRLLSRGKKRKQALLAVAHKLLRRLTGRLKAYYRGQEPGQEGNQGQNQKTGRKQSLKQRDNQSNERSHEDRQNHRLAAERVERVLEVNGVAG

SEQ ID NO: 468224 - protein, 387 aa, unidentified
MPQPNDLSRSLVALDQNSTIIAVIEMSQSSWLVAGMLPGIERQPRKKLEPSPERLLALLQRWRDEAVRAERTITRIALAFEAGRDGFWLARWLEARGVEAHVIHASSVAVSWEHRRAKTDRLDTELLKRGFLGWLRGERGHCSMARVPTIAEEDAKRPNRERDCLVGERTRIVNRIKSTLARLGIRNFKPTLRKAAERLATVHTAEGMPLPPNTLAELQRDMARLGFVVSQIREIEDARQKRLEQQHATGPHAMVRLLARIVGVGVETADMLVHEVLSRPMRDRRAVARYAGLTGAPDESGARRREQGLARAGNARVRRGMIQLAWRFLMFQKESALALWYRARTADSRIGTRKTMIVALARKLVIALWRFVTTGEPLEGVVLRPAS

SEQ ID NO: 468225 - protein, 412 aa, unidentified
MNLFIGIDVGKLILSYCAINSDDQCLFLDEASNDLNGASQIKQAILAETKLSDYQKVIVGMEATSVYNFHPTTFLSEDQELQKNQLEVITINPYTSHHFSELFDDGKTDEVDAKQLAELIRVKPLGTSVVRQEKYMALQRLTRERYHLIHQLVDAKNQFLNNLYYRCNTLDQTLPTSVFGSTMMSLITDEELSLDEAAAMPLDQLAVKLQQLGHGKFGNPEEVAKAIKKAVRSSYRLSKAVTESVDSILAVYAEIIRTLQAQITKLDKSIQQLSVQITEIKCLTSIPGIGAVFAAGIVSEIGQITRFPNESHIAKYAGLAWMPHESGTSIRQSTPRTRKGNQYLRYYLVEAANSVRRYDPTFQRYYQKKYKEVPKYRHKRAAVLTARKLVRLVDVLIRNNQLYVPPETGIAE

SEQ ID NO: 468226 - protein, 322 aa, unidentified
MAEPVTPPTPTRFIGCDVGKTLIVVCDSRDGSTRTLANTPEALAGFAARLDTTCLVVCEATGGYEDALLAALLAAGCPAHRADARKVKAFIRSFGTLGKSDSLDARALARYAQERHARLARWQAPDPQRERLQTLVLTRADLIAQRTACTNRLAAPGAEPVRACLDALRACLVAQIQALEAAIAELVAGTADLRRAERVLRAIPGIGATTAAALIALMPELGRIDRRQAAALAGVAPHPNQSGAADAYRRTRGGRPEVKRTLFLAALTASRYNPALKDAYQRLRAAGKKPLVAITALMRRLIVIANARLRDAYAHPQNSAAN

SEQ ID NO: 468227 - protein, 375 aa, unidentified
MKEKVRFLGLDVHAETIAVAIAEPEGEVRSLGTIPNRSESIRKLIKKLGPAEKLRACYEAGPTGYVVYWLLAELGVHCDVVAPTLVPVKAGDRVKTDRRDAEKLARCYRSGDLTAVWVPDEGSEALRDLVRAREAAKQDELRARHRLGKFLLRSGQRPPSGVKPWTRAYLIWVAQLRFTQIAQEATRQDYLHEVEHMRERVTRLEQAITEAVKLASPALQQVINDLQALRGIAEISAVTIAAELGQVSRFDSARQLMGYCGTVPSEDSSGRRTRRGSITKTGNAHLRRIVVEAAWSYRRPPCIWYGLRGRQESIAEEAKEIAWKAQHRLHKRYMKLGAAGKDQRKIVTAVARELLGFIWAIGTRAETVASQRLAA

SEQ ID NO: 468228 - protein, 347 aa, unidentified
MQILKQVLGVDVAQKELVVTLGRLNKDLSIDLYSYKVFRNTDLGIESLVKWVKKLTTKDVPVQYVMEATGVYHQKLAYYLDENGFEVSIVMPNKISNYMRTLENKTTTDKTCSEAIAQFGLERKLDRWHRPDRIFKNLQQLTRERDQIVTERVMVKNMLHAEQTEAEPNPNSLKRLKARIQFMNKQEFQVKKDIELCVENESGVKKDIQNICSIPGVGKLTAVIVLAETNGFNLIRNKKQLTSYAGLDVKEKLSGTSVKGKPRISKIGNTALRKAMHLPSLSAIKHDERFKEVYVRLVSRHGIKMKAIVAVQRKLLELIYLLHKNNTTYQKDYENKERVQLQLADTL

SEQ ID NO: 468229 - protein, 349 aa, unidentified
MSQTLNTAIAVIGIDIGKNSFHVVGLDARGAIVLRQKWSRGQVEARFANMPPCLVGMEACVGAHHLSRKLQGFGHDARLMPAKYVRPYSKGQKNDFRDAEAIAEAVQRPTMKFVATKTADQLDLQALHRVRERLVSQRTGIINQIRAFLLERGIAVRQGQRFLRAELPRILATPSNALSPRILQMIQDLTSDWRRLDERIEGLSGEIEAIARHDIGCERLMSVPGVGPIISSAMVAAIGAGDAFSKGRDFAAWLGLVPRQMSTGDRTILGKISKRGNRYLRVLFVQVAWVVLIKPKSWERYGLKPWLEAAKKRLHHNVLAIALANKLARIAWSVLAYRRDFEASKLRVA

SEQ ID NO: 468230 - protein, 359 aa, unidentified
MKIVGCDFHPSWQQVAVFDPESGEWMERKLMNGDGEAERFYRELEAPALIGIEACGNSQWFIELAEGLGHVVWVGDAAQIRASYVRRQKTDRRDAGHILKLLMENRFPRLWTPTSEQRDMRQLLIHRHKLVEIRTRVKNGLQHLALNKGLQKKNALWSVRGRAELEKLPLAGWTLRRREDLFGLLKELNRTLEQLDEAVERTAQDHPQARLLMTQPGVGPITSLAFVLTIGDVSRFRHSKQVSSYLGLIPREHSSGGKQRLGAISKQGNSFMRQLLVEAAQTANRLDEGYRRQYQARCHHKAKGVAKVATARKLAVRLYWMLRQNVGYPEIALIESSPRVPLIGASQIVTLNERSRIQQ

SEQ ID NO: 468231 - protein, 336 aa, unidentified
MSFNFFLGIDVAKQTLDCALLDQDGHLKHQAQILNTQKAVEQLMQQLKELFGVLPATTLICLEHTGIYNNHLLEVFTRPDYCVWLESGKQIRYSTGIQRAKTDSVDALNIARYAQRHHPQARLWKPASKLITSLKALTSLRSRLLLAANTLKQPLKEAESFMDKGILRSLEKASANSLKALEKDLAAVNSQIEALIKNDPELNRLFCLLTSIVGIGAVTATGLILATHAFTDGKTAKQFACYAGVAPFPYQSGSSIRGRTRVSPMADKGMKTLLHLSAMTAIRAKGELRDYYRRKVGEGKNKMAVLNAVRNKLIGRAYAVVSKNQEYDKTYAYSLA

SEQ ID NO: 468232 - protein, 341 aa, unidentified
MDIIKQVVGIDVSKDTLAVSYGIVNLNQEQRITKPITFDNNLKGFKELISFVKKNKEQSKAPLYFVMEATGVYYENLAYFLTEKHQKVIVVLPNKTKNFSKTLDIKSKTDKLDAQMITQFGLERQMQLWQVPSPIMKTMKSLTREYNSIKRMAAQVKNQLHAKEHSFEPLKESLKRSKATLTVFQKQLKEIEKQLKELVKKDSDLNDRINKIDKIEGVGFMTIVSIIAETNGFALIENTKQLASYAGLDVVYNESGLKKHKTSISKKGNRFLRQAVYMPALSACKHNPRLKQTYISLVIKKNIKKVAIVAVARKLLILIYTIFKKNVDYIPNYNPAYAVNI

SEQ ID NO: 468233 - protein, 314 aa, unidentified
MPTHVGIDVSKTRLDVAVHENGEQFDCGNTPEALEGLVQRLRALGPALIVLEASGGYEQEALFALLAAGLPAALVNPRQTHNFAKATGYLAKTDRIDARLLAHFAATVRPSVTAAPPPAQIALAELISRRQALVEMLVAEKNRLRLTRTQAARAHIERHIDWLKQQLNDVDKELRLHIRGSDTWADLDRLIESVPGVGPLAAAALIAWLPELGRLNRREAAALVGVAPYNHDSGLHRGCRRIAGGRTAVRTALYMCAVAGLRCNPVLKAFYVRLKAQGKPSKVALTACVRKLLVTLNAIVRDRRPWDATRVAVA

SEQ ID NO: 468234 - protein, 337 aa, unidentified
MVTAVAAPATPCAVGIDVAKAHLDLAVHGQGQPWRVANDAHGIASTVQRLQALAPGRVALEATGPYHHAIAYALQQAGLAVVVINPRLTHAFAKSQGYLAKTDRLDARVLAHYAAITTLQPRPLPDPPAQALRQLVARRRDVQAQLVAEHNRLEGAIPAVVTLIQAHLAWLAAHLRAVDQALAAAIAAAPRWLDTARLLRTVPGVGVVSATALLAELPELGTLSRQQIAALVGVAPFHRESGGSQGQRQTWGGRAGLRTTLYMAALVASRRNPVLQPCYARLVAKGKPKKVALIAVLRKLVVILNAMMRDGTPWTPYENRTGPAVASTSPVPVPPTV

SEQ ID NO: 468235 - protein, 347 aa, unidentified
MRFYTKQHKFYCGIDLHARTMYLCILNQDGEILMHRNMPAGPDAFLKAIAPYREDLVVCVECIFTWYWLADLCAREGLPFVLGHALYMKAIHGGKAKNDKIDAQKIAVLLRGGMLPQAYVYPAEMRATRDLLRRRMHLVRKRAELLTHVQQTNWQYHLPDIGKKIAYKANRGGVAERFPDPAVQKSIEVDLALIDYDDQLLRDLELAIVTTAKKHDANTLYLLQTVPGIGKILSLVLLYEMHDIARFPRVQDFVSYCRLVKCAKESAGKRYGTSGTKIGNAYLKWAFSEAAVLFLRNNPAGQKYLARLEKKHGKGKALTILAHKLARAVYDMLKRGVVFDHNTFLQS

SEQ ID NO: 468236 - protein, 408 aa, unidentified
MARYYLGVDWADQSHQLYVSDESGRKIRELEVQQTADGLAELGRWLEESRGQGIELWAAIEKPEGRVVDFLLDHGVVVYPVNPKALDRARDRFRMSPSKSDGFDAYVLAEFLRTDHAHLRALEPNSAEGQELKMLTRDHQRLGRQKTRLLNQIGITLKEYYPVPLEVFESLDTKIALDFLKAYPTPQALSKLTRRGWKRFAKRDHHLSEARCSELWDKLNKPQLAVPTHVVRAKAKLLAALVMQLEASVKAVDSYSQEVQSFFAAMPAAEIAKTLPGGKSGTTVASIWAELGDAPKRWNSFRHLQAEGGAVPVTKASGKSRMVQFRFACNKHLRQAMYWFSFNSLQRSEWAKKYYRNQRAKGHCKHESLRALGAKWLKIIFVMWRDHKPYDENYHLANIARQMMRQAA

SEQ ID NO: 468237 - protein, 390 aa, unidentified
MSAAPRWHVRSAGKWLNSPALMKNTIVHHEGAASLEAARTKVKRCGSIIKIGLDVHARIYVAVAQYDQLLPKPARRLAPSEFVPWVRQLVRAGHVVYVVYEACGFGFGLYRNLQAAGAHCYVIAPRKLDEQCTRVKTDPRDATTLCQRLSRYVEGNTRELAVIRVPSEAEEQARHVSRQREQLVRHRQKLEAQGRSLLVGHSLPSPAHWWKNQTWSRLTKLLPSWICLRLEVHRPALLTLEQQISALSAELEAAAPADVPAGVGKLTTVVMTREICSWERFRNRRAISCYTGLCPGEHSSGTKRVPGSVTKRGNPRLRAALVECAWRMVRFQPNYPPVKKRLSVLAKGARATGAQRKKAIVAVARHLAVDLWRVHTGRNTAAQLGLTIND

SEQ ID NO: 468238 - protein, 342 aa, unidentified
MEQYVGLDVSQKTTAICVVDGSGARVWQGECRSDPETMALIVRSRAPAAVKVAFESGPLAVWHWHRLRELGLPIVCIHARHARAALEAQVNKTDANDAHGLAQLVRSGWFRAVEVKSVESYRLRALLTTRSQLVAIRTRLYNQVRGLLKTFGIVLPAGKGGSFERLVERHVPADGCIELAIGGLMRIWREVTAELDQLNRRLQEIAKKEEICRRLMSIPGLGPTTALAFVTAIDDPPRFKHSKDVGAYLGLTPRRYQSGEIDRVGHVSKCGDRLTRSLLFEAAGVLLYRSKCPTALRPWGLALSRRAGYDKARIALARKLAVLMHRMWTNGTSFATQPACAA

SEQ ID NO: 468239 - protein, 325 aa, unidentified
MRKISTIGLDLAKNVFQLHGIDASGAVALRRQLRRGQVEKFFAQLPPCLVGMEACGSAHHWARVIGRYGHEVRMMPPAYVKPYVKRNKNDGRDAEGICEAVGRPTMRFVPVKSVEQQATLAVHGTRALLVRQRTMAANALRAALSEVGIVAAQGYEGLRELMSRLEEPSEDIPEIMRGALLMLAKHWQVLDADERMLEQQIAKAARCDRDAKRLMEVPSVGPMIASTVLAKVPDAKVFRSGRDFAAWVGLTGKDHGTGGKHRPGRISKQGDRALRALLISGASAHLRQQKARGVTVHGCAICWREGLTRSPWWPSRPRPRASSGP

SEQ ID NO: 468240 - protein, 344 aa, unidentified
MKIKLLGIDLAKNVFQLCALNQANKVLFNRTIRRAQLRSTIAKLEATIIAMEACSSAHYWGRSFEAIGHKVLLVPAQHVTPFVRGGKSDARDALAICEAAQRPNIHLVPIKTVEQQDIQLLHRLRQRQVQHSTALANQIRSLGREYGVIFPTGIKPLISHLPEVLEDGSNELSPVARHALADQYQCLLDTRQAMGAFLLQIEQLAAQYPAYDDLQILPGIGPMTASAYIAAIGNGRQFKRGRQVGAWLGLAPRQYGTGGELKLGGITKSGDRHLRTLMIHGARAVITRGLKTRTELAQWVQPIIDRQGFNKAVVALANKLARISWVIVTTGEPFDMKQAFKPAS

SEQ ID NO: 468241 - protein, 341 aa, unidentified
MDIAVLGIDLGKNSCSVVALDSSGKVTLRRRMLRKTIVALTSKLTPCIIAMEACCGAHHLGRVLSAQGHTVRLMSPEYVRPYVKAQKNDDRDAEAIAEAATRPTMRFVALKSEQQLDMQTLHRARDRAVGERTSLMNQLRAVLLERGVIVPQGRAKLRLRVTELLQQSPEQISSRIRLLIEDMLMRWQALDEWIAGFDGEFAAELKRDEAARRLTSIPGIGALNATALVAAIGDAQTFARGRDLAAWLGLVPRQATTGGKPRLLGITKRGSKYLRKMLIQGARAALPTLSRSNTRLGQWLRGLLVRAHSNTVVVALAAKMARTVWALLRYGTTFEPRAIAI

SEQ ID NO: 468242 - protein, 310 aa, unidentified
MGQSFVGIDVAKAAVEVCVRPTGEAFAVPRDEVGLARLVERLTALGPALVVLEATGGYEASVAAALAEGGLAVVVVNPRQARDFARSTGKLAKTDRVDARLLAHFADAVRPPVRPLPTAAAAELGALVARRRQLVDMIRAEKTRVQQARSREVQGRITAHLQWLERELAGIDDDTRRLIRSTPVWRETDAVVRSAPGIGDVTASTLIADLPELGHLDRRRIAALVGVAPMNRDSGAWRGHRMITGGRAQIRHHLYMATLTAITHNAAIRVFYHRLVAGGRPKKVALVAAMRKLLTILNAMVRDRRQWQNA

SEQ ID NO: 468243 - protein, 339 aa, unidentified
MKKVNAIGIDLAKSIFHIYGVDKHGNCLFKHKAKRHNLLEILARYESKTVFLESCGSSHYWAREINKIGHNVKLIAPQFVKPYLKSNKNDYLDAEAIAEAGTRGGMRFVSVKQPWHQDMQMFHRIRDRLIKNRTALCNEIRGFLLEYGIEVARGREKLVKELPAILDRDDGFLTPIANAEISELYEELKILNQRIEDSDKKIELQSNTNEDCVRIKKLRGIGPVVSTAIVAAAPNPSAFKNGRDFAAWMGLVPKQHSSGGKQNLLGISKRGDPYLRKQLIHGCRSTVYRSHEDGDAIQKWVNQLKQRRGSNKATVALANKNARMIWALLTKKEDFKFVA

SEQ ID NO: 468244 - protein, 408 aa, unidentified
MEVLYPRCAGLDVHQQTVVACARIASGPAVQQEVRTFGTTTGALLALADWLTAHGCTHVAMESTGVYWKPIWHVLDGQFDLILANALQIRSVPGRKTDVNDAMWIADLLAHGLIRSSFVPPAPIHELRDLTRTRKQLVREVSQHTLRIQKVLEDANLKLTSVISDVMGMSGRAMIEAITRGEQDPERLADLSQGRLKASRPAVIAALQGRVTPHHRFLLRLHLTQIDALEVAVRDVEARLGEALAPFQAAVDRLMTIPAIGRTVARVIVAEIGVDMTRFPTAGHLVSWAGLRPRQQESAGKRLSTRTRPGNPWLKTTLVQVAWVAARTRNTYLRAQFLRLKSRRGAKKAILAVAASMLTAAYYILKDDVRYHELGADYFEHRDKAQIARRLVRRLEALGLSVEVRPAA

SEQ ID NO: 468245 - protein, 306 aa, unidentified
MNTFVAVDISKETLEVRLPHTSISLTNDADGFEKLIGQCQDLTNPMVVFEATGGYEQSLKNALHDANVDLCLVNPARVRAFASSEGLKAKTDAIDAAMILRFAQEKRLKPTPAPSPAQAKLMALLDRRSQVSEHIAREKNRRQKAADFIVPQIDESIKQAEAQLQELERQISIVIRETPEMKKQDGLFQEVKGVGEITSWTLIAFLPEIATLTRNQTVAMAGVAPYNRDSGRQQKPRRIQGGRAKIRKVLYMAAQTAAIHNPVIKPYVQALRERGKPYRCAIVAAMRKLLLHLRSLINNPEKTLAV

SEQ ID NO: 468246 - protein, 351 aa, unidentified
MKYYAGLDVSLKETAVCIVDQNGEIVKEGSVFTEPEDICRFLQTAGVQFDRVGLEAGSLSPWLCHSLTAMGLPVVCMETYHAKAALQAQKVKTDRNDARGLAHIMRTGWFKAVHVKSDQSQKLRVLLKNRRCLVEKRVDLENQIRGTLKVFGLKTGQITALGYEGRIRELIDGDRDLELYVIPMLLVRQAVLEQQRKLDKLVRDVVKEDAVCRRLMTIPGVGALTALGFKTSIDNPYRFKKSRHVGSHLGLTPRKYASGEIDYDGQITKCGDALARSSLYEAAIVLMCRSKKWSALKAWGMKIARRSSMKNACVAVARKLAVIMHRMWIDGTDFQWGREPAAAMVATGCAA

SEQ ID NO: 468247 - protein, 335 aa, unidentified
MVLIAVDPHKASYTARAVDGRGGVLGGTRVTAKEREALLRWAEQWPQRRWAIEGARGLGQPLAQWLVGRGEAVMDVPARLVRRVRELGGSDKSDAKDARAIAEAALRAEGLQRVEAEDESTVLRLLTDRRDDLAGERTRTANRLHRLLRELAPGGAPRRLSARRAAALLCEVQARSAADRERLRQAEELLAELRRLDGQLRESLQRITVAVRARGTRLQGIPGVGPVVAAKLLGRTGRVERFASEAHFASYSGTAPLEASSGEVVRHRLSRRGDRQLNAALHIVAVTQLRMRASRGYVYYWRRRAEGKSAREALRCLKRQLARVIYRCLRADAMR

SEQ ID NO: 468248 - protein, 397 aa, unidentified
MYIVGIDIAKRKHEAAVIDGEGAVIIKPFSFTNNCSGYNRLLAMLTKAKLPLDEVSFAMEATGHYWLALFTRLQKEGFRVQVINPVQTNSIRSFYIRQAKTDPRDALLIAEVIRFGHFSESTLHPENIYELRELCRGRHAIVSMQADVKRKVVALLDQVFPEYETAFTNMFSDTSMAILQTCPTPKELSEMPLEELCHLIEVSSHKRFRMAKAQELQALARNSFGFAMAGDVFSTMIRLYAKHLDFLKQQVREMDRKIAEIMDTLDTPITTITGIGPTLGAYILSEIGDINRFSSSAKLAAYAGIDPTMRQSGEYNGVRNRMSKRGSPYLRHAIWLATSSAVLHDPALKLYFQKKRDEGKPYMASVGHACRKMVSIIYAVMRDNKAYTPYIPNEISA

SEQ ID NO: 468249 - protein, 326 aa, unidentified
MKNCFVGIDVSKDTIDICLLKDLQESLVIKNSKRDILKFIKSKLKDGFNYYICFENTGKYSWLLTELLIELDFKVYLVNPLHLKRSMGLVRGKNDKIDAIRIANFIKKNYEDINVYLPLREELTMIKILLSERNFKVKQKRELNTKNKDLVILSNKSLAKSLIRKNKKIILELEKQIKEIEKEIKLIIKLDDSLNILNKLLQSVPGVGDILSWNIIIKTNEFKTIKTPRKLACYAGVVPFHNSSGTSIFGKNRVSYLADKDLKRLLHLGAMSAIRLENNFKKFYLRKVKEGKNKMSVLNAVRNKIIHTCYALVKNQTFYKNNLVMS

SEQ ID NO: 468250 - protein, 415 aa, unidentified
MATPLVVGVDVHRKANAVALMDGNGAELCTGFSVANNRPGTQKLAQTVAQHMSSGTFDCVRIAAEATGWYWWHFFRTLDQDQTLQQWPLDLLPFNPRLTANFKKTYVDLDHADPIDAFVAADRLRLGRDLPAPFHYEERYTGLRLLTRYHYHLVHALAREKAYCIAILYLKASAYTQVKPFSNTFGAASRAVIEEFASIEDIAALPFADLVEFVDSHSKRTLEDPAATARLLQQMAAESYPLPGALHAPVNLILRSCLQQIVHMEQAQKRVDTAIAQAMLAIPHTLETVPGIGPVFSAGMIAEIAGVERFGDDEAKVAKFAGLKWRKHQSADFQAEETRLTRTGNRYLRYYFCEAANAVRLHDAEYAAYYDRKFHEVRKHQHKRAVVLTARKLVRLVVHLLMTNQPYQARRPHHS

SEQ ID NO: 468251 - protein, 340 aa, unidentified
MTITTVGIDLAKNVFAVHGVDQNGRTVLVKPKVSRAALPELIASLPPCVIGMEACSGAHYWARLFRQYGHEPRLMAAKFVSPYRMAGKSGKNDAADAQAICEAVRRPHMRFVPVKDESQQAMQCLHRTRQGFIEEKTATYNRLRGLISEFGVIAPQSADALRHMVSVQKSSLPLQVQQCVDDLMEHVDRIEANITEYDRILSHIAKTDHRSQRLMELKGVGPTTAYALVASIGNAHDFKNGRQLAAWLGLTPSQYSSGGKSKLGRITKAGDSYLRTLLVQGARSVLIGAGKRTDSFSRWVCMLVERRGYWRAVVAIAAKNARLCWASLHYGDDFRLYSVN

SEQ ID NO: 468252 - protein, 344 aa, unidentified
MLTETEILILKNKVMEFKNIIGVDMAKETLEFVLLEKGKKKLQLQVMNQPKEIRSVFRKNKIDLKHTLICLEHTGIYNNHLLNFFNEQGAHVWLENPVHIKRSLGLVRGKNDKIDADRIASFAYDHQAKARLWNPKREVIEKLKLLMSQRVRLMKAKKALEVPIAEAKKFCLKEHVSIMKDTCRAAVRGIKKDIELVNQYIKEAIKSDERLKELFGYVTSVPNVGTIVGTAILVSTNEFKTINNARKFACHCGVAPFEHTSGKSIRGKTRVSHMANKDLKTLLHIAALGSTSRPGELRDYFERKVAEGKNKMLILNAIRNKLIHRVFACVRDQKIFVKKDLTFV

SEQ ID NO: 468253 - protein, 340 aa, unidentified
MLHVAIDLGGRESQICVREEDGSLVKEGRWPTAKLEKLLEEFPAGSRVVVETCAEAFSTADAARAAGHEPRVVPATLVRSLGVGQRGIKTDKRDARCLSEVSTRIELPSVHIRSEQSRMRKTLCGMREGLVSSRTQLVNQVRGWLRGQRQRLSSGAVETFTARVRKHFGEQELPRCVARHLATIDALSEQIKDADAEVHAEAKSDVVCQRLMSVPGIGPVSALRYVAAVDTPERFHDAHALESHLGLTPGEKSSGDKTRRTSVTKAGDTAVRRTLVQSAWTLRRCRPGDPIVRWCYEVEKRRGKQVAIVALARKLAGVLFAMWRDGTTYQPQRAAAVPVS

SEQ ID NO: 468254 - protein, 419 aa, unidentified
MNMNAVGIDVSKRKSTIAVLRPSGEVLMKPFDIPHKSADFQTLVNKLKGLDGETRIVMECTGHYYEPVARELAQADFFVSAVNPQIINNFQGQDNPLRKVKTDKADSVKIARYTLDSWANLKQYTLMDELRSQLKTMNRQFDFYTKHKTAMKNNLIALIDQTYPGANTYFDSPARDDGSQKWVDFLDTYWHVDCVRKMSLNAFSDHYQKWYCRRKYNFSKAKAEEIYGAAKELIPVLPKDNFTKCIIKQAVAQVNAASQTVERLRALMNETASKLSEYPVVMAMKGVGPSLGPQLMAEIGDVTRFTHKGAVTAFAGVDPGVNDSGDYSQQSVHASKHGSPVLRKTLFQVMDILTFYLQAVYFRLIKYCKGTLFFKKTINISFVYCSTLPNPIYHFLNHSCSILLNHLIPLMSLPVQNDV

SEQ ID NO: 468255 - protein, 411 aa, unidentified
MRRVIGMDIHRTFGEVVIWEDGRLTRAGRVDMTRTALEGFGKNLRPTDEVVIEATGNCMAVSRVLTPFVARVVIANPLQVKAIAHAHVKTDTIDAGTLASLHAAGYLPEIWTPDAATERLRRLVARRYQVVRHRTRIKNEVHSILNAHLIPPCPHADLFNGRGRAWLERQSLPDDEQVAIARHVRELDRLAEDLSALDREIAASALDDASIARLVTITGVNLTVAAGIMAAIGNIGRFESPQNLVSYFGLNPRVRQSGLGAAHHGRISKVGRSHARAMLVEAAWACAKAPGPLHAFFVRIRAKRGHQIAAVAVARKLTVLCWHLLTKEAEYLWARPALVANKRRAMELQAGKPQKKGNKPGPAHAYNVKALRDQEMRIAEQAEKAYEHFVGQWKQRGPKSGRTDAAKEERR

SEQ ID NO: 468256 - protein, 428 aa, unidentified
MKDIYEQVKRGCGIDIDSLKLWASTFVTSKKGTIEWETKVFDNTVDGIEELIEWLKEKKTTHVAFESTGCYWQMLYSFLEDSFEVIVANPRQTKPLKGKKRDPDDAKQIARFLQMGSIIPSFIPPRNVRELRDLTRQHVNITEDIVRVKNRITKTLREASITLDAHLSDLFGVSGRAMIQGLIAGMPGDEIAELAKRRLRSKIPQIKDSLRFPLSDHYRRILFRYWKQFTFLEEELESLEKDLDEKMKPFLAVIKRLQTIPGCGMKAARGIISEIGNDMSRFPKEKNLCSWAKVCPGNNSSGGKRKSGRNSKGNRYLRRYLGEVAWAAVRTKGSEFRDQYLKKQSRLGKKKAIVAIMHKILRIIYHMLSKGEDYQTNYEREKRKDPRKALIGFKLKNISNEDLISELLSRGMSDIKWDWDSEENAVSQ

SEQ ID NO: 468257 - protein, 412 aa, unidentified
METVVERPAALDVHKERVTACVRVPGDGRSREQHVAEFQTTVAGLLTLRDWLAAFGVQQVTMEATGVFWKPVWAVLEDEFECVLVNARHVKQVPGRKTDVTDSEWICQLAEAGLLRASFVPPKPIRALRNLTRYRKTQIQERAREANRLHKALEDTGIKLDCVATDILGKSGRDMLDALVSGTTDPEILAELARGKLRKKIPALKQALQGRFDHMHAVWIGAILAHIDFLDEQIANLTEAIGEQIAPFEQAVELLCTIPGVQRRNAECIIGEIGIDMAVFPSAKHLASWGGQCPGNDQSAGKRRSGRTRKGSKWLDWALEESAMVAARSNDIYLAAQYARLRPRRGHKKALGAVKHSILIACWHMLSTGELYNDLGGDYYRKRDPERVTKRLIAQLESLGHKVTLEELPQAA

SEQ ID NO: 468258 - protein, 417 aa, unidentified
MNAVGIDVSKGKSTVAIYRPGDQVILRPRDFRHTQTGINSLIEIIKGLDGETKVCMEHTGRYYEPVATWLSKADIFVSAVNPMLIRAFGDDSLRAPKTDKADAKKIARYTLDRWTKLKQYGRMDETRNALKTMNRQFGFYMDQKTAMKNNLIALLDQTYPGANTFFDSPARSDGSQKWVDFVYTYWHVDCVRGKSLNAFTEHYKNWCKRKGYNFCAAKAEQIYHGSADLIAVFPKDANTKMLVHQAVEMLNTASKTVETLRTEMDRTAATLPEYPVVMAMNGVGPTLGPQLMAEIGDVTRFEKRGSLTAFAGVDPGKNDSGQHSQKSVKTSKKGSPHLRKTLFQIMDSLIQRSPEDDPVYAFMAKKRAQGKPYHVYMTAGANKFLRIYYGRVNEYLSGLSDVGEQPDQPAIEGESCS

SEQ ID NO: 468259 - protein, 355 aa, unidentified
MSSEKYIGLDVHQATICVAVMDAKGKVVMESILETKATTILEFFAGLRGTLSVTFEEGTWAAWLYDLLKPHVANLVVCNPRKNALLKHGNKSDKIDARKLANLLRLNDLEPVYHGETGVRMLRELARSYLTIVKDVSRVMSRLKAIYRSWAIPCAGRDVYYTRHRGEWLGKIPEAGCRRRAEQLYQQLDMLQPLRQQARRELLAESRKHTITAKLRQIPSLGPIRSALAVALIQTPHRFRTKRQLWTYSGLGLETRDSGEYHYVEGQVRRRKKQVFIRGLNKDHNHDLKGLFKAAATRASVRPGPFQDFYQRSLAKGIQPTMARLTLARKIAAITLTLWKKGENFDVEKLKAQAA

SEQ ID NO: 468260 - protein, 346 aa, unidentified
MNSVGIDLHRRRSHIAVIDDEGTETLSRRIENDPATFLELLAEIDGESEIALEATYGWEWLADLLCDAGYELHLAHPLRTKAIASARVKTDSVDARTLAQLLRADLLPEAYVAPRELRDLRDLLRHRIALTQMRSALKNRVHAMLARHGVQHGHSDLFGRAGTAFLSELALRQPPRRRLDSLLALIGDFDRELKATTREIDRRARRDERVDVLTQIRGVGPYTAMLVIAEVGEIARFPTARKLCAWAGLTPTVRSSDGRARLGHITRQGSRALRWAMVEAAQKAPLGGGPLRETFERIAKRRGRKIAKVAVARKVLTLCFYGLRDGEIRCLARPHRPSALKVMATS

SEQ ID NO: 468261 - protein, 360 aa, unidentified
MEVGQTMADHGVVGGVDTHKDLHVAAVVDELDRVLESRCFATTRHGYQQMLTWMRSFGQLRRIGVEATGTYGAGLLRYMQNAGVEVLEVTTPDTHDRRKRGKNDDLDAQNAAHAAFAGRRTVTPKSRDGMVESLRVLKACRKTAVAARRVALQMIHNTIVCAPDELRETLRRMTRMQLIRTLAAWRPDLTDYRSVVSAYRITLKSLGRRYLELHDEIADLDTMIVAIVDELAPALVARNSIGHGSAAQLLVTAGDNAERLQSEASFAALCGVSPVPASSGKTTRHRLNRGGDRAANSALDIIAIGRLRTDPRTKAYIAKRVAEGHSKLEAIRCLKRYIAREVFSLISQRKREINQGRNAA

SEQ ID NO: 468262 - protein, 310 aa, unidentified
MDMLTVGIDVSKDHLDVAVHPSGEAFTVERNAAGLDQLIVRLRELRPGIVTLEATGGFETVAAAALAAAGLPVVVVNPAQIRAFARALGQRAKTDPIDAAVIARFAAATNPEVRPLPDEATRLLSDLVARRRQIVEMMAAEGQRERRLNNMRLKKSIARLRKALEKELAELDDEIDQSVRGSPAWREKEDLLASVPGIGPVIARTMIAELPELGTLNGKQIAALAGLAPFTRQSGQWRGKSFIGGGRTAVRTALFMGAMVARRHNPVLRAFFERLVAAGKPKMVALIAVARKLLVILNAIIRDNRPWQTA

SEQ ID NO: 468263 - protein, 378 aa, unidentified
MYRILKIGMDVHTTNFTLCAVEPILGQEANVLARATVGPDYKNIIDFISKLKNTLKVTDKECDIQCGYEAGCLGYSLYMQLTKAGIKCVILAPSTMLTQQGKRIKTDKRDALLIAQCLCYGGYHAVHIPTDDDNAVKEYIRMRDDHKISAKKIKQQINAFCIRHGLIYTGNNWTGKHRAWLKAQKLDPINQETLNEYIVSLEEAEAKIARFDKRIEEIAVETKYVEKVKALRCLLGIQTHTALSLVVETGDFKRFAKGSIYAAYLGLAPGEHSSSTDINRLGISKAGNNHLRKLLIEAAGGICKGAIGHKSKALRAKQEGNTAEIIAYADKANTRMRSRYYHFIRCGKKRNIAVTAVARELACFIWGLMTNNIALNPT

SEQ ID NO: 468264 - protein, 347 aa, unidentified
MLHVGLDLSRKRVDVCLISDQGELVDELAAPFDEDGLCRLTERVAANRGGRVRAVVESMNGARFVHDTLEAQGWDVLVADAQRVKGLAPLACKTDKIDARVLAELSFRDLVPAIWLPDPQVRRERELARFRLHLVRHRSSLKNRIHSTLITFGKPCPVSDLFGVAGRKLLERLDVPEPWRENVEASVVLIDQLDRQIDAVASELKYVGADHPYVPLLVSAPGVGWLVGFSIACEIGDISRFSSPTKLCGYTGLCPRVIQSGESDRRGPISKHGPKYLRWALFEAALNACDHPLYKERYERTKKRLGRQRGPKVAQIELSRKLAEAIWHMLTRNQPFAPAGAPFRLAA

SEQ ID NO: 468265 - protein, 352 aa, unidentified
MQHFIGCDVHTRNQVVAWIDEETGEIRTRRLEHGGEEVGKFYAQFPRGTVVGIEATFPAHWFERLMGELGHELWVGDAAGIRASVVRLQKNDFLDAEHLLDLLRTGRFPRIWIPSLEERDLRQLLVHRTKLVRVRTQVKNQLWALATSQGICRKGKLWTVKGRAELEKLALQPWAGRRRKELLESLDRLDEQVRELDQAVEEAGRTRPEVALLRTHPGVGMVVALTFALTIGPVERFANSRCLVSYLGLNPREHSSGGRQRLGAISKQGNSMLRWLLVEAAQTAARFDAQLRRLYQRLKKKRVSGIAKVAVARRLAVRLFWMLRTRHNYAQLVRMSGSSSSAVVPPPAAPRV

SEQ ID NO: 468266 - protein, 348 aa, unidentified
MKIMKQVLGTDVAQKELVVCLGRMDDSLIPQLYARKTFANTTKGFEAMLLWVKKLTVDTIAVRYVMEATGVYHESLAYFLEEKGYEVSIVLPNKISNYFRTLDVKTVTDKTASEAIAQFGLERALDCWKRPKEIFRNLKQLTRERAQIVEHRTMAKNQLHAEETEAYPNRSSVARIKTQIRLCNKQVAEIKREITSLVKQEKDVDKSIETICSIPGIGLLTAVTVLAETNGFELIRNKKQLTSYAGLDVKEKQSGTSVKGKATISKRGNRHVRKAMHLPALAAIRVEERFKAIFIRLVSKHGIKMKAVVAVQRKLLELIYTLYKTNTVFDKQHLKLKELDLDCQIGVA

SEQ ID NO: 468267 - protein, 315 aa, unidentified
MQVGKLILGADVAKAELVIHHDDRDEIIKVKNTKPEIKKWLKQQPLNTAIAVEATNVYHLDLVELAHSLDFEVYVIDGFQLSNYRKSVGVRVKTDPTDARLLSRFLRNEGEDLRPWTPPPAVYGKLQSLLRRRAALVTARTAMTQSWANEALLKAAFTTFVKSIDRLDLLIQKKIKEVLREAGLHEQVARCQAVEGIGFLTATALVMAFMRGEFKSSDSYIAFLGMDLRVIDSGQKNGRRRLTKRGCSEIRRLLHNAAMSASRTATWKGIYEQHRNAGKATTQALVILARKLARVAFALMKNQDEYVTKGGKAAC

SEQ ID NO: 468268 - protein, 372 aa, unidentified
MGHHTEAFVGIDTSKSSNAIAVADGGRGGEVRYLGGFPATETATRKLVAKLAARCPHLTFCYEAGPTGYGLYRLLKGLGHDCLVVAPSLVPKKAGDRVKTNRRDAVSLAKLLRAGELTAVWVPDERHEAMRDLSRARQAVKKDLQGKRQQISSLMLRLGRIYPGKTTWGPAHMRWLMEQKLEHREQRIAFEELLEGIRQESERVERLENAIREAVPEWSLAEAVVAMQAVRGIDLIAAVGVLAEIGDLSRFQNPRELMGYLGLVPSENSTGDKVKRGGITKAGNGRARRILVEAAWSYRYPPRVSRDKQPKVEAAPRHVREIAWKAQTRLCGRFRSLERKGKRRTVIATAIARELSAFIWAINRELMAHRQA

SEQ ID NO: 468269 - protein, 342 aa, unidentified
MAIVAGFDVHRAQITFDALDTESGEVMRGRIEATPAAVARWSERFDGREIHVAVEACTGWLFVCDALVAAGAVAHLAEPVETRALRGRKRRAKTDREDARWLRELLADGRLPEAWIPPEHVRQWRSRARMRHTLVDERTQWMQRIQATLYHHGIGGTPEKLRTRAGRAFLEALDVPADARERIEIALAMVEAIEARIAPLERELRQLARRQTGCRALMGLYGMGELTSLVTLCELGDVGRLSASRKAVRMAGIDIGVHRSDRRARVGKLTRQGSPQLRWALYEAALSACRPSSPDHADYLALKARGLSHTRASLTIARKLARGSFHVLRELGPAALDPVTTT

SEQ ID NO: 468270 - protein, 341 aa, unidentified
MRYIGLDVHKDNITACVLTSTGKPKFEKDFLKESGNWILDELLDFGDKEGFCVMMESGTYAYAPFRFFSDRGIEVHVVHAKALKVITDSDKKTDRKDALTIAKMLRLWKKGDIDLQMAYMPTREQCELKDICRYREEISKKIGDETRRIKSHMSRNCEYLPEEFDNFQTEKAREFVKKTYPEDRTLMRRMDCLIDLFRERDLVKEDVGSRLPGSREVGLLCGIPGIGRQTAVQIMSMIVDVNRFADAEKLCAYFGMVPRVRDSGGKEHHGRMTKNGDRMMRMIMERVTESHVRNCNSSLTQYYKRKRDEMGTKKALITASRKMLSVIYAVLKSGRDFRIVA

SEQ ID NO: 468271 - protein, 376 aa, unidentified
MNEFSSVYVGLDVHKETIAVGVARAGRGAPEYFGEIKNSAAAVRKLLRRLSPDGEVLQICYEAGPCGYGLYRQIKSLGHDCEVVAPSLIPRKAGERLKTDRRDGLKLAHEHRAGGLTAVWVPDEEQEAMRDLTRAREDMKAIERQARQRLGAFLLRHGRVFGGKSHWTQAHFRWLETVRFAHPVQQIVLQEYIDAVTDARRRVEALELQMREALPSWSLGVVAEALMALRGLSLIAAMTTLAELGDITRFDSPRELMGYLGLVPSEHSSGGSRRQGGITRTGNGHVRRVLVEAAWNYRFPARKTRDIQKRAEKTSVEVQAIAWQAQKRLCGRYQALMRAGKEKRQVTTAVARELAGFIWAIACEVMGKPHASKALA

SEQ ID NO: 468272 - protein, 409 aa, unidentified
MLKIVYPNCCGIDVHKTFVVAVIAITNNQGITEYHRKRFSTFTNGLTQLRDWLEYHSCFDVCMESTGKYWIPVFNILEEQPNVCLAHPKYVKAIRGKKTDKKDAQWIADLFKHDLVASSFIPPLKIRQLRDLFRYRMKLTQLQVGEKNRYQNCLTWSNLQIASVVSDVFGNSAQAIIKSILDNPQDKPNIEQLVHKRMKNKVQDLEIAMEGALTPEQGEKIRVIKAHYDALAICKEDLEQMIRELGQDYQHQVKIIQTVPGFKEDLFALRIISEIGCDMTVFDSAAKLCSWAGLVPANNESAGKKFSTRISKGGKYLKPFLVQVANAVVKYDKHPELRNKYLKLKKRRGHRKAIIAICRRLLVSVYQVLRKQEDYNLVLQGLTEIRNPDKTMSVQDAVRFAQQHGFNVA

SEQ ID NO: 468273 - protein, 411 aa, unidentified
MGQVVIGMDPHKSSATIEIINDREKILDTGRYSTDTAGYRAMLAAGRKHRDRVWAVEGCNGIGRHLAQRLVADGEPVVDVPAKLSARARVFSTGQGRKTDPVDAHSVALVGLRSQGLRTITADDATVALRLLIDRREQLGVTRVQVINRIHRLLLELLPGGAKKHLSAAQAKALLTKVRPRDIAGKTRRRLAAELIVDLVSLEAKIKAADKELHQLINTTGSTLRDLHGIGPANAARLLGDVGDITRFADKARFASWNGTAPLDASSGDQHRHRLSRAGNRRINRVLHIMAVVQLRTDTKGRRYYDRKVAAGKTSMEAMRCLKRRLSDIVYKQMRDDAQRIATGPGGHVGAATDSSAVNSNPDVDASEKSCPGPVTTNATRAESSRPDRSPARSRHPKTAPARSRRQAHSA

SEQ ID NO: 468274 - protein, 331 aa, unidentified
MEQYIGLDVSMKETAVSIRREGKRIWRGKCASNPAALVKLVRKRAPHAKRVVFETGPLSVWFFHALKSEGLPAICIDARHAKAALDMAPNKTDANDADGLAHLAEIGFFREVRVKGFESMISRTRVAARNRLVRISVELSNQIRGLMKTFGLIIPSAKGGKFDEHVCRSLDGRNDLAPIMMPILEAWLSIRIRAAELGRQLLADARQSQACQLLMSIPGVGAITATAFTSAIEDPANLKKSRSVGAWIGLTTRRYQSGEIDYDGHISRRGDAHLRGLLYEEATVIMTRAAAESDLRSWGLKLREKIGFKRAAVAVARKLAVRSGSVCLNSL

SEQ ID NO: 468275 - protein, 361 aa, unidentified
MEWPAPLLHHDRVTMEGGMKDVCILGVDLGKNSCSVVGLDGSGRVLLRRRTRREGVIALAAKLPGCVVAMEACCGAHHLGRLLVAQGHEVRLMSPEYVRPYVKAQKNDDRDAEAIAEAATRPTMRFVALKSEAQLDVQVLHRVRDRLVGQRTSLTNQIRSILLERGIVVPQGRRSLLDALAALSSDDGSGVGARVQLLLEDMLDQWRALDTRIKALDDEFAEMARNDPAARRLATIPGIGVMNATALVAAVGDGRTFSRGRDLSAWLGLVPRQATTGGRPKLLGITKRGSKYLRKLIIQGARAALPSLARTATPLGGWLRGLLARAHGNTVVVALASKLIRIAWALLRNETRFAAGGHAAA

SEQ ID NO: 468276 - protein, 434 aa, unidentified
MNPPCEQTAQDWLAHRAFGGLDWASQKHNVIVVDSRGKIVEDFEIAQSALGWKKFRERLAPYGAIPFAIETSQGSAVEQLLEAGMEVYPINSKSAKSYRERKAPSGVKDDRLDAWSFADACRIDGQGWRALRPEEPLVKELRLLCRDEVGLIQQRTSFICQLRHALGEYYSIALEAFEDWGSMSAWMFVQRFPTPQLLQEAGKRQWEKFLHARHLWRTESGPRRMELFAQATELCGTVPMANAKSQLALSLISMLFALEKQLGIYRQRIEELFSRHPDHDLFGSLPGAGPKLAPRLLSEIGDDRGRFEDGPQALQCLAGSAPVTRRTGKGKVRANPDHWPCHQRWACDRYLRHAMHLFAEQTLGQCVWAQIYYQHHRQKGSSHADALRRLAQRWLKIIYRMWIDRKPYDAILHHHNQLQHGSWVLELNPPANCK

SEQ ID NO: 468277 - protein, 391 aa, unidentified
MSVYVGIDVAKRQHRIAILDTNGDSLHKPFSIANDYDGMQDLLHHLSPWSGDLEIGLEATGHYWLALFEQLTRAGYTVHVLNPLQVHAYQRSGIRKRKTDSVDAMWIADFVRIGGARHTSDPTAMPIYMQLRQLSRFRFNLIEQIGDTKRRILSLLDRVFPEYETLFSSVFLQSSRQLLAQATTAQEFIDFDLDELTHILQSASRGRLGRKHAQTLQQTAQRSIGVTFLADASRIQMGCLVAQLDFLGQQVSDIEKALDDLVLQLPNQYLTSIPGIGSVIAATILGEIGDIQRFDSLKQLVAYAGIDPAVYQSGQFQASQTHMSKRGSPYLRHALWMAATVARMHDSELKAYYDKRRDEGKAYGTVIGAICRKLLARIFVILRDQRPYEKR

SEQ ID NO: 468278 - protein, 357 aa, unidentified
MESQEVKYVGVDCGKKSIEVVRINSENPLERRQFSTTESGINNLLQWLTLNDIVGLEAGSQSFRIAKSILNKGIQVIVLNPGDLATIYQSLKKTDKEDSLKIARLIQRFPIEELPTVPIPNDEEEDNRRLCTEQENWTRQLTQGKNRLHSLFTQAGLTHITKKHLRTKANREISVALLPSRYQKEAERILKVLDLVEQNLKLIEKEIQEALKKNKAYVQTIMSMPGIGMITSLAIMSYMGDCKRFSSAKQAAYYAGLVPRVDISGDTVRYGRIINRGCHSIRRVIVQAAWSLVRCQHGGKVKEFYQRLYLKKGAKKSIIATSRKMIEVLYVMIRTGKLFDSMPENILNRKLTQYGLM

SEQ ID NO: 468279 - protein, 319 aa, unidentified
MRRIVLGIDVSKKTLDTALIFDNRTLSKQFKNSAEGFKSLAAWLESLKITQVHACLEATGAYSEAAALFLHEQGHQVSVVNPLRIKGYAQSNMQRNKTDRLDACLIAAFCLTQEPDEWLPPSEAVKHLQSLVRRVEVLEEMRQAEENRLANASLEIKPSIERMIALIKEEILELERQIKQHIDQHPELKRQSELLQTIPGIGKRTANLLLSEIEFDRYDSARSIAAQAGVTPRKRQSGTSLKQTSLSKLGNARLRKALYFPAIVARQHNEIVKEFANRLKKRGKTPMQIVCAAMRKLLHIAFGVLKHKRAFDSSLAFSA

SEQ ID NO: 468280 - protein, 350 aa, unidentified
MNNSLIAFDPCGIEVSSLILVVALRCGDHDLPLREFPNTPAGHQALLRFLTRSGRRVRVAMESTGLYGLDLALCLHGAGVAVMVANPRAVRHFGQALLQRSKNDQLDAVVLREFVHRMPFQPWHPPSGAALKLTSVARRLEALTDMLAAEKNRLHAASLSQALPAIIRRDIQRSIQTQERAIQRLTRAAQEFIAADRDLSRRMELLLSIPGFGITSAVHVLAELTLLPAGMDVRQWVAYAGLDPREYSSGTSVQKKVRISKAGNKHLRRALYMPALVAVQHQPQVRAYYDHLQARGKTKMQALVATLRKLLHAIYGMFKHDQIFDGHKLYAAPATAAPVPTPQPQEVPCL

SEQ ID NO: 468281 - protein, 348 aa, unidentified
MKHYVGLDLSMEAAAVCVVDGEGQIVAETTLCRNADDIVRYLGKIEDEIELVGLESGSGSSLLTTQLSEAGVKVVCMDARALAGFLKAKYMNKNDRNDARGIAEALRLKAYKPVHPKSQAAREAKAVLKIRKRLVKAWSSQKVSVRGILKEFGVRLGPAGKAGFTNKVRERLKEISPDVATAIESMLQVIDQTLVQIKALDRQISQLAKQNPACIRLMTIPGIGPITSMSFIAEIDDISRFKDSRSVGAYVGLTPREYSSGETRRLGGISKSGSAELRSLLVEAGIVILGRCQKWSRLKAWGVRLAKRHGPKKAAVAIGRKLSVIMHRMLVTETDFIYGEPKKQKVAA

SEQ ID NO: 468282 - protein, 377 aa, unidentified
MPVSPCMLKVCYTFDVTDVIDRSPLGVNKPVGKPGSSRLFSLHNPNSCLGLEPASCKAGSRRTVMNKCFVGIDVSKATLDVAVLPEDRCWQVARTPSGMAALVETLRSADVHLVVLEATGGLEAPVVAACAAAMLPVVVVNPRQARAFAKATGSLAKTDVMDARLLARLGQTLQPDLRPLKDADTQALQELLTRRQQLVDMLTMEKNRWQQASPWVRPDIRAHIDWLSRRLKDVDGDLAAAIADIPAFRLKDDIIRSLPGAGRVLSMTLLASLPELGHLNRRQVAALVGVAPFNCDSGTLRGNRRIWGGRAAVRAVLYMATLSAIRCNPIIRAFHQRLRDAGKKPKVAITACMRKLLTILNAMVKTNTPWYVDDAIC

SEQ ID NO: 468283 - protein, 350 aa, unidentified
MIIIGVDFHPEFQQIASVDTDTGEFQEKRLTHREEAEKIYRALACAGQKVRVGMEASGHARWFERLLAELQIELLIGDAAEIRTKRVRKQKTDRQDAQLILSLLLEDRFPRIWVPSWENRDLRQLLWHRHRMVQARTRIMNQLQAVALNEGLRCKKKLWRERGREQLESFRLAPWASRRRRDLLELLDRLNPTITELSQAIQQEVEKCPEARRLMTHPGVGPLTALAFVLIIGEADRFQCGKQVASYLGLVPLEDSSGNRRRLGHITKQGSSMLRFLLVEAAQVTARSLPQWRSKYLHLMMRRGRKTAKVAMARRLAVHLYWMMRQGWDYQQWIKFGSHAGQLGNRHGVQ

SEQ ID NO: 468284 - protein, 363 aa, unidentified
MTNSTTLVIGGVDTHKHTHYAAVIDENGRLLGHREFPANEDGYSTLLEWMRSHGRIVSIGVESTGNFGASLTRFLTARGAEVVEVNKPNHRARYLDGKSDRLDAEQIARSVLAGTGTATPKSKSGAIEVIRALRVARASAVRSRTQAFNNLFGTMVSAPSLVRDDLIDLTKRTLVNRCLALEPETGNLLELIDNPERLVIAGIQTALRDLARRWKLLDAEVKELSAQITALVEHVAPDLVELFGVSAELAGQFLVTVGDNAERIRNEAAFAKLCGVSPKPASSGQTSGRHRLNRGGDRAANSALYMVTLVRLRHHEPTRAYVERRTAEGLSKREIIRCLKRFIAREVFAALPRSQVAEDLEAA

SEQ ID NO: 468285 - protein, 342 aa, unidentified
MEHTTIAVDLAKSVFQIAVSHRAGRVDEERRLSRDRFLAFFAQRPPATVLLEACGSAHYWARQLQPLGHSVRLLPAHDVRPYVRRNKTDRTDAKGLLEANRNEEIHPVPVKSVGHQAIGSLHCLRSTWLATRTARLNTIRGLLREFGIFIPAGAHHVVPRVRALLDEPTTVPLLLHTTLAAACDEIAVLEANMRAVERQLAALAADLPDVTLLQTVPGVGLITATALVALVTDIRRFPSGRHFASFLGLTPKEDSSASRRRLGAISKQGDVYLRMLVTHGARSVLWHAKTAVHPTSLQCWAVQTEQRRGHNVAAVAVANKLARIVWAVWVQQRPFAANHRPA

SEQ ID NO: 468286 - protein, 356 aa, unidentified
MKTTTKRLSFKGEELYIGIDVHLRSWTVTVLSRNLVIKRFSQEADSDRLIRSLQCSYPEAKIKCVYEAGYCGFWLARALESSGIECMVVNPADIPVSNKHKEQKTDKIDSKKLAEFLRAGILKGIYIPSQEVHEDRNLLRVRSQLVRNQASIKCNIKASLAFYGIKIPEEQLSRYWANNYVEYLKTINFSRESGKEAFNALIRHLEYLRKDLLNVTRKIRELSRTEEYKNKVERLTSIPGIGLINAVTLLTEASNMERFSNTKKFRGYLGLIPKEHSSGETINRSTISRRGNNRLKVIFIESAWVAVRIDPAMTMAYETLLRRMNKSRAIIRIAVKLASRARHILLSNETYELSVA

SEQ ID NO: 468287 - protein, 389 aa, unidentified
MNLIVADRAAAPTAIQTDLHAIFVSLELSRSTWLITSLSPGGGQKMSKHSGQAGDIAGLRKRFAQLKEKARARTGRDFPIITIQEAGLDGFWIPRVLQSEGIESHVVDPASIATSRRRRRAKTDKIDGETLVRTLLAFKRGEPRVCAIVKAPTPEEEDSRRLCRERKVLIAERVLHVNRIKGLLFCQGISGYEPLRRDRHERLDELRTGDGRPLPQHLKAQVNREIDRLELLLKQIKAVEAERDALLVAAHTPAAMPAAMLLNIRGIGPEFAAVLWSEGLFRHFENRRQVAAYAGLAPTPWQSGAVDREQGVSKAGNPRLRTTLIQLAWLWLRNQPHSALTLWFHERVSRNGGRLRKTTIVALARKLLVALWKYVTAGIVIEGAAMKAA

SEQ ID NO: 468288 - protein, 355 aa, unidentified
MKYYHSTTEFNCGIDLHAHQMYVCLMDRTGKILVHTNIRNNDFDYFLKLVAPYRHSLTVCCECMFGWYWLADACQAAGLTFVLAHALYVRAIHGGKNKNDRIDSEKLAHLLRSNLIPPGYVYPADKRPLRALLRQRLFYVWSRSELLARIQSHQLAHNRPVLRQGRSNRDPWEVQLLAREADPVRQIALSNDLAMIRHYDAQISALETQLQQLTKATAWREYTLLQTVPGIGENLGLTLLYEIGDIARFPTVKDFLSYCRLVKGTVASAGKIKGLRGAKLGNPYLRWAFGETAIIAKRDHAVIGPLAQRLEARMNGNKFKANTVLAIKIARAVYFMLKNQTVFDPQRLVAALARN

SEQ ID NO: 468289 - protein, 355 aa, unidentified
MFNDSTLFVGLDLGDRMSDLILLDPEGELIEESRLPTSQASFQQKFSALPSARVALEVGAHSRWVSQLLEQLGHEVLVANARKLRAIYNNPRKGDRTDAETLARLARLDPSLLSPIHHRSAQAQADLAVLRSRDAGVRSRTLLINHVRGVVKASGARLPACSADSFSKKAGPSIPEPLRPALLPLLDTIASVTQQIRAYDRQIETLCQAQYPETRSLQQVSGVGPLTALAYVLTLEDPSRFPKSRDLGPALGLVPRRDQSGDRDPQLGITKSGNAFLRRLLVGSAHYILGPFGPDCALRRWGLELADRGGKNAKKRALVAVARKLAILLHHLWKTGQTYDPLYQSQRSREPQLAT

SEQ ID NO: 468290 - protein, 367 aa, unidentified
MNKSKVLYVGMDVDKEKIAMAALEGSSNEFVGEQLVRNDPAAVAKYFKRFMKSETEVIACYEAGCFGFRLARQLSDIGIGCAVAAPGMLPKMPSDRVKTDRRDARTLAKALRNGDVHNVYVPTEQDEAVRDYLRMFEDMKGNVKRAKQRVLTLLLRKGIRYTESGNWTAGHWRWLRTLELDQPLTHATLQEYLTSLGELEESCQRIAARIEEIALEERYAEPVARLKAFKGIATLIALSFIIEIGDFRRFATAQQFMAFLGLVPSEHSSGSHRRQGSITKAGNSHLRKLVVEAGWHYRSYHPVSKRLAKRREGLPPQLVAYAHRAGRRLNKKYLHLVFSGKPTQVAATAVARELSGFIWGTMTGKTA

SEQ ID NO: 468291 - protein, 406 aa, unidentified
MNESVSEQPLSPKVAAFVGIDWADLKHDVVLRSVGDPTKSEHQIIKSEINALADWIAQMYERFEAKGKVLVCLEQSRGALIYQLMAYELFELYPINPSQLANYRKAFFSSGAKDDRPDADLLSELVMCHRDRLTAWKPDDQLTRELASLNEGRRNAVDRRTDLANEIKSQLKLYFPVALQLLDNDITTALAADLLVQWPTLAELQKVSPAKLRKFFYGHHSRQEKKILERLALIKEAKPLTTDVAIIRPNALRVKLLAQQLKSLLPFIAEYERRIAELFGSHPDRFLFDNLPGAGPALAPRLLTAFGTDRDRFEVAGDLLSLSGIGPVRIASGKKTGKHASVHCRRACPKFLRQSFHEFGECSIRYSPWAQACYQAQRGRGKGHHAADDGARGRRSDDDGWRGRVR

SEQ ID NO: 468292 - protein, 384 aa, unidentified
MSNIASACAEASVGRSLETERHQFLYVGMDIHKDNHTAAATNCFGQNLLEVEVSNSKKDFDDLVARVERLSKAENLKPVFGLEDSYGYGLRLAKHLYGKGLLVKMIAPVLVDRERQYETHPEKSDSLDALGVAKVLIQRIDRLPNYSVSKNDEISKNIKELTLDREFLVKEQSRLKNQLHRLLHKAYNSEYRTKFKDPFSLKALRYWRGHPVPQKRADIMGNISILKNQIRRKIKRLLDIKKEVKEIEQELQCLIQQTNQKIDTLNGCGTVLASQVLAEVRNIDRFQSPHSLAKYAGLCPREKSSGKTFRHIKTKSGNRRLNMAIHRIALSQISKSGNQYAKTYFQRKISEGKTKVQALCCLKRRLIDIIFMMLKYKQSYNYIA

SEQ ID NO: 468293 - protein, 385 aa, unidentified
MQVMIEGQSHFQPFGLPYWGFTDLNKGVGSMTASYDYHIGVDYHKSYSHLVVQDSNGKTLRSGRVKNDRQSLGGFLERYRENSHAVVEATRNWMVMYDWLDDICDDVVLAHPLKVKAIADAKIKTDKIDATVLAHLLRADLVPEAWAPGERARELRIALRARMFYVRLRTMTKNRIVTVFDRYPEQTTQLKKLGDLFGKAGRIQLAQVKVSEIDRIQIDRGLDFIGDIDVQIRQSEATIRTMTKANANVRLLKTIPGIGEFFARLIDAEIDDISRFRTPKKLAAYAGLVPSTYSSGGKTFHGKIIKQGNKWLRWAFVEAVSPAIASDAQLRAQYEHLKIRGTNKARVAIARKLLTIAFQILRDQRAYEPRGESTMEGASTISRLS

SEQ ID NO: 468294 - protein, 372 aa, unidentified
MEQNTTYVAFDTSKETIAVALAEGGRRGEVRFFGTVANRPEAVRKLVDKLAGRHSRLAFCYEAGPTGYGLYRQIRALGHDCQVVAPSMVPVRPGGHIKTDRRDATTLAALFRAGELTAIWVPDAAHEAMRDLVRVRQTATEGVRRARQQLLSFLLRHGRIYPTKRHWTRAHRRWLAEQRFEHPAQQIVFEELIQAVEQAIARRDRLQQQMIALVPSWSLQPVVAALQALRGVAMVAAIILVAEIGDFRRFATPRQLMAWLGLVPREHSSGGSTSRGAITKAGNGRARRLLIESAWTYRLPARIASELLARSAALPETVKAIAWKAQVRLCARYRRLRCTGKPTNVVTVAIARELAAFAWAIAITVMPAPQTA

SEQ ID NO: 468295 - protein, 310 aa, unidentified
MANPYVGIDVAKAMLDVAIGSDGEVVQVENDEAGIARLIQRLHEVVPTLVVLEATGGYESLVAGALAGAGINVAVVNPRQVRDFAKATGVLAKTDRIDARVLARFAEAVRPEPRPLPTAEAKELEDALRRRRQIVDMLTMEKNRLSIAATERLKKDLKKHIAWLEEALRRANDDIDTAVRNSPAWREQEDLLRSVPGIGPVSARTMLAELPELGTLNRKKIAALVGVAPLNRDSGTIRGSRSCWGGRAQVRQVLYMAAVSAVRCNPVIRRAYLALRARGKKHKVALVACTRKLLTILTAMVRDHRRWSPS

SEQ ID NO: 468296 - protein, 360 aa, unidentified
MKKNNRESEWKERPERTVGVDLGDRFSDYCVVNRDGEVIEEGRIRTNEEAFRRHWEGEPRQRIALETGTHSPWVYRLLQGLGHQVIVANARKVRAIWENESKNDRQDAGMLAQLGYSNPRLLYPIQHRSVERQRDLNLLRARDALVRARTMLINSVRGLVKSAGGRLPKCAADYFAARVSSALPAELVTATRPLVDQITALTFQIRGLDQAIENLAQRYPEIHILRTAPGVGPVVAAAYVLTLDRVDAVAHSRSIGAFLGLRPKQSQSGESDPEHKISKTGNIYLRRLLVQAAHYTLGRFGPDSALRRWGLKLAQGGKRAKKRAIVAVARKLAVLLHCMWRTGQNYQPFPEQTTAAVGAD

SEQ ID NO: 468297 - protein, 345 aa, unidentified
MEIRTIGIDLGKTVFHFVAVNARGQIVVRKKGSRTQLLRFTANLPQCLIGMEACGGSHFLGRALREQGHDVRLMPAQYVKPYVKTNKNDYIDAEACSEAVTRPTMRFVPIKTDDQLDLQSLHRVRERWVVRRTAVINQMRGMLLERGITIRKGRNHIEESLPGILEDPDNKLSGALRILLTQLRMEMQYLHGQIEETDKLIARICGELEQCKRLVAIPGIGPITATATVAAIGNGAAFKKGRGFSAWLGVVPGEHSTGGKQKLTGTSRRGNKYLRKLFVQGAHTVLLQKTKQSSGLSTWLVDLTSRKRKQVATVALANKMARMAWAVLFKGEAYRPPTVPQVIAA

SEQ ID NO: 468298 - protein, 402 aa, unidentified
MNCVGIDVSKGKSMIAVMRPFGEVVVSPFEVRHTASELSELARLLKNLDGETRVVMESTGNYHAPVAWLLHGAGFYVSVVNAMLVHDYGNNSLRRGKTDKKDAVKLANYGLDHWLTLPRYVPEEDTRLMLKTCYRQYQQYSKVQTMLKNNLISLLDTAFPDANRLFTSPPRADGSEKWVDFVATFWHCECVCGLSKKAFTAKYQKWCRKHGYNFSQDKALDIYASACGRFGVMPKTNTAKLLVEQAISQLQTTSAALAALKQEMQSLAASLPEYPVVMEMFGVGPTLGPQLIAEIGDVRRFHSKKALVAFAGIDAPPYQSGQIDVRSRSISKRGSASLRRTLFLVMGVLLQCAPMDEPVYQFMNKKRSEGKPYRVYMMASANKFLRIYYASVKAYLESLEHD

SEQ ID NO: 468299 - protein, 350 aa, unidentified
MSKQTNAIAISTIGVDTGKNTLHLVGLDRQGMIVLREKLARSRIGTRLANVPSCLIGIEAGMATHYVARELLALGHDVRQVPPAYAKPFRQGHKSDFRDAYAIAEAVQRPSTRCVPVKTDDQLDLQALHRVRSRLVGQRTAVINQIRSFLLERGIAVRQGLRFLRQRLPEILAKRVDVLSPRMIRIVEDLSGDWRRLDERIEHVTDEIEVLTHESESCRQLMTVPGIGPLIASAMVAAIANGAAFAKGRDFAAWLGLVPKQMSTGDRTILGRISKRGNRYLRTLFMQGARVILLRPASWAKHSFGPWLMAGVKRLHHNVLAAALANKLARIAWSVLAQRRNYETRAIVVA

SEQ ID NO: 468300 - protein, 345 aa, unidentified
MELHTIGIDLGKTVFHLVRLNLRGEVAVRKKFSRTQLLRFTANIHVELIGMEACGGAHFLGRGLREQGHEVRLIPAQYVKPYVKTNKSDYIDAEAIAEAVARPTMRFVPIKTDDQLDLQSLHRVRERWVMRRTAVINQIRGLLLERGVTLRKGRHHVHAALPLILEDADAKLSGAVRMLLAQLKLDLDQLAVRIDEADALIRKTACENEACRRLVAIPGIGPVTATALIAAIGNGGAFHKGREFAAWMGVVPGEHSTGGQQKLLGISKRGNSYLRRLFVQGARAVLQQRTKQSSGLSAWLAQLTSRTHRNVAAVALANKLARIAWAVLAKGEQYRPSVLADVAAA

SEQ ID NO: 468301 - protein, 337 aa, unidentified
MKYCGIDLHSNNSVVVVIDDEDRVVGQKRLPNELARIVAFVASWRDELAGVVVESTYNWYWLVDGLQAAGFEVRLANTAAIKQYDGLKHSGDEADARHLAHLLRLGILPTGTILPRDERAVRDLARKRIQLVRGRTTHILAIENIMARQFGGRMTSNQIKRLSADEIDRMPIAADVGLAMNANLAVIGALDAQIEVLERRLRERVKPRPEYAFLTSVPGIGQALSTTILLETGPIDRFASVGNYASYARCVDSVHTSNRKKKGEGNVKNGNKYLAWAFVEAANFARRYCPEAKRFYERKKAKTNSIVATKALAHKLARACYHILREGRPFDVTRCFA

SEQ ID NO: 468302 - protein, 343 aa, unidentified
MEAYAGKQLVGIDLHRRRTVIVRTTEAGEVLEAVRIVNDVQRLASVMARAGDCPEVVLEATYGWYWAVDALQAGGASVHLAHPLGVKAFEYRRVKNDFRDAQDLADLLRMGRLPEAWIAPPPTRELRELVRHRAKLVGLRSHCKAEVHAVLAKCGVQVLMSDLFGLAGTELLDRLELPAPYAARIASLRRVMDDLDFEINVFAGIIRGRMAHEPGYTAVQKIPGIGPTLGAVLVAEIGDITRFASASKLTCWAGLTPKHHESDTHVRRGRITKQGSRLVRWAAIESVKTVSKASEVGVLRERVADRRGRNIGSVAAARRQLELVFYALRDGHVRALEHLPRVA

SEQ ID NO: 468303 - protein, 441 aa, unidentified
MAMRTQDEEVVFPNAAGIDVGGSSHWVAVPPRSTDDPIREFGAMTDDLNAMADWLLACGVDTVALESTGVYWIPVYEVLEQRGLKVCLVDARQMRYVPGRKSDVQDCQWLQKLMSLGFLRAAWRPNGEVCTLRAVARQRDVLLADQASWVLRMQKALVQMNIQLTEVLTDVMGMTGQAIIRDIVAGECDPKVLARHRNGRVKASEAEIVKALTGNWRDEHLFVLGQALAMYDDIGRHLVECDAKLQGLMTDLGRTQVDLGKAPRPGSKLRQEFDIRQILANWAGVDLTRINGLGLAAAMKILTETGPDLSRFETVKQFCSWLGLSPGTKISGGKVLSAKTKRSANRVRQALKMAAMSLWHSDSALGAFYRRLCSRMDKPRANTAVAHKLARMVYFMLTRGEDFVDKGQQHYEEQQHQRSVAALKRRAAALGFKISPAVALA

SEQ ID NO: 468304 - protein, 433 aa, unidentified
MSKFFNNPVVGIDVSADFSYAAILAPNGDVYKKSFKIKHDAKGFDHLVNEIKKVEKEFNMKTGIFMESTGVYHLSLFHYLNNNFDNTFVINPLVTKCNKNVDIRKVKNDKKDALFIANIGKFQNIKLSQTNNLAIFLLKNLVREYYKLTDTCSTFKKKLSADLRVIFPNYNTVFSDSTSNTSLEILSNYPTPKSVINAPKEDVIKILIEKSKKGVTWSENIYLKLISIAKEANIIGVPLSGLAIKISSSLVLIKAFESQIEDLLNEINTLIESSEFPESIKENIELINSIPGIGRLTAITLIAEIGDIDGFIKPKHLVAFFGIDSSVNQSGKFLGDQSKISKRGTRIGRRALYAVALASIRRSRAGIPINKVLLEYYQVNLKGKKAKVALVAIMHKILNYIFAVLRNQTPFEQRDPKIHKQMFLENKHLHNVA

SEQ ID NO: 468305 - protein, 418 aa, unidentified
MKIVFPTCCGVDVHKSFLVATIIKTPQDSLQPSYQKKRFSTFNSDLNRFADWLHENDCLDVCMESTGKYWVPVFNILEKRGIRVTIANPKWVKAVKGNKDDTKDSKWIGDLFRIGLVKSSFIPAKDIRILRELTRYRYKLTSMKSSEKNRFQNAFTVCNVALDSVVSDMFGKSATAITDYLTSDEDFDPQHCVSLLHRSLKKKAEDVLSSIEGYEITLEQKCRIGIVRDHLHYIEKLIERVDICINTMVEKYDGAISLLRTIPGIDRSSAITVISEIGVDMAQFGSSKRLCCWAGLTPGNNESAGKKKSVRISRAGVYLNPVLVQAAHAAVKDKLNPYYALKYERIAKRRGKKRAIVAIARMILTAIYSMLSTGEIWNPVDLFKVDMPEHLKEQQLQKAMKQAVRFLEAQGLTVLDSA

SEQ ID NO: 468306 - protein, 414 aa, unidentified
MESVYRSVAGIDVHKKMLAVVIRRQSGEAVEYEQRKFGTTRAEIQHLEAWLRAQGVSEVVMESTAQYWRPVWYGLEPHFRLHLTHPLRTRAPRGRKSDFRDGQRLADRWSAGDLEESFIPGCEQRGWRWLTRTRVQLSKKLGVIHSHVEGLLEQGGIKLSAVVSDLFGVSGWAMLELIAKGVTDVEVLAGQARGALRKKDAELKPALEGQLEPVYRLLLRQHMDQVRLLRRQVEELNQTLAEAMQQHLPALHRLTKIPGVDLYAAQELVAEIGPQASAFASAEQLASWVGVCPGSQQSAGINYSARSAKGNRYLRRLLCQIAWAAIHTKDTFFAGLFARLKPRVEGKGAAWAVAHRIAKVVWLVLHQGVEYQEKGSAPPNERTLVRKFKRMLKEFGRLGLDVRALLDSQLTAPV

SEQ ID NO: 468307 - protein, 387 aa, unidentified
MSLSTVAPAAPSHDATMVVAFELSKAKWKVGIVLPQSTKLSRYTIAGGDTGALAELLATSRQKAERRCGMPVRVVSCYEAGYDGFWLHRWLADHDVTNHVLDPASIEVNRRARRAKTDRIDLEKLMRVQLAHLRGEPKVCSVVRVPSVEDEDAKRRTRERERLTRERGGHINRIKALLHGQGIRDVKPTAKRLLALLATFRTGDGRQVPPALAAEIAREHARLCLVDEQLKAVARETSEVLQTAPAGSTAAKALLLMALNGIDKSALVLANEVFYRRFRNRREVGGYTGLTGTPYDSGETQREQGISKAGNRRVRTLAIEIAWLWLRHQSRSELSQWFHKRVGQQKGRVRKIAIVALARKLMVALWRYVEFGIVPRGALLAAAPARR

SEQ ID NO: 468308 - protein, 387 aa, unidentified
MIYYIGIDISKYKHDFCIISNAGEAIVENNSFDNTKNGFQYFVNLLKSYDKSKVRIAFEATGHYSKNLELFLIDQDYSFMKINPLVIHQFLKARSLRRTKTDKADSIAIANYLMSVPYKPNSNLLYNIYTLKSLCRSREQLIKERSKFYILLTNELDLTFPELKPFFSNDFSATLLYILDKYVNTEHISLMRDFETISKKSRWRFSYAKFVNLKELAKNSVGHHDKNTDLLISTYVSIIQNFNDKIDPIDKQISTIIKELNPRMLSIPGLGEISAATIISEYGDIKNFSSSNKMLAFAGLEPSIIQSGTIENNGKMVKHGSGHLRYSIMNTAMIILRYSPTFYDYYHKKCSEGKCHRVALSHVCKKLLRVIYTLEKNNMDFNPSLLR

SEQ ID NO: 468309 - protein, 371 aa, unidentified
MERIVYIGLDVHKESITVCSYTIETDKVQYAQKLPADYKLVLKYIEHVRRHYPGAREYICGYEAGCMGYSLYHQLADCGQKCIILAPSTMAITNTNGIKTDKRDAGNIAKCLAFRTYSEVYVPTDEDNAVKEYIRMRDDQKKVLKSTKQQILALVLRHGHRFDGGKTYWTQTHVKWLKSLQLCGVLQEALDEYLVTYSYLVDKLARLDKRIEELASGERYEEKVNKLSCLIGVKAHTALSVIVEVGDFERFSHAGKFASYLGLVPGESSSGESHHRYGITKAGNSHLRRLLVESAQGYTRGAIGHKSIALKQRQQGNSPQVTAYADKANERLRRRFYKMTLSKGINRNKAATAIARELACFMWGLMTGNIA

SEQ ID NO: 468310 - protein, 424 aa, unidentified
MGKFTKTLCISERKEYSIMEGPIITVDVSKGSCHYQPFIENGHPMRKPKQLSATIDGFQKLGQTIKDLEAKTEREDIPVIFEATGVYHRPLQKYLEDHKIRYYIISPLLSATYRKTDLHSNKTDALDCSHIAKAYYCEKELRQYQAQPQEYKRLYQLSRLYESELVHLRKRKVSLRSMLDIIYPRIDRTFKGNQNLYDPIPMEILKRYPHPSLLLSHREDTIVKTVGHRTGHLKGYTERIVHKIYEKAKECYSGCDIDDIEVVKLPSLIENVQEQKKKCDSLLKEMIEIARICPYFASVVSIVGIGENLAARIIAELGDVNRFDNRAAIVAYAGLNPKIQQSGDIDGLHLKISKKGNKHLRCLLYLGAQCNYRLRKEDPLYEFTKKKRQQTQCPLSSKAAYTASAHKLLVIIYSLCKNGTLYHS

SEQ ID NO: 468311 - protein, 268 aa, unidentified
MSFVGIDVSKSQLDIAVRPDNKRWSAVNAEADIAKVVEKLNEFSPQVIVIEATGGMEMPLVAALSQARLPVVVVNPRQVRDFAKAVGRMAKTDRIDAEILAHFGEAVKPDVRLLKDEDTQMLTALVTRRRQVIEMLTAEKNRLGISPKVVHKDIKKHIDWLQARLEDMDRHLDSAIRKSPVWREKNDLLRSVPGVGHVLSVSLITGLPELGILSRRQIAALVGVAPLNRDSGLFRGKRTVWGGRAHLRAVLYMAALSASRVNPAISLF

SEQ ID NO: 468312 - protein, 317 aa, unidentified
MDKSIGIDVGKEELVACIRCSNGITETPVSFPNNSIGLKKFLRYLKQNEIVSSEPILLESTGPYHWQAAKFLTDNHYLAKVVNPLHTRQIIRHSIRKRKTDKVDAGNLAFLASQGYGYLFQETGPMAYRKALVRHYWKLKSAATNLLVHERYLKEYRGITKFSISPFIVKRCETLKQLIIKEFCKGNDLRYLDSIPGITPFLGATILAELTPLDRFTRIEQIIAYAGLDPAVKQSGGKPAQYGRISKRGSSTLRQALFLAAFGSFQRKPFSRFYQSYKKRGLHHNTILCILARKILRIAIALLKKRETFQEEYLDRT

SEQ ID NO: 468313 - protein, 312 aa, unidentified
MDATVIGIDVAKDRLDVCVRPSGESFVVARNSAGIADLAERLKKLLPRIVAIEATGGFETVVAAGLAAAGVPLVIVNPAQVRAFAQALGKRAKTDPIDAAVIAHFVEATKAQPRPLPDETTRLLADLVTRRRQIVDMMAAEGQRDRRLTNKRLKKSIVRLRKALEKELAEIDSELDDTVRGSPVWAAKEDLLSSVPGVGPVIARTLIAELPELGSLDRRKIAALVGLAPWTRQSGQWRGRSFIGGGRKSVRSALFMAAMVAARHNPVLKAFHDKLVVTGKPKLLALIAVARKLLIILNAIVRDKQPWQPKNA

SEQ ID NO: 468314 - protein, 455 aa, unidentified
MGTSTTNLPIINPHAAGIDIGSREHWVAVDQDKENVQSFGVYTQDHQSLIDHLRQYCITSVAMESTGSYWQTLFNALQKAGFEVLLVGGSQTKNVQGRKTDIIDCLWIQRLHSLGLLSGSFLLSDSLQELRTYYYHRQHLIQQSATYTRKMQKALRLMNIRLDVAIRDITGKSGLAIIEAILNGNRDPHELASLVDVRVKKSKEEIAQSLQGWWREEQLFELQAALNFYKLYQKALLDCDGIIEQVLRRSMPEEPVSKSAEAHQPATRKKTNKNTPGFDVSQIALSYFQTDLFAIPGVSHGTVLCLLTTLGKDIHKFTTAKSFASWLRLVPNNKISGGRTISHRTPSGKSHIAIALRQAANTIGNLANHELSGFFKRVAYKKGRVAAITATARKLAVIVWNMLTKEEPYKKAQVIDKTQKTREAGLRQVQRRLKALDLSQDELIRLFSSHSTSNT

SEQ ID NO: 468315 - protein, 355 aa, unidentified
MTWYMGIDLHARTFTIAVYDRDGNELFVKQRETSCENLRQMVGSVKGKKRVVIEESTLASWAYRVLQGCGASVVVADPYHNRLIGSDEKMDDEKAARKLADLLRWGEIRPVHHTADLARQGFRELVLMYLDTTRDQTRVKNRLKSKFRQHGVPCRRGDVYLPASRNQWRKKLESPEAQLQADLLWADLDHVAGKLERLRRLIQQRAKGVDVIRRLRGVPGIGLIRASTFYVLVDTPQRFDHRQKLWSYCGIGLAKRKSADSEGPDHLVRRFNPRLKDLAKGAAASAIAARNNPFHEQYIQYLMDKPGKTTSARLVIARAIISTMYELWRRGTEYDPQHRREARSWRKPTNHDTVG

SEQ ID NO: 468316 - protein, 386 aa, unidentified
MGTQTFIPRDYDVFAGLDVDKKSISVTFSDHQGFLKSLSMPYSAEHLVNHVRKHYGDKKVAFAYEAGPTGYGLYDGLEARAYKCLIASPSMIPRAPGQRVKTNRLDSRGISENLRGGQLKGIHVPTPLYRELRHLTQLRDAMVSEMVGMKQRIKSLLLLEGLEFPPAPAGGQWSLLVKKKLRELPCSSTVRFKLDRLLDSLEFDEKQVLKTTREIRRFCQSEPELFQCIHYLKTLPGIGWIVASELMARIGDWRQIENIRQLPAFLGLVPTENSTGERTERGSITHTGDGRLRSKLIQASWSAIGQDGELREFFRTVAKRHPRQLASRVAIVAVAHKLSVRAAVVLMKQRPYEVREKVQSAPLTQEETVPQGTTRRQAEVRESATR

SEQ ID NO: 468317 - protein, 317 aa, unidentified
MNKNTDSIQKNDPIHYVAIDVSKSTLQVQDDRRAFVVGNDSKGHQKLLDYLKTCDGPLVVFEASGGYERDLLQSLHQAGMPLAMVNPARVRSFASSEGVRAKTDPIDCKMILAFARSKALRPMEAPSGACLKLAALLDRRGHLVEQLAREKNRLQNSETFIHRSIKRMIKILEKEIATIEEAIEKLAGSDPALKSRSEIIKSVKGVGKITAWTLLAYLSEIEDLNRNRLVALAGIAPFNRDSGKFSGRRTIQGGRAKVRKCLYMAAHTAATCNPVIASYVQGLRDRGKPYKCAIVAAMRKLLIHIQSLMKKAQLSPC

SEQ ID NO: 468318 - protein, 340 aa, unidentified
MTQHKIIGIDLAKNIFFLFEINHKGKNLSRKKLQRSKLLSYIANKAPCTIAMEACSGAHYWAREFSQFGHEVILYAPQHVKTQRRKQKNDYNDAEAIAEVALYKRPHPVPHKSIEQQDIQSLIRMRRLLVTERTRIVNQVRGLIFEYGIIMPKGATAFRKAIPEILENDENQLSCILRELLSHQYERYLYIDEQVKWFDDKLNQTAKQFENAKRLMSIPGFGPLTSQAVAVWLGSGQQFKTGRDASAAMGLVPKQDTSGDKVVLLGITKRGNTYIRSLLVHGARAALRRAKFKSDNLSKWMLELQERRGPNRAAVALANKLMRIAWAVITKNEEYRPTQS

SEQ ID NO: 468319 - protein, 438 aa, unidentified
MVSEEKGVDMLGIGIDWAEEFHLVAFGRSGDGVFEVVRVEHSPAAMRALLEKVSGLEPDPAEVRVVLETRHGTLVELLVDAGYVVVPVNPDLVARRRNPAKKKDDAEDARIACLLALDRHQRLAPLVPHGEIAAELRSIARDDERAARDERRLLNRLRGDLVAVYPAALTIAGDDLGAPVLLKLLERWSTQESLARASDDELGAFARAAHHGWPERFVAKVRDALAVEHFIPRDYLVRAKADTIALGASQLLLLGRQRRSWEKRMGELLLGAPRTGRDKTAKDPDLGKAFPGGEIYLSFPGLGDRLAARVAGEIGDHLEQFETPNSLACYAGKAPVTRRSGKSQMVVAKRLACNRFLDNAVQQWAFTSLQYSAWSRDFYDAQRARHKGHHAALRALGNRWLEVLWHCLKKGSLYDEAIHVANRNRALGLNPPAASKAA

SEQ ID NO: 468320 - protein, 320 aa, unidentified
MTILTSQTVVGIDVAKAEIVVYRSDLQTIDTVKNDRTALKRWLKTLPAQSALAVEATNIYHLDTVELAHALGHQVYVVDAYRVSNYRRGIGQRAKNDPCDARLLARYLTNEQHELRRWNPPPKAYTTLKSLLHRRATLVKNHTGLMLSWADEPLLKKALTAQKKAFEQAIQAIQKLLRKVSKESGIEANIERCKGIEGVGELVATGLATSFMRGDFTDSDAFIAFLGMDLRVDDSGKKNGARYLSKKGDPEIRRLAHIAAMTACRSPRWKPFYESYLARGFSKTQALVVLARKLCRVAFALMKNQSEYQPTPMLQGCPAT

SEQ ID NO: 468321 - protein, 400 aa, unidentified
MRTVFGIDVSKATSEVAILVNGERVHGYSIPNDVIGFSRLFHDLTQVVNPEIIFEATGVYSRRLEAFLKNNNYAYTRLNPLEAKKQLDGLRHRKTDKIDAETLAQTQFILNRKPSYVQEEIFEHLRDLSRFYQNLTEDIVRAKNRLHKALQATFPEIEKLLSIPSGTQYWNLVIIFPNASLVLEKSRSELQDIVRQSTAKQISENRVIGLTDKLIESAEQSYPAVSKDSPMLETVRYYAQELLRLNVQRQSVLNHMVEQAQTLPEYDVLLSIPGIAETTAVSIIGELGDIRRLRSSNQINAFIGIDLRHYQSGDYLAQEHITKRGNPYARKILFKAIHNIVSASRTKPSHIADFYAKRKRQSPNAPTKPYTIASMHRLIRCLYYLIIHNKTYDYALTQNQ

SEQ ID NO: 468322 - protein, 363 aa, unidentified
MEEEKRRYVGIDLGKREYTMAVIGKNGKMTMHKGKTSIQGRQALYKHLEPTDKIALEAGNLAFIMAREIMEHTGSEVRVLNSAKLPFIWDAPTKTDKEDAMKLAHLVEERRDEKLPIVPLPSEKELERRKIIASHGREMRNRVRHINTLHALFVHHGHTTIVKKNLATAERRQQAVQVLTGHEREEAEWLLKYLELHEQRIKELKRKIREDAKNDEDMKRLQSIPGVGPVVAYAFVAHVGDGSRFSKGAQVSNYIGFVPRLDYSGTIQRHGHITKRGNGYLRGLLVQAAWTMTLSKKGSALRTRYKYYTLCQEASKKKTIVSIARKLAELMYSVLRNKTIYEPRKWDGPKSRPVDLAGQAMCA

SEQ ID NO: 468323 - protein, 406 aa, unidentified
MNMNAVGIDVSKRKSTVAVLRPGGKIVAKPFDVPHLSPDFQALEKLIRELDGETRIVMECTGHYYEPVARELSQAGFFVSAVNPQIIRNFQGQDNPLRKVKTDKADSVKIARYTLDSWANLKQYSLMDELRSQLKTMNRQFDFYMKHKTAMKNNLIGLIDQTYPGANTYFDSPAREDGSQKWVDFIDTYWHVDCVRKMSLSAFTDHYQKWCSRRKYNFSKSKAEEIYGKAKELIPVLPKDSFTKRIIKQAIDQLNTASQTVEQLRTLMNETASRLPEYPVVMAMKGVGPSLGPQLMAEIGDVTRFTHRGAITAFAGVDPGVNDSGDYSQKSVHASKHGSPVLRKTLFQIMAVLTKTKPDDAVYLFMDKKRSEGKPYYVYMTAGANKFLRIYYGRVKEYLSSLPESE

SEQ ID NO: 468324 - protein, 457 aa, unidentified
MRIVYQRCCGMDVHKDSVTACVLLIDEYGEWRSEKRKFRTMTRDLREMATWLASLGVEAIAMEATGVYWKPVWNILEAENKFRLLLVNAHHIKQVPGRKTDQKDSEWIADLLQHGLLKASFVPPQTIRRLRDLTRMRVKIRQMLATFANRIQKVLEDANIKLGSVASDVLGVSGRRMLHALVEGQQDPEQLAALAQGRLREKRAELQLALEGHITDHHRFQLKFLLEFVQFGEKQLSQLEAEIRCLLAQVDPASVPPEDTVTAELAAPGAKAEAPATAQKSPLQTVVELWDTIPGVDELTATTLVAEMGANMDQFPSAGHAAKWAGMCPGNKESAGKRLSGKTPKGSVWLRRALCQAAWAASRTKNTYLAAQYHHLIVRKGKKRTIVAVAHTMLVMAYYMAKRQCTYQELGGDYFDRRNADTMQHRLVKKLKNLGYEVTLTPINAPPTAQEPSAQCC

SEQ ID NO: 468325 - protein, 336 aa, unidentified
MPKLKQYVGLDVSLEETSIAVIDETDNLVWRGSVASTPEAIAAALRKHAPRAERIGFEAGQLSSWLYHGLKAKGCPVICIDARHAKAVLSLKVNKTDPNDALGLAQIMRVGWYREVTVKGHDCQALRALLVARAQIVSQITTVKNCVRGILKTFGHVLPKKLRATYIASVREIIEGHATLEPILMPMLRTLAATMEQLQVYDRAINRFARHSETARHLMTAPGVGTVVALAYITGVEAPARFSRSSAVGAYFGMTPRRYQSGEVDHAGRVSKCGDGMVRTLLYEAAKVLLSRSAKPSDLQAWGHALARRSGKKKATIWFSSIYARSRVFARSTRPA

SEQ ID NO: 468326 - protein, 413 aa, unidentified
MELVHARCAGIDISKKDAKVCVRVQGTGRRRTAASVTTWGSMTNQILALREHLLAEKVTCVVMEATGAYWKPFYYLLDDGLDVMLVNARDARNVPGRKSDVSDAAWLADLGAHGLVRASFVPPPPIRELQDLTRARTVITRERSREAQRLEKLLEDAGIKLSSVATDITGASSRRMLEALIDGQQDPTVIADLVHWRMRPKIAALMEALTGRFSEHHRFMTRLFLDRIDAHSADIARLDARIEAAMEPFASARDLLMSIPGISRITAEAFIAETGADMSVFPTAGHLASWCGLSPGSNEAAGRVKSTKTRPGNPYLKGALGVAALSVVRRKDTYFWAKYRRITVRRGPMRALVAVEHAMVVAAWHMLTNGEFYHEPGPDYFTRRMPAKTQARAVAQLESLGYKVTLEPLADTA

SEQ ID NO: 468327 - protein, 404 aa, unidentified
MVFLGVDWAEEHHDVWLENEQGEMLGKARIANDVGGVRQLHELVAEHAHDPSQVVVGIETDRGLLVTALVGAGYQIYAINPLSVSRYRDRHGTSGAKSDRADAKLLADLVRTDRHNHRRLAGDSELSEAVKVLAREHQDLVWTRKRFINRLRSTLREFYPAALEAFGTDLGALDALAVLERAPTPWQGRQLSHAKIVSMLRKAGRQRNLEPKAAEIQRALRSEQLQAPAQLQAAMAIVVSSCVAMIKSLNFQLEQVATEMTASFEGHPDAEIYLSLPGLGVVLSARVLGEFGDDRARFADAKARKAYAGTAPVTQASGTKKIVLARFARNRRLADACYCWAFSSLTRSPGANRYYRTLRTRGKTHHQALRGLANRLVGILHACLAAGQAYSESLAWPQPYEIAA

SEQ ID NO: 468328 - protein, 313 aa, unidentified
MTPGSFIGIDVAKRELEVAERPNGARWRARNDVTGIAALVERIRATGRVALIIVEASGGYEMGLVAALTAAQLPLVVVNPRQVRDFARAAGKLAKTDRIDADVLAHFGEALRPEPRTLPDEVTQALHGWLARRRQLLEMLVAEEQRLANSTREVRRHIEQHVEWLQRQLRDVETQLQTLIRTSPVWRESENLLRTTPGVGPVLATTLLADLPELGRLDRRRIAALVGVAPLNWDSGQQRGTRHIWGGRAPVRAALYMGTLAAIRCNPVIRAFFERLSAAGKPRKVALVACMRKLLTILNAMMHRRVAWQAAVA

SEQ ID NO: 468329 - protein, 352 aa, unidentified
MTLVGCDLHSRKQQVAVLVTDTGEVLEQELLHEGDAVERFYRALPRPVTVGIEATGYTLWFHAVMQKLGHTLLVGEAAKIRAMVVRKTKTDRRDAQHLLDLLKHERFPTVWMSDPTTRDLRALIAHRVRLVRMRTMVKNGLHAIALNQRVALGPSLWTKRGLAQLQALSLPPHTANRRADSLELLTWLTTHIDQLDAQIAEAAAADARAQRLLTHPGVGPLTALITVLVLGPAARFPTSKHVVSYVGLAPAIHSSADKYHLGKITKQGNALLRWILGQAAPLAARADGELRRAYFAVLHRRGRPKAKVALARKLLVRLYIMLRDQIDYEEFRRRGRVRRPRIAVNPVSATTM

SEQ ID NO: 468330 - protein, 328 aa, unidentified
MQMVTTIGLDIAKSVFQVHGVDAVGNVIVRRQLKRRYVLPFFQKLPPCLIGIEACASSHHWSRELQALGHTVRLMPPAYVRPYVKRQKNDAADAEAICEAVTRANMRFVATKTLEQQSCLMLHRTRHLFIRQQTAVINAIRAHLAEFGIVAPVGRNGVEQLLDVVADASDKRLPEIARACLLALGAQLRTLKVQILNFDRQIVAWHRSNEASKRLDEILGVGPALATALVASVADPKAFQSGRNFSAWIGLVPKQHSSGGKDKLGSISKQGDRYLRSLFTAGALAVIRYAKKSMAPNIGPGSRLCWHGGQPRSPRSRSPTRSQGWLGP

SEQ ID NO: 468331 - protein, 432 aa, unidentified
MAPDLLRKELFPMKVVYSTCCGVDVHKTFLVATIIKTTKGVQPSYQKKRFSTFNSDIRRFKQWLLDNSCFDVCMESTGKYWIPVFNLLEDQINVTIANPKWVKAVKGNKDDAKDSKWIGDLFRLGLVPGSFIPCKEIRILREYTRYRFKLTCCKRSEKNRFQNAFTVCNVALDAVVTDMFGKSASSITDYLITSDEFDPETCKSFLQKSLKKKADAVIESIEGYQMTSSQKERMLMVRSHLEFMQQSIDSLDSKLDELTAPYENAVSLLCTIPGVDRASAITIISEIGTDMTQFNSSKRLCCWAGLTPGNNESAGKKKSVRITRAGVYLKPALVQCAHAAVKSTATPYYKNKCERLAKRRGKKRAIIAIARMILTAVYHMLSTRETWNPCDLYKIDMPKEMQDKQKAKAVKQALKLLISQGVISPESAPTAV

SEQ ID NO: 468332 - protein, 356 aa, unidentified
MEHVNKLDFSGQSIYVGLDVHKKSWSVSIFSKQCEHKTFTQPPEADKLVHYLRRNFPGATYQAVYEAGFSGFWAHDQLQEQGVNCLVTNPADVPTTDKERTRKRDPSDCRKLARSLRSGELKGIYVPSRPKLEDRSLVRTRQSMVRKQTRCKNQIKALLYFYGINLPEDVVDSHWSQKFIRCLENLHMERSSGDMALKVHLDELHHLKRIIASLNRSIILLSREAEYREMVRLLKTVPGISTLSAMIFLTELGELGRFASLDRLASYVGLIPDIESSGETEHIKNLTHRRNPQLRALLIEAAWVAARKDPVLLLAFNEYCQRMKKTRAIIKIARKLLNRIRYVLKNQVEYVPGVVQ

SEQ ID NO: 468333 - protein, 408 aa, unidentified
MTVPLYVGVDVGKAKNVACFMGPDGTVLLKSLNFDNSLSGAQKLVAKTKDILAQKGCDHPVFGMEATSFYHFHLMYFILQDDELKPYRPTVYQLNARNIKNFKKSYTPRGKNDTYDAFIIADNLRFGRLPKPYEVDEMYLPLQRLTRYRFHLVGSLVREKSYFLSMLFLKFSNYGDVFSDVFGATSRSLITEFYSIEEIINTPLEDMVEFLIDKGNNHFSEPEKLAKELKRIARDSYRLQPKLADSINLILETSINNIRFFEQSIRKVESVINRDMAKLSNPLESVQGIGKVYSAGIIAEIGDVTKFSSQAKLAKYAGLTWNSNQSGEFEGEDEPINKAGNRYLRYYLIEAADSLRRHNAEYQAYYQKKYREASKHAHKRAVVLTARKLVRLIYALLSKNQLYRPDKG

SEQ ID NO: 468334 - protein, 370 aa, unidentified
MTERTTYFVGLDVHKDSIAVAHAEALRTEPPHYVGVIGTRQVDLDKLVRRLHSQASELVFAYEAGPCGYVLHRYLTAKGLDCRVVAPSLIPKRPGDKVKTDRRDAVEIARLLRSGDLVNVYVPRIEDEAIRDLCRARDASLVMLKEAKLRLKSFLLRLGLHYSGRADWTDAHRRYLAKIVCPTAPQQIVFQEFVHAVDEQVERLGRVEKEILDVIPTWRLYPLVEAFQALRGVQWIVATIIVTELGDITRFDNPRQLAAFVGLIPSEHSSGEKRRQGGITKAGNSRARRALIEGSWAYRHVAKVSPAIQKRLESLPKPIRDIGWKAQVRLCKRFRRLSSRGKNANVVVTAIARELLAYMWAIAKEVPISV

SEQ ID NO: 468335 - protein, 344 aa, unidentified
MENYAGIDVSLELSSVCVVDAQGKILKEAKVASEPDALVEFFERLGFAVKRIGLEAGPLSQWLHAGLKGAGLETVLLETRHVKAALSAMTVKTDRKDARGIAQLIRMGWFQPVHAKSVGAQEIRALLIARKQLLGRLIDVELSIRGILRGFGLKVGPVTRRSFEPRIRELVAGQATLERIASAMLSVRSALKAEYGRLHKAVLAIVRDDAVCRRLMTVPGVGPLVAVTYKSAIDDPHRIVKSKAAGALFGLTPKKYQSGEKDVTGGITLAGDETVRTVLYEAANVLLSRITRFSKLKRWGMDVAKRRGSKRAKVALARKLAVILHRIWIDGTTYRWTDAGPIAA

SEQ ID NO: 468336 - protein, 367 aa, unidentified
MTKDTLYIGLDTDKKWIDVAVAEPLPGGEVRYFGKIANDPAALDRVLKRLGKEARELVVCYEAGPCGYGIYRRLTGKPGVTCQVIAPSLTPRRAGVRVKTNRRDSLTLAKLLRAEELTAIWVPDGAHEAMRDLIRARGAAVSDLTRCRQRLGGFLLRQEIGYGGKPWSKKHRLWLGRLEFSAPAHRLMFTELLEALDQTQARLDRLAGHIEELWPTWSLAWLVEALQALRGYRLINAATVVAEIGDPRRFDSPRQLMGFLGLVPSEHSTGDRQRRGALTKTGNGRARKALIEAAWTYTRPAKMPKAEAARQPAEVRAIADKARHRLSARYRRLRARGKLAQVAVAAVARESLGFIWAIAQAAGPRQR

SEQ ID NO: 468337 - protein, 309 aa, unidentified
MTANQKFSRFIGIDVSKAKLDIYDDATGEFLTVENTAKAIEKYVSALSPDPELLIVVDLTGGYEALCVNTFYNRGFTVHRAEGRRVKAFMRSYGEHAKTDRIDAYALALFGRKLHETLRMYTPLPLNLKPVTERISDLKTMLLQEKNRSTAPSLPADMKKEIVRHIAYLEKEIERLYQKCLDIIKNDPPLAEAFYKIIAIKGIAEKSAVLLLTTLPELGCANRRQIAAIAGVAPYAKDSGTLSGYRRIRHGRTTAKSTLFIVTLVAIRHNAQIKEFYERLLKKGKSKMTAIIACARKLLIIVNATLKTC

SEQ ID NO: 468338 - protein, 327 aa, unidentified
MQKSKIQRILYCGIDVSGDTLDICFQTSDGELISQKITNDASGYKQLWQLTGLNYQFIMESTGVYQLPLCFFLEDKKARYSVINALQIKRYIQMKLERNKSDKKDAFHICMYGVENKPECYEMPVPLYFECRALNNAIETITTEITSFKNKIHSLSKLEIDSKVIMSGYKKILRNLQAELKKFEVVLYKKLSAWQPDLVKQVGSVVGIGKRATAILIVTTQGFRHTANYKQLISYAGLSPKEYSSGSSIRGKVRICKQGGSLLRHTLYMCALNAKSTNAACKALFDRLVAKGKNKKLAIIAVANKLLKQVFGVVKNGTLFDRGYYGK

SEQ ID NO: 468339 - protein, 338 aa, unidentified
MTIVMGLDQHRAQITADWVDTSTGEVSRARVVPADRAGVRRFLERFGDQELEVALEATTGWRFVVEELRRVAAVVHLAEPAETAARRGNKKRAKNDRADARHLRELLMVSRLPESWIPPDHILDLRAQVRLRHTLSEQRGEWQQRIQAVLYHHGCPQRRNLMTGEGQRWLAAQPLAACAREQITVALAMIDALDLQLAPLNKQLRAYARRQPGCRALMAHFGIGELTAVTILAELGDAGRFSSSREAVRYAGMDITVHQSDARRAPGHLSRQGPPALRWALFEAAQSAARAGSPDRDYYRQAAERLGANRACLSVARKLLKRSYHTLRELGEEALQPA

SEQ ID NO: 468340 - protein, 340 aa, unidentified
MSEITTVGLDLAKHVFQVHGVDAKGAVVLRNQLRRGQVLGFFSRLPRCVVGLEACATAHYWARELGALGHEVRLMPAQYVKAYVRRNKNDAADAAAICEAVLRPTMRFVPVKTAEQQGAMLLHRGRERLVRQRTGLVNALRAHLAEFGIVGPQGLRNVGRLIAIVRDEADPRLPELARQVLQVLATQIEQLEAAVAALERQLMAWHKSNPVSQRLATIPGIGPIIATALAATVVEPSGFRSGREFAAWLGLVPRQNSTGGKIRLGGISKRGNRYLRRLLINGASANLLRSKATNANPWVIGLRRRRPSLVVAVALANKTARIAWAVMQRQEDYRRMAAAA

SEQ ID NO: 468341 - protein, 377 aa, unidentified
MKRVKFVGLDVHAETIAVAVAEQDGELRSSGVIPNREDAVRKLVRKLGPVEELRFCYEAGPTGYALYWQPTKLGAPCVVVAPTLVPVKAGDRVKTDRRDALKLARNHRAGELTAVWVPDAEHEALRDLVRAREAAKKDQLRARHRLSKFLLRHGRRPPLEIKPWTVKYLDWVKRDVHFQPQAQEVTLLDYLHEVEHAAARIARLDAAIGEAVKLALPKMRAVIAALQALRGIAEISAVTVVAELGEVTRFRKARQLMAYGGIVASENSSGERTRRGGITKTGNAHLRRVVVEAAWAYRHRPSVGFTLRKRQGPLSEKIKEIAWKAQHRLHARYTRLLARGKNKGVVVTAVGRELLGFLWAIAVQAEAEHQEQLPRVA

SEQ ID NO: 468342 - protein, 341 aa, unidentified
MLKVDSAGIDVSARSLMVLLRRDGQARPARSFLNTPEGHRLICRYLAKGGHRVRVCLESTGLYGLDLALVLSVCDGIEVMVANPRAVRRFAQALGHRSKNDQIDAALLEEFSARMPFEPWQRPGQAALELRAIARRIKALTVACTAEKNRLHAATSTHTTPRIVRKDLQQSIRHHQQSILRLRNEAQRIVALDARLKQQFDLLVTVPGVASTSAILILGEIVVLSEDLDARQWVAHCGLDPRHEISGTSVKHPGHISKAGNKYLRSALYMPALVARRRQPNLKAFALHLVSKGKKPIQALVAVMRKLLVAIHHMLKRSQPFDGSKLYSLPTQHTPPTTEAA

SEQ ID NO: 468343 - protein, 369 aa, unidentified
MHDVTTFVGIDAHKKDLFIAMLVGNQATPVTWTVANEPNAVRRLARKLEREAPGPVHAFYEAGPCGYALQRQLTTPRVHCDVVAPALIPRKPGERVKTNPRDARKLGELGRAGLLTPVRPPTPDEEAVRDLCRARDDAREDLQRCRHRFGKLLLRRGLQYRVGRQWTKAHRRWVDSLTWPHEAERVVVADYLLAIDQTEARLKELDQQLTAVAATEPYRERVAWLRCFRGIDTLSAMLILAELHDFRRFASPRALMAYVGLVPGEHSSGEKHRRGRITRTGNALVRRLLVEAGWHYQHRPGVGVALARRRKGQPARIIAIADKAQQRLCRRFQYLVVLNKPRPTIVVAIARELVGFLWAALQPALVVAN

SEQ ID NO: 468344 - protein, 369 aa, unidentified
MDHYAGIDVSLEYSSICVVDATGNIVREDKIASEPEVLIAWFGSLGYALARIGLEAGPLSQWLYAAMKQAGLAVELLETRHVRDAFKAMPVKSDRNDARGIAQLMRLGWFRPVHCKSIGAQEVRAELTARKLIESRLQDVENSLRGILRGFGLKVGKTTQRSFPGRVRELVKGHPVLEAIAEALLSVHAILLREFNGFQKRVQSAARSNVKARLLMTTPGVGPVISLTYAAAIDDPARFKSSKKAGSHFGLTPTRYQSGETDRSGRISKIGDASVRAALYQAAHVIVTKPVQGCPELKSWAMRIAKRAGQEKAKVALARKLAVIMHRMLADGKPFNPSAKAERMAATAAKAAAKVVALPASGQTMAAAV

SEQ ID NO: 468345 - protein, 458 aa, unidentified
MSQKRRKQIRSGQSEWNLNLEVVHPNAAGIDIGNESHYVAVAPDRDPNPVRQFACFTEDLHRLADWLKSCGIVTVAMQSTGVYWLPVYEILTEKGLEVFLVNARHTKNLPGRKTDVQECQWLLQLHTFGLLNNSFRPPEEICVLRAYWRQRGEHVAAAGACIQRMQKVLTEMNVQLANVISDISGLTGMAIIQAILNGERDRYKLADLADPRIHATREEIARSLEGNWRKELLFILQQERNLYQIYQQQITECDTALAAHLQTLNDKVEPGSQPPAAKPNKRAGSNAPTSFDVRGELYRISGTDLTQIDSINIMTAQTIIAEVGIDMSRFPSEAHFASFLGLCPDNQITGGKVLRRGTRHVQNRAATALRMAASTLWRSKTYLGAKFRRLRARLGAPKAITAMAHMLARLVYRMLRYGEQYVDKGMNYYEEKYRENEIRSIQKRAKQLGLQIALSPAA

SEQ ID NO: 468346 - protein, 407 aa, unidentified
MQKVYERCCGIDVHKQMIAVCLKKGKHSEIRQFGTFTKDLREMTAWLKEQDCQMVAMESTGPYWKPLFNVFELEELPAIIVNAAHMKALPGRKTDVSDAEWIADLLQHGLLKASFVPHRKQRELRELTRYRKSRMEERAREINRLQKMLEGANIKLSGTVTDITGQTAQKLLKLVTCGKPITVEDVSACMVGNLKASAEELYISLEGIVTDLQRELILEIMRVIDEQTQQIARAEALVQKYMDEEFSRAASAIDDLPGIAKISAQQIIAEIGTDMSRFPSADHLCSWAGICPGNNESAGKRKSGKTNKGNKILKSTITQCAMVAVKNKDTFFYAQYQRLVVRRGKKKAIIAVAHSMLISIYHVLQGHPYKDLGSGYYNQFNTEKKINSYLNKLKNLGWEPPSPAVSC

SEQ ID NO: 468347 - protein, 402 aa, unidentified
MNCVGIDVSKGKSTIAVMRPFGEVVVSPFEVCHTASELSELARLLKSLDGETRVVMESTGNYHAPVAWLLHGAGLYVSVVNAMLVHDYGNNSLRRGKTDKKDAVKLANYGLDHWLTLPRYVPEEDARLMLKTCYRQYQQYSKVQTMLKNNLISLLDTAFPDANRLFTSPPRADGSEKWVDFVAAFWHCECVCGLSKKAFTTKYQKWCRKHGYNFSEDKALDIYVSACGRFGVMPKTKTAKLLVKQAISQLQATSAALAALKQEMQSLAASLPEYPVVMGMFGVGPTLGPQLIAEIGDVRRFHSKKALVAFAGIDAPPYQSGQIDVRSRSISKRGSASLRRTLFLVMGVLLQCAPMDEPVYQFMNKKRSEGKPYRVYMMASANKFLRIYYASVKAYLDSLEHN

SEQ ID NO: 468348 - protein, 421 aa, unidentified
MKSTIPTILAGVDTHSTTHTLALLDEHGRVTDTKTFNADPKGYERLIAMIGDPALCLGVGVEGTNSYGAALSRRLAAAGYTVHEVLRPKRSVRRSDGKSDPIDAIAAARSVLAGDGISTPKASDGWCEALRHLIAAREQLVTSMTAISNCLAELLTTAPEGIRERYRSLPSKRRIGKLAACRPSGGIVERNVLSSLKTLASSWRELHDRADVLECRMRQILEENARPLLDVYCMGTMSAAQLAVIGGDNPERIRSEAAFAKLCGACPLPASSGKTNRHRLNRSGNRQGNRALYNVALVRMSHHQPTKDYVVRKTKEGKGKLEIMRCLKRYIAREAYRALIAIRNGEAGREPAVERGARLREVRVSLGKTQQQVGDALGVPSSRVSEIERGVRDLPELERQIIEWMDSILGQSQHSNTFDNV

SEQ ID NO: 468349 - protein, 363 aa, unidentified
MFESTMVSVGLDVHARSVRFAAVRADELLEERTLPYDEEAVERVLRRWPAVRCCYEAGPTGFGLYRYLVDRGIDCWVVAPGLVPQRPGDRVKTDSRDARKLARLLAGGLLEPIHVPSRQLEAARDLVRAREDARLDRMRDRHRLSKFCLRHGRTLPTRSWTVVRRKWLGEQRFEFAAEQCTFETYVHTVDLVDARIEQLERAIRETAEQGPWSQLVARLRCLRGVDTLAALALAAEIGDFNRFESAEEFMAFVGLVPTERSSGDQRRQGSITKVGNSHVRRLLVESAWHARRHPKVGYDLARRQRGHDAAVIERSWRCQQRLHQRWQRMAGRGKPQQKIVVACARELAGFVWAIATDQPLRTT

SEQ ID NO: 468350 - protein, 325 aa, unidentified
MSKIVLGIDVSKAKLDLALLKDNKFYCKTVDNSNIGFKEILHFLSKKSIGKPEIYLESTGSYSEMVSDFFVDHNFKIKVVNPLKIHAFSKAKLSRNKTDKADAKLIAEYGLKFEEPSYKKLPKNIMELRALYRCSLSLKEQAVECKNHLEHKNVMPEFVVSTWKTTLNNINQQIKDIKKRMNEIIEKSEDLTTKFSNLMSIPGIAGTTAIAVLAEVGKIDKFLTARQLAAYIGVTPRHRNSGSSVNSKPSIAKIGNAILRKALYLPSVTAMRCNETFAKFASTLKIRRKLGKQVIIAIMRKIIHAIFGVLKNNSKFNEKLLFKYA

SEQ ID NO: 468351 - protein, 427 aa, unidentified
MNYTQNHKISQITPSTLIIGIDIAKDKHVARAQDDRGLDFGKRLIFENRIFGFEALVEWVKQHQEKHKKNHVIFGVEPTGHYWKSLAYYLTAKGYDFVVVNPMHVKKSKELDDNSPTKNDTKDAKVIAQLIKDGRYSVPNLLDGIYAELRECVKIRDQLTEQLMITEGRIQNVIQRYFPEFFDVFGDWEGKAALCTLKLFPFPSDIHKKTPERVLQEWKPYVQRGVGIKRATKLVETAKKSIGIEVGLKFAKCELKNLIEQYELFKRQLEELDQELEAIVETLPGAQQMMKIPGLGAVTVGLFFAEVGDISKYSHPQQLVNLAGLSLREHSSGKFKGQTRITKRGRKRLRRALYLAIRPLVAHNSTFKALHHYYTKRPERPLKKQQSLIALCCKLLRVLFVIGQKQCEFDGSRLIKDIPQMDGLQAV

SEQ ID NO: 468352 - protein, 402 aa, unidentified
MNCVGIDVSKGKSMIAVMRPFGEVVVSPFEVRHTANELSELAGLLKSLDGETRVVMESTGNYHAPVAWLLHDAGLYVSVVNAMLVHDYGNNSLRRAKTDKKDAVKLANYGLDHWLTLPRYIPEEDTRLMLKICYRQYQQYSKVQTMLKNNLISLLDTTFPDANRLFTSPPRADGSEKWVDFVATFWHCECVCGRSEKAFTTQYQKWCRKHGYNFSEDKALDIYASACRHFGVIPKTDTAKLLVEQAISQLQTTSSALAALKQEMQSLAASLPEYPVVMGMFGVGPTLGPQLLAEIGDVRRFHSKKALVAFAGIDAPPYQSGQIDVRSRSISKRGSASLRRTLFLVMGVLLQCAPMDEPVYQFMNKKRSEGKPYRVYMMASANKFLRIYYASVKAYLDSLEHD

SEQ ID NO: 468353 - protein, 334 aa, unidentified
MEQITTVGIDLAKRVFALHGVDAQGRVVLRRTVRREQLLETIATLPPCLIGMEAGSGAHEWGRRFEPFGHRVRLMAAKFVAPYRQNGKNDGNDAEAICEAVGRPKTRFVPLKSAEQQAVLSLHRVRQGFVTERTATMNRIRGLLAEFGMVLPQRSPTVRRQALKAAETLPLLARRAIEDLCAHVRILDERIDSYERDLHQQAQTSEAARRLMQIRGIGPLSALAIVATVGNARDFKNGRQFAAWIGLTPQQHSSGGKTRLGHITKRGDAYLRSLLVQGARSALHTATRHRDRVSRWACELEHRRGYHRTLVAVAAKNARIAWALLSKGETLRPN

SEQ ID NO: 468354 - protein, 343 aa, unidentified
MDHFAGLDVSVKHTSVCIVDDTGKVVREVKVASEPEAFLAVLKNPAYHFKRIGLEAGPLSQWLFGALAEAELPVVCVETRHMRAVLKAQINKTDRNDARGIAQMMRVGLYRAVHVKTLRSQKLRMLLTHRKLLQSKAIAIENDLRGTLRNFGLKVGMAGKTKFEARIKELVENVPDLAELVEPLLIVRRALREQLGILHRRLLAVVRDDDVCRRLMTVPGVGPVVALTYRATVDVPARFRKSKSVGAVFGLTCAKYQSGEIDRSGAISRCGDEMMRTMLYEAAQNMLFHSTRWSWLKAWAMKIAKNRGMKKAVVALARRLAVIMHRIWVDGTKFRWTREAAVA

SEQ ID NO: 468355 - protein, 343 aa, unidentified
MYYIGLDVHKKTISYCVKDAAGCVHQEGRIGSTRCELDAWIRTLPQPRMIAMEATIFTGWIYDHLLPHAKAVKVAHPLMLRAIAAAKRKNDRIDAGKIADCLRCDFLPECHMASTEIRNRRRILRYRGLVLRQAVQMKNRVSGLLMETGVSYNKLRLHRMGYFAELMSTNEEVSESIRPLLRLCREHIDRAIRLDTALLRSLEQDPLLSDRLRRLRTIPGVGPITALTWALEVGDTSRFRSIKQAISYCGLCSAEKSSADKVMRTPISKQRNKHIQQVLVEAARLAPRYSDELALLHEKERQRGNGNRATLAVARKMVALMLAVERRNTDFVPAAEFRRTAAA

SEQ ID NO: 468356 - protein, 354 aa, unidentified
MAETLRTTVAVIGIDIGKNSFHVVGLDRRGAIVLRQRWSRGQVEARFANLPPCLIGMEACVGAHHLSRRLQALGHDARLMPAKYVRPYSKGQKNDFRDAEAIAEAVQRPTMKFVATKTADQLDLQALHRVRERLVSQRTGIVNQTRAFLLERGVAIRQGLRFLRIELPRLLAAPPDVLSPRMVCIIADLAGDWRRLDERIGGLSAEIEAIARQDRGCVRLRSVPGIGPIIASAMVAAIGTGEAFAKGRDFAAWLGLVPRQISTGDRTILGKISKRGNRYLRVLFVQAAWVVLIKPKSWARHGLKAWLEAAKKRLHHNVLAVALANKLARIAWSVLAHGRAFEALTIDEATARPV

SEQ ID NO: 468357 - protein, 376 aa, unidentified
MNDHSEAYVGLDTSKLRHAVAVADGGRGGEIRFYGEIENTPAATAKLVRKLAAKYERLTFCYEAGPTGYGTYRQITSLGFECVVAAPSLIPKRPGDRVKTNRLDAMSLAKQLRSGDLTAVWVPNEGHEAMRDLTRARETAMLDSRTKRQHVSAFLLRLDRPYPERKKTWTKVHMSWIASQKLDYPQHRIVLEEMMLAVRQAQERLDRLEQAIADAVPDWSLAPVVTALMAMRGLDLISAATILAEIGDPSRFQTPLALMDYLGLVPSEHSTGDEVRRGPITKAGNRRARRMLVECSWSYQYPPRVGRAKQPKVDAAPPAVREIAWKAQHRLYRRYRALIRKGKRKTVAIVAIAREFAGFIWAVARATTTARAAVAS

SEQ ID NO: 468358 - protein, 310 aa, unidentified
MEHTTVVGIDVSKDRLDVHVLPSEEAWAVSRDGEGLAELCRRLAGLSGVVALEATGGYESIVAASLSSAGLPLVVVNPAQVRAFARALGQRAKTDPIDARVIARFAEATKPMVRPLPDQATRMLADLLARRRQIVEMIASESQRLRRMEMARVRKSIERLLVALKRELGDVDHDIDDTVRGSPVWREKEDLLASVPGVGPIIARTMVADLPELGTLGRKQIGALAGLAPFVRQSGKWKGQAHIGGGRPTVRTALFIGAQVAKRYNPVLRAFYERLIATGKSKMVATIAVAHKLLTILNAILRDKKPWQPA

SEQ ID NO: 468359 - protein, 347 aa, unidentified
MLIIGCDFHPGFQQVAIFDNLTGEIKEKRLQHRAEAEQFYRSLAGQEVRVGMEACGHYPWFERLLAELGFELWMGDAAKVRASVVRKQKTDRRDALQLMHLLIEGRFPKIWVPSLEERDARQLLVHRHKQVQARTRSKNQLQAMALSHGVQKKYKLWTQAGRAELEQLPLLPYAAERRKKLIEGLDALEAEISELDRRVAEEARQRPEAVMLMTHPGVGPVTALAMVLTLGPAKRFESAKQVGSYFGLIPSEASSGGKQQLGKISKQGSSFLRFLLVEAGQTAARYDPQLKRFYKRLAMRKNRGVAKVAVARKLATRMYLMLREGWTYAQLNQAVMSASPSHSVDGE

SEQ ID NO: 468360 - protein, 415 aa, unidentified
MKVVFPTCCGVDVHKTFVVATIITTPADSLQPHYQKKRFSTFNSDLNRFADWLLEHNCLDVCMESTGKYWVPVFNILEKRGIRVVIANPKWVKAVKGNKDDTKDSKWIGDLFRIGLVKSSFIPDLDIRILREFTRYRYKLVSMKSSEKNRFQNAFTVCNVALDSVVSDMFGKSATAITDYLASNESFDPEHCVSLLQRTLKKKAKQVLESIEGFSITDEQKARIKIVREHYDFLVKLVAEVDACVNEMVVKYEGEINLLCTIPGIDRRSAITIISEIGTDMRQFGSSKRLCCWAGLTPSNNESAGKKKSVRISRAGVYLKPALVQVAHAAVKDNNNPYYKLKYERISKRRGKKRAIIAIARMILTAIYSMICTGEVWNPVDLFKIDMPEHLKEQQLAKAIKQATRFLEKQGLSVA

SEQ ID NO: 468361 - protein, 353 aa, unidentified
MVELSKVEAQEVMGLDLGDRSSQICRMDRKTGTVLEERRLSTTAASVQRYFSALPPQLVALESGTHSLWMTRLVKSLGHEVIVANPSQVRAISSSLKKTDERDARFLAQLVRVDPQLLSPVQPRSEDSQQAIAVVRAREGLVKARTMLINQVRGVVKSFGYRLPSCSSAAFAHKAQQDKTLPSSLKETMEPLLRVIAEMSQEIARFDKEVEALARRWPVTSRLRQIKGVGALTALVFVLTLGDPFRFARSRAVGAYLGLVPGNRSSGQSTPQMPITKQGDRMARRLLVQASHYVLGPFGQDSDLRRFGLRLAERGGKSGKKRAVVAVARKLAVVMHRLWVSETDYEPLRKAAA

SEQ ID NO: 468362 - protein, 467 aa, unidentified
MSKKKLSLNVVNPNAAGIDVGSKTHFVAIGQSPKDVKSFGVYAQDLQSIASWLKSNDIVSVAMESTGTYWQNLFVELINSGLEVILTNGKFTKNINRKKTDVLDCQWIQKMHSLGLLPSSFLPDNITEKLRTLCRHRSNIIAQRADSSHKMQKFLKYLNFRLDVVVRDVTGLTGLKIIDEICNDNLDPVSLAKHRHYNCRKSEEEIAKALVSNKRKDYLFGLKQEYKRYRFYTNMIKECDEEISLFLKGITKNNAGKTEKLPENKWYKRQNKNSIEGIDLNLVSYHLFDGVDLYAIPGVSHSTILTIISELGPDGFKKFPTAKHFASWLRLAPNNKISGGRTLSNHIPKGSNRLKIALRNAANAVGNLKDSDLGQFFTKIAFRKGRQAAICATARKIAVIKWNMVIKKIQYYPKTEYIFLDQKRKIIRAMRKKITKFGIDPGELGLFGQDRDRIAFEKRKLITSNLT

SEQ ID NO: 468363 - protein, 348 aa, unidentified
MNYVGIDWAYGRAAWCAMTETGTIAGEGMIPADESGLARLVLELGTEVEGCVEMMSGAVWVRDRLQAAGWEMKVAHARKVRDVAPLACKTDKVDARVLAELCRRDLVPELWVPSLEDRALRELLRRRMHLVKTRTSARNRIFGLLTQFGLRISYARLRRPDAMELLEGRGVPEVWRASIAELLELAAEMDRRIDPIDRELGPLAKADERARLLATAPGIGPLLSLTFAAEIGEVSRFSGPGKLIGYAGLAPRVSQSGERSATGALSKAGSRTLRWAAVEAANQAWRPSNPWHTHYLRVTARHGKNPAKSSVARKLLIAAWHMLSRDEPFKPPRPEAARTLPRRAPAAF

SEQ ID NO: 468364 - protein, 431 aa, unidentified
MKTDQESTVVYAGYVGLDWSSKEHVFCIYDCATAKRTKRKIPNDPAALLAFLAELRVLFGGKPVLLGLEATRASILPILLQHDFLQMILINPKTASDFREMFRPSCAKSDDLDAYYTCELIRAHSDQFRIWEPHDPLTRQLNACVEHRRELVDLRTQVANALHSALSASFPQLLELLNSQLTTSMAAHLLERWPTLEAAQAAGVDKLRSFFYKHNVRTSDKLEERLKKLAAAQPLLVCAEDREPAGMFIKALAAQSGQLHRSIDRFETKIAELVEKHPTAKLFKDVPGAGPQLRPRLAAVFGTQKNRFATAEDLTTYTGIAPIKQSSGETSLTCARWIRPIFIHQTWIEHAGCSIRKCDWARELYEMKREAGKTHFQALRAVAFKWIRVLHSCWVKDTPYNESIHIQNLQKKSPQLWQRLQELQKKKAVNN

SEQ ID NO: 468365 - protein, 343 aa, unidentified
MYIGLDVHKKLSYYSMVDGRGTEMQRGRFPTTCEGLDEFASKLPEDAKVAIEASTSGIFAYERLDESGIEVHLAHPVYVKPFAKKHVKTDKVDARVLAQLLRMAYLPESYVPGKEIRDQRVMIRHHASLVRLRTSIKNRIHALLAIEGVQTSEFSDLFGKKRMEFLRGVKLRQVRREALDNYLEVLKALEERIEEMEAILKERAKITDEAKWLMSIPGIGYHNALLIQSELGEIERFSNPRSMVSYSGLAPKVEQSGDYKRYGHINKHSNGFLRWAFIQSARAAVRSSKPNRFQRIYNKIKARRGEKVAIVATARHLAESVYWVLTRKEYYKENRAIRASSFS

SEQ ID NO: 468366 - protein, 353 aa, unidentified
MITIGVDAHKHAHMAVALDERGRVAGQWRGENSAAGWDEVTRWARALGDERRWGIEGGGGYGRGLAQHLVGGGEVVYDINPRLTATERRRSRRMDKSDAFDAQAIAQVMQREEDKLPHVVAEDETVALDLLTAEREDAQAEATRLRNRLHHLLLQLDPEYHLHLPALTSLAGVQAAETYTTTSGNLVQQERAAVVRRLAGRLRLAMEQVAELGGRIEALAQARYAPLTRLCGVSLLTAGSLAGILGPGHRFASEAQLAAYAGVAPLETSSAGRVRHRLNRGGNRRLNAIVYRIALVQARWSPEAKAYLARRVAEGKTKCEAFRALKRYLVRAIWRLWGACLPPAAVESGRRAA

SEQ ID NO: 468367 - protein, 478 aa, unidentified
MSSRRLVGIDLGIASAHTVRVLDETGKTLAKRKAWPTVASLSDVEKTALAGAPDGTVLEVVMEPTGPAWLPIAVYFTARGHLVHRVSSAKAADLRRFLSRHAKSNAIDAETLARLPLVAPSGLVPVEFGSPARASLDRRVRAVARLTADIGRRKNRIRALAQAMVPTIGAALSEGLNHTDLAVLERYADPRALLATGPARLTRLVTTTSRGQLGQAKAQALRTAAAEAVALWDGDSAAALDDLAAEVASEVRLVRAAEAERTRHEHARDAALACVDPAGLAASLPGLGPVGAAQLVATMGRPGRFPHASAFKAFTGLTPRANQTGQTDRKHQPMTKAGPRALRSQLLQSADTARKLDPQLAAVYHAQMTQRGATHRKALCVVAARLAERAWLTFARGEPYVVCDLEGRPVTPQHAKHLIAKHFTVPTEVRRRRRSTKQAGKVPHDAQGASQVTARSWTRGDLPHASLTTPSGIVNQAT

SEQ ID NO: 468368 - protein, 400 aa, unidentified
MLSIGIDVSKGKSTVCGMKPGGEIVYTPFEVQHTREGMSELVSLLRGSGEEVRAVLESTGSYHCPVVAALLENGIFVSVVNSLRMKRFCSQSIRRVKTDQIDAMQIALYGLAYWQELQPTRLPENTYRELQLLARQYYQMTSLLIKAKVDFNALCDQVLPGMQELMSDHAGRHKLSDFVLRYRHTTHILEMGETRFRKDYCKWAEKKGYRNHERMAALIFATAQNGIPVLPNAPSTQIVITEAIRVLHTVEASRDAILTQMQALAKTLPEYSLVREMPCIGDTLAPRLIAEIGDVRRFHSKRALIAYAGIDAPPYQSGKFCANNRHISKRGNRYLRKTGYEVMQSYVMHKPANDPIFTFIEKKRSEGKSGKLAMVAGLNKFLRVYYGKVTELYRSLPAIE

SEQ ID NO: 468369 - protein, 349 aa, unidentified
MRFYNQQHRFYCGVDLHARTLALHVLDAEGNTALAKTIPASPKAFLQAVAPSRDGLAVACECMFAWYWLADLCEQEQIPFVLGHALYMKAIHGGKAKTDKIDAKKIAVLLRGGMLPQAYVYPKGMRETRDLLRRRTFLVRKRAEALVHLQNTNSQYNHPPLTKKLSYAANRAELDLPARFTDPSVKKNVELDLALLDTYDEHIREVELYLTRAAKVDDPQAFQRLLSVPGVGKVLALVLLYEIHDIRRFPEVGQFLSYARLVRCTHESAGKKQGTGGNKIGNAHLKWAFSEATCLLLRESDQAKQWLARREKKHGKARALGALAARLGRAVYHLLRKQQAFDLPRFFAS

SEQ ID NO: 468370 - protein, 343 aa, unidentified
MQAVTTIGFDIAKSVFQVHGVDTVGQVIIRRQLKRRQVIAFFQKLPACLVGIEACASSHYWSRELQALGHNVRLMPPAYVRPYVKRQKNDMADAEAICEAVTRANMRFVPTKTAEQQSGLMLHRTRHLFMRQQTSVINAIRAHLAEFGIVAPVGRRGVEELLRVIADPSDKRLPEVVRACLAALGSQLLSLKKQILDFDRMIMAWHRSNQTSKRLNCIPGVGPLLSTALVASVADPKTFRSGRNFSAWIGLVPKQRSSGGRDKLGSISKQGDRYLRGLFVAGAFAVIRYAKIHGAKHRPWLTALLARRHTKVAAIALANKLARMAWAMMATGERYNYPASLKV

SEQ ID NO: 468371 - protein, 328 aa, unidentified
MNTKVGVDGGKTKFDAAVMTSQGKYRTKVFDNNPAGFAAFAAWLDAYVPAGRSQAHVCMESTGSYHEALACFLFDAGIAVSVVNPLRVKRFMESEGVRNKTDRGDAKALARFAQKNEPERWEAPAPAVRTLQALVARLDALMEMRQAERNRQEVSHPSVQPSIEAMLGSIDEAIAEVRRQIAATIDDDPDLKRRSELLETIPGLGDRTIPQLLAYIGRPQRFKSVKALTAYACLSPLIRQSGTSLDRHKGTHPTGHHALRSALYFPAMVAGRHNPSVAAFWARLKAQHKPSKVIVVACMHKLLAIVYGVLKSGRPFDAQVALGHGPHS

SEQ ID NO: 468372 - protein, 387 aa, unidentified
MAQVNDLSRSLAVFDPISTLVVVVEMGKASWLVRSVVPGVERQPLKKLEPDATALLRLIERWRSEAVRAGRPISRVALTYEAGRDGFWLARWLIARGIEAHVIHSASVAVSRERKRAKTDRLDTAMLMRVFLGWLRGERGHCGMVAIPTIEEEDARRPSRERESLVNERSRIINRMKSALARLGIRGFKPHLRRAPERLACLLTAEGTSLPANIIEELRRDMARLALVREQISAIEKTRVERLERAPDTGPHAMVRLLSRVIGIGIETADMLVREILSRKLRDRRAVARYAGLTGSPDESGLKSREKGLAKAGNARVRRGLIQLAWRFLMFQKDSALARWYRIRTEGPNGARKTTMIVALARKLLIALWRLVTTGEIPDGVELRPAA

SEQ ID NO: 468373 - protein, 359 aa, unidentified
MESMEGSRSCVVGGVDTHKDLHVAAVVEEQDRVLGTRCFATTRQGYRQMLAWMRSFGNVQRIGIESTGSYGAGLLRFMQDAGIEVLEVTTPDKHDRRRRGKNDDLDAQNAAHAAFAGKRTVTPRRRDGMVESLRVLTVCRKTAVAARRVALQLIQTTIVSAPDALRDTLRNMTRMQLVRTLAAWRPDLTAYREMEAAYRISLKSLARRYLELHDEIADLDAMIGAIVDDLAPQLIARNSIGHTGAAQLLLTAGDNPERLRSEASFAALCGVSPVPASSGKTIRHRLNRGGDRAANSALHIIAIGRLRTDPATKGYVARRIAEGHSKLDALRALKRYIAREVFSIIMRRQREINQTRVVA

SEQ ID NO: 468374 - protein, 323 aa, unidentified
MQGKVSFEEDAMPVVYAGVDVSKEWLDIHLHPLGESRRFSNDKTGIRQLKRLLARHRPKSIVMEATGKFHRPAHRSLWLDGFAVAVVDPLRARMFARACGYLAKTDRLDARFLALLAESLRPPADTPPSPHVEALQELVNARSAAKCDITALQNRSKTATTALLRGELNRLVRRLEQHVERLDKEIERRVGEDPQLYRKAEILTSIPGIGRVTALALMAGMGELGTCSGKQAAMLAGLAPIANDSGARTGRRSIRAGRPAPRRALYMAALSACRYNPALARFADTLKAAGTAAKVILVAVMRKLLVLANCLLSQDRLWTPTPP

SEQ ID NO: 468375 - protein, 310 aa, unidentified
MEQVYVGIDVAKDRLEVHLRPSGEAFAVARDGKGLEELSVRLGGLEVALVVLEATGGFEITVAAALCATGLPLAVVNPRQVRDFARATGRLAKTDALDAAAIAHFAEAVRPEPRPVPDEQARALGELVTRRRQIVEMMTAERNRRKRLASRRMVKSVDRLLKALQRELSDLETDLDDTIRKTPAWRQAEDLLKTVPGIGDVTARTLIADLPELGTLSRRRIAALVGVAPFNRDSGTMRGRRTVWGGRASVRASLYMAALSASRCNPTLKRFYQRLTEAGKPKKIALTALMRKLLTILNAILRDRKPWLAT

SEQ ID NO: 468376 - protein, 323 aa, unidentified
MFYLGVDVAKAKLDCMLLDSSSGKLKSKSIANTPTGFVQLLEWLVKNKAAKPHVVMEPTGMYHESAALALTDAGLIVSLVNPAQLRSFAQGLGVKTKTDKADSVVLARYGATQNPAPWQPPSASARRLKALLARRDAVADDLQRERNRREANDFSSVPEAVGESIAQSIAFLEAELRRLEKMIATHIDDDPDLRNKKDLLETIPGVGPRVASHMTALFAGRTFERAEQLAAYLGLVPVQWESGSSVRGRPHMSKAGPAYLRKVLYMPAVVARRCNPHIKALNERLLAKGKSKMAAIGAAMRKLAHLCFGVVQTGKPYDPTFAM

SEQ ID NO: 468377 - protein, 364 aa, unidentified
MKQKEKHNTIGLDLGERRHRFCVLDEAGEVVEQGSLSNERVALGRLTQRYRGALVVMEAGTHSPWISRYLKELGSEVIVSNPRKVRAIYQHERKSDQRDAQMLARLVRMDRALLYPVRHSSEQAQQDLLRIKLRDSLVRARVGLINSVRFSLKSLGYTVRNPSSERFHKVVRETLPEVVRQMISPSVEALAELSARIKVLEREINLLAQSKYPQTLWLQQVPGVGALTALYFVLKIEDPQRFENVRDVGAYLGLCPRRDQSGGSDPQLRISKRGDAYLRRLLVSAAQYILGPFGPQSALRAYGLMLAADGGARAKKRAVVAVARKLAVLLLSLWKNRSDYEAFPHCQTIEDKRSGTIAIHRVEA

SEQ ID NO: 468378 - protein, 411 aa, unidentified
MQVVYARCAGLDVHKKTVSACISVCEAENKQRRTRVFGTFTRDLLALVDWLKEHRVTHIAMEATGVYWRPVWAILEGHVEQLLVNPQHIKAVPGRKTDAKDCEWIADLLQHGLLKGSFVPPTPIQDLRDLTRYRAELRQSQNRVANRIQKFLEQANLKLSSVASNALGVSGRQMLDAIIGGQNDPEQLAQMARGRLKNKIPELEQALEGRIRDHHRFLLKQFLEEWNDLGQRIARIEAEIDKRIGPFEEAVALWQTIPGVDRVTACNLVAEIGVDMHQFPTDRQLASWAALCPGNHESAGKRLSGKTRDGNKWLRRSLCQAAWAVTRKKNCYLSAQFKRLAARRGVKRAVMAVAHSMIIIGYHMLKTGRGYHELGGNYLEQINKDQLQRYYTKRLQRLGLKVTVESATEAA

SEQ ID NO: 468379 - protein, 424 aa, unidentified
MKVTYQTCCGVDVHKSFLVATIVKTTGGIEPSYQKKRFSTFNSSILEFKQWLLDNHCHDVCMESTGKYWVPVFNLLEDEINVVIANPKWVKAVKGNKDDTKDSKWIGDLFRLGLVKGSYIPCKKVRILREYTRYRYKLVSCRSSEKNRYQNTLTVCNVALDSVVSDIFGKSSMSIIDYLLEQSGTSINHEEIASKLLRSLKSKEDAVIESVEGYQMTDAQKYRMRLVRAHMDYITAEINDVDKMIENMISSNPDFENAVQFLCTIPSVKRDSAITIISEIGTDMSQFGGSKRLCCWAGLTPGSNESAGKKKSVRITRAGVYLKPALVQCAHAAVKSDKSPYYKKKYESLVKRRGKKRAIIAIARMILTAIYQMLSTGEQWNPSDLYKIDMPVALVEKQKAKAIKQAKKLLQREGILPPDEPLAS

SEQ ID NO: 468380 - protein, 320 aa, unidentified
MPQQSRIVGIDVSKAKVDACIRSLGQWRSVPRTPQGERALLAWLHDHQVGLAVMEASGGYERGWAEVLRHAGIAVRIVDPKRVRYFAKSAGRLAKNDPIDAEMIAWFAETFATEVDQAHDPDRDALDRLVTARAMLVRLSTQIAQLGEHRQPAVVTSAQRAISKMIIAQRARLEAAVQAQINANAALAARAAIIRSVPGLGPHFTAGALAWLPELGRIGNKAAAALAGVAPYDDDSGQHRGERHIKGGRREIRDLLYMATLAAAARHNPLIKAYYQRLRARGKKAKVALVACMRKLIVILNTMLARGQTWNPPNAAAAIG

SEQ ID NO: 468381 - protein, 328 aa, unidentified
MSNPESFVGIDVAKGWLDVAWLTGETLRIDHAEKAIAVLVERLRSQPPALVVMEATGGLETGVASALAAAGLAVAVVNPRQVRDYAKACGRLAKTDRIDALILAAFAAAIRPQVRELPDEHTRALGDLLARRRQLVEMRVQEKLRLQRASNVQRASLREHIVWLDERIGRLDIDLTHALRSSPAWRDKDDLLKPIPGVGSLTRATMLALLPQLGTLSRRQIAALVGVAPFNRDSGQHQGGRVIWGGRAQVRRTLYMAAVAAMRCNPVIRSFYQHLRSQGKPAKVALTACMRKLLVTMNAMLKHHSAWSNRLDTQHSCSRVNTLHDGLQ

SEQ ID NO: 468382 - protein, 362 aa, unidentified
MEVAGNAVGLDLGKRTYEMCLVTKDNEIIRTGGKTDFSGLDKLCTKLNKADVVAMEACNLAFRIERILREKVGCRVIILNPGRLAIIFMSTRKTDKEDSMKLAKYIRSHEEDEMPVVTPPSDEEWERRKLLSEYRSLKSLRTREINRLHAIFEHAGFTQFTRKDMCVPKNREEILLLLKGYEKEESERLVERLLILEKQIELLYKKINDETEKDVKVQKLMTVPGIGPITALSYVAYIGDVNRFENAHQVSNFIGFVPKVDRSCTINRLGHITKQGNSLLRSLLVQAAWSCVRSKDGAALRDKYNYMAVTRGIGKGKSIVTIARKMGELLYTLLKNNQIYEPKKFILPDGRISKIAEEALGA

SEQ ID NO: 468383 - protein, 331 aa, unidentified
MATYVVGCDVSKKKLDVALLLSVEPCKLRSKAFDNHQPGCMALIEWACRQAGCGAGELHVVMEATGAYHEAAAYALTQAGVKVSVVNPAQVRDFAKGLAVRTKTDAMDRAVLARYGAIAKPALWQPPAPEVVELKGLLSRLQAIEADLGRESNRLEKAQVTVTPQIVLDSLHKTLAFLKQEKHALEKRIDDHIEAHPQLQRDRELLESIPAVGRKTACRMLCVLHSRAFRAATSVAAYLGLIPVQHRSGTSVYKPPRLSKAGDGAMRAALYMPAVVASRVNPDIRAHYKRLLAQGKCKMSALGAAMRKLVHICFGVLKNQQPYQPRVAQNT

SEQ ID NO: 468384 - protein, 344 aa, unidentified
MDYFAGLDVSVKETSVCIVDDTGKIVREVKVASEPEALLAVLTNPAYRFKRIGLEAGPLSQWLFSALAEAGLPVICVETRHMRAVLKAQINKTDRNDARGIAQMMRVGLYRPVHVKTLRSQKLRMLLTHRQLLLSKAIALENDLRGTLRNFGLKVGMVGKVKFEARIRELVENLPDLAVLVEPMLIVRRVLREQIVILHRRLLAIVRDDEVCQRLMTTPGVGPVVSLTYRATVDIPARFRKSKSVGAVFGLTCAKYQSGEVDWDGRISRCGDEMMRTMLYEAAQAMMRSKKWSWLKAWAMQIARRRGMKKAIVALARRLAVIMHRIWVDGTEFRWTREQATATA

SEQ ID NO: 468385 - protein, 456 aa, unidentified
MGRKKLSMEIINPNAAGIDVGSRSHYVAVGQLPGDVKEFGVYAEELSALGVWLKSKEVTTVAMESTGDYWQNLFSELVKQGLEVVLVNGKFTKNAKGKKTDVKDCRWIQQLHTLGLLSGSFLPDETTEKLRTYCRQRGNWVDQAASTTHKMQKFLKFLNFRLDVVVKDVCGLTGLAIIGDICKGNLDPEKLAKHRHYNCRKSEEEIAKALHGNNREDFLFGLKQEYETYLFLQKKIEECDKQMEKFINAELKKYPGKRALKTTEKPYKRINKNAPKIKNLNQIAYQYFEGVDLFTIEGLSHATVVSIMSEIGPEGFKKFESAKHFTSWLRLAPNNKISGGKILSHRIPKGSNRLKIAFRQAANSIGNLKDTHLSNFFKRVAYRKGRTAAVSATARKLAVIVWNMMVKKVPYLPPTEYLFLDQKRKLKMVARLRKNIAKLELKPEDLGFSPTLVSTN

SEQ ID NO: 468386 - protein, 408 aa, unidentified
MEILYPRCAGLDVHKDSVVARVRCVSAPQADETRSFATTTGALIELQEWLSTHAVTHVAMEATGVYWKPVWHLLEEHFELVLANAQHIKNVPGRKTDVNDAAWIADLLAHGLIRSSFVPPAPIQELRDLTRTRKQLVREISQHTLRIQKTLEDANLKLSSVLSNVIGASGRAILSALIAGETDPERLADLAQGTARHKRTALIAALHGRITPHHRKLLRLHLDLIAALEAALAELDRDVGKLLAPIRTSARLLTTMPGVSELTAQVVLAEIGADMARFPTPAHLLSWATMCPRNDESAGKRRSTRTRKGSPWLKTALVTAAWAAVRVKNSYLQAQFLRLRARRGAKKAILAVAASMLTAIWHMLKDGVEYRDLGADHFSRRDRSKAILRLVRRLNDLGCNVQLTPQAA

SEQ ID NO: 468387 - protein, 434 aa, unidentified
MKLPKHLRNINQHAAGIDIGSRSHFVAVPEGADEQPVREFSTFTGDLERLAEWLGSCGVTTVAMESTGVYWIPVFEMLESHGFEVRLVNARHVKNVPGRKSDVLDCQWLQQLHTYGLLRGAFRPVEQVCTLRAYVRQRGTLVRTSSSYIQRMQKALAQMNLQLHNVVADITGLTGMRIIKAILAGERNPDVLAAMRDKRCKNSESTIARSLKGHYRPEHLFSLRQAVEIYEFHQEKIADCDRQILKQLQCFDSQDVPNDAPPANVGEALQRMSGVDLTGIDGIDTNTALKIVSETGFDMSRWKSAKHFASWLGLSPGTKVSGGKVLSSATKPVANKAAAAFRMAALTLFNSRSALGAYLRRQRARLGAPKAITATAHKLARLVYTMLTHGTSYVDAGQEYYEERYRSRVVQNLKRKAHEMGFELVSMQEVPASA

SEQ ID NO: 468388 - protein, 301 aa, unidentified
MNTQQTAYPKLYIGIDIHKGSWKVHCATDLFAGKSFSMSPDPKQLHSYVSKHFKEYEVTVAYEAGCCGYHAHRCFESYGWRSLVVNPADIYRKGKEKHTKTDKIDAQLIARELKDNRLQSIIAPDRKREELRSLFRRRNDLVKDFRRVKSYIKMQLLYFGIREPEEFDNDHWSHKYRNWLDDIMFEYPTAKATLESRMRFFRFVDQELRDVSTQLRRYCKVNYKKDYLLLRSIPGIGGIVACGILCELGDLRRFNNIKHLAGYVGLAPSMYQSGNSQRTMGMTLDLQQKSGHLVKSHAAIF

SEQ ID NO: 468389 - protein, 363 aa, unidentified
MEGQERSPGRIVGGVDTHKDLHVAAVVDELDRVLASRCFATTRHGYKQMVAWMGAFGSLQRVGIEATGTYGAGLLRYMQKAGIEVLEVTTPDKHDRRKRGKNDDLDAQNAAHAAFAGKRTVTPKSRNGMIESLRVLKACRRTAVAARRVALQMIQNTIVCAPDELRELLRKMTRMQLIRTLAAWRPDLTDYRNVTSAYRITLKSLGRRYLELHDEIADLDTMIVSIVDELAPNLVARNSIGHESAAQLLLTAGDNMQRLRSEASFAALCGVSPVPASSGKTTRHRLSRGGDRAANSALHIIAIGRLRTDPRTQAYVAKRITEGHSKLEAIRCVKRYIAREVFSLIDHRKVIRPQPQLDPRRPV

SEQ ID NO: 468390 - protein, 322 aa, unidentified
MTSSKLATRLIGIDVSKDKLDISDSEEKIRKEVKNSINNIVKQVVEKITEPGKTFVVCEATGGYERALVKALQDAGIAVCVANPWQVRQFAKGIGNLEKTDAIDAQLLRQFAQVVDLQPTPRKSPRHEAHDALVRRREQLMLLINQEQNRLAQTSDREVCQMIEKALRMLRRQLQDVDQRIEAFLKEEARTNQAVDVIQSVPGVGVVTTSTLIADLPELGTLNRAEIAKLVGVAPIAEQSGTREGKRSIFGGRSHVRRVLSMAALTATRFNPVIKKFYQRLLARGKQKKVAIVACMRKLLTILNEMVRHQAIWRQKEVVTGA

SEQ ID NO: 468391 - protein, 347 aa, unidentified
MELYAGLDVSVAETSLCVVDASGKVIRETKVLTEPEAIIAALAAACTGGASWKRIGLEAGPLSQWLFSALIEAGYPAICVETRHMKAALSAQLNKSDRNDARGIAQMMRVGLYRPVHVKTLASQERRLLLTNRKLLQDKMLDIERELRGTLRNFGLKVGIVSRARFEARIEELVIPSPRLAALVRPLLVARRALREQFACMHKMLLDLVRDEPVCRRLMTAPGVGAVVALAYRVTIDVPARFERSKAVGAALGLTPRRYQSGEIDRTGRISKCGDGMLRSLLFEAAQVLLTRASSSWLKAWGLQLAKRRGMKRAIVATARRLSVILHRMWTEGSDFRFSRQSEGAST

SEQ ID NO: 468392 - protein, 401 aa, unidentified
MHAVIGIDVSKATSQVAVAIDGKVVQNFKITHDVFGFNQLNSVIMQFNTFPDIVFEATGVYSRRLKTFLEAHNYPYTYLNPLTAKKQLDQLRPNKNDLNDAKHLAETQFILKRAKSYVQNPIYIELQDMSRFYQQLNHDIVSAKNRLHRLLQLTFPEIETLFSTTDSQQYWEIVSLIPHATMAKHSRQTLSDTIQSSVSRQIGVARLTRLVDKLVALGSLSAPAVAVASYNVTEVRYYAQRLIALSQSKANVLATMVDQTKDLPEYDIYQSIPGFSDKTVVSLIAELGDLHRFATSNKLNAFVGIDLRFNDSGDYKSSGFITKRGNTIARKVLFKAISNIASTATYGHQNHINDWYQKKKQSSMSKGTKKIAIGAMSRLLRTMHYLVLNNQLYDYDTASKR

SEQ ID NO: 468393 - protein, 378 aa, unidentified
MTFSKQNLGIDVDSEKLKVSFRRIDMDQNIKTKASRTFKNNASGFTKLEEWAEKNRIPELSIHVTMEATGVYYENVAYFFNEQKDYVVHVLLPNKTAAYKKSLNVKSKTDEIDAKVLAEMGLERKLPVWNPGSEEMRTIKTFTRERLRLQKVKTMISNQLHAENKSHNPRKEAVIRYNAHIDFIVQQIEEIESDIRDEVKKDEDLKARIDNMCTIPGIGFVTAIGLVAETDGFTLFKNRKQLTSYAGYDVIENESGKFKGKTRISKKGNSYIRQILYMPAMSSANHNPLHKKHYDRVVDSTKIKMKASVAIQRKLLLLAYALYKNNTTFDPLYQQKVDKQLEAQRQQKKQFKEQNERKKINDLLNKGVDHAQGMAYSG

SEQ ID NO: 468394 - protein, 408 aa, unidentified
MQVTFGIDVSKSTSTVCELIGESKNELTITNNRPGFIQLLHELTAFSKHPQIIFEATGVYSRTLQSFLEDYGYDYVILNPLKAKKEMDMGLRHNKTDKTDAYHLALIQRLYHHPINQLQSQTYKQLNALSRFYDQLTADLVMAKNRLYQALQSTFPEIENLFSSAKGKNYWQIVVRYPHCDLVRREDKKQLINWLMSLKGIAFKHALRTADKLIELAYQAYPVVSCSSIEVEQVQYYAHRLLNLSDQRENLIARMVKLAKSLPNHDLENLESIPGFAQTTAVRVLAELGDLRRFSNPNKINAFIGIDPGRYQSGEMDSNLSITKHGNAVARKLLYRAIGQIDNAAKTNPCHIADYYESKKLSSQTKGFKKIAIASIHKLIRTIYALIINDQPYDYNVATHNQKDFSRN

SEQ ID NO: 468395 - protein, 343 aa, unidentified
MLYIGLDVHKEFCQACVMNKSGKVLSNERFLSNQESLDKFLDRFDKAKFVLESTGIWEFIYEGIERRGFEAVLAHPLKVRAIAEAKVKTDKVDAQTLAHLLRADLIPRSWVPSKDVRDLRQLVRQRSYLVRQSTSLKNRIHAELLRRGARRPEESGGAFTKKSIAWMRSLRIPTVDSCLCCLENVQEQIEAINVKLLEEFGRRPEARLIATIPGIGFYGALLIHAEIDDIHRFPHPEKLCSYAGLVPTVHQSASSVRHGGVSKEGSAYLRWILTEAVHVHVLHNPTSRLSKFYSRIERRRGKHKATVATARKLLHIIYWMLLNKERYHGHGFNPGSQTCMRNA

SEQ ID NO: 468396 - protein, 320 aa, unidentified
MTSRGAEKMQNDTIGVDVSKDHLDAHRLADGANQRFANNKGGHKALIKWLAETPLCRVVFEPTGPYHRAVERALGASGVPFVKVNPRQARRFAEATGKLAKTDRLDAQILARMGALLELEARPARSEVLLELKELYVAREALVKDRTAAKNRGKALTLSLLKRQNAQRLEQIDRQMATLEAAILQIVEADASLADRFAILISIPGLSNITAFALLIAMPELGALEAGQAASLAGLAPIARQSGRWTGRSFIRGGRADVRQALYMPALVAARFNPDMKAKYAHLIETGKPAKVALTAIMRKLLVLANALLKANRPWTQRIA

SEQ ID NO: 468397 - protein, 323 aa, unidentified
MDGILGIDVSKNTLDASMSSCNKVRTRNFANSPDGWRHLLDWLITKGVRRVHACLESTGRYSLGIAGALNEAGHVVSIVNPAQIRDFARTKLGRNKTDGVDASHIREYCELFKPQPWAPPSEAHRRLGELQAIRAGIVAGLTEWKNRKNSGMVDAVAQSLADVTISHFTSQLGAVDEAIAQTIDNDSVLRRKRDLLLSISGVGETLAGVVLAELPGPNVLHSSAAVVAYVGLNPRQYQSGTSIDRVTRISKIGNAVLRAALYMPAMSAMRYNPAIVALVTRLKSRGRLTPKQIVVAAMRKLLVLCFGVLKTGKPFDPAIAMGC

SEQ ID NO: 468398 - protein, 370 aa, unidentified
MSKPTTLFVGLDSHKDFVSVAHAEGGTSDPPVFVGPIGTRQADIDKLVRRLHSKAAHLVFAYEAGPTGYGLYRYLTAKGEECCVVAPSLIPKRPGNKVKTNRRDALELARLLRSGDLTSVWVPRVEDEAIRDLCRARDAARITLKAAKLRLKSFLLRLGLQYTGRATWNDAHRRYLARVVCPTPAQQIVFQESLHAVDEQVERLARLEHELVELTPAWRLQPVIDAIQALRGVQWLVALTVIAELGDITRFDNPRQLAAFVGLIPSEYSSGTTRHQGGITKTGNARVRRALVEAAWAYRFPAKISEHIQKRIEGLPKPIQDIGWKAQLRLCARFRSLVSHGKHVNVTVTAIARELLAFMWAIAREVPIQA

SEQ ID NO: 468399 - protein, 495 aa, unidentified
MFVNQSKVFCRNKVGVYYPCLKLALKVVVYNLENPAKFEFYWVSRLAMYQTKILSALLAKLLVMSKLKEIKKNAAGIDLGSAEFYVSVDGVTVRSFETFTSSIIELIKYLKEHFIKTVAMESTGVLWIPLYDMLEKEGFEVFLVNAAHAKNIPAQKSDPADCRWLQKLHSYGLLRASFVPQDAIRRLRTFMRLREDHLDMASSHIQHMQRAMELMNLKLKNVISQLHGASGLRIINAILAGERDPVILTELCEITILKHKKNKVQESLKGNYKEEYIFLLKQAYQAWQFYQEQIKECDAQIEKLLDEATCKILLSDTGSPKPSRHNCPQIKGLHDKIVKLNQGRNATQISGISDTTMLKLTAELGFDYSKWPSEKHFVSWLGLSPKKHQSGKLRKRKRNNAKTKGGQIFKECAMSIANSKHLALKGFYHRIKTKHGARAANKATARKLAVLYYRFMTKGMEYVEIGLIEYEKRYKEIMIKNLCRKARGLGLQVVA

SEQ ID NO: 468400 - protein, 411 aa, unidentified
MLWGKRRDSCKIVASINLQLTELPVQKPHDNSKASPAAFMQDNTLIAVIELSLSSWLVAGLIPGVSREPLKKLEPNAEDLLKLLHRWRDEAINAGRQITRIAVAYETGRDSFWLARWLRERDIDAHVIHANSVTVSREHRRAKTDRLDTAMLKRGFLGWLRGERGHCTVAIVPTMEEEDAKRPHREREGLVHEQTRVVNRMKSALIQFGVRHFNPKLRKASVKLETVLTPEGKSLPPNTIAALRRDMERLKIIKEQIKAIEQARLQQFEQKPEALANRMVYLLVRIYGLGLETADLLVHELLSRTLRDRKAVARYAGLTGSPDESGSKRREKGLSRSGNTRVRKIMIQLAWRMVKFQPDSALVQWFKQRTENAKRSRKPIIVALARKLVIALWRYANDGVIPEGFRLHSAA

SEQ ID NO: 468401 - protein, 339 aa, unidentified
MAIYAGIDLHSNSNFLSVVDSAGKIIEKRKLANDVQAILHPLAAYRDQLQGIAIESTFNWYWIVDALMDEGYRVHLANPAAIQKYSGLKHSDDASDAAWLAEMLRLGVLPEGYIYPKAERPIRDLLRKRGHLVRLRTSLITSLQGIVSRNNGHSLPGRMIKQLKTNHVAPLCAANEDLALCGEVSKDTIDYLGRQIKKIENQAEERIELRPAYKALLSMPGVGVILGLTIMLETGPIGRFAKAGNFSSYCRKVPSSWISNGKRKGKGNTKNGNKYLAWAFSEVAEFARRYDDASRSWYDRKLARSNRMIAHSALAHKLARAAYFIMREGVNFDHKKCFA

SEQ ID NO: 468402 - protein, 408 aa, unidentified
MNAVGIDVSKGKSMVAALRPMDEVALLPQEFLHTEVGLEQMAYAIIALGEDTRVIMEATGRYHEPVAAALHEYGIYVCVLNPLFIKQSGGGSIRKVKTDKADAMKIAKYGLDNWVDLREYTPMDTVRQQLKLCSRQYNLYMKTVVSLQNNLISLTDKTFPGVNELFSSPERADGHQKWVDFVMTFYHCDCICRVSENAFAERYQKWCKRKGYHFSAEKAQDVYLGSCGHFTTLPKNDNTKLLITTAAQQLLAGKMTLAALRTEMTRLAKQLPEYDIVRAMYGVGETTAVQLMAEIGDVRRFPRRSSIVGFAGVDPAVDQSGKHSAKSVPTTKRGSPHLRKTLYQIVCTYLKKSPVDEPVYQFLDKKRSEGKPYFVYMTAAQNKFLRIYYARVKECLEAFDAQQDTSQR

SEQ ID NO: 468403 - protein, 452 aa, unidentified
MEEKEISMEIVNPQAAGIDIGSRSHWVAVGQKEGDVREFGVFNQDLFEMAEWLKERQVKNIAMESTGSYWQNLYAVLLSKGFNVILCNGKFTKNIKGKKTDIKDCQWIQRLHSLGLLSTSFLPDGKTEQLRTYCRQRSNLMYLAASTSKKMQKNLRLLNLRLDVVVKDICGLTGLAIIRAICAGETNPQKLASLRHSNCRKSEDEIANALQSNGRKDYLFALGQELDTYDHLQQKIAECDKMIQQTLNEIIDNDDNKKQHRIEPKSYKRPQKNTPKNIDLNLQSYQMFEGTDFLAIEGISFSTVLSLMSEIGVEGIRKFPTAKHFTSWLRLAPNNKVSGGKILSSKVPKGSNRLKIALRSAANAIGNLKESTPLRDFFHRINFRKGRVAAISATARKLAVIMWNMVVKRIPYLNPHEYLYLDQKRKLGIVKRIKKQIAKFELTVEDLNLIPT

SEQ ID NO: 468404 - protein, 337 aa, unidentified
MNTKTTLKQCLGIDVSMKKIDCCLSFYTADLKIKVVSTVGFENHLKGFLKLQEWIEKKKDDSISLMVNMEATGTYHEETAYFLYDQGYNVSVIQPTKGKQYARSLDEKNKTDQIDAKMLSRMGLERELFPWNRPNEKLRILKRLSRERIGLIRDRNAMTNQLHALKHSHEAFQDTVNRLKDRIELASKQLVQIEEQMHQEIESEVFLLEKIKHVITIPGINFITAVAVISETDGFANITNRRQLVSYVGLDVVIKESGTLSWRPHISKRGNAYIRAALYMSAVCSIIHNKALKKYFNRLKDNGKPRKTGIVALERKLLVLIYTLFKNDKDYLLNYSN

SEQ ID NO: 468405 - protein, 321 aa, unidentified
MGMEVFVGIDVSKDTLEVAIWPQEERMSFAQTDDGLSLMADFIQPFSPCLVVLEATGGLERAAVATLAARSLPVVVVNPRQVRDFAKATGILAKTDKLDALGIAKFAQAIRPELRPLKTMEAQQLEAILSRRRQIVHMLTAEKNRLHSAPGWTREDIRLHITWMEKRLEKIEKELGGMIRKSPVWRVKDDLLRTFKGVGPVLSQSLLSDLPELGSLNRKKIAALVGVAPMNRDSGKFRGRRRVLGGRADIRSVLYMATVAAIRFNPAIGAFHERLIKAGKAPKVAITACMRKLLTILNAMMKNQTPWRPLTQNMLDMQHSC

SEQ ID NO: 468406 - protein, 347 aa, unidentified
MEDTMGMFAALDVSQEETAICLVRQDGTHVAEAKAPTCPDAIADWLAERTEGLERVGMETGPLAVWLWNALTDRQVPIVCMDARHASGVLKMMPNKTDRHDARGLAQIIRTGWFKAAQIKSHDAYVNRAMLTARDALVGMRVRLENEIRGLLKTFGIMVGKRVGGFKRRAEEVIEGEMAVAPELVPIFEALMQARRDILARIAALDSRIRAVARRHATVRLLMTAPGVGPITAMAVVAAFDDASRFRRSSSVGAYLGLTPRRYESGEISRNGRVSKRGDGFTRKCLFEAANAIFCRNLGGPRLRDWAKAIAERTGPRKAKVALARKLAVILHAMWRTNTPFREIAMA

SEQ ID NO: 468407 - protein, 419 aa, unidentified
MTGISAMKKHIYRTKKINAIDWIQMKEQLQGSPVVFAIDVAKEKQYALLANADSSVSELLSWNHPEQTRELLTHLENLACPLTAIMESTGTYGDALRYQFRCSGFEVNQISAKRVSDARELYDGVPSLHDAKSATVIMRLHRDGLSIPWRESDDAERELDALRREYDLHQSQYQRNKNRLEAYLSRHWPEVLPLLPLDSVTLESLLIEYGSPEQIAKNTEEAAKNMHLWSKNQLKNEKIAVVIQSAVNTLGQPCIDAERRYLQALTAEMRHSRQQQKEVKDILEATVKADTGLSKLASVIGLITTAVLLSCRLDPRNFRNARSFQKALGLNLKEKSSGRDVGRLKITKRGCSMGRRYLYFAALRLINNDPVVKAWYQKKVDARAKNKTVIALMRKLAKALWHVARGERFDATKLLSVTA

SEQ ID NO: 468408 - protein, 345 aa, unidentified
MADTSASYQLYVGVDIAADTFAAAWLSASGVLAAPFTGEQTPTGFAALQRRLQATAAAAAETLVVLEATGNYWVALAVTLHEAGYRVAVVNPRQAHHFAKAQLRRAKTDALDARDLARLAAALQPPPWVPPPMVYHEARQRLVARDALLAMRTQARNQRHALLQWPVVVAGVRQHLDEIVADLDRRIASLEAEIAAVLGASEWAESLACLTSAPGIGLVTAAWLLVGTRNFARCASPAALAAYAGLVPMPRESGRSIRGRPTIGHDGNGRLRTALYMATLSAARHNPAIKVFYERLRAAGKPHKVARCAAARKLLHQVWALGTKQQHFDPYHGQQRPAPSPELAA

SEQ ID NO: 468409 - protein, 369 aa, unidentified
MVEYTEAFVGIDAAKSRNAIAIAEAGREGEIRYLGEVEATPQSMRKVVARLAAKYQRLHFCYEAGPTGYGLYRQLTALGHDCIVVAPSLIPRKPGVRVKTNRRDAISLARLLRAGELTPVWVPDEAHEALRDLVRARDAAVEDLRRKRQSVTSLMLRHGRIFPGKTTWGARHARWLQEQHFEHPAHQIVLQELVLAIQHAQERLERIEAAIAEFVPGWSLAPAVEALQALRGVNLISAVTFLVEVGDLRRFETPRQLMGYLGLVPGERSTGDTVRKEGITKAGNSRARRTLVESAWTYRYPPRIGKVKLYHLQRVTPAIRDIAWKAQSRLCARFRALSARGKKSTVAVTAVARELAAFMWAIVRAVPAT

SEQ ID NO: 468410 - protein, 319 aa, unidentified
MDNVPQDAIIGIDVSRDWLDIHSLPDNQRLQLPNTDGGHERLSEMALSQSALVCFEATGGQEWRLWSALDAAGIVTRQLPPAQIKAFAASRGTRAKTDRIDAELIARFMAFRPDAGRTLPHEKIRRLRALTSKRGQLVETRKRLLAQIKAHVKLGSAEMFAEMDEDLKAVLGDQIARLEAQIEQIIAADETLMETSEILRSVPGIGPVASTMLIAEMPELGHISGEQAAALTGLAPIAHDSVSLRGKRAIGGGRRLLRHVLFQVALVASHHNSVLKHFADRLRAAGKPHKVVITAVARKLVTIVNALCKSRQIWAHQSV

SEQ ID NO: 468411 - protein, 351 aa, unidentified
MSKRSQRSQYVGLDVSLKETSIAVIDDDDKIVWRGTVASTPEKIAEGLRKHAPHALPIGLEAGQLASWLYHGLTAKGLPVICVDARHARAALSLKVNKTDANDAMGLAEIMRVGWFRKVEVKGEDSQALRALLVARAQLVSQITTLKNCVRGILKVFGRVLPKKLRAQFIPRARVTIDGDAMLTATLDPMLRTLAATMEQLHVYDRAVLRHARGDATVRHLMSAPGVGPIVAMGYMTCIETPARFSSSSAVGAYLGMTPRRYQSGEVDKAGRVSKRGDNMVRGLLFEAAKVVLSRSAKPSDLQAWGRSLARRIGSKKATMAVARKLAVILHRMWSTGERFRWTDSPVVTAR

SEQ ID NO: 468412 - protein, 348 aa, unidentified
MKKVTVIGMDLGDKNHKAIGLSESGGEVERAEVPCTPEGVRAYLERHPGALLAIETGTHCRWVAGVAEELGHEVLVGNARKLRVIWQTSRKDDWRDAEMLARIARTDRRLFHPVKLRNAGGQRLMRLVKSRDVLVRNRTAIVNQVRGFCKSEGAPLPRCSAEAFANLKELLPPEVMDVACHLFEVLQGLNDKIKRYDKIIAKALKRLRGGDAALLDSIAGVGPVTAAAFLAAVGDPATFGSAREAGPYFGLVPRRDQSGATDKQLRISKEGNQVVRRLLVTAANYIMGPFGKDCDLRRHGMRIAERGGKNARKRAKVAVARKLAVVMLAILRNRTACRPLAEDAGPVA

SEQ ID NO: 468413 - protein, 437 aa, unidentified
MMKETTVFEVMNPHGAGIDVGSEKVFVSIDGSTVVNFETFTADYKRCVNYLKENGISQVAMEATGVYWIAFHEMLEQAGIQVCLVNPKEVKQVKGRKTDVKDCQWIQKLFSAGLLRQSYIPAGKFKELRMLNREREDIIEMGSAYINKMQKALELMNIKLTGVISQINGVSGIKMISAILNGERDPHKLLALCDKRIIKAKADRVLKALKGNYTDTYLFLLKASFEMWKYHEQHVHIIDKKLQELLEALTKDLKEVHCDMAPKLIRHHKPQIKDLHQKLLTLYGTNVSTVSGLTDYTLLKLVGETGNDLSRFPTVKHFVSWCQLSPRSSQSGKQKRPIRVKNKSKAGQIFREAAQSLIQSKNIAIGMFMRRIRSRKGPAAAIKAGARKLACAYYNTITKGANYVEEGVKAYELKFKAQEIRLLHKLAAKHKIQLIAS

SEQ ID NO: 468414 - protein, 352 aa, unidentified
MKKTLFVGIDFAKANFVASALLSEDPDPVCLPKSFSNDDKGAKALVSWIVKFLPETCSLSDVLVCGEHTGSYSLLLPRRLFDAGIDCWLENAVCIKNGSGRIVREKSDSADATMIAEYARTFYQKRVRLFVPESPVLSELRECNDIRRRLVKEQAGLMCKKHDAEVRLKAKPGSKAIMMNIKILEKQLAYIKEQINKVDRQMYILIRSEKKLSGIYDIIVSINGVGPVTAIALIVLTSGFTTFGSKRSLACFLGIAPFRSESGTSIQHGSHRSRQADSYYSGLLYMVAVSAMSWNPEIALYRERLLKKGKPRLVVINNIKNKLITIIWAMVKNDTLYDPDHHLKVAQQYQTA

SEQ ID NO: 468415 - protein, 422 aa, unidentified
MKKIQTKKLKFVNDKTLIATVDIGKGLNMGYARCPDHSVVKPFEFANNRAGFDKFWDCLEKARDSKNLDSIIVGFESTGAYGEPLQHFLKNKPVRLVQVNPMHTKRVKELQGNSPNKTDRKDPKVIADIIELGHSLTVVIPEGAAAELRRLTLARERANKRCTALYNQLQDLIFISFPEFSQVIKDVKTKTARYLLQTYPDPQDIIDLGLESLGAVIKRVSRGKMKLAKAKDLFEAARTSAGITEGRFSVALEIQATLEAIASSDDFVVRLEEEMSRHLEDIPYSHLLLSMKGIGRVTVAGLIGEIGDFNSFDTQRELLKHAGFDLFEISSGKLRGSRRISKRGRPLLRKLLFFAALNTVRKGGVMHAHYQRHLKKGMKKIKALVAIARKLLGIIFALVRSKQEYQEDYQKIQAAATMPMAA

SEQ ID NO: 468416 - protein, 408 aa, unidentified
MNTLYVGIDVSSKSNVVYLMLPNGDKHSNFSVANSHEGSTLLVKKIYSALTSHSLDTVLIGLEATSVYGDNLVYFLREDATLAPFNRKIHVLNPKQVKKFHDTYNDLPKNDYVDSFVIADCLRFGRINKEVYMGEYRYKALQNLTRARFFAVQNLVKEKQRFMNVLFKKYSTMTQEKVFSDAFSTTALAVYDEFESAEALANMDLHELTDFIIEKGKNRFPDPDAVAKAIQKAARSSYRLPKTANDSVNQVLSISITSMKALESQIKEFDKAIKALMELLPNVLISIPGIGPVYSAGIMAEIGDINRFDNQASLAKYAGLAWKQHQSGGFEAEVTRLIPSGKRFLKYYLCEAAFSLVRCDKEYSDFYHLKYKEVNRCQHKRALALTARKFVRLVFRLLKDNRLYCPAK

SEQ ID NO: 468417 - protein, 358 aa, unidentified
METNTIDREVSQERAAVETAVTVKLGLDVHAGQITVCRQDGGQVPKPAQRKGWPEFLLWVGALVKSGVRVVSCYEAGPCGYGLHRQLEALGIINYVVVPQRWDEQNKRVKTDARDARELCDRLDRYERGNHQAFSVVKVPTPEQEQRRCVGRQRSRLMKERQRCVVRGHGLLLGQGVQAPAGWWQPKVWAEFRTGLPEWLRDQLQTWQTQAVALDEQVNHWTRQVEAQAARQLVPKGVGELTAAVLAGEILDWHRFDNRRQVASYTGLCPSEQSSGQSRRQGGISKHGNPRVRHALVEACWRLLLWQPDYPPVKKLRAATGKRARKRAVVAAARRLAIDLWRLNTGQCRAEKLGLQLR

SEQ ID NO: 468418 - protein, 358 aa, unidentified
MTAQPIDSQIQVFGGVDTHSDTHTAAALDAAGAMLDAKQFPATAAGYTTLLAWLRSLGCVVRVGIEGTSSYGAGLVAVLRAVGICVIEVDRPDRSTRRRSGKSDPIDAEAAARAVLAGRATGAAKTHDGVVECLRVLRIARSSARDQRADCMRRLKSLLVTAPEPLRGQLRGLSDTRLVATGAALRPDTSDAANPATATRIALRALARRHTELTSELADLDKLIHPLVAQANPTLLAVHGVGPEVAAQLLITAGDNPDRLHSEAAFAMLCGAAPLPASSGKTNRHRLNRGGDRQANNALWRIALCRMKTHAPTRDYVARRTTEGLSKPEIIRCLKRYIARDIYRILVPETEKDLALAA

SEQ ID NO: 468419 - protein, 348 aa, unidentified
MTTIHYIGFDVHKKTTSFCVKTAAGEIVEEGVVASHREALRQWASARSQPWRGAMEATLFSSWIYDTLQPYSEQLEMAHPAKMKAISAGKKKSDTIDARTIADLVRCNLLPACYVAPPRIRELRRLLRYRSLVVSEAVRMKNKMAGLLMETGAPYVKEKLHGKKYFATLLEELEEVPESVIDLLRLSRGALEMFETTQKRLVRELLADSELAGRMERLMSIPAVGEITALTWALETGDPERFHSSSDAMSYCGLTAALKSSAGKQQRGPISKQRNRWLQTTLIEAAKLAPRWNPQLAALHARELERGHRNRATLALARKLVAYLLAVDKSRQSFQLRSLPEVPEPKAA

SEQ ID NO: 468420 - protein, 355 aa, unidentified
MSQEKYIGMDVHQATISVAVTDSRGKLIMESILETKAATILEFLQGLHGSLSVTFEEGTSAAWLHDLLKPHVTRLVVCDPRKNALLKDGSKSDRIDARKLAELLRGNQLTSVYHGEHGMRTIKELGRSYLTITKDLTRVMSRIKALYRSWAIPCIGAGVYAPRHRAEWLGKIPEPGVRLRAERFYQQLDLLQPVRQQARHDLLTESRKHHAVKLLRQIPSIGPIRAALLVAQLQTPHRFRTKRQLWAYSGFALETHDSGEYRYVRGKLQRNRERMTVRGLSNNHNPDVKNLFKGAAISASTHPGPLYDFYVALLEKGMRPTMARLTLARKIASITLTIWKKGVDFDATQLHRQEA

SEQ ID NO: 468421 - protein, 372 aa, unidentified
MNYNTVYVGMDVHKESFTLCSCKYEDEKASHYQRTPASYKNVLRYLAFLRTIYGEDTRFVCGYEAGCLGYSLYHQLENFNVECVILAPTTMLEQRSKRRIKTDKRDAEIIAKSLAQHNYSPVHIPTKMDNQTKEFIRMRDDHKAELKKIKQQILSFCLRQGYQYDGSGNWTAKHVKWLRSLKTEGLYKEILDEYLLTYTILTDKLNRLDQRIEELASEEEYKEPVSKLTCFLGIKTHTALSVIVEVGDFQRFASARKFAGYLGLVPGQHSSGDDRNGLGITKAGNTHVRRLLVESAQSYTRGKIGYKSRVLRSRQAGNSPQIINYADRANERLRRRYYKMVLKDGKKYNIAKTAIARELACFIWGMMTDNIY

SEQ ID NO: 468422 - protein, 349 aa, unidentified
MIVIGIDPHKQTHTAVAVDGATGTVLGELTIKARTPGFERLVEWARALEDERLFAVEDGRHVCGHLERHLIARGERAVRVSPRMMGEARRSDRVAGKSDPVDATAVARAALRHPDLPQATLAGPERQIGLLVAHREMLINERTDRICKLRWLLHDIDPDLAPGLRSLDRFKTLDRLAEALQVLGPAVEVEICLELLTQCRQITARANELERRIGALVRTHAPALLQIPGCASLTAAKIVAEAAQVRRFPTEGHFARYAGTAPIPASSGARHRQRFNRRGNRQLNAAVHRIAVTQIRMHDPAKDYLAKKRAEGKTKTEAIRALKRHITRVVFKTMTSMSWPTDRLTAAAA

SEQ ID NO: 468423 - protein, 433 aa, unidentified
MKVMYERVAGIDVHKDMIKVAVRSPGEKPWTRKTEILEYRTFYGVLQQTAADLRRRGVTHVVMEASGVYTEPVYYALAERDFTEVAVINPAHAKALRGHKTDAKDCARLAELFECGLLRGSYIPPAELKEVRDLTRYKVKTVQARTSEIQRLAKALESAGIKLGSVASSITGTASTAMIEALIDGERRGAVLADLAIGRMRTAGKLAGLSMALAGRFTEHHALLCRLHLDRIKVFDDAAGGLADQIAGKAAPWQRELDLLKTLPGFGDTVAQAWLAEIGPAPHLHFSSHEKLASWVTLCPGNNISAKKRKHGRTGDAGTYIKPMLIQAAWSAIRVRGRLQARYNRLVRRFGGDKNPAAKKKAITAIAHTLLKIAYQVLMSGTPYQDPGADFYTRRESPEQKQAYLERQLQKLHPGCTVTITVSPPEAALPPGA

SEQ ID NO: 468424 - protein, 436 aa, unidentified
MNSKAYSAQLVNRIQLTSLLKDRQQGQDLWVGVDVGKEQMHVVLNWAADDFERPWIVNNPAQVRLLVDHLKQLAVGRRRLIVAMEPSGTYGDVLRQACGDAQIVVHRVSPKATHDYAEVFDGVPSQHDGKDAAVVAELARLGKSTPWPLHSVPESHQQIEYWVDRMDAQRRLLQMWCGRIEGRMARHWPEMLRHLKTTSPTMLKLLIEHAGPATLAADPQAVSKLQRFSRNHLSQQKIEQIIDEAKQTVGVRQTAVDQQRLRDYATEALAAKQQIKQAQKRLLSLSRPIQPIRALTPAVGNATACLLFTCLGDPADYPCGAAYVKAMGLNLIERSSGLYQGKLKISKRGSSAVRYWMYLAALRLIKKNSPVRPWYLKKKHRDSGQAAGRALVGIMRRLALALWHVAAQGEAFDARRLFPGKRQARRHVAAMRSKGG

SEQ ID NO: 468425 - protein, 332 aa, unidentified
MKKVQFFVGIDVSKATLDVFIHGLNLYFVVENNLQGFVYLLEKVMTGTKCKKEEVFFCFENTGKYSRMLSVFLQSENILFTMESALQIKKSLGITRGKNDRIDAKRIAHYAYEKREILVPTILPGAKIDQIRSLISLRGKLIKHRTAYKNGISDLHDCYEDEESELIKEMQLRLISNLNDEITKVEQKIEDIIESDESISRNYKLILSIRGVGKILGFYMIGYTANFTSFANARAFACFAGIAPFSYSSGKVKGTPRVHPFANKMLKALLNLGAMSAIKYKGEYLQYFNKRVNELGKNKMSTLNIIRNKIVYRVFAVVQRQTPYVDLLKFAA

SEQ ID NO: 468426 - protein, 432 aa, unidentified
MKVMHDRVAAIDVHKDMVKVAVRVPGERRGTRKTDVLEFRTFYGVLEEMGRELRRRGVTHVVMEASGVYTEPVYYALAGLDFTEVMVINPAHAKALKGHKTDARDAIRLLDLYECGLLSGSYIPAPDLKEVRDLARYRMKTVQARASEIQRLQKTLETAGIKLSSVVSDVTGVSATAMIEALIDGERRGAVLADLAQGRLRTAGKMADLSMALAGRFTEHHALLCRLHLDRIAVFDDAVDGLDERITGKAARWQREAGLLTSVPGFGDVVAQAWLGEIGPAPHRHFATHEKLASWVTLCPGNNISARKRKHGRTGDAGTYIKPMLVQAAWAAIRVRGRLQARYNRLVRRFGGDKNPAAKKKAITAIAHTLLKIAYQVLKSGTPYQEPGADFYTRRESPEQKQAWLERQMQKLHPGCTITITISPEAALAPGA

SEQ ID NO: 468427 - protein, 399 aa, unidentified
MAASRRVVIGADTHLDTNHLAVITDAGKPLADAEFPTSPAGYDDAARWAQSFGTIVIVGVEGTSSYGAGLTRVMQAAGIEVAEVSRPDRAARRRQGKSDPLDAYAAARAALAGDGLAVPKGEHTTALRALLSARRSAVKAHTAATNQIHALLVTAPAELRERFRRHSTTALVTALARCRPATHRDPTTAAVLTAAKALAQRVEFLERQKQDLTAQLDALVRQANPALRATYGVGPDTAAQLLVTAGANPHRLRTEASFAALCGAAPVPASSGKITRHRLSRGGDRAANNALYRIALVRMSAHPQTRDYVQRQDTNGRTKKEILRLLKRAIAREVFRLLTRPGPIDDYSDLRPARQAKNLTLATVAHHFGVPIITVSRLERGHQRNDTLAANYRQWLTAA

SEQ ID NO: 468428 - protein, 425 aa, unidentified
MLAVGIDWSEEFHLVALGRPGEGVFEVRRVEHSPKAVDALVERIAALEPDPAEVRVVLESRHGLLVERLLDAGYVVVPVSPDLVARRRGPAKKKDDAEDARIACLLALDRFERLRPLIPHGELAGELRAIARDDERAARDQRRLLNRLRQDLLATFPAALQIASDDLGAPTILRLLERWPTAQGLAAASREELIAFACSCKHGWPDRFAGKVAEALAGDHFQPRAYLVRAKADTIRLTAQQLLAIGKQRRAWERRTGELLLGAPRRGRAKQPREDERGQSFPGGEVYLSFPGLGDRLAARVAGEIGDHPEQFESPNALQCYAGKAPVTRRSGKSEFVVSCRLAYNRHLDDAVQQWAFCSLRSSPWARAFYEQKRTAGKGHNAALRALGNRWLEVLWHCLHRHVLYDETIHAAKRNRAPQPLPQAA

SEQ ID NO: 468429 - protein, 482 aa, unidentified
MAKRKMSTYERIGKGGRLTRQQRKDFEQRLEAADPGLQIVHANAAGIDVGNQSHFVAVPAGRDTQPVQEFGSWTAELQRMAAWLKSCGIGTVAMQSTGVYWIAVQEVLEQEGIEVYLVNARGTKNLPGRKSDVQECQWLMKLHTYGLLRNSFRPPEQIRAIRTVWRQRDRLVRDAGRSIQQMQKALTTMNIRLSNAISDVSGVTGLGIIRAILKGQRDPWELAKLRDRRIQASEEEVAHALEGHWREDVLFELGQVVEGYDFYQKQIAACDQQLEKYLAVLPEHVGAAPGEGAALRGGVSKNKQRKSKPRRKNQPNFNLEAELHRIFGVDLTRIDGIDIMTAQVILSELGPDLRAFPSEAAFCSWLELAPRRDVSGGKVVKQKSRESKNRVANALRMGAESLCRSDSYLGARYRRLRGRMDGKKAVKAMARYLACLIYRLLTKGQDYIDRGAAHFEDQRALREMVSLTRKAAQLGMKLVPAS

SEQ ID NO: 468430 - protein, 358 aa, unidentified
MEKFTMTGCDLHDKSMLLKIASGQEPPTKRSFANNADGWRAMLAELKKRAAQAGSTKNVFAYEASGLGFGLRDFLTENGITCHVLAPSKIERSPKHRKTKTDEKDAERILEILRGHYLAGNKLPAVWVPDKQTRDDREVVRARLDAQEKCSAVKAQVRTLLKRNCIAKPEDCGAGWTDPFRAWLKKLSTCAKPLASGARINLASLLRQLESLEAEVETLEQSIGMLAQEPRYAASIKKLVEFKAIGVFSAMVFLVEMGDLNRFSNRKQVGAFLGLVPSSNESGEADDRKGHITHQGPARVRYILCQMVWNRMRFDPREKAVYERLVAKNSKHKKIAVVAAMRRLAVMLWHAGRPAKAA

SEQ ID NO: 468431 - protein, 340 aa, unidentified
MNVKTIGLDIAKTIFHLIGLDQYGNQKLKKKLRRNQLLNYFANLQPCTIVMEGCGSSYYWQRELTKLGHTVKLLPAQHVKAYVRGNKNDYNDALALAEASRAPEMREVMPKTIEQQSMQSLHRLRESALGDRTALGNQMRGLLSEFGIIFPQGLSQVRNGLYSVLEDAENELQDSLRAALALKHRQLTQLDDLVAELDRLIHEAGETRQEVPLLKSIPGYGNILSTAYYSVIGDGKSFAKSRAVSASLGVVPKQHSTGDKTMLLGISKRGDKYLRKMLINGARSVVNHAHKKDDALSVWVTQLVERRGRNKATVALANKLARIGWAVLVSGKPYEENYAV

SEQ ID NO: 468432 - protein, 331 aa, unidentified
MKFEEVIGIDVSKLTLDAFIHSHQIFTQVPNTKKGYSKLLTWATKSTGCSMDNVLFCFEHTGMYSYALARHMTEKQMNYIMVPGLEIKRSLGIQRGKNDRVDAMRIAQYAYRRREEVTTYQLPEKAINKIRQLLSLREKLVKQCAGYEASLKDLPDFIESSESKVLVGVQRNMIKALAREIEKVEKEIDSVLESSPDIMNNYRLITSITGVGRQTALYLIIVTNNFLSFDDHRKLASYAGVAPFANTSGTSIKGRTKVSPLANRKLKSLLSACAVSAIRHDPEMKLYFNRRTEMGKHKMNSINAVRNKLLARVFAVVRRGSPYVPLCQYAA

SEQ ID NO: 468433 - protein, 425 aa, unidentified
MNYKQNEKINQVKESTLVVGIDIGSTKQYARAFDWRGIELGKVFTFSNSREGFEAFKAWMRHLQDKYRKSDVIVGIEPTGHYWFGLGAYLEDEGILLVMVNPYAVKQTKELDDNSQSKNDRKDPKVIAKLVTEGRYSAPYTPDGVYADLRIMVANRKRLIREMTQIKNRFARWFAIYFPEYTDVFGDYEAQSSMLLLKKVCTPEAIVELGAEKINQIWRDAKLRAVGMKRATTLCETAKRSIGLKKGSSAARYEMKLLLEDYEYKKAQLDAVMEEIEKLCRKIPESEQMLAIKGIGVITAAGFLAEVGDVRRFESPRQIQKLAGLSLRENSSGKHKGQTTISKRGRSNLRAVLFNAAIPLIATNREFKSLHEYYTTRANNPLKKKQSVIAISCKLIRVFYAILANGVTYDPQKMLSDIHRQPQAA

SEQ ID NO: 468434 - protein, 470 aa, unidentified
MQDNNRKESAAKKRQIEGLPVVRRNVAGIDLGSERHWACAPSVDRTAREVADFGATTPELIRMGEWLQARGVESVAMESTGVYWIAPHEVLEGRGLEVLLVDTRQLARVPGRDKKTDPSDCEWIQRLHSCGLLRGSFRPAEQVCMLRTLERDKANLVAESGDWVRRMQKSLDQMNVRVHRAVSDIDGVTGMAILRAIADGERDARKLAQLRDPRCRKSEPEIAEQLSGHWREDHLFTLRQALKMYDAIQQRIADYDQEILGRLAAMQREDFRDQPPPKVKNRQKAQAIKKRGEEPMREALFRMSGVDLTAIDAIGVGTVQVVLSEYGPDLSRFPTEKEFVSHTTLAPRRPMSGGKPVRKKRRNTASTRVAAALRMAALSLRHSATALGAYYRRIARRIGADVAVFATARKLATLIYRALRWGQPYVDEGAEAFEKRYQEIRMTALKAKAKELGYELLPSVQAPVEGEVTG

SEQ ID NO: 468435 - protein, 321 aa, unidentified
MDEVKRFVGIDVAQAALDVFIGSDGAAFSVTNDEVGIRELLGQLKPTNFVILEATGGLETPVASALAAAGIAVAIVNPRQVRDFARATGRLAKTDALDAEVLARFGEAVRPQARPLADEQAQALEALVTRRRQLVEMLTAEKNRRANAPKVLHRSIDEHIRWLEKRLSGFDDELGELLRDTLLWRERDELLRSVPGVGKVLSSTLLAHLPELGALNRKQIAALAGLAPFNRDSGTLRGSRGIWGGRAQVRRVLYMATVAGVRSNPVIKIFTPSCVRAGNILSQRSPPACASSSSFSMPCCTIKLTGKHLHSRPRRLPFRPS

SEQ ID NO: 468436 - protein, 415 aa, unidentified
MKEENKSSPCRYIALDIHKHYSVVAGVNRDGDEILTACRVEHFDLENWLPKHLLPTDRVVIESTTNAWHVYDLLEPLVAEVLVANPIKVKQIACARVKTDKKDTLILARLLAANLVPKVWVPPVHVRELRQLISQRRRLVGMHTQVVNRMHSVSHRHHLGHPKGKRFQEKDMGWRDSLGKLECFQLDLDLDTKKFMKVQIDQITNELRSMSHQEPWANQMMYLMQIPGFGVVTGMTVLAAIGDIARFETPKALASYSGLTPGVEQSGVKLRGKSITKEGRREFRWAMVEVAQRAVKADPHWKRRFTELERRMHRNQAIVAVARHLLTLVWSVLSQGKSYRHYSAERIAYKYYTWSWQLDEAQRKGLTRPQFVRYYLMRLGIGADLQHVALDPKHPHRLASEAEILEMMAEFKPPG

SEQ ID NO: 468437 - protein, 462 aa, unidentified
MPGREDSETGESSRRQLQGLPVIRRNVAGIDLGSERHWVCAPTQDGSGREIASFGATTAELLRLAGWLKARQVESVAMESTGVYWIAPHEVLEAQALQVLLVDTRQLARVPGRDKKSDPSDCEWIQRLHSCGLLRGSFRPEEAVCMLRTLVRDKANLVAESGDWLRRMQKSLDQMNVRVHRAVSDIDGVTGMAMLRAIAAGERDAQKLAQLRDRRCSKTQQEIAEQLTGHWREDHLFSLQQALKMYDAVQERIAAYEQEILRQLGEMEEPGQQGQTAPPLHNANKTKAIKKRGQESKRQALYRMSGVDITQIDALGVETVEVVLSEYGPDLSRFPTEKEFVAHVTLAPRVPSSGGKPLKKKKRNSASTRVAAALRMAALSLRHSQTALGAYYRKLAQRLGGDVAVFATARKLATLIYRLLRWGQPYVDEGAAAYENRYLQQRIKSLTAKAKQLGYELTAVNA

SEQ ID NO: 468438 - protein, 412 aa, unidentified
MKTFVERCAGIDVGKKFVLVCVLVGSPGEKVRSEVRKYGTTTPDLQLLKQWLDENGCTQAVMESTGTYWKPVLNVLESTIAILLANARHVKNVPGRKSDVLDCQWLAELLRHGLIRGSFIPPRDIRNLRDLTRRRRQLIGAATAEKNRIQKVLEDANIKLGSVLSDVFGASGRAMLRALTEGSSDLERIAQMARCTLRKKIPQIVQALTGGILTEHHRFMLRQALTHIEYIQQQIAELNDELTQRIKPYQEQFDLLLTMPGIREDAAASILAEIGPDMRQFPSASHLASWAGLCPANNESAGKHRAGKPRKGNQWLGATLNQCAWATSVKKGCYLGDRYRRIAARRGKKRAIVATAHTLLVIVYHVLSTHQPYQERGFAGYSQEERERRIKYHLRRLTSLGAADMSLPPRSA

SEQ ID NO: 468439 - protein, 318 aa, unidentified
MLIHYIDIAKRNFVIAVSSLSKTKTETNNPKGIAHTIEYLKKHKVALVVTESTVGLEIPAAKAIRRAGIAVIIANPRQTHQFAQSQPLTKTDAKDAKMPAFFAQMKAQKEDSQTMPYQPPTEAEEVLEALVNRRNQSADMRTAEKNRLHQVHETQVESVKQLIAHFDRLIDELDKQIDNHTHTHFDGKAQVAEQIKGIGSITTATLMAMLPELRRLSHKRIAGLAGIAPHPRESGETKFKSRCFGGRSAVRKALHMATVAATRFEPLIRDFYQRLLSEGKPYKAAVTACMRKLLTISNARMRDYFAENDTAENGIRTA

SEQ ID NO: 468440 - protein, 340 aa, unidentified
MSLVLQSLLPYPNSCQGTSPHQQGWDTKMEKLSYGGIDVSKDRLDVVVLPEGWFFSVSNDTAGWTELVARLRPLAVCAIGLEPSGGYERGIIRALLAARLSVRRINPNKLRQFARARGVLAKNDRLDARLMAEYVAIMPTRAVQRDDAVDRLAEVVTMRRQLCDEHVTVENQTAHLEDAMLRRLSKRRLVRLEADIRLLDKRLAEMVATNAAFAQPYELLTSMPGVGPVLAFTLIALLPELGKMSRKQIAALVGLAPYDFDSGKLRGHRSIYGGRMPIRNVLYMAALSASRYNPALKTFSNRLAHANKKSKVIIVAVMRKMITTLNAMLRDNAAWQPQSN

SEQ ID NO: 468441 - protein, 456 aa, unidentified
MGIDIAVRAPHQASLTNEKGELLWSAHRFRTTAADLEKLWARLPSGHTPSDITIVMEPTRNAWVPLAAWFRRQGAQVVLVSAERSSDLRAYYAKHTKSDRLDSVLLARLPLLHPEGLHRERGIGPGDPLRRASKMHSTLVKRRTTSLARLDALLEILGPDWHAAFSADLSNKTPLQFLAAGYAEPHTVRRLGRARLTRFFYRHSRGAFGEAHADQILAAAHASLELWGDELAFSDLAEDIAIEARLALALTAEIKELDERIAILVADRDPQGIITSAPGVGAITGAVILGRLGDASRFQSLAAVRSFSGLVPSLDSSGVSGRHGGPTKRGDHLLREALFISANQARRLDPTLAAKYHRLMIESGKHHNSALCHIATTLLTRVAACWRAQIPYQIRDVDGQAITRDEARAIIQARYTIPDKVRRSRVTTGTGRRRKESLRAPSTGPSNQHAKQSGAA

SEQ ID NO: 468442 - protein, 420 aa, unidentified
MRNAGIHANSLLEVRRMYNAVGIDVSKGKSTVAVLQPGGTVIRKPFDVSHTSQNLNELADYLSSLDGTTKIVMECTGRYHEPMIKALSEAGLFISIVNPHLIKNFGNNSLRKLKSDPADARKIARYTLDNWTELRQYSGMDNTRTQLKTLNSQFSFFMKQKVAAKANLIALLDNTYPGVNKLFDSPTREDGSEKWVDYAYSFWHADCVRKIGLKAFTERYMSFCKKHHYIFQQDKPEKLFNASKELVAVFPKEKTYKLLIQQSIQQLNLASEHVERLRREMNELASTLPEYSTVMGIYGVGKTYGPQLIAEIGDVSRFTHREALTAFAGVDPGVDESGQHKSKSNRASKVGSARLRKTLFQIMTTLLQNAPEADPVYRFLDKKRSQGKPYYVYMTAGANKFLRIYYGKVKECLRNLEQTE

SEQ ID NO: 468443 - protein, 400 aa, unidentified
MQQQAERVVIGMDPHKRSATIEVMTADESVIGGGRYATDEAGFAAMTDYVNTLRPAVEDRVWAVEGCHGIGHHIAMRLLAAGERVVDVPPKLSARARVFATGQGRKTDATDAHSVALVGTRMAGLRSVVNDEQLAVLRVLVDRRRSLGEDHTRMVSQLHHLMLELIPGGAKKDLSAAQAKALLAKVRPRDLAGKTRRRVAAELVGDLERIHARKKAADKELRELVAATGTSLLHLNGIGPSGAARLLVEVGDITRFPDRGHFASWNGTAPIDASSGDQIRHRLSRAGNRQINRTLHIMATVQLRNPTEGRDYYDRRKADGKTSMESMRALKRRLSDIVYRTMLDDAVAHTIGDRRTGPGGHRGNVSVSSAAGSHPHTNSSEKSLPGPATTNPRTPLPTAS

SEQ ID NO: 468444 - protein, 401 aa, unidentified
MQDTQQRDAVDVFVGVDVGKGHHHAVALDRNGKRLYNKALPNDEAKLRALITELKTHGRLLFVVDQPSTIGALPVAVARDEGVLVAYLPGLAMRRIADLHAGEAKTDARDAAIIAEAARSMPHTLRSLRLADEQLAELTMLCGFDDDLAAQVTQTSNRIRGLLTQIHPALERVLGPRLDHPAVLDLLERYPSPAALAGTTEKTLANRLTKLAPRMGKGLAAEIVQALREQAVIVPGTQAATIVMPRLAQQLAALRKQRDEVAAEVERLVLAHPLWPVLTSMPGVGVRTAARLLTEVAHKAFASAAHLAAYAGLAPVTRRSGSSIRGEHPSRRGNKVLKRALFLSAFAALRDPVSRAYYARKIQQGKRHNQALIALARRRCDVLFAMLRDGTIYQPKSAPNA

SEQ ID NO: 468445 - protein, 359 aa, unidentified
MGSMLAGVVDFVVGVDTHRDTHTAAVVDARTGGVIDRITVPTDALGYRRLRSFADQQAPERRVWAIEGTGSYGAGLTTSLLEHGEWVVEIDRPARPARRDGAKSDDLDAVRAAREALSREHLAAPRARGDREALRVLTAARQGAVVARTKAIGQLKALIVNAPQSLRDQLRRGTTDQQLQRCARLRTLPQHSIEHRATIRAIRGTARRALALEAEAAEYETELEQLVVAICPVLLAQPGVGTITAAQFLISWSHAGRIRSEAAFASLAGAAPIPASSGTVTRHRLNRSGDRQLNRALHTVALSRLRIHEPTKAYAARRQAEGKSPREIKRCLKRAIAREVFRLMNTHAAAVTGSLPITA

SEQ ID NO: 468446 - protein, 408 aa, unidentified
MEKRLFVGIDTSKMGHQVCLMNPTKIKQDVYIENNRAGFDRLATILSQYREEGYQVTVGCEPCGHYWENLGYRLVEDGYAVQLVNPFHVNRYKEIFDNSPQKDDRKDSRIIATLVKDGKSLHNNLPRDGYAELRHLTHLREQLLKEGTRLRNRLHGWIDRYFPEYSTLFCDLLGVTCLGLLKKYGGPRGMVEVCVGELTGEVRSLSRGKLGRKRAQEVQARAARTIGQTIAPRAARAELNWLLTRIESWREEVKGVERLIKAELIQQKEDKYLQSIPGVGWWGSAVFLGEVEDIGKYPRAKSIEKLAGLNLYHKKSGKTESSLRITRRGRSLLRKMAYQLAVSGTHGAEEFREFYQRKLNKGKPKVSALVALAAKILRVMYGVVKNEEEYRPLKERAGDAGGFQEGPC

SEQ ID NO: 468447 - protein, 368 aa, unidentified
MNDVTTRYLGLDVHKATIAVAVADAGAPPVLHGTITNDPGAVRKLINQLRRGCRLVAAYEAGPTGYGLHRQLVDLRVECVVIAPALIPRRAGDRVKTDSRDAITLARLLRSGDLTPVWVPGEEDEALRDLVRARFDAKDDLRRAQHRLSKFLLRQSIHAPAGIKSWSARYQTWLNTLRLERPASQLVLEDYRATERGARDRVRRLDLDLKRCAEQSPRLGLILALQVLRGIAFLSSVTIVAEVGDFRRFVDAPHFMSFTGLTASEYSSGQSRHQGGITKAGNRYLRHILVQAAHNARYAPDLDGAVKRRLRGIPVDLVDIALKAQTRLHRRYHHLDRRVGRAKAITAVARELGGFVWAIGQRMEASAA

SEQ ID NO: 468448 - protein, 345 aa, unidentified
MENMYYIGLDVHKKTISYCVKEGSGRIYAEAEIPATRLDLDIWMKTLPQPWTAAMEATIFTSWIYDHLLPHAAAVKVAHPLMLRAIAAAKKKNDRIDANKIADCLRCDFLPECYMASTEIRERRRTLRYRNLLVRQAVQMKNKIAVLLMEAGVSYNKQKLHKVGYFRELLASNQDIDEGLKSLLRLCRETVVRLGKTESALVRSLQRDSLLMERVERLMTIPAVGPITALTWALEVGDVQRFSSIKKAISYCGLCGAENSSANIIKRTPLSKQRNKHLQTVLIEAAKMAPRNSPDLAMIYDREKQKDNANRATLAVARKLVAYLVAVDRRQKEFLTVERENRTAA

SEQ ID NO: 468449 - protein, 340 aa, unidentified
MELKRIAIDTSKHVFTLHGVDRQDHAVLRRDLRRSQLEPFFRKVPATEVVMEACGGSHHWGRLLSRLGHTVKLIPPQYVKPFVKRGKNDRNDAEAINEAASRPTMRFVPVKTAIQQAATMILKTRELLVRQRTQVINAVRGHASEFGVIAAKGTAQVEPLLERVADDETLPIEAREMIAVLGEQIKDLDIRIAALEARMKQAHKTNPVSQLLEGVPGIGPIGALSLAVTVDPAQFHSARHFAAWLGLTPRERSTGGKQRMGGISRAGDERLRQLLVIGATSVIRHVKPGSRNASAWLLSLLERRPRKVAAVALANKMARVVWAMMTSGEAYRARTVPAMD

SEQ ID NO: 468450 - protein, 535 aa, unidentified
MPRKLQGPLAGTSRERENGKGKPATPVPLWPSRPSESLALGPDQKGRALCHEHAKQNFGLHPRAPSLPLCNQRVQEEGDQAVGINGGNVVDVGPDEADHLLERAAAIDVAKASGKVCVRLPHPRIAGRRETRVWDVVATTNAIMALADELVGLGVERVVLESTSDYWRPFFYLFEAGGLVVWLVCSRDVKNVPGRPKTDKLDALWLCKLNERGMLRPSFVPPVEIRHLRDYTRLRADLVADRCRYVQRIEKLLEDALIKVSTVASDILGKSGRAMLEALIAGERRPAVLADMALGKMRAKRAALVEALTGRFDAHHAELARVLLDQVDALTAKIDQLTARAGELIAVMTAAQAPVPVPAGGPGLGSTGTCPVPLPVLERLDEVTGIGLAAAQAIVAEVGLDMAQFPTPARLVSWAKLSPRTVQSGARTSSGNTGKGDPYLRRVLSEAAASAGRTDTFLGERYRRLVRRRGKQRALVAVARSILVIVWHLLDDPMARFADLGPNYYEKRMDKGRRTRDLIRQLQALGHQVSLSPAA

SEQ ID NO: 468451 - protein, 340 aa, unidentified
MSKLLKNFVGIDISKLFFDVALLVADQSGLILHQQFKQSQKGFSDMKEWLKKQGVLLDAATLFCMEYTGIYNTALTKFLCDEKALIWIEMAIRIKKSEGFERGSNDKTDAIKIARYACRFKEKMQLWSPTDDNLNKIKHLIAQRDRIVDTISRLTVPINELKEIGCASEAKQLEKLQKTVINNLQKVKKNIEAAISKIVHQDKDLTRKVARVKSITGIGEVTAIAFLVYTKGFTSFDKGNELSCYCGVVPFIKKKSGISVTTKAHVSQFANKKLKTLLHMCALSAIQFDPQLKAYYERKVLAGKNKMIVLNAVRNKLVLRIFAVIRDDRDFVENYKRKCA

SEQ ID NO: 468452 - protein, 351 aa, unidentified
MNILAMDIAKSKTVVCYYDSESGRHEYGKVKTSPQQIHDLVAEYSPDRVVFEICSSAGWLHDIVTALGTEVQVANTNTQAWRWKNVKNKNDKKDALKLAQLSAMNQLPTVHMPKPNVRQKRALIQYRQTLVARVVQIKNNIRSILDKQGYSMAAGKSGWTNKSIEQLNQMALPIERCGVHDLWRGQLYVELTMLSSTQDALAHVTSKLDKLAESDSQVNLLQTVDGVGPRLAESIVAFLDEPERFKSCKHIGSYAGLTPRQYQSGSTNRQGRISGQGNKLLRALLVEVSWIGLRYNRWIRETYQRLLRGSASRKKIAITAVARKLLVRCWAMLRDGQPWRDMGVKTERQAA

SEQ ID NO: 468453 - protein, 338 aa, unidentified
MSLYGGIDLHSRISWLVILDGALKLVRQVKLTNDLREFLRVLEPYRAELAGLVVESTPNWYWLVDGLHDAGYRMHLANTYAAQQYSGLKYTDDRHDARWLAHLLALGILPEGYIYPAHERPVRDLLRRRGFLVQKRTSMVLSLQGAFGCHTGHRVSSDTVKKWTAAEIEEQFDNPLVARGLTCLLEPINAMSSQIRMLEKEVLAQAKLRDEFALLKTIWGVGPILALTVMLEVGDIKRFETVGNFASYCRLVKTDRFSAGKRKGAGNAKNGNPYLSWAFSEAAHFAIRYHDTARRFYQRKRSQTNGIVAVRALAHKLARASYHVMRNQVEFNPQRLFA

SEQ ID NO: 468454 - protein, 411 aa, unidentified
MRMAGIDVHKKVLMVVVIETTRPEEKPERQRFTTLRGDLSRLSSWLRAQDVQGAVMESTAQYWQSVWLELEPHMLLHLAHAFSNRAPRGRKHDFRDAERLVRRLFADELILSFVPDGEQRIWRNLTRMKMQLTRDRVRLQSQMECLLEEMRIKLSSVVSDLLGASGLRILRALAAGETEAKRLAALGDDRLKCTEEQLLDALTGSSQPMHREMLALQLERLQLIDTQIDKLNHLIAQAMKPHQEAVMRLAEVPGLGVDSAQQIIAEVGAQAGTFSSAAELTSWVGTCPGKDESAEQNHSSRSAKGNKYLRRVLSQAAHAAVKKRGSYFQALFRRLLPRLGYQSAIWAIAHRLCRVVWKILHEGVRFIEKGREPDAQAKKKRARILVQALRRLGYDVAITATHLGTQNATQA

SEQ ID NO: 468455 - protein, 410 aa, unidentified
MKLFCGIDWAEAHHDVAIIDRDGHLVANKRITDDPDGFAELIEVLTAAGDGAEDPIPVAIETPRGLLVAALRGTGRAVYAINPLAVARYRERHSVARSKSDHVDAMTLAHILRVDAHLHRQLPKDSELCQAIAVLARAHQDAIWARTKAHNQLRSVLREFYPTFLDVFTGRFALGISSPEARAVLRVAPTPAAAAKLSVSRIAAALRRAGRSRNIDPTAVELKAALRTPQLRQPVLVQTAMGRQTLALLAALDTACASVTDLGQAAAEAFQQHPDYTVITSFPGLADSTGARVLAEIGDDRSRFDDARALKAYAGSAPVTRASGRSISISHRRIKNDRMANTGWVWAFAAAAHCEPARTHYRQRREHGDRHAAANRRLFNKLLGQLYYCLQHGNASDKAKAFPGVLQPAA

SEQ ID NO: 468456 - protein, 409 aa, unidentified
MRYYLGVDWADQTHAVWVVDGSGMKITARAVLHSAEGLGEWGRELDEWRAQGIELWAAIERPDGRVVDFLLDHGVVVYAVNPKALDRARDRFRQSGAKSDPFDARVLADFLRTDHGHLRALQPSSEAAQELKLLTEDCQRHIRQQTRLVNQLTAILKAFYPRALEVGVLTTALVREFLQAYPTPAALTALTHRQWQRWAQTHRLTEARTRELWEVLQRPQLPVPAHVVRAKTRMMQSLVEQLAPVVAAVAQYRKVIDDFFGSMPAAQWARSLPIGKHGVTAPTLWARLGDAPGRWESFRHLQAHAGTVPVTKRSGKQRMVQFRFACDKALRYVVDQVAFLSMLSSEWARAYYDQQRARGHSHRQALRALGAKWLKIIFVMWQRQLPYDEQYHLATMTRQQLRQRQQQTA

SEQ ID NO: 468457 - protein, 391 aa, unidentified
MVCVGIDVAKDKHDCFIISSEGEILADVFTIPNNAEGFDTLLQAIRRSTRPEDKIKVGLEATGHYSCNILGFLLDNDLPVYVMNPLHTNLYRKSLSLRKTKTDRVDAKTIATMLLSDVDLKSYTDTAYHNEELKSLTRYRFDKVQERAKLKQSVSRLVTILFPELEQLVSSIHGTSIYALLSEYPGAKQISEAHLTRLANILVTTSRGHYRKDRATHIRDAARTSIGSVMPAKSLELKHTIKLIQELTSEINEIEDAIRKIMDELKPPILSIPGMGFYSAAMILAEVGDFSNFNSPDKVLAYAGCSPSTYQSGKLTNCYAHMEKRGSRYLRYALYTATKYVCYWNPVFTEYLTKKQAEGKHYNVALSHATKKLVRLIYALQKSGKAYLAIT

SEQ ID NO: 468458 - protein, 365 aa, unidentified
MQKISTMRTNAKNIFQGQLTIGLDLGDRSSAYCVLNEAGAIVLEHKLATTPEAMKQVFGSMPRCRIAMETGTHSPWVSRLLTALGHEVIVGHAQKVRLITKSRRKDDRLDARTLARLARIDPELLSPVKHRSAQAQLHLAEIRARAVLVSARTALVNAARGLVKSSGERLRKCHTQQVRREMTVGLSAGLREALEPLLQEVESLNERIQEYDRRIARMAKETYPETALLKQMKGVGDLIATTYVLTVEDPHRFRKSRDAGCFVGLQPGRRNSGESEPQMHISKEGDEYLRTLLVQGAHYILGPFGEDSDLRRWGQKLSARGGSNGKKRAVVAVARKLAVLLHRLWVSGEVYEPLRNSQKVMTAAA

SEQ ID NO: 468459 - protein, 411 aa, unidentified
METLIRRCAGLDVHQASVVACVRCVDEHGELQQVTETFGTTTPRLLELFDWLERWGVTVVGIESTGVYWKPVYYLLENQFECWLLNAQHLRNVPGRKTDVGDAAWIAQLVAHGLVRPSFVPPKPIRDLRELTRYRKQLLQERSREVQRLQKTLEDAGIKLSSVVSDIQGKSARAMLNALLNGVHDPAVLADLAHGQLRKKIPALQQALTGWFSPVHRILVSEILAHLDYIDETVERLGGGVEKILAPFASAVDLLDTIPGINRRTAEVVIAEIGADMTRFASQQQLASWAGMCPGNNESAGKHFSGKTRKGSRWLRTALVESAQVAARTKGTYFSAQYARIRGRHGHKKAIVAVAHSLLVVAYYVLLRQEPYVELGDHYFIHRQQKESYRRRLVQQLERMGYDVNLAPRAA

SEQ ID NO: 468460 - protein, 480 aa, unidentified
MNVKATRTKKQVNVENQAIKLLSKEELGIKIEVIKKELRSYTWRDLETNGKFAKNDKLSFITDDMLIAGCDIGSETHYIRAIDVRGRELSSRAFEFSNTSEGFANAKAWVLALAAKNDKKQIVLGLEPTGHYWFALAAWMVSNGISVVQVNPYAVKQSKEIEDNSQLKDDRKDPKLIANLVKDGNYGMPYLPEKVYADMRRLSMFRDQLTEDRIRNINRLHRELKIYFPEYMDAFGKIDGAFTLEVLKVSAIPSDITALGAEGIKNIWHNEKLRGRGYSRANEIVSYAEKSVGLTDGTDAGRETVKWYAEQILKLDEQLAVIESTLHEKCREIPYAENILEIRGVGENILAGILAEMGDISRFDDVKEIQKLSGMGLVACSSGKHKGQTKISHRGRKRLRYWLFQAAKSAVSHADEFKQLHESYTTRTNNPLKKMQSLVVIACKILRVSYTILKTGTTYDPQKLLKDIKRPTASQAPMAA

SEQ ID NO: 468461 - protein, 399 aa, unidentified
MAEGVVAGIDWASEVHVACVVGGDGTVADRFSFTHDTAAIRSMVSRLRSANVAGIAIERGDGPVVEELLAAGLVVFVMPSRQIKGLRTRYGSAGNKDDRFDAYVLADTLRTDGHRWKPLRPDTGPTRALRALCRSRKDLVETRVLVTGQLRANLELAFPGAIGLFTKPASAISLAFLQRFPAAGKAAWLSPSRLASWLRSAGCTGGVSAGTLYGRLAAAAPGLTGPEGDARGQITLAFVAMLRTLNEQITVMDAEIGRLFAAHPDRHIFASLPRSGTVRGATLLAEIGDCRQRFPTDDALAALAGACPSTRQSGKRSQAVFRWSCSKKLRAAVMDFANGSRMSDPWAAAVYAAANGRGCRHPHAIRILARAWIRVIWRCWQDGTAFDPALHRGRQAAAA

SEQ ID NO: 468462 - protein, 317 aa, unidentified
MDKPPAATCFVGIDVSKGHVDVHVRPDGTAFSCTTDQDGLANLITRLAPLQPQLVAMEASGGYEAVIAAALTEAGLPVAIVNPRQVRKFAGAIGRLAKTDAIDAGVIAHFADAIRPAPKPMPDALMLRLRELVARRRQLVVMVNAEKQRLGKAADKLAQRSFKTILRSLEAERARIDRAIDTLIQQSPLFCAKQDLLKSVPGIGDIVARTLIVELPELGSVDRHQIAALAGVAPMNRDSGRYRGKRRIQGGRVEVRAPLFMACLTAIRHNPPLRSFYRRLRDAGKPARLAIVAVMRKLLTTLNAIIRDNTAWTHVHI

SEQ ID NO: 468463 - protein, 449 aa, unidentified
MVRTQGKLSGLPIINEKAAAIDIGSRFHVVAVPPNLSAEPVQTFQAFTADLQRMANWLVALGINTVAMESTGVYWIAAYEILDSRGLDVVVTNARESRAVPGRKSDVNDAQWLQRLHACGLLRPSFRPSGDIAALRAYLRLRERHLDYAAAHIQHMQKALTSMNLQLHHVVSDITGATGMKIIRAIVAGERAPSVLAAMRDRNCKSTVETIQAALVGNYQAEHVFALQQALALYDFYQARVDECDAVIQSVLAKLAADKPNPEEPLAKARHRADLSNGFQFDVRPVMRQLTGVDLTQIHGIGAYLAVRLVAECGTDLSRWPTAKHFTSWLTLSPGCKISGGKVLASHTRKTTNRVTALLRLAAVAVGRTSTALGAFYRRLAARIGKAKAVTATARKIAILFYNAMRYGMKYVDPGADHYEHCYKERVIKQLHRRAAEFGFSLQPVEGLS

SEQ ID NO: 468464 - protein, 518 aa, unidentified
MKHRVLGIDLGIRAPSVAVVADTDGTIIGNAVRFELGIDELEGVEVGALKGAKEGSKLHVIMEQTYPTSEYVTAFFLTRGHKVSFAKPDQVKAFRKCLSPKVKTDDVDAYVMARLPWLDPNQLARTYVPPPEIRELKIQVSQRASMVKQLVELKNQLIAYANAVWPGIARAFGDFDSAHARSFLREQRPKNIATLQVDELAKLLKDRGKIQHSYAKRLAGKLLAIAQRTIGLHQLLPEEQIESTRSHTIELVDMVEELELRIRSKEKRLDEAYVRCDPQRLLMSIPGIAEKTAPTIFCYFGEPERFASTRKAQGFVGMFPETDASGTSDRKGTHITKAGPALLRRDLFLAADHFRRNDPHGAKLYHNQMVHHGKHHNSALCIIANRSLIPRILAVLREQRPYELQDLEGNSITKPEARKLAEQWKVTEEVRKRLRSKKTLAQERWEAPPSVTSEPKAPRNGRPSQPADPNPETLSVTTDELKMLVFKSLEKMLNTGGNVEEIRLQLKEEAANFFQERA

SEQ ID NO: 468465 - protein, 352 aa, unidentified
MIVLGADTHKRSHTVAAVAATTGELLGEQTVQVGRRGFDALLRWARGLDGERVWALEDCRHVSGSLERFLIGRGERVLRIPTHLTAKARASARQRGKSDPIDALAVARVALQEGLESFPAAQLDGPELDLRLLVDHRERLVRQRVGLNSTLQWHLHDLWPELQLPGSSLFYGRWAPRVARRLARAEQTMRVRIARDELRRIGELSRTIKALEAEIAGLVATIAPQLLSEPGFGPLTAAKLVGEIAGAQRFATAAKLARAAGVAPIPASSGNTQRQRLDQGGNRQINAALHRVIVTRARCHPATQDYIARRRAEGKTTREAIRCLKRYLARHVWRLLQPPHPVRGTPPSPSIS

SEQ ID NO: 468466 - protein, 332 aa, unidentified
MYFDHYLGIDISKATLDAALIIKEGEVVGQTKVANNSHGFNDLASWIRKLKVKLSDVLVCAEHTGIYGYDLQIWLDDMQISFAFVSALEIKRSLGIRRGKNDAVDALRIAEYAYIRRESISLSHKPSDVIFQLRALLGERKQYVRMRAALLARKDALHQYESKESIYRREEIIDKYAEYIASVDKQMRGLMEHDDEIKRNYELISSVKGIGLVNAINTLVYTNNFTSFQTPRQYACYCGIAPFEHTSGTSIKGRTAVSKMGNQQLKCELTMAARSAIIHDPWMKQYYKRKMMSKGNAPGAHGIVLNAIKFKLIVRMFSVVKSGIPYKVMAYC

SEQ ID NO: 468467 - protein, 350 aa, unidentified
MIIIGLDFHPEFQQIAFLNTTTGEVEEKRLAHSDEAEKYYRALATAGETVRIGMEASGHGRWFERLAAELQFDLWIGDAAEMRAKRGRKQKTDRQDAQHILKLMLKDDFPKIWVPSWENRDLRQLLWHRHRMVQARTRVMNQLQAVALNEGLQCKKKLWRERGRQQLESFALAPWTSRRRHDLLELLDRLNPAIADLTQAIEREVENYPAAQRLRTHPGVGVLTALAFVLILGDAERFHCGKQVASYLGLVPLEDSSGNRRRLGHITKQGSSIVRFLLVEAAQVTVRSLPEWRSKYFHLVLRRGRKIAKVAMARRLAVQLFWMMRKEWDYEQLKKFGSYAGQPGHRHGAQ

SEQ ID NO: 468468 - protein, 382 aa, unidentified
MSGTEPHAWGTGLMDDIIFVGLDVHKATVCIAVAEGTRGGEVRQLGAFENRPEILSKVVSRLSKGGRRLSFCYEAGPCGYGLHRLLTGYGHECVVVAPSLIPMKAGDRVKTDRRDALMLAKLHRAGELTAIWIPDAAHEAMRDLVRARATAVRVLVKARQHLQGFLLRHERIYRGARAWTLAYRRWLSTVHFEHPAQQIVLQDYIHAVQDAETRRDRLTQQIEELLPNWSMAPVVAALQSMRGVALIVAVTVVAEVGDFRRFANPRQLMAYLGLVPSEHSSGRSVRRGGITKAGNALARRVLIEGAWTYRMSARVSRKLYDRLEPLPAAVRDIAWKAQLRLCARYRRLAAIGKPKVVVTTAIAREMVGFIWAIARLAQPALV

SEQ ID NO: 468469 - protein, 383 aa, unidentified
MPRIAGQAGPVTGGAGTHADVHVAAVVDQVGRVLGTQAFPATAAGYRAALAWMRAHGELVKVGVEGTGSYGAGLARYLAACGIEVAEVIRPNRRARRQRGKSDAADAVAAAVAALSGEASGVPQSRDGAAESIRALKVARAGSVKARTQAGNQLRDLILTAPEPLRQQLAGQPCGRQADVAARFRPGRPACPAEGAKAAMASVARRHQQLTAEITRLDTMLEELVRHAAPEGFLAKRGVATQVAAALLVTAGDNPGRVRREASFAALCGASPAGASSGKQLRHRPQPRRRPASQLRAVDDRHDPPGPRPAHQGLRRPAHHRGQDQQRDHPLPQALHRPRNLQGPMQTQRPNAINAANQTRSFSSGLDVGASAGRRAFSRTCSR

SEQ ID NO: 468470 - protein, 332 aa, unidentified
MTGVYRTESQGYKDFCNRLHSIEAEEECRIELAVEATGNARYFKNKMEAEGFGVLVVNTSKFKVITMSTKKTDANDAATLAFYLSKDMLPQSHLCDQTSEEIRRMLKTRSILVSSTVKIKNQIHGMLLGYGIETTSAQFQSKKKRQELINVLAEHYFSQFTASSLEVTLNILDDIYAQVKRIEEQIREMTKENETVSLLMTMPGIGFVGATTIVSYVDDISRFDGDFKKFSSYLGIIPSVHNSADTVRMGHITKRGPQELRTAFVQVAMGIIRQPQNTSEWKLMKDYQTMKISKGSGRAIIALTRKVARIVFAMLNNREAFNPELMKKSNVA

SEQ ID NO: 468471 - protein, 404 aa, unidentified
MYYVGIDWADEAHHAYITDDSGEKLDSFPIEHNEKGMNKLQSRVYKFSRKLDNVLFSIETDKGLVTSTIMDWGYTVYPINPKAVDRYRDRYKVSGVKSDEFDACVLANILRTDRSRFQPILSDSELARELKVLTRDRDKLVGDRTRLSNRLTAILKAYYPAALELFSAVAQPITLSFLRKYPTYDDARKTSFAKLKRFLSENRYPHPKRAAGIYEKLQQPHLECEDMLVRTKSRLMLTTVSQLQILMDEIKSYEKEIEKLLQSHPDSNIFLSLPGAGDILSAKFIAEFGDNRDRYEKAKDVQAESGSAPITIQSGKKKYVKFRRSCKKPFRKTIHSFAFCSTNECTWAREHYDQQIATGKTHSQAVRSLSNKWMKIIFTLWKRDEKYDEDYHLQMKAKHAVVTV

SEQ ID NO: 468472 - protein, 311 aa, unidentified
MNSPAWFVGIDVSKGTLDVFVRPTGEAKTFVHTEEGLAQMADWLQSFPQALIVLEATGGWEMGAVRILVARGLFPVVMNPRQIRDFAKATGILAKTDKIDPQVIARFAEAVRPEVRPLPTLEAQELEALNARRRQIVEMLTAEKNRLSLAPRWIRKEIQAHIRWLEKGLEKVNKELKDRIQKSPLWREKDEILRSARGVGPVTSTALLCDLPELGTLNRKQISALVGVAPLNRDSGLFRGRRMIWGGRATVRSALYLSTLVAIRFNPVIRAFYERLRAAGKPFKVAATACMRKHLTILNSMIKYRTRWQTA

SEQ ID NO: 468473 - protein, 335 aa, unidentified
MEVKTIGLDLAKNIFQVHGVDAAGEVRITKRLRRHQLRDFFAGLQPCLVGIEACPTAHYWGRELKSLGHDVRLIPPQYVKPYVRRNKNDAADAAAICEAVARPAMRFVPIKAPEQQAALMLHRTRDLMVGQRTQLLNALRSHAAEFGVIAPKGSQNVATLLEACEEAQLPALALELLRVLHRQINEAAERIEEVETQISAWYKANEVCRRLSSVPGIGPLTATAIATTVPDPGVFKSGREFAAWLGLTPRQNSSGGKDRLGRITRKGNQHVRRLLIIGAHAALLNSRVLKTTDWVQGLMQRRPRQVVAVALANKMARIAWALMARGTSYRVAVAA

SEQ ID NO: 468474 - protein, 401 aa, unidentified
MKEFNAEHHRVESASALAVVSNAGGAERYAAYVGLDVHKETIAVAVAEPGRAEPVYRGEVANRPKSVEKWLSKLSAAYEGGLLAFCYEAGPCGYVLYRQISASGHDCQVVAPSRIPRTPGERVKTDRRDALKLARLLRSGDLRAVWVPDQEQEMMRDLSRARDDMKEQERKARQQLNAFVLRHGRHWPRGKSRWTQAHYNWLESLRFERAWQQVTLQEYIDAVKEASARVAQFDAHLMRALPEWSLAPVVESLIALRGVDKLTAIVLLAELGDISRFDSPKELMAFLGLVPSEHSSGGRRRQGGITRTGNGHARRVLVESAWSYRFPARQTMHLKRKAKKSSASAKKIAWAAQKRLCGRYRTLVQCGKHKNVVCVAIARELVGFVWDIVRQEMPRLAPQAA

SEQ ID NO: 468475 - protein, 422 aa, unidentified
MLEQAQDEEEIITHVAGLDIGKASLVCCARVPDEARPGRRLQEVRTYATMTRSLIGLADRLTVLGVTRVVMEATSDYWKPVFYLLEAHGFEVWLVNARDVKHLPGRPKTDKLDAVWLCKVAERQMIRSSFVPPSPIRMLRDLTRYRVDLIAEAGAERNRAEKLLEDAQIKLSVVVSDLFGASGRAMMAALIAGQRDPHTLAELARSSLRRKIPALQEALTGHFTDHHAFLLGKMIARVEAIEADIRDVDSRIEAQLAPFAPAAARLLEIPGVGPAAAAAIIAEIGVDMTRFPTSAHLAGWAKFAPGVKESAGRRKGNGSTGHGNRYLARVLGQIAVSAARTSTFLGERYRRIARRRGAKRAIVAAGRSVLTIIWHLLSNPETRFHDLGADFYLSRTDTERRKRNHIHQLEALGYRVTLDLAA

SEQ ID NO: 468476 - protein, 384 aa, unidentified
MGSFIPQEYDVFAGLDVDKRSISATFSNHQQGFVRSVHMPYSVENLLKHVRKHFPDQKVAFVYEAGPTGYGLYDGLVAQGYNCLVAAPSMIPRAPGQRVKTNRLDSRALSENLRGGQLNSIHVPSPIYRELRHLTQLRDTLVSEVAGMKQRIQSLLLFEGIAFPTAPAGSRWSLKVKAQLRKLECSRSVRFKLDQLLDNVEFSEKQVVKVTKEIRKLCQNDPELAQCIKYMMSVCGIGWIVASQLLARIGDWRELKNVRQLAGFLGVVPSEASTGEKTHRGSITRTGHGRLRSKLIQASWSAIRQDGELRDFYRSVCRRHPRHMGPRVAIVAVARKLSARIAAVLMEQRPYVVRQKVHSAPLTQEETSPQGTTRRLGEPGEQNS

SEQ ID NO: 468477 - protein, 450 aa, unidentified
MSNGNGVSRGDRNRNARLVRLRSLVPVSNAIIGIDLADNKQMVVVCDHDSKVLARRTFRCRAWDLGVALDWAAERAAAKGFAGVTVACEPTGHRWRVLGELAGRRSMPFVCVQPALTSAARRTEDLTADKTDEKDAVLIARLTAQLRCYIPEQTDETWARLRHLGARREQLITETTAQVQQMRDLLECVWPAVLDTAQQPFRSHTWIAGLAVVVDRDGGDLTRTLRLGAARFEHAIRREIIKRGGLKPCLRIVRELFAALADPAGVAAHRKGALERVQLLLVDWVHAHERLTDTETRMVAVLDELQLTGLVCSIPGISAVGAAAILAQTGDPRRFATARALVKHAGLAPREKLSGNFKGRTKLTGQGRPGLRLAAWRAVWGAQRVNPVYAARYRHLTTRQNNKLKPTQAQSVIAAAILRHLHAVITTGQAWDPSIATHGNSGPVSATLAA

SEQ ID NO: 468478 - protein, 386 aa, unidentified
MQKLNDLSRCLTPLEPDSTLMAVIEMSLSSWLVAGIVPGVERQPLKKLAVDESVLLKLLHRWREEAEKAGYMIKRIAVAFEAGRDGFWLARWLRARDIEVHVIHASSVAVSREHRRAKTDRLDTELLKRAFLGWLRGERDHCKMVAIPTIKDEDGKRPNRERESLVGEQSRIINRIKATLVRLGIRGFNPKLKKAAERLEGLRTPEGEPIPPNTLSELYRDMERRRLVRGQIRQIESARLDRLEHAPGEGAHAMVRLLARVMGIGIETADMLVQEVLSRNLRDRRAVARYAGLTGSPDESGKKRREKGLARSGNPRVRHGMIQLAWRFLLFQKDSALAQWFRVRTENARGTRKTMIVALARKLLIALWRLVREDVMPDGVILRPAQ

SEQ ID NO: 468479 - protein, 315 aa, unidentified
MSTPVFVGIDVSKAELQVAVRPGDEQRTFANDRSGLGQVVAYLGPQQPALIVLEATGGYETAVAGALAGAHLPVAIVNPRQVRHFAQALNKLAKTDRIDAGVLAQFAEAVRPEPRPLPDALTQALQALVTRRHQLVDMMTAEKNRLPGATPPVRRQIKAHLAWLQKHLAQVNEDLDQAIRESPVWREREQLLRTAKGVGPVLASTLVADLPELGTLNRKQIAALVGVAPLNRDSGTHRGRRSIWGGRRRVRSVLYMATLNAIQHNPLIRPFYERLVAAGKRAKVAIVACMRKFLVILNAMVKTNTPWNPKATTGP

SEQ ID NO: 468480 - protein, 408 aa, unidentified
MEATIERCCGLDVHKDIVVACVLIGPADGKARKEIRTYGTTTAQLEQLRDWLGQIGCTHVGMESTGVYWVPIYAVLEEHFELIVGNAAHMKNVPGRKTDVKDAQWIAELIRCGLVRKSYVPPKWQRALRDLTRYRRKLVEAQASERNRLQRLLETCNVKLASVATDVFGKSGREMLRALIKGDESPEQMAQLARGRLRKKLEQLVLALRGKVESHHRFMLEMQLGRVEDIEANIAVIDSKIDEAIAPHRAVMERLMTIPGVDRVVAMTVIAELGIDMNVFPTPAHAAAWAGVCPGNNESAGKRMGQQKRRGNVHLATALVQAAMAASKTKNTYFKARFWKLAGRAGTKRAAVAVAHSILNAIYHMLKGSVDYKDLGGDYLDRFLNRRSEQRLVQRLRSMGYEVRAQTA

SEQ ID NO: 468481 - protein, 371 aa, unidentified
MVNHSEAFVAFDTSKLRNSVAIADAGRSGEVRFFGEIDNTPAATENLVRKLAAKYSRLTFCYEAGPTGYGLYRQLMARGHDCVVAAPSLIPKKPGDRVKTNRRDALNLARLLRAGELTAVWVPDERHEAMRDLVRARGAAVDDLKSKRQQVLSQLLRLGRHYPGKKTWTRTHMNWLASQKLAQREQRIAFEEMLLAVRQAQERVVRLDQAIVAAVPDWSLAKVVTALMALRGLDLVSATIFLAEIGDLSRFASARELMAYLGLVPSEESTGEQISRGGITKAGNHRARRVLVECSWSYRHPPRVGKKKLDKIAAVPRDVQDIAWKAQARLTARFRALTRRGKRPTVVVTAIARELAGFIWAVGRVVDRPMM

SEQ ID NO: 468482 - protein, 403 aa, unidentified
MSSAVAYLCRRMKGSTALVIIGVDPHKRTHTASVVETGTDKVLATLQIDASLAGYRRLLKWASGFEQRRWAVENARGLGRHLAQWLVAREEVVDDVPSTATARVRELSRGGRRKNDVIDAAAAASVAALRGDANPVVADDLTTVLALLDERRDNMVTQRTRLINQLHALLRDLLPGGAPTALTAVDASRLLTGVRPAGPVEAARKHLARDLVAEIRDTDQRLKTLTAQIADTLDAHGTRLRDVAGIGPVIAGRLLGRTRRAGRFRSASAFASYAGVAPIEVASGDHTRHRLPRGGDRQLNLALHIVALTQVRMRESTGRAYYDTKVAAGKSHNEAMRCLKRQLADRVWRLMLSDEHPLAAGPGGHSGATLTSSAAGSTPTTSSSDKSLPGPADRNSTTPSPAA

SEQ ID NO: 468483 - protein, 417 aa, unidentified
MDTLFVKVAGLDVHLKGIQCAVRCRQESGKLIGQVRSFGTMTRDLRALADYLQQLGVTHVAMEATGVLWKPVWNVLEGRFTLLLVNPRHLKKVPGRKTDVTDAEWIAQLLQCGLLRGSFVPGRALRNLRDLTRHRAQLAGEHTRVANRIHKLLEDTNIKLGAVASDVLGKSGRKMLRALLNGETDTAKLADMALGVLRKKIPQLQLALEGNCTEHHRFVLGRLLSHLGYLESQTQEFGYRIGQTLRPMLPTATYERLDRIPGVNHTTIENILAEIGVDMTIFPDEHHLASWCGMCPGNEESAGRRLRSRTRKGNRWLRRALAEAAWAASKVKRSYFNAQFRRLAAKRGKKRALVAVGHSLLIVIYHVLKHNKEYRDLGPDYFDKLEPERLRRYLVKRLRSLGYDVALSPRNPDDRAA

SEQ ID NO: 468484 - protein, 476 aa, unidentified
MHPQTLPAFEPQGSLYDLQPVGATPKTTTANHQKKSMPTSTADLGAPGAPPSACFTDLPPGEYAALLGLDWGETSHALALAPRGVQAPAEELVIEHCAETLHGWLDQLGERFGHQPVAVALEASKGAVVAALLEHPWLVIYPIHPATSRRFSTAFTPSRAKDDGPDARILLELLQCHRARLRALVPQEPQTRRVALLAEARRKLVDRRTLLTNQLQSLLKNYYPQALQLTGDSLSCALSLDFLERWPELVVLQQSRPQTLRTFYYRHRVRREESILARLALQQSARPLSSDRALIEVSILQLRALLAEVRTLNSHLAKMEEAIAGAFAAHPDASFFRELPGAGKAMAPRLCVLFGADRRRWASAGELQKYYGIAPVIEKSGRQHRVHWRWNAPVFARQTLVEWAGLSVKACPWAKAYYLQQKQRQMGHSAILRSLAFKWLRVLWRCWMDGKPYDDALYLNTLKKRNAPLLAFLPTT

SEQ ID NO: 468485 - protein, 408 aa, unidentified
MKTLHKRCAGLDVHKAEVVACLRVITNRKVGREVRRFPTTTQGLLALAEWLENAGCTHVAMEATGVYWKPVWHILEGHFVLILANAAHVKNVPGRKSDVNDATWLGDLLAHGLIRSSFVPPPEIQELRDLTRTRRQLTREIVQHVQRIQAVLEEANIKLCSVITDIMGASGRRMLKAMIAGETDAEKLAALGHERLGCTRAELVEVLTGCVREHHRFLLGQHLRTIEQLEDSIAAFDARIEGALSPFHDIVERLKEVPGLGATATETVIAEIGTNMSPFPTAGHLLSWAGFVPRLDESAGKRRSTRIRKGAPWLKPVLVQAAWGAARKKNSYFQAQFLRLKARHGAKKAAIAVAASILTTVYHMLRDGTCYQDLGPEYFTRRNPAKAAARLANRIRNLGYHVEIRAAA

SEQ ID NO: 468486 - protein, 343 aa, unidentified
MNHYAAIDVSLELSSVCIVDATGKVVRETKVETRPEALVKFFRGFDLPLTRIGLEAGPLSHWLYAGLTDAGFETTLMETRHVKAALSAMTVKTDRRDARGMAHLLRMGWFRPVHAKSAGSQEVRALLVARKQLQHKLTDIELSIRGILRGFGLKVGKVTDKSFEVRIRKLITGHPMLEQIAEAMLVARATLLEQFNKLHKAVLNVVRKDEVCRRFMTTPGVGAMVAITYKSALDNPHRIKKSRNAGPLFGLTPKRYQSGETDVTGGISRVGDEMVRTALYEAANVLLTRVTRFSGLKHWGLQVAKRRGSKRAKVAVARKLAVILHRMWIDGSTFRWSKTKAAH

SEQ ID NO: 468487 - protein, 385 aa, unidentified
MPMPNDLSRSFTAFEQDSTLIAVIEMSLTSWLIAGILPGIERHPLKKLNVDEEGLLQLLHRWREEAINAGREISRIVLAFEAGRDGFWLARWLRARNIEAYVIHPNSVAVSREHRRAKTDRLDTELLKRAFLGWLRGESDHCSMAAIPTLEEEDARRPNRERENLLGERTRIVNRMKACLVRFGVRNFKPTLRKAPERLKTLRTPEGGPLPPNSFAELRRDMARLRFVMDQIREIEEARLQRLEHSPNEGLHPMVRLLARVIGVGIETADMLVHEILSRNLRDQRAVARYAGLTGSADESGKRRREKGLARAGNARVRRGMIQLAWRFLMFQKDSALVQWYRSVTNETRGARKIMIVALARKLLIALWRLVKTGEVPQGVAFRSA

SEQ ID NO: 468488 - protein, 430 aa, unidentified
MAGHRIARRLRLVAPTSVWIGIDLGQERHAVAVLSPDGCLLARFWMVNALTGFQQLVERARGFSGVCNGAPVVIGMEATNHYWETLVDFLDEHGLAWRLINPFTAKRHREGADLARTKHDRRDAMQLAEMLRIGYFTETKRLPPAYAALRRAFHEHVRLADARAQQQILIRHALEGVFPELRRACRAGVQSEAVRSVLRTGLTPRQIAALSEAEFVERVRAHFHGKRLFCGKLRALYSACQETVGSTLGSEAAMAEIRRCLATFDHLEAQLAEVDAELDAALVLIPTSRHLFTMPGLGRITVAGLLAEIGPIEWYTSGKQLVKLAGLHPGQHDSGRRTGTRGRLAKQGRVLLRRVAFMAALSCLVHNPLLRTRHHALTTRAARPLARMVALGAAMNKLLLWVFALLHQQRDWDPLHEWQPTRKEVVAQGS

SEQ ID NO: 468489 - protein, 423 aa, unidentified
MTKLSSTPAGAVLVAIDMAKNRQEVLIERPEGGRRRRLTVLATKADYDGLAEQLAAIGRPVVVGFEATGNYHRTLAYRLLTAGCELRLISSVALARTREALHNGWDKNDPKDAQVILHMLRIGATQRYVDPLAAGINDLQELSKTHETISRIKTQTWHRILTHYLPLYFPEIARFAGNSRSDWFLALIERFPTPASITALEREAFSAAAWPLIGRKVSKARLINDIYETACASTALPVPEDSAAVTMFRMVVAQGRSLIRQRDEIERLAHARLADDVDYRLLRNIPGIGPINALTILAEAGDLRRFGHHRQFLKFCGLDLATCQSGTFRGRTKLSKYGNARLRRTFWMAAQVAARQRDNSFRDKLGRYVAGHADDADRRRKAMTALTAKMARVAHAVIKTGTEYRPFLERPDARWKDPSLQVP

SEQ ID NO: 468490 - protein, 343 aa, unidentified
MKIVGCDFHPSFQQVAILDTSTGEVGELKLRHGGGEAERFYRELEAPVLIGMESVGNTLWFERLMEQLGHELWIGDASQIRASYVRRQKTDRRDAGHILRLLVEKRFPRIWVPSSQERDQRQLLLHRHRLVQMRTRVKTELQHLAMNQGMQQKRALWSVRGRADFAKLPLEGWTGRRRADLLKVLAMLEEQVASLDEAVSQVAFSNARARLLMTQPGVGPITALAFVVTIGDVARFQRGKQVASYLGLIPSERSSGQKRRLGAISKQGNVFLRTMLVEAAQSAVRHDEQFRKEYVHRCHQKPTGVAKVAAARKLAVRLYWMLRTRTPYRPVPNEGSPSHSLVG

SEQ ID NO: 468491 - protein, 356 aa, unidentified
MSEKLNSKIAVIGIDIGKNSFHIVGQDRRGALVLRQKWSRGQVEARLANLPPCLIGMEACTGAHHLSRKLQALGHDARLMPAKYVRPYCKGDKNDYRDAEAIAEAVQRPTMKFVATKTADQLDLQALHRVRERLVSQRTGIINQIRAFLLERGIAVRQGLRFLRAEFPDILAKRTDVLSPRMLRIIEDLSGDWRRLDERIEGLSSEIEALARQDQGCARLMSVPGIGPLISSAIVAAIGTGDPFSKGRDFGAWLGLVPKQMSTGDRTILGNISRRGNRYLRTLFVQAAWVVLVKVGPKQWERYGLKSWIEAAKKRLHHNVLAIALANKLARIAWAVLHNGRTFEYVKTNATASRSA

SEQ ID NO: 468492 - protein, 318 aa, unidentified
MSEKNNEVEFLVMGVDVSKDTLDVCIVPDFERMQVSNDAEGHVLIIEKVRKLGVKLIVLEATGGYEMALVLVLSEKELPVTVINPRRIRKFADAIGITAKTDAIDAKVIAEFGRMVRPEIRSLPPADIRLFSQLVARRRQLQEMHGMEQNRLACSIGEVRCTLEKHLRFLERGLEKIEKQINDEIKRTPLWKQKSDNLDAVKGVGPVLVSTFLAELPELGTLNKKQIAALVGVAPYNHDSGKYRGKRAIYGGRVVVRNVLYMSTLSACRWNPVIKSFYERLKAAGKPEKVAIVACMRKLLVILNSMAKTNSPWRPVIA

SEQ ID NO: 468493 - protein, 312 aa, unidentified
MTTPCYVGIDVAKAQLDVAVLPAGTSWRISNDAAGITALVAQLGEHRPTLIVLEATGGHETAVGSALVVAGWAVAVVNPRQVRDFARALGQLAKTDAIDARLLAEFAERVRPHPRPVPSEAQAELLALVTRRQQLLGMLTAERNRVATARPAWLASLRAHIAWLEQQVREVDRETGVRLRQSPAWRTRDRLLRSVPGVGAQTARRLIASVPELGAIPPRPLAKLIGVAPLNCDSGQFRGRRAIWGGRTTVRGALYMAALSASRCNPVLRVFYQRLLAAGKPPKVALTAVMHKLLHILNAVVRDHTPWAPRPA

SEQ ID NO: 468494 - protein, 415 aa, unidentified
MIPAILECCAGIDVGKKFVMVCVLKGPANGEAQSQIRRFGTTNEELNRLREWVKSCGCTHVVMESTGEYWRPIFNVLEEEESLQVILANSKQVKALRGHKTDPEDAHWLAYLLRHGLIRPSFIPPKPIRELRDLTRRRRQLVRTGAQERNRVQKVLEGANIKLGNVLSDVFGLSGQLMLEALMEGKANAEQIAQLAQKSAKKKIPQIRAALEGHRMSDIHRELISLSLNHMAFLEEQITELDGRIAEHIRASGLEREQQILQTVPGIKQEAASSLLAELGPDMKVFGNAEHCSSWSGVAPGNNITGGKRKRAPAMHGNPWARSLLTECAWSASRKNGSEFQRQYELKKVRLGHKRAIVAVAHSLAIAVFEVLRTGQPYTKPGANPMPDTKAAKLIRHHSRRIKTLRKRLTHQTKT

SEQ ID NO: 468495 - protein, 350 aa, unidentified
MKYYKSTTEYNCGIDLHSRQMYVCVMDKEGNKLLHTNIKGNDFDYFLKRIEPYKQDLTVVCESTFNWYWLADACNDAKLKFVLAHALYLKHIHGGKNKNDRIDSEKLAHLLRANLIPPAYVYPRKYRPMRALLRQRMKYVWARASLIGHLTMDQHAEGAVPVSTSSNRDDWEQRILEQYTDPLHRLAVESDMELIRSYDKLVKRLENELEQRAKKFFRRNYILLTTVPGIGKIMALTILLEIDTIERFPTVKDFTSYSRLVKGSVASAGKVKGLTGGKMGNAYLRWAFGQIAILAKQHDPLINSYAERLVSKHGKFKGNAILSNKIARAVYFMLHNKTVFDVEQLIATSI

SEQ ID NO: 468496 - protein, 427 aa, unidentified
MKYTQNEKIMQITEETLVVGVDIASEIHYARAFNNRGIEVGKLIRFTNSEEGFIVFATWAEELKVKYNKKQVIVGMEPTGHYWFNFAQHLKDHSIKIVLVNPFHVKRSKELDDNNPTKNDRKDPKTIAMLVKDGRYMVPYIPEGIYSELRTAMETRWQIVKQLNTIRNRVKRWISIYFPEFNTVFGDWEGKAALIALKEFPTPARVVEKGVEGIVSYWKKEKIRAVGKRRAVELIEAAKKSIGIREGLTAANNELLTLLEDYEMKIKQYERIMALIEQLTLQIPGMEEILKIKGVGLTTAAGFIAEVGNISRFEHPKQIQKLAGLSLKENSSGKHKGKTTISKRGRRRLRALLFQGIMPIVATNEEFRELHRYYTTRDKNPLKKKQSLILLCCKLIRIFYALLTKRTAYDPQKMMSDIKRPILQEVA

SEQ ID NO: 468497 - protein, 391 aa, unidentified
MAVPNDPGRCLTTLEPEGALIAVIEMSQSTWLVAAIVPGLERHPLKKLAVDEVGLLRQLERWREEAGKAGRKVTRMAVAFEAGRDGCWLARWLRARGVEAHVVHPTSVAVSREHRRVKTDRLDTGLLKRAFLGWLRGERNHCSMAAIPTLEEEDARRPNREREALVAERTRVISRIRGCLARLGIRAFKPTLRRAPERLAGLRTPEGDALPPNTLAELRRDMARLRLVSDQIKEVEAARSARLETAPAEGWNAMVRLLARVIGVGVETADMLVHEILSRGLRDRRAVARYAGLTGAPDESGARRREKGLAKAGNARVRRGMIQLAWRFLIFQRRSALAQWYRARTAGARPGTRKTLIVALARKLLLALWRFVTTGQPPAGIALRPAPMAAG

SEQ ID NO: 468498 - protein, 370 aa, unidentified
MKKKVLHVGLDVDDKSFHIGAFCKKTGEIFEMTSKPNVGNLMRKLEKFTEQNFELRLCYEATYIGYSLCRDLNKRGFKTEIIASSMIPEVPSGRVKTDRLDALKLAKYYSNDLLTSIHIPNEEEEQDRDLLRARNFLVDQRKILRRHILSACRRNNMHYKVETGSKHHWTKKHENWLIDRVNKLSGAIRLNLEILLRQLEKISEGIAEYDKAIEELAESKKYKSKKDALNCFRGISTLTAMTLITEIGDVRRFKHPKQLTSYCGLDISEYSSGGKEKKFGITKMGNWRIRTSIIESCQRLDRVKPLSKRLKAHRTGQDAKVIDIADRCTKRLKKKSNNLLDAGKHRNKVKVACAREFLGFVWETLHHVAA

SEQ ID NO: 468499 - protein, 432 aa, unidentified
MTGYPVPLQDGVPVTWVAIDIAKDAHVVLVESGGARRQFRVANRLEELQALVVYLRQQPQPVRVAFEPTGVYHRVLAYQLVTAGVDVVLVASLACARYREARYTSWDKNDPKDASVILELLKQGLTMRYVDPLVAGWHDVQEIAKTYWHVTLARTRVQHSLLTHFLPLYWPEFARFWRTSRSAHFVQMLLAYPTPASIRAGSLDEFVTAAAAAVGRKVNKRAWLTEVYELAGRSAALPVAPASPAVATFRLRLQSFLDLTAQRAQLEQWADDVLGRHADYRLLQTIPGVGPVFALTILAEAGDLRRFAHHRQFLKFCGLDLAKNHSGTIRGPERLSKRGNARLRCTFWFAGRVAVRLRESSIRDKYERYTAADPRSPDRRRKAYTAIAAKMARITYAVIKTGRPYRSYYEHDIPGGSISFKRAVEARSPATS

SEQ ID NO: 468500 - protein, 437 aa, unidentified
MSQELPMLDPLAAFVDVGSEHMHVSVGGNKPEVFGTVTSQLHALRDWLIAQGVHSVAMEATGVYWLPLYGVLESAGLEVRMVNGRQTRNLPGRKTDMADSQWGATLHMHGLLHAGFVPPADIRRLQDYLRLRADHVAAAATCVQLMQKAFERMNIKLHDVISSLAGVSGLAVARAIVAGERSPEALVALCDVQIRRKKEQAVIEALRGTWADEHIFALAQALQSWDHYRKLIADCDERIATVLPPHDDTQPPLPRSTRQTGVNAPDIARLREILAQMCGGRDLTKLPALSSYGVLQLIGEVGTDLSAWPTEKHFTAWAGLAPGNHDSGKRRKGVRRGRNRTGRLFCMMAQSLVRSRDIALGGFYRRLAARRGGLVATKALARKLAAWFWRVMVKGEDYVEKGLARYEEQVRKTREQALKRLARELGRELVPLPGVSD

SEQ ID NO: 468501 - protein, 452 aa, unidentified
MLDKPQEIVDEEHEQVCERVAAIDVAKATGMVCVRVPDDARPGRRVSRVWEVQATTRAVIELGDHLACEGIEKVTLESTSDYWRIWFYLLEAAGLDVQLVNSRDVRNVPGRPKSDKLDGVRQAQLTERGMLRPSFVPPAEIRQLRDYTRLRTDLIQERTRHWSRLEKLLEDALIKVTAVASKIDTKSVRAMLEALIAGERSPRVLADLALGKMKARRAALIEALTGRFDDHHAELARMLLDQVDQLDRQAGRLTGRIEELIAAIPAARGVDAGGTAGPGAGAGPDAAVRSAVARPDEIDGIGPRGAQVVLAEIGLDMSRFATAGHLVSWAGLSPRTIQSGARSRGGRTGKGNPYLKGIPGGAAAAAAKTGTFLGERYRRLVKRIGKLKALVAVARSILVIIWHLLAGPTARYQDLGAGYYASRTGKDRKLNSHIRQIEAPGYTVTLMPAQAA

SEQ ID NO: 468502 - protein, 337 aa, unidentified
MTLYCAIDLHSTNNVPVVIDENDKILFQKRLPNDLATVHAALAPYQSELHGVAVESTFNWYWLVDGLIDHGYKPVLVNTSAVKQYEGIKHTNDHSDAFHLAHLMRLNILPTGYIYPKEERAVRDLMRKRLQLVRHRVTHMLSAQNQLWRSTGVNTTTKLIKQADCSLLNLVEDRHIKMAIKANLVIIQALNHQIDLLEKTVKQQAGLKPEFQSLLTMDGIGDVLGLTIALEIGDIRRFPRVGNFSSYCRCVDSSRVSNGKKKGDNNRKNGNKYLSWAFIEAAHSIIRHNKTAHRFYQRKRAQKNGALATKALAHKLARAAYYMIRDREPFKLDLLFR

SEQ ID NO: 468503 - protein, 447 aa, unidentified
MSKPQVIGDVEYEQVYQVVAAVDVAKKDGVVCVRRPDPSRPGRRQSAVETVPATVNAVTALGVRLAAAGVQVVTLEPASDYWRIWYYLLEAAGLDVQLVSATQVKQLAGRPKTGKLDAVWLARLTEKGLLRPSFVPPAEIRALRHYARARTRLTGDRTRCWQRLEKLLEDALIKVSSVVSKLTTLSARDMIAAMIAGERDPQVLAGLARKRMKAKHAALAEALTGMFTSHHAEIAQLLLDQIALADRQIARLDILISEQLASIEAAWGIDAGGDTGPGAGTGGGAVLPAVARLDEIPGVSAGLACSIIAETGLDMTRFPTAGHLVSWAGVCPRAHQSGPRTRHGKGQGNTYLRGYLGQAAAGAAGTATFLGERHARIARRRGGARAQVAIARSILVIIWHLLADPQARFADLGPGHYQAKTDTSRKARGHIRQLEALGYTVTITQAA

SEQ ID NO: 468504 - protein, 360 aa, unidentified
MGNERTFVGLDVHAWSVTGHALDAVTGEIWQRKLTPDPSDVLGWVSKLPGPVKVGYEAGPTGYGLYRFLNDHGVCCVVGAPSKLHRPHGDRVKTDARDAELLARLLKLEEFAEVSVPSLEQEAARDLVRAREDVRGDLMRARHRLSKMLLRQGIVYTGGQPWTRVHDRWLGAQRFDQPARQTAYEAAYEAVVLTTDRRDRLDAAITAMAADSSYTAVTRRLGCLRGISTLTGFALAVEIGDWHRFTGSTIGSFVGLVPSENSSGQSRSQGSITKTGNTHARRLLVEAAWHHARPYRTPGKTMRDRWEQAPAQARLRGHHGNQRLHQRWRAFTARKKKPVIANVAVARELAGWAWSLAVLD

SEQ ID NO: 468505 - protein, 366 aa, unidentified
MNNEYYTTIGMDVSDRTTKVCVMAKAGGARQIVEETTIPTTKDGLRAYLAGKSADWPVVFETGTHCRWMKREVESLGMKAIVANPAKLRMVTESNTKNDRNDAREIARIALADAELLHPVRLRGERCQQVMRILKARDMLVKVRTMHVNQLRGFAKSIGFRLPSCPANKVHALGKSGWPADFESVAWPLMDVLETVDLKIRAYESRIRALAGSPELKEKVERVREVYGIGLLSGCAIVASIDADPSRFRKARDAGAYFGLVPRQRQSGDVDEQCHITKAGSALVRRLMIEAAQMVLRSSSRDTDAKLKGVRMCARGGRIAKKKALVAVARCLVVTAVALLKKPAAEYVPLSEAARREFEAMRTAVA

SEQ ID NO: 468506 - protein, 329 aa, unidentified
MSEIIRIGMDTSKHIFQLHGVDASERVALRKRLGRNAMLAFFAKLPPTVVVIEACGAAHYLARELGKLGHTAKLIAPQLVKPYVPRNKNDGRDAEGLCEAASRPRMRYVPVKTAKQQAALMLLATRDQLVARRTQLDKLAPLLAAIEQDESVPVLARELFAMLARQYAQVQVELKAIEAKLLAWHRADDLSRRLAQIPGVGPVTAAALVMKAPDPHAFRSGRLFAAWLGLTPKDHSTAGKTRLGKITRAGDERLRQLLVVGATAVVKQAKARGRGPRWLTELLKRKPPKLAAVALANKMARIAWKLMTTGESYDSARIEVRIDAQAAAA

SEQ ID NO: 468507 - protein, 338 aa, unidentified
MKTYAGIDLHSSNNYIGIIDENDKRLYQKRLPNQLTYIKQALEPFKESLQAVVVESTYNWYWMVDGLKEDGYKLHLANPSAIKQYEGLKHTDDKWDSFWLAHMKRLNILPEGYIYPKEERPVRDILRRRLLFVKHRTSHILSLQSMITRNLGYKISGNDIKKLNDSDADKLFNEPFLVLAAKNNISTIQFLGKIIKGIERPVKSNVKLKPKFEYLLTTPGIGNILGLTIMLEVGDISRFPTVGDYSSYCRCVKSERLSNNKKKGKGNRKNGNKYLSWAYVEAANFAIRSYPECQRFYQRKKATTNGIVAIKALSNKLARASYYVMRDQVAYDEKQLFR

SEQ ID NO: 468508 - protein, 388 aa, unidentified
MFQTIDQSKKCLNAFEQDSTLVAVVELSQKSWLVAGIVPGVDRHPLKKFDADENRLLALIQRWKQEAIKAGREIKRIVVAFEAGRDGFWLARWLQARGIEAYVIHSTSVSVPREHRRAKTDRLDTELLKRATLGWLRGEPDHCRMVAIPTLEEEDAKRSNREHQYLVGERTRLINRLKAALARLGVRNFNPKLRKASERLRALVTPEGMPLPPNTLAEMERDMQRLQFVRQQIKAIEQTRFERIKKAPKTRLNMMVLLVARVLGMGIETADMLVHEVLSRDLRDRRAVARYAGLTGAPDESGARRREKGLARAGNARVRRGMIEFAWRFVRFQKDSTLSQWFRARTADARGPTRKTMIVALARKLLIALWRLVTTGEIPTSLTLRPVA

SEQ ID NO: 468509 - protein, 342 aa, unidentified
MSEIITVGLDLAKNVFQAHVADASGKAVLRKRLRRDQVLAFFGQLQPCVVAMEACGGSHFWGREIGKLGHEVRLIPPAYVKPFVKRQKNDAADAEAICEAAQRPTMRFVPVKSEGAQGAAMVFRIRELLIRQRTQAINALRGHLAEFGQIVPQGAANAAKLIALVEDPDSGLPADAIATLQVLVGALTHLETEIGKLDAEIARRAKENEIARRLMTVPGIGPLIATAIAVLAPPPGTFRKARDFAAWLGLTPRQHSTGGKQRLGATTRMGERSLRRLLIIGANSVIIKRHVHAAARPGTWLGGMLTRKPPMLVRVALANKMARIVWALMARGGVYQSPAAAA

SEQ ID NO: 468510 - protein, 366 aa, unidentified
MKKPSTTALRRIRKLQDGQLTIGLDLGDRSSFYCVLNSAGEVILEERVATNPEAMKKTFEKMPSSRIALETGTHSPWVSRLLTELGHEAIVAHSRNVRLIGESRRKDDRLDAQALARLARIDPQLLSPIQHRSAQAQADLAVIRARYALVRARTALVCAARGLTKAFGERIRGRNPKGFGSATAEALSPQLQVALAPMLSALEAITTRIREYDALIEKLAEESYPEVALLKQVKGVGTLIALTYILTLEDPRRFRKSRDAGCYVGLQPGRRNSGQSEPQMHITREGDSYLRMVLVQGAQHILGPFGEDSDLRRWGLKLAERGGKRGKRRAIIAVARKLAVLLHHLWISCEEYEPLHNTRKRRLIAA

SEQ ID NO: 468511 - protein, 472 aa, unidentified
MRSAKMCKVSRRGVAAGRAEGKSLCARLAPSSGAQGSNGIQRRKRRPRMDKQENEFRLRGTGNRVVEGGRLMRFAGIDVGSERHMLAMVGEEGEVLCRSSPFGEDASGYARLFELLGPPEGCLLALEATGHYWRNLFVALLAKGYAVAVLNPLRTRRFAEEELQRTKTDAIDALGIARFAAQKRPSAAQLPDVATEELRELARLRARLQEDFASRLRQLHRAVDLGFPEFTRHVHTLESPLAAAILSRYPTAASFHGVSVKKLARIVYDGSHKIGEELARALIDEAANSVGSHHSEPYRLRIRYLCEDLDVLRRRLKDLARDIERKLDDHEVGKLLTTIDGVGPLTAACLIAELGDPARFRSAGAIASYVGVVPRLRQSGKKRFSGSPTIPFGNARLRKALWMVVLNAVRCNPWLRQYYERLRAAGKPGKVAVIAAMRKLLTAVWSVATHRKPFVPHLPRVPAPLGAVTNKA

SEQ ID NO: 468512 - protein, 343 aa, unidentified
MQEYIAFDSHKHYTLAEREEVATGRVAQCRIEHHRGSLREYLSRCAPGTPVAVEATANWYWIVQEIEEAGQQPRLVHPRKAKLMMGMINKTDKLDVHGLNRLQRNGTLPTVWIPPAALRDLRELTRVRMLLAGQRTRLKNRITATLSKYGLIVEGYSDPYGKRAREALYRQIEQLPPQTRYATGMLLEQLDFIEGQIADQERRLQELLKVTPDMALVDTLPGVGTILAAVIVLEIGDVRRFASAERLCSYAGTTPRVHASGDKVRYGRLRPDVNRYLRWAFVEAGNSVAVNYRRCPERHVSQLYRRLRDRRGHSKAIGAVARHLAEACFHVLNRKEPYRDPSV

SEQ ID NO: 468513 - protein, 311 aa, unidentified
MTEHTTVGIDIAKETFDVFISPDGIFLHLENTPQGHQLLLDALSSRAFARIVMEATGRYHNLLAATLELAGLPVAVVNPAQVKHFARALGTLFKTDPNDARIICEFGRRMTPDVRPAPDEQTQRLAMMVSRRRQLVDNRTMEQNRYGSCTDELIRTGIKRHIDWLNAEIKDTDDDIDQQIKVMPLWQEKVKLLEEVKGIGRTTLAVLLSMLPELGQLNRRKISALVGVCPYAHDSGKMKGKRCIWGGRSAVRAALYMAAMSAVRYNPTIQAFFEKLRSKGKAFKVAMTACVRKLVTILNAMVRDNKKWAAA

SEQ ID NO: 468514 - protein, 424 aa, unidentified
MKVTYQTCCGVDVHKSFLVATIVKTTGGIEPSYQKKRFSTFNNSILEFKQWLLDNDCHDVCMESTGKYWVPVFNLLEDEINVVIANPKWVKAVKGNKDDTKDSKWIGDLFRLGLVKGSYIPCKIVRILREYTRYRCKLVSCRSSEKNRYQNALTVCNVALDSVVSDIFGKSSTSIIDYLLEQSGTSINHEEIASKLLRSLKSKEDAVIESVEGYQMTDAQKYRMRLVRAHMDYITAEIKDVDKMIENMISSNPDFENAVQFLCTIPGVKCDSAITIISEIGTDMSQFSSSKRLCCWAGLTPGSNESAGKKKSVRITRAGVYLKPALVQCAHAAVKSDQSPYYKKKYESLVKRRGKKRAIIAIARMILTAIYQMLSTGEQWNPSDLYKIDVPEALIEKQKAKAIKQAKKLLQREGLLPPDEPVAS

SEQ ID NO: 468515 - protein, 319 aa, unidentified
MGNNDMSKSLYFIGIDVSKDHLDVAIRPTHQQMQFGNDDEGVDKVIEALNPVSPTLIVLEATGSYHRLVLSRLLAAGLPAIAINPRQARDFARAIGRLAKSDTIDADILAAFGEKIRPELRAVADEATTQLEALCTRRRQLVGMLTAEKNRFHSSPASMRPLIKKHIQWLENNIAELEKDLDDQIRSSPAWRDKDDLLRSCKGIGPTTSHTMLACLPELGQLNRHQIAALVGVAPFNRDTGLYRGRRHIYAGRTDVRCVLYMATLAAIRYNAAIRRFHQRLIAAGKLKKVAITACMRKLLTILNAMLRSNTPWNVDFVG

SEQ ID NO: 468516 - protein, 338 aa, unidentified
MKLYAGIDLHSSNCYIGIIDEQLEKVFGKRVKNDLLIIIDCLAPYKKDLEGVVVESTYNWYWLVDGLQEQGYTVHLANPAAIKQYEGIKYSDDKWDALWLAHLLKLDILPQGYIYPKETRPMRDLLRRRMLFVRQRTADILSFQSMITRNTGARISVNNIKKLTEENLEMLFSHQDLLFMAQRYLGIIGFFSQQIKMIEKKALDKIGLTDRFKWLSTINGVGKILAMVIMMEVGDIGRFKKVGNYCSYCRCVKSERISNGKKKGAGNKKNGNKYLSWAYVEAANFCIRHNPQAEKFYQRKKAKSNGIVAIKALSNKLARASYYMMRDQVPFDSQMLFA

SEQ ID NO: 468517 - protein, 345 aa, unidentified
MEIRTIGVDLGKTVFHFVAVNARGEVVVRRKGSRTQLLRFTANLPQCLIGMEACGGSHFLGRALREQGHDVRLMPAQYVKPYVKTNKNDYIDAEACSEAVTRPTMRFVPIKTDDQLDLQSLHRVRERWVVRRTAVINQMRGMLLERGITIRKGRHYIEESLPSILEDADNKLSGALRVLLTQLRMEMQYLHGQIEETDKLIARICGELEQCRRLVAIPGIGPITATATVAAIGNGAAFKKGRGFSAWLGVVPGEHSTGGKQKLTGTSRRGNKYLRKLFVQGAHTVLLQKTKQSSGLSMWLVNLTARKRPQVATVALANKMARMAWVLLAKGEAYRPPTAPQVIAA

SEQ ID NO: 468518 - protein, 430 aa, unidentified
MRNGTSRKLEEITVNTLIVGVDVAKYTQWARFVDYRGIEVGKTISFKNDRKGFETIVAEIKNIINSKIHKQRFDKVIVGMEPTGHYWKTLANYLIKLGYRVVGVNPYHTKKSKELDDNSPTKCDKKDAITIARLVKDGRFFDPYMPQDIYAELRVLTNTRISILKRNDALKNTITAVLDEYFPEIWTVFKNPLTGKASRQILKSCPFPSLILSRGESGVLEEIKKAVKKTVGLKKVKQLIETAKVSIGVEYGLKAAKLRLGLLLAELDLIELQLAEIETVMEQMLETTGYADKLLSVKGIGIITATMFLGEVGDPLRFTNARQISNYAGYNLVEDSSGTNKSGTCISKRGRKQLRSILYQMAFTMVGQNDEMKELYRHLINRENNPLKKKQALVVISKKIITILYSLLKKQEVYKPQLVFGAVRKEQMAA

SEQ ID NO: 468519 - protein, 433 aa, unidentified
MQDVEDEPLFAERVAGIDIAKAGIEVAVRVPSDTTAGRRQQETRSFRTTRKELLALADWLRSWGVTKVGMESTGDYWKPVYFLLEQQDLDCVLYHAAQVKALPGRPKTDKQDAVWIAKITERGSLPSSFVPPEDIRRLRTRTRYRRTVTQARTAEMQRVEKLLEDAHLKLSSVISDIHGVSGRAMLEAIIAGERNPVRLAQLARGRMRGKIRQLEEALDCSFLTGEHIFILTMMLAAIDGHTARISELTARIEQLTEPYWHQIDQLDAVHGTGIITAQDVIAEIGVDMTVFPTAAHLVSWAKWCPQVARSGGKRKGSNATGRGNRYLSGALGEASMGAGRTDSFPGAKYRRLNKRMPKRKALVATGNSILTIYHALLSDLAASYHDLGPGYYDQRAGTRRQARNHLKSLERLGYKVTIEPLTPDTDPALPATG

SEQ ID NO: 468520 - protein, 479 aa, unidentified
MTPHKDFCLDPGPPTPPPMVPPSPALSDALQICHPHAAGIDIGEAEHWVAVPPGCDPQPVRRFGTFTADLDALADWLIDCGVTTVAMESTGVYWIPLFELLEARGVQVLLIDPRQAKRAPGRPKTDRLDCKWLQRLHTYGLLAGAFRPEAHVCVLRGYLRHRQMLLTYAAHHVQHMQKALEQMHLKLTQVVSDITGVTGMAILKAIIAGERDPQHLAKLRNPHCHHTEDDIAKALQGTWRAEHLFALRQAVELYAFYHQQITQCDQQIKAHLETFADKSAGRPLPPKARRSKKTNEPRFEARTPLYRMAGVDLTTIEGIEEGTALVILSEIGTDMHRWPSVKHFCSWLGLCPQHKISGGKVLSRRVRPGAHRVAVALRLAARTVQHARTALGAFYRRMRSRLGAPKAITATAHKLARLVYSLLKHGSAYVQQGLDAYESQYRERKVKAMARQAQALGYTLVALGTPEVPHFNALAAPTP

SEQ ID NO: 468521 - protein, 341 aa, unidentified
MDKELYIGVDVSKKTLDLAYYDGETIDWKNAHIKVSNDTSGFKEVASWLAKIANRFDNLLFCMEHTGLYCQDFRMWLESHQYIYGMVDPRKMHRFEPDLDAGQRSLDRVKSDELDAFRIAIYCEQNHKKILRSPSRLPPAIYFKLKRLYAERKQDSKQSVLYKHQLHDTCAYDTESSMERKRLLLGSLKESIKAVDEEIACCLDEEASIRKNYDLLLSIPGIGHVVALETIILTENFTAITNPRKYACYIGIAPFPKESGTSVRKRTSVSCKGFSKAKADLSISAVSAITHSPTLREYWQRKRKEKCGSIVLNAVKFKLVLRMFAVIKRGTPYVETDAYKN

SEQ ID NO: 468522 - protein, 321 aa, unidentified
MTKEAVYVGVDVAKNSLDVAVSNSEEVRQFTNGHEGITNAVQYIAGLKPAGVIIEATGHLEMPLSAALQADRLPVAVINPRQVRDFARATGTLAKTDTIDARMLALFGTRVQPEIRPLPDEKTREMRNLLTRRRQLIEMLTAEHNRLFHSGDDVRPSIETHIKWLDEALSDINDDLDCRIRLSPSWFEKDNLLKSVPGVGKVVSSSLLIELPELGLLNRRKIAALVGVAPFNRDSGTMRGRRTVWGGRAKLRAVLYMAALVASRRNSIIAAFYQRLLEAGKAKKVALVACMRKLVTILNAMMRTMTAWRPEIILNHISVEV

SEQ ID NO: 468523 - protein, 314 aa, unidentified
MYHYIGIDVSKKVLNVFDGKKDSIFDNKENLSSLKKYLKKRYPDFSSLVILFEATGIYSFHLKAFCASHHIKAYMINPQISHNFSKSLGKRSKTDTTDARTIWEYHKLIDEKDISIPRVDREIITLSSYLTSYRLALKQRLALANHLEGIKDKTLYRLLKKEQERLQKLEQELLIRMDIYIKQYPKLEEDYQRLLSISGIGKKTAIGLLVLFHTYTETNRNQITALIGLDPIQRQSGTSVKGRSRISKHGNQMMRKSLYMPTLCCIKHNHKIKIFYERLVSKHKPKKVAVIAAMRKLLLIAHAIYRNKTVYVPG

SEQ ID NO: 468524 - protein, 346 aa, unidentified
MKITTIGIDLAKTVFQVHGVDERGKVLLRKQLRRKDVAVFFANLEPCLIGMEACGSAHYWGRTLSVLGHTVRLIAPQFVKPYVKTNKSDRNDAEAICEAVGRPSMRFVPIKSAEMQAVLALHRARQGFVKARTAQANQVRGLLSEFGIVIAKGIGHIGKRLPEILEDGENVLPAMMRQLLRRLGENLKEMDDQVSQLERQIKLWHRDNEQSSELEAIAGIGPITASAFVATVGDVKSFKNARQVPAWLGIVPRHKGTGGKAMLGGISKRGDAYLRTMLIHGARSVVAQLERKPDVSDGWLQRLVARRNKNIAAVALAAKNARIAWAVLAHERSYERDYVARRAATA

SEQ ID NO: 468525 - protein, 382 aa, unidentified
MKVSYQTCCGVDVHKSFLVATIVKNTGGIEPSYQKKRFSTFNNSILEFKQWLLDNDCHDVCMESTGKYWVPVFNLLEDDINVVIANPKWVKAVKGNKDDTKDSKWIGDLFRLGLVRGSYVPCKKIRILREYTRYRYKLISCRSSEKNRYQNALTVCNVALDSVVSDIFGKSSTSIIDYLLEQSGTSINHEEIASKLLRSLKSKEDAVIESVEGYQMTDAQKYRMRLVRAHMDYITAEIGTDMSQFSSSKRLCCWAGLTPGSNESAGKKKSVRITRAGVYLKPALVQCAHAAVKSDKSPYYKKKYDSLVKRRGKKRAIIAIARMILTAIYQMMSTGEQWNPSDLYKIDMPVALVEKQKAKAIKQAKKLLQREGLLPPDEPLAS

SEQ ID NO: 468526 - protein, 345 aa, unidentified
MDNHTQYSGFAGVDLAKKVMQIHFVTGDGEITDKQVKRAEFLDFFRNRTKCLIGMEACGASQDWARTLEAMGHEVHLMSPKAVKPFVSGQKNDYNDAIGIYKAMFNGVRRVPVKSTEIRDLQTLRRIRSQVTKDKVKEINHVRGLLAEYGIVMGKSITAFNKGISSALESLKERGDVSPLVAEELQTTVESIKTKIERQKRLDREIEQLLARGCKNYENFLKTPGVGLFTAAMLCVLLCDPAIFANGRQFAAYIGLAPRSRGSGGKNFIIGIPSKFNCDSESRAVFVECAQALARYKNKSPWVDGILRRKPKKVAVIAIANKLARQVWAMANKGESFKQMTILTA

SEQ ID NO: 468527 - protein, 419 aa, unidentified
MTRKEDSRIIRIVHPICCGLDVHKESISACIIFPDGNGEEQYEVKVFGTFTDDLMRLREWLAGHDCPVVAMESTGVYWRPVHNVLEDSVQVILANARDMHNVSGRKTDIGDSRWIAGLLRHGLLKGSFIPSKDVRQWRDLTRLRKKYVHTVGDYRKRTHKLFESANIKIDSVVSDLFGVTGRNLMELLVADRNALTLSDIRGCVCGKLKGKEAELFRSIQGFFTDHHRFLLKMILETIATLEVQIKALDHEIRRAMKEQKALLDRMKKAAGIADVSSREILAEIGPTLDSFPKDTSLVSWSGLCPGNNESAGKRKSGRSPVRKHHLKTIMIEVAWAAIKKKGSYFKDKYYRLKARRGAKKAIVAIAHRILLGIYHVIKDGADFRDLGEDYLTLRNKSQKVSHLRKQALALGFDLVPQAV

SEQ ID NO: 468528 - protein, 358 aa, unidentified
MNEITRVGVDLAKQVIQVHAVDAAGKLVTNKALQRDKFMHWCALLPARCLIAMEASSSAHHWARKLVALGLDARIMAAHLVAPYRLQGKSGKNDANDAAAICEAASRPTMRFVAIKTVAQQGMLCVHRLREGLKEERTACVNRIRGLLAEFGLVFAQSPKVLRENLSSVIEDASNELPGLARLVIERAHSQWAELDAHIEWCDARIAAHIKQDEHAKQAMALMGVGPVTASAVVATVGDFKQFKDGAQFGAWLGLTPKQNSSGGKNNLGAITKRGDMYVRMLLIQGARAAVLTAHRRDDPISKWAHQLREKSGWQKAVVALANKNARILWAMFARGKPFDAMHVSVKPAGLAQAMTTI

SEQ ID NO: 468529 - protein, 334 aa, unidentified
MKKRYFMGMDVAKATFDFCLLSGSGACLWRGQFSNDARGIERFFHQLRAHGWKFQQIHFALEATGVYGQKLIAALHQAGLAVSVLNPAQVKYFALSVLRRTKNDTVGAEIIARFCRERKPLATRALRSIETQLKLLVRERESRVVEQTRERNRAKKDPYQIELPKLIRRQRQQRLKQLQKEIAQLDAQIDSLITSDELLRTQRQLLCSIPAIAKLTAAKLLSELAGKEFQSARQLGAYAGLTPAECRSGYSLYGKTRISKIGNAFLRKALYMPAAVARRWCKPLQPWIAILENRKLHDLAIRGAIMRKLLHIAFGVLKHQQPFNPMLASIPKTV

SEQ ID NO: 468530 - protein, 422 aa, unidentified
MISDRPVIGIDVAKDFCFYAAASPSGTPFLKPFKALNTKQGLLSALGQIKKVEETFSSKPVISLESTGHYSARIVHFFIKQGFEVYLINPLISHSIKNSVVRKVKTDSVDAFELAKLLFLQDFHTTYIPSDAFANLKILTRTRFQLANQRTTLLNQLVAAIEQIAPLFPKVLNPASLTALTLLTTFTAPSEWLKEVNQQAILSMLETLPRKGKNYGEKKYEALLDCARDAEVTGIDLMANVTTVQVYANGVLFMDHQLKALDNQIDEVAKQLPEFILLKSIPGIGAILASLILGEIGDINRFTNAKQLVAYCGMDPSVRQSGNYVGTKNRVTKRGSPFLRRSLYIVATTAIRKNAKGTLVNSVIYDYYQKKTQTKTRKQSLGAVMNKLLRIIFSVLKNKQAFHVITSDEQVLLYQNKRKNAA

SEQ ID NO: 468531 - protein, 349 aa, unidentified
MILIGCDFHTRFQQIAMLDSETGEIEERRLEHPEEAGMFYGGLGGPVRVGMEATGATPWFERMLREYGHELWVGDAAKIRAAVVRKQKTDSRDALHILDLLVTERFPRIWVPSVPERDARQLLRHRVKLVGFRTSVRNQLHALAMGEGVCRRKKLWSRAGRNELEGLALGPWSSRRREDLLGMLDRLNAGIEELDQAVKREAESRAEAVLLMKQPGVGPVTALAFVLTMGPVERFSKSKQLVSYLGLNPRESSSGGKQRLGAISKQGNSMMRYLLNEAAQTASKFDPELRRDYQRLQFRRGKAVAKIAIARKLAVRLYWMLREAAESAPPARMQGSPARALVEETLSEK

SEQ ID NO: 468532 - protein, 343 aa, unidentified
MKIIRVGVDLAKNVFQVHGVDRNEKPVWRRKLNREEWLKVLLEKIEPGCEIGMEACGGAHHWARKLQSQGYRVKLIAPQFVKPYVKSNKNDANDAEAICEAMSRSNMRFVSVKTVEQQDIQAVHRIRAGLMEQRIAKANQIRGLVCEYGLVAPKQISHLRAAIPEWLEDAENGLTSRFRKLLNGVWVDLLSLDQRVKELDQEITAIAAADPVAKRLQQLRGVGPMIATALLATVGDASQFANGRQMAASLGLTPMQNSSGGKEKLLGISKRGDAYVRCLLIHGARSMINASKGKDDRLSLWVMRIANTRHPNVAAVAMANKTARIAWAVIRREGDYQPQLAAG

SEQ ID NO: 468533 - protein, 341 aa, unidentified
MEDYIGLDVSMKETAVSIRREGKRVWRGRCASDPKVIAELVRKRAPAAKRVVFETGPLSVWFYHALRAEGLPAICIDGRHAKAALDMAANKTDANDADGLAHLAEVGFFREVRVKGFDSMLTRTLVAARTRLVRITTELSNQIRGLMKTFGLLVPAGKGSTFERNVRNLLVDQDGLTPIVLPMLEAWRSMRVRAAELGRQLVAGARQSRACQILVSIPGVGAITATSFVTAIEEPDNFKKSRSVGAWLGLTTRRYQSGEVDYDGHISRRGDRHLRGLLYEAATVILTRSCADSSLRTWGLKLRERIGFKRAAVAVARKLAVTMHAMLKTGEFFDRTAGATA

SEQ ID NO: 468534 - protein, 425 aa, unidentified
MSDDVMIAVDPHKASNTAAVLDPVTKTVIEVARFANSVDGYSRLAGFAARWEQRRWAVEGCHGAGRFLAQRLVADGELVLDVPAKLAARVRVYSRGHGRKTDRHDAVSVGLAALDGTGITMVTGDDALVSLRLLCDRREELAAQRTQAVCRLHRLLAELTPGGMRRELSANKAQALLARIRPANDVGRVRVHIARDHLADIRALDARLKFIAAQIAALVTASGTGLTGLYGIGPVIAGRILAEVGDVARFATKDAFASYNGTAPIDVSSGDQIRHRLSRAGNRRINHALHMMAVTQIRNPDTPGRLYYERKRLEGKTGNEALRCLKRRLSDLVYYQLIADRHGTIGTCGSPTTPPPTRSTSISPATRSREAGPPSRPPHRPAPKGSSRSTGKTTASSESRSSTPAPASTTTSSKRPKSIVKTAAS

SEQ ID NO: 468535 - protein, 428 aa, unidentified
MIANSAAAPRGTFVAIDVAKLVHEVLVEPPTGRRQRWRVGNCLPDFVALRDRLHAFQPPVLIGFEATGNYHRPLAYYLGQCGFELRLLSSLAVARTRDALYNSWDKNDPKDTHVLLHLLKTGVTQRYHDPLVHAMNDLQELAQTHYQVSLRKVQVQHSIMTHYLPLYFPEAERSYTNSRAQWFTQLLHRFPCPTAITRYSQDAFEQEAWTVVGRTVNKHGFLADLYATASQSIGLAVAEDSEAIQMFRVMLAEHQHLCATRAAIEQQADQALRAHPDYQRLRTLPGVGPILALTILAEAGDLRRFPHHRQFLKFCGFDLSTQQSGQFRGTSRLSKHGNARLRYAFWMAANGAVRMRQNTFREKYARYIKSDPQNPDRKRKALCAVAAKVARVAHGLIKTGTDYRPYFEALPPSGVLRSRGPSRQVLTS

SEQ ID NO: 468536 - protein, 412 aa, unidentified
MNVRVEKACGIDVHKSFLVATILNCEGIKETKEFNTGLEDLINLREWIIARHCQRVAMESTGIYWTPLYTCLEGKVETIVANPRHIKNIPGRKTDYLDSEWIAELCLNGQIKPSYIPSKGIRELRDLTRTRTKTIQTMTAFKNRVHKVLEKANIRISSVLSEIFGIAGLQILNGILNKKNIDDVLKDVKRIGKKKTAIKESVRGELSQTDIWLIQECLEIIDFLKKKINLLDSLINQQIKKEQKQNQMEILMTIPGISYTSASAILAEIGDIDVFPCPKNLVGWSGLAPSLNESAGKSSNGHITKKGSKYLRRMLVQCAHVIARCRPNKLRFFFQRILMRKGKKIAIVALARKLLSIIHHLLKNNENYIEDELKPKKNRLPKFQSIYELSLDEMIDIISKAGFTVEEITSNG

SEQ ID NO: 468537 - protein, 374 aa, unidentified
MHAAFLTPTKFPEEVIEKEMTKYIGIDVGKKRCYACVTNETGSVLDEFSFQNNLDGINELIKTIHPTSDNQCNAVLESTANMWIRAYHALEDRGIAVKLANPNKTKAIASATIKTDKLSAKILADLLRANLIAECFVSPKETREINALLRQRASLVKMQTMVKNRVHALLDRYDHKSNFSDMFGVQGMEWLKMLELNQIDRYILDSHVRHIECLKEETTILDSKIASIVTQNEDAKLLMTLTGIDYHSALLIASEICDIRRFPSPKHLVSWIGLCPSIHQSGNSLHIGGIKKDSNKRVRWVLVQAAQTASRTDPRMKSLHDRIALKKDEGRAVIRVANKMATIIWHILAKKQPYYQVKQELYQSKLKKISRIAA

SEQ ID NO: 468538 - protein, 324 aa, unidentified
MIDGILGIDVCKNTLDVSISSYTKVRTKSFTNSADGWRHLLDWLIAQKIQRVHACLESTGRYSLGIACALYEADHVVSIINPAQIRDFVRTKLGRNKTDGVDASHIREYCELFKPSPWAPPSEAHRRLGELQTIRSGIIAGLTEWKNRKNSGIVDAEAQALADATISHFTSQLGAVDKAIALTIDNDCDLQSKRDLLLSISGVGETLAGVVLAELPGPDVLRSSAEVVAYAGLNPRRHQSGTCIDRATRISKIGNAVLRAALYMPALSAMRYNSAIVALVTRLKSRGRLKPKQIVVAAMRKLLVLCFGVLKTGRPFDAAIAMGG

SEQ ID NO: 468539 - protein, 333 aa, unidentified
MIKINLGADISKETIDFFCDANSELFQLKNNAKGLDNLLMWADQHQYPLNQIAIAFEHTGHYGNVLVDFCVQHEITFYHVPALEIKKSLGITRGKNDQIDAKRICAYLKEKGYKLTPTKPVNDAIERLKHLQAQRALFVRNSASIKNVLKDQLEVLVISKEDFLVRTNMQMIQQFEKSIKEIDDEIQKMVEADKEIKKNYNHIISITGIGKVIAIDTIIATHNFTKFNNWRQYASYCGCAPFEYSSGKFIGKPRISKLANKELKAHLNSGALSAIKFDNECKMYFERKLKEGKTKKCITNVIRCKLIARMYAVVKQNRPFEKNYAHSLEGKVS

SEQ ID NO: 468540 - protein, 356 aa, unidentified
MIAISQPKVPGIIIGVDTHKDEHVAVAVDRLGVRIGQRNVPTTDTGYAGLEHWARSLGEIDAFGVEGTGSYGAGLARFLRGQNHRVIEVNRPDRSTRRRLGKSDPTDAEMAARAVLSGVARDRPKSGVDKVEMIRMLKSTKDSAMKGRTQAINQMKALVVTAPVELRAKLRDMNASKLVACCVKWRHGYLETTTSAAKYTLWSLARRHVQLTREIEALNAELARLTAEFAPALMESLGIGPDTAAALLITSGSNPERLKSEAAFAALCGVSPIPASSGKTNRHRLNRGGDRQANAAIHRVVIVRLRYDHRSKAYLQRRMEEGKSKTEIIRCLKRYVAREVFGILNDIGKRHALQNA

SEQ ID NO: 468541 - protein, 417 aa, unidentified
MQKHNNSGKKSEPTSKRAKSRGPVQRDTKEVLAELVETLRKKLDPKVEAGSTGEEDRRGKFRPNLDRLTVGVDLGDQWSHYCILGLEGETLAEGQLRTTQQHIAEFFQALNAARVVFEVGTHSPWVQEVICGCGHEVLVANPRLMEGSKRRKRKNDRIDANKLARLGRVDPQSLHPMRHRSKEVRQDLVVLRARDALVAARTELINATRGLVKSMGARLPKCSSPSFAQKVEEAIPVEIREAVLPLVRMAAALSDCIQRYDEKIEKLGREKYEHTALLRQVKGVGPITALAYVLTLENPQRFVKSRDVGPYLGLVPKQEDSGESQPQLGISKTGDTMVRKLLVGSAQYILGPFGPDTDLRRYGLRLCERGGKNAKKRAAVAVARKLAVLLHCLWVSGEVYEPLRQGMSPTIAPAVAA

SEQ ID NO: 468542 - protein, 317 aa, unidentified
MTDSGVIVGIDVSKDRLDVFVRPEGQRFSVSNDEAGRRALIERLRLYVVKVVALEASGGYERPAVADLVAAGFAVRLLNAGQVRKFAQAGGLRAKNDRIDAEVIAHYAEVFDGPVCQRTSQTALLSELVGTRTLLVEQKVALGNRRRMMSDAGVRDSLDDVIAELERKIREIEGRLADIVAADPVLARKAEIVTSVISVGPVVSWTVLALLPELGSLGRKPIASLVGLAPFDRDSGVYKGRRKIEGGRKPLRDVLYMAAQSARRYNPDLAAFDERLRAQGKKKKVAITAVMRKLLVMLNALVRDNRLWTPDHVSVRP

SEQ ID NO: 468543 - protein, 399 aa, unidentified
MYETNYGGDTMYLIGIDISKYKHDCFIATETGEIIKDVFTFTNNQQGFTEFLDVLQDLDLNQTKRIGLEATGHYGRNLKVFLDKHGYTYMEFNPFLVKKFSSGLTLRKTKTDKVDSRLLSLILLSVEYKVYPVKSYHIEEIKSLTRYYKTLVKKRSKEITNLTNILDYIFPEFKPFFNNKFSKTALFIIENYQTPEKISNMNSKSHEKLNGISRGKFSYARFIKLKILATETIGSSSVVLNTLLQSSLRVYKSIDQEISITFDNLLELSKTINSPVLTIRGVGPISALSIISEYKNFTSFNSPAAMLSYAGLEPSVIQSGTIERPGKMVKRGSGYLRETIMNVAPFFYMYNPKIYDYYHKKRNEGKSHRVALTHVAKKLIRIIFHLVKNNESFDEDKLK

SEQ ID NO: 468544 - protein, 379 aa, unidentified
MKAITLYIGLDVHKDSIVIAIAEADRGGEIRIFGTITNDLHALEKALNRIRKAHPGALLEVAYEAGPCGFGIARRLKQLKVSCLVAAPSLIPKQPGSPFKTDKRDARGLARLLRAGELTGVYVPEPTDEAIRDLCRARTDAVDDHRRCRHRLKGFLLRHGFRYQGKANWSQPHMRYLRELVLPHPAMKTILEEYLQGIDAAHNRIERIEASMLTLLETWRLKPAVQALMAFRGFQLVASMITVSELGDIHRFEHPRQLMTYLGLVPTESSSGPHQRLGSISRCGNSHQRWLLTECAEHYAIPPKISKELSRRQEGQSEAIKALSWKAQNRLHNRFIRLLARRLQRNKAKVAVARELCGFVWAVLRTQDCYKSTSTSTPA

SEQ ID NO: 468545 - protein, 340 aa, unidentified
MNITTIGIDLAKNVFQVHGVNERGQAVLKKQLKRSQVMAFFANLPPCLIGMEACGSAHHWARKLQGLGHTTRLMATQFVKPYVKSNKNDAADAEAICEAVARPNMRFVPIKNLEQQAVLALHRARHGFVKARTAQGNQIRGLLAEFGLIIPKGLVHIRTQVPAFLEDASNELPGEFRSLIHRLTQHLVELNRQVDEIGAQIGIWHRNNELSRKLTAIPGVGPLSASALTATIGDARNFSSGRQLAAWLGLVPRQSSSGGKDVLLGISKRGDSYIRMLLIHGARAVIAWARQKPESNRWLLKLMERRNCNVAAVALANKNARIVWALLAHDRQYRADYALA

SEQ ID NO: 468546 - protein, 383 aa, unidentified
MNSQEKRRRAMRAGAYVGVDAGKFEHTLVVRNKDGEDSKPYPFKTTRAGFDGAVAFIQKTVPGVAADQVLIGIEFAGSYGFTLAHYLHQWGFDVVSVLPAHTKRQKEITHNQSLKTDAKDAAAIVDLVSQGKFVSFPFLHSVYADLRYLVSAREHVTVLRNAAITRLKSILDVVFPEFERIFVQVDKKTPLALLKAYPGPRALLEAKKPRVIALFRKTSRNHLGAERYEELVSAARTTLALPGAQLALCREIPLIIDRIELFTAQIAELKARMIASLEEAPEAEFLLTIPGVNAVTAATFLGSIGDPRAYESSGQVLKVAGLSLVERSSGLLKGKRSVSRRGAVPFSGGTPSCSRSVACSPVACTTPSSRSSWRIMAGRRCRP

SEQ ID NO: 468547 - protein, 419 aa, unidentified
MQHHTCEEFAAFVGLDWADAKHDICLQAAGTKHREFLVLEHRPEAIDAWVQTLRTRFHGQPIAVCLELNKGPIVSALRTYDFLVLFPVNPLTLAKYREAFTPSHAKDDPTDAELQVELLLKHRDKLTPLSPQSPTMRALAQLVEHRRRLVGDKVRLTNRLTSALKNYFPHVLQWFQDKDTAIFCDFLSHWPTLKAAQLARRTTLERFFQAHHVRSVDVITTRIEAIKSAVALTTDDGVITPNALLVQALVAQLRVTLQVIADFDTVIAQRAQAHPDFALFEALPGAGAAFAPRLLVAFGEQRERYASAEELQKYAGIAPVTERSGKKSWVHWRLQCPKFLRQTFVEWAAESTRHSFWAQVYYQQQRAKGKAHQAAIRALAFKWIRVLYRCWQERTPYDESVSLQALNRHSAPLLHHLAK

SEQ ID NO: 468548 - protein, 327 aa, unidentified
MKQINKLDFSGQDIYVGIDTGKKSWKVTILTKEYEHKTFNQNPNPKDLVTYLHKNNNANYLCAYEAGYFGFWICQSLNQMGVKCIVVHPADIPTKDKEKHNRNDSSDARKIARTLRSGELTPLYVPSQSEQQARSLVRMRLEMKRKETRCKNQIKAMLTFYGIDIPDEMANSHWSKRFILWLENLDSDNQALSALLMELSSLREIIVKLTKQIRSLANQEPYTQPVKNLCSVPGISTLTAMVLLTELSDINRFSNSDHLASYVGLSPGKDSSGDKERTTGLSRRRNGYLRSVLIESSWVAVRKDPALLMSFTELEDVKERSDNTNST

SEQ ID NO: 468549 - protein, 346 aa, unidentified
MRIIGCDYHPSWQQICWLETRTGETGEGKLDHATGEATRFYRGLAEQALIGMESTGNCQWFVEMATTAGHDVWVGDAGAIRASEVRQQKHDRRDAALILKLLLEGRFPRIWTPSGEEKDLRQLLMHRFKLVRLRVTVKNELQHLAMNQGVTRKGKLWSKAGEKVLRELPLKPWASRRREDLLKIRTMLGEQIDALDAAVIEAAEKNEKAKLLMTQPGVGPITSLAFVLTMGDVNRFPRGKQVASYLGLIPREYSSGGKQRLGSISKQGNRFMRMLLVEAAQTAVRNDPGMRNEYLHRCHRMAKGVAKVAAARKLAIRLYWMLKTKQSYPGVVGVESSSRVPLVSAS

SEQ ID NO: 468550 - protein, 394 aa, unidentified
MTKHTLYVGLDTDKRHIDVAVAEPLPGGEVRYWGQIGNDPTALDRMIRRLQKGGRELEVCYEAGPCGFGIYRRLNRKPRVRCQVVAPSMTPRRPGSWVKTNRRDSLTLVKLLRAEELTAAWVPDEEHEAMRDLTRARSTAMQDLTRCRQRITGFLLRQEIVYVGKPWTKKYRIWLGRLEFVAPAHRLMFDELLSAFDATRARCDRLLADIVELLPNWSLCWLVTALQALRGYQLINAVTLAAEIGDPRRFENPRQLMAYVGLVPSEHSTGDSVRRGGITKTGNRGARKVLIEASWTYARRAKSLPRAQGQPEAVRVIAEKALHRLSGRYRRLMAQGKLAQVAVTAIARESLGFIWAIAHAAGAENVARPSSLGGRSWPAGKPSQGGPLAPAVGG

SEQ ID NO: 468551 - protein, 343 aa, unidentified
MEIHAIGIDLGKTLFHLVGVDSCGNVVVRKRCSRSRLLAYTANVRVQRIGMEACSGSHFLGRALREQGHDVRLMPAQYVKPYVKTNKSDYIDAEAIAEAVQRPTMRFVPIKTEEQLDLQTVHRVRERWVMRRTAVVNQIRGLLLERGLTLPKGRSHVDRALPDILADATLRLSDSFRVLLAQLGLEMDQLTARIEQMDAVIHRTATENEACQRLTTVPGVGPVTATALVAAIGNGSAFRRGRDLAAWVGMVPREYSTGGKQKLLGISKRGNVYLRRLFVQGARTVMQYRSKQAPGLRCWLDQLMARTHQNVAIVALANKLVRMAWAVLCKNETYRTPALVTAS

SEQ ID NO: 468552 - protein, 397 aa, unidentified
MPAVWAGIDSGKRTHHCVVIDQSGLVLLSRRVTNDEAELLELIGAVVDLADGDQVCWATDLNAGGAALLITLLVGHGQRLLYIPGRVVHHAAATYRGDGKTDAKDARIIADQARMRTDLQPVRGADQISVDLRMLTSRRTDLICDRVRAINRLRGTLLEYFPALERAFDYSKSKAALTLLSEYQTPDRLRRVGVTRLAAWLRKRGCRNSAAVATAAVDAAHQQSTTLPAEPIGSALVARLASEITAIDGDLVELDAQLTDRFRQHEAAEILLSLPGFGPVLAATFLSNIGGNLDGFDTVDRLAAVAGRAPVPYDSGRISGNLHRPRRFNRRLLRTCYLAALSSLKNSPSSRAFYDRKREEGKTHKQALIALARRRINVTWAMLRDHTPYQEPVLAAA

SEQ ID NO: 468553 - protein, 367 aa, unidentified
MKKVSTGGTQQGRNISQQKLTIGLDLGDRNSWYCVLDEAGQIQLEQRVRTSTKALQEVFGAMPRSRVALETGTHSPWISRLLAELGHEVIVANARKVRLIGESRKKDDRLDAQTLARLARIDPGLLCPVKHRSAQAQADLAVIRARAGLVRARTGLVNTARGLAKSYGQRLRGCNVRNMNPEKAEGLSPELQRALEPLLACIESVSEQIREYNERIETLAQQSYPQVALLKQIKGVGTLIALTFLLTLEDPHRFGKSRDVGGYVGLQPGRRKSGLSEPQLHISKEGDPYLRTLLVQGAQHILGPFGVDCDLRRWGLKLAERGGRNGKKRAIVATARKLAVLLHHLWVSGEVYEPLHNSSRTTVAAAA

SEQ ID NO: 468554 - protein, 327 aa, unidentified
MRQAKSLTEKAKTTVAFDVCKAVLDVHIRVDGKAFQVPNTYEGFDQIALVLADYDVSLLLMESTGGYEDAAACNFQSLGYDVAVINPRHGRNFAMAMGKFAKTDRIDAAILADFAAVIDSRSDRARFIKPPTDEERKFLSQMVARRRQVVDLLSTEKQRLSHADDYAKQSINKVVAFIESQLDEINKDVSFYLKKNYSGLSKMLSEIPGIGELSVGLLVGDVPELGQIGNRQLSAVIGVAPFNHDSGKMRGKRCISGGRQNVRNVLFMGVMSATRYNPVIKAFYDRLINKGKPKRVAYIACVHKLLRIINAMVRDGTSFNPDLHAVI

SEQ ID NO: 468555 - protein, 400 aa, unidentified
MLLFFEVITMIFVGIDVAKDTHYAAVSDDSGAVLVKPFAFQNNAEGFCLLLKKLSEFDRSKLLIGLESTGIYSENLICFLYESGFRLAVINPIQTATLRKTAIRKTKTDKVDTMLIIKSLMVNSYRLYSQRDADSLKLRTLCRFRQNLKKSKARLKIQLAGCVNLVFPEFGKFFKSGIHIAASYALLKKYSSPKEIAALRTSTLCTLLSKASHGRFGKDTAEALKSLALSSVGVKNPYISIQIAQTIAQIELLEQQIKDLNSAIEEAMESINSVLMTVPGIGAVNAACILGEIGDIKRFSKPCKLLAYAGLDPTVRQSGQFTAKSTRMSKRGSALLRFALINSAWQLTLNDTTFKAYYDLKRSQGLNHYGALGHVAHKLTRVIFKLLTSDTPFNPAKLVA

SEQ ID NO: 468556 - protein, 370 aa, unidentified
MKTLNKYVGLDVHKDTTVIAVAEGGREGEVRLYGQIASDLAALEKVLRKLGGDGIVLHVVYEAGPTGFVVYRRLRQLEIDCIVVAPSKTPQAKGPRQKTDRRDAIQLARLHRAGELTAIHVPDAVDESIRDLTRARADAVHDLTRAKQRLKSFLLRLGYRYPGSANWNEAHMRTLRKLTLPLPALRSVLEEQLLAIDQTMQRVARLDELLAVQVPQWRLYPAVQAVMCLRGFQLTSAAIIVAELGDVRRFAHPRHLMGFLGLVPKENTTGNTRRLGAITKAGNAQARWCLVEAIQKALTPPKVSARLSLRQQGQPALYRELGWKTQVRLHKRGWHLLHRGVMKAKVNVALARELAGFLWDLLRQVPTPEV

SEQ ID NO: 468557 - protein, 402 aa, unidentified
MNAVGIDVSKSKSMVAIMRPFGEIVFSPFEIKHTASDINSLVELIKSVEGESRIVMEHTGRYYEALAHKLSEANLFVSAINPKLIKDFDNDSLRKVKSDKADAVKIARYALDKWQNLKQYSVMDELRNQLKTMNRQFGFYMKHKTAMKNNLIGILDQTYPGVNTYFDSPARSDGSQKWVDFASTYWHVDCVRKMSLNAFVDHYQNWCKRKKYNFSKSKAEEIYGKAKELVPVLPKDEITKLIIKQAIDQLNSASATVESLRTLMNETASKLPEYPIVMAMKGVGPSLGPQLMAEIGDVSRFTHKGAITAFAGVDPGVNESGSYEQKSVPTSKRGSSDLRKTLFQVMDVLIKTHPQDDPVYQFLDKKRAQGKPYYVYMTAGANKFLRIYYGRVKEYLSSLSES

SEQ ID NO: 468558 - protein, 445 aa, unidentified
MRVMYERVAGIDVHKDMIKVAIRFPGEKGTRKTEVLEFRTFWGVLQEVARELRRRGVTHVAMEASGVYTEPVYHALCEQDFTEVLVINPKHVKALKGHKTDARDCRRIAELLECGLLRGSYVPSAEQKEMRDLTRYRKKLVQARTSEIQRMQKALESAGIKLGSVLTDITGVSATAMIDALIDGERRPQVMADLARGTLRAAGKQADLKMALAGRFTAHHATLLRMHRDQVKLNNHAIAGLDEQIAAAAGRWQREMDLLMTIPGFGPVAAATWIAEIGPGPHKYFDSHDKLGSFVTLAPGNYVSARKRRHGRTGDAGTYIKPALIEAAWGAIRVRGRLQARYNRLVRRFGGDKNPGAKKKAITAIAHTLLKIAYQVLRSGEPYAEPGADFYTRRNSPASQQAWLLRKLEQLNPGATITITLPGAAPPDGGAGPADPPGAALVLPR

SEQ ID NO: 468559 - protein, 405 aa, unidentified
MATKTKTTARSTATQYIGIDVHCQFCEGGVIDSLGRESGQFNVATSIPTLLEVIEKVRRPRTVVIEEGPLADWLYRHLAPHVDEMIVCDPYRNALIAKEGDKSDPIDWRKLAHLCRGGYVKAVHQRQSLARSMLKQHVQVYHDRVRHRVSEANKILWRVRRLGVFVTEADLKDDARRQAMLEQLPGGGQANQRQQDGKDNSNGNSNSKGTTDGKGKDNSKGNSNDKDAASDSGSVIRQDVQLLLKGYDLAAEQVTELRRRLVTLGKQEPIIRAFCELPGVSWVRAASFFVMVDTPFRFASKQKLWKYAGIGLERHQSGNGPVRLRVPRRCNRVLKNVLLGAAKSAAASKDNVFADQYQRWLDAKCSPRIARRNLARSLATTMWGMWKSGSVFDPKMIGCMPAVIA

SEQ ID NO: 468560 - protein, 427 aa, unidentified
MPYRIAGVDVHKRMLAVVVSDVEIDGEYHFERRQFGSNPAQLRLLAAWLLEQQVEEVVMESTAQYWKPVWAALERYWKPICQKREGASPMSGTLHLAQAQSNRARRGRKNDFADAERLVKRLVAQELTLSFVPDPEQRLWRTVTRTKYQQRRNRVQLQNRLEALLEEAHLKLSSLVSDLLGASARRMLKALADGETDPAALAMLADYRLRAPQELLRDALGACQELNPVYRRLLKAVLEELELIEKQIGQLDQEIADLLRPHQNQVQRLAEIPGLGVDSAQQILAEVGATAAAFPSERNLSSWVGACPGDDETAGVSRSHRSPRGNRQMRRILNQAANAAVKYKGSIFQILYRRYVPRLGHNQTIGVIAHRLCRLIWKILHQGVHYEERGPEVNKKSQQYRAARMIRDLRSLGYRIELPNSQAPVPA

SEQ ID NO: 468561 - protein, 426 aa, unidentified
MAQPAQQQQKASNMTPHCELTHFAGFDWAGDHHDIIIVDTAGRVVADFQIDHTAAGWRAWGERVAAYPKLGIAIETSFGMVVEQLIDSGATVFPVNPMSARRFRERKSPSGTKTDRHDAWALADALRTDGHAWRALGPKDPIIEELRILCRDEVALIEERTALINQLRQALREYYPTALEAFEDWNALGAWAFVERFPNTQVLIQKGKRQWEKFLHVHKLNRPQTYQKRLEIFAKAGEWKLNNGLVKAKSLYALSKIKQLRILTAQLEEYRRRIEELFADHPDSGLFGSLPGAGPKIAPRLLSEIGSDRALYEDASGLQCVAGTAPVSFQSGKIRKAQMRRACNRNLRHTMHLFAYTSVEQCTWARSYYDALREKGKSHAQALRCLGQRWLKIIWKMWQSKTPYNAELHLKNQIAHGSWILQLQTT

SEQ ID NO: 468562 - protein, 375 aa, unidentified
MKEKVRFLGLDVHAETIAVAIAEQDGEVRSLGIIPNRAESVRKLVKKLGPAEQLRACYEAGPTGYVLYWQLAELGVECAVVAPSLVPVKSGDRVKTDRRDAAKLARCHRAGDLTAVWVPDASTEALRDLVRAREAAKQDQLRARHRLSKFLLRTGQRAMPGVKAWTQAYMTWVRQLRCAQAAQEWTRLDLLHEVEHMGERVKRLEEAIREAVKLAPAAMQEAIRGLQALRGIAEISAVTVVAELGQVSRFESARQLMGYSGAVPSEESSGQRQRRGAITKTGNAHLRRIAIEAAWSYRLKPAVGPALRKRQQGVPEEIKEITWKAQLRLHKRYARLAAAGKDRRKIVTAVGRELLGFIWAIGVKTETAVRPAMAA

SEQ ID NO: 468563 - protein, 315 aa, unidentified
MSEVDCFAADVSKRELVIAVYPAEVGVKRIANQEAVISAWLDTLPAGSVIAMEATGTYHRRLADLAHTRGLVVYVVNPRDVYYYARGMGARGKTDPSDAKLLARYVAHERAHLHPYLPPSALCERLTTLLERRAVLVRTRQALTQSLADLPALAGEKRNLFEAVAALLCGIDQELAALTSSDASTAKLVSRLKTISGVGPLVASLLCALFKRFAFRHADALIAYLGLDPRPDESGQHRGRRRLSKRGHPEWRRLLIAAAMSAARTQAWRDYVNLQRAKALPATAVHVILARKMLRTAFALYKNGQDFIPPSVQPT

SEQ ID NO: 468564 - protein, 386 aa, unidentified
MQKLNDLSRSLIAFEPDGTLIAVIEMSLTSWLVAGILPGVERQPLKKLAVDETALLKLLHRWRDESEKAGRRIERIAVAFEAGRDGFWLARWLKACGIEAYVIHASSIAVSREHRRAKTDRLDTELLKRAVLGWLRGERDHCKMVEIPTMKDEDAKRPNREHDSLVGERSRIVNRMKAALVRLGIRGFNPKLKRAAERLDGLRTPEGEPIPPNTMAELRRDMERRRLVNNQIRQIEEARLERLEQTPSDGPHAMVRLLARVIGVGIETADMLVHEVLTRNMRDRRAVARYGGLTGSPDESGRRRREKGLARSGNARVRRGMIQLAWRFLLHQKNSALAQWYRARTENARGTRKPMIVALARKLLIALWRLVRQGVVPDGVVLRLAQ

SEQ ID NO: 468565 - protein, 412 aa, unidentified
MDVIYPQCCGLDVHKKTVVACCLISTEGPETVKEIRTFRTMTADLLALADWLQERGCTHVAMESTGVYWRPVYNVLEGQCDLLVVNAQHIKAVPGRKTDVKDAAWIAELLRHGLLRGSFIPSKPQRQVRELTRYRSTLVQDHARALNRLQAVLEDANLKLASVVTDIYGVSARAMLEAILAGQRDVEVLADLARGRLRAKRDQLKEALEGRVTAHHSFLLTEHLSTLEYLDEAIERVSAEIDQRLTAEQEAIALLDTIPGVGQRAAEILIAEIGTDMSRFPSAKHLASWAGMCPGNHESGGKRLSGKTRKGSRWLRQILVEIAHVASKTKNTYLAAQYRRIAARRGKKRALIAVGHTILTIVYTLLTRKQSYQDLGAAYFDQREQHRVERRLVQRLERLGYEVALQPKALAS

SEQ ID NO: 468566 - protein, 418 aa, unidentified
MNAELIARLSRRYLALDIHKHYSVVAGVNFEGQVVVEPVRIEHADLEGWLKNHIQPTDYVVIESTTNAWHIYDLLVPLAEKVLVANPIKVKQIAQARVKTDIRDTLILARLLAANMVPEVWVPPAHVRELRYLLSQRRHLVGMHTATVNRMHSVAHRHHLNHPRGKRFNEQNTKWQQDNVLSESEQFQLELDMNTKKHLAEQTEKITEKLRRMSHQKPWAESMLYLMQLPGFGVITGMTVLAAIGDITRFESPKHLVSYSGLNSGLEQSGVKLRGKKITKEGRKDLRWAMVEVAQRAVKSDPLWKHRFIELCRRMHKNQAIVAIARRLLELVWYVLSRKQAYQNFSDERIAYKYLTWSWQLSEADRDGLTRQQFTRYYLMKLGIGHDLEQIALNPRYKRNLASEAEVLALRPELKQTE

SEQ ID NO: 468567 - protein, 382 aa, unidentified
MKLLGRTDLGAIFVSLELSRSTWLVTSLSPGSGEKMSKHVVDGGNVAELLDRFEQLQQKARLRTGKSLPIVTIQEAGLDGFWIHRVLEANGIESYVVDAASIATSRRRRRAKTDKIHGEALTRALLAFKRGEPRVCAMVRAPDPEDDDRRRICRERKVLIAERVRHVNRVKGLLFAQGVSGYQPLRKDRRKRLEELQTGDGRELPRHLKAQVDRELDRLELLLEQIATVENDPNSLLSTHEQPAVEATKPAAMLLSLKGVGAEFAAVLWTEALCRHFDNRRQIAAYAGLTPTPWMSGTIDHEQGVSKAGNPRLRTTMIQLSWLWLRNQPASALSCWFVDRVQSTGGRLKKAAIVALARKLLIALWRFVTAGVVIEGAVMKTA

SEQ ID NO: 468568 - protein, 344 aa, unidentified
MEHYAGLDVSLELTSVCIVDVRGEIICEAKVASEPEALIGFLSGQQLEIGRVGLEAGPLSQWLHAGLIAAGFDTVLLETRHVKAALSAMSVKTDRRDARGIAQLLRLGWYRPVHAKSATAQEVRALLTSRKLMQGKLLDVESGIRGVLRGFGLKVGLVSRGRFETRIRELVAGHAILETVSDAMLAARAALETEFKRLHRELLEIVRADPVCRQLMSVPGVGAIVAITFKSGVDDPTRFRRSRDVGPHFGLTPRKYQSGELDVTGSITKVGDRMVRTALYEAASVMLTRTVRFSSLKAWGMAVAKRRGTRKARVALARKLAVILHRMWVDGTTFRWSNEETAIA

SEQ ID NO: 468569 - protein, 446 aa, unidentified
MDVVFTHCAGLDVHKKSITACRIVPDPTGLDAEGVAELQTFGTMTIELLALVDWLAAAGITHVAMESTGEYWKPVYNLLEGSVTVLLVNAAHVKNVPGRKTDKADARWLAKLMRYGLLQASFIPPAGQRDLRDLTRYRTKLVQERVREVNRVQGVLERANIKLASVASDIMGVSGRAMLEALIAGRADPAAMAELAKRRMRRKIPLLEQALTGLVRDHHRRLLAIQLAHIDFLDEQIDTLSAAIEANLAALSAEERATPAVSAAAGASLSTAPVSPPPLTFTRAVELLDTIPGVNRRGAELIVAEIGIDMTRFGTAPRLAAWAGVAPGNNESAGKQRSSTTRKGNQALRAGLTQLAQAAAHTKETYLSALYGRLAARRGKQRAIMAVAHSIMVSVFHMLTRQEPYRELGARYFDERRRHYTVDRLAQRIERLGYRVHLEPIATTAT

SEQ ID NO: 468570 - protein, 343 aa, unidentified
MDYFAGLDVSVKDTSVCIVDDTGKIVREVKVASEPEVLLTALKNPAYHFKRIGLEAGPLSQWLFSALAEAGLPVICVETRHMQAVLKAQINKTDRNDARGIAQMMRVGLYRPVHVKTLRSQKLRMLLTHRKLLQSKAIAVENDLRGTLRNFGLKVGIVGKVKFEARIKELVENLPDLAMLVEPMLIVRRVLREQIVILHRRLVAIVRDDEVCQRLMTTPGVGPVVALTYRATVDVPARFRNSKAVGAVFGLTCSKYQSGEVDRSGRISRCGDEMMRVMLYEAAQSMLRSTRWSWLKAWAMQIARRRGMKKAIVALARRLAVIMHRIWVDGTEFHWTREQATAA

SEQ ID NO: 468571 - protein, 355 aa, unidentified
MDSRKYIGMDVHQASISIAVRNAAGKLVIESLIETKAATILEFLQGLKGTLCVTFEEGTSAAWLYDLLKPHVANVVVCDPRKNALLKAGNKNDRVDARKLSDLLRAGLLTPVYHGESGVRTLRELARSYLTITKDLTRVMNRLKALYRGWAIPCGGEKVYSPRHRSVWLEQLSEAGVRRRAEQLYQQLDMLLQIRREARRELLRESRKHPAQELLRQIPQLGPIRVALLIALIQTPHRFRTKRQLWAYCGLALQTRSSGEYRFTAGQLQHSNKLPALRGLNSNHNHDLKNVFKSAATHVSTSPDALGDFYRSLLAKGMKPAMARLTLARKMAAIVLTIWKKGERFDPGELKRQAA

SEQ ID NO: 468572 - protein, 377 aa, unidentified
MRKNIRFVGLDVHAETIAVAVAEAKGEVCSLGIIPNRPEAVRKMIRKLGPPASLRVCYEAGPCGYVLYWQLTRLGVHCEVIAPTLVPVRAGDRIKTDRRDALKLARSYRSGDLTAVWVPDEAHEALRDLVRAREAAKKDQLRARHRLHKFLLRHGLRPGEKIKAWTGKHLSWAKTLRLELPALEATLLDYLTEVEHACERIARLERAIDQAIEAAPAAIRAVIDGLQALRGIARISAATIVAELGQLSRFSRPKQLMGYVGAVPREHSSGEHVRRGAITKTGNAHLRRILVEAAWSYRHRPNVGSQLRRRQRRASEQVKEIAWKAQQRLHYRYVRLMGRSKLKQQVVTAVARELAGFVWAIGVEVEKHLASRPVRAA

SEQ ID NO: 468573 - protein, 346 aa, unidentified
MNYIGMDSHITTLDFAVVNETGRLVKSDRVATSVNGLIEFVKKVPPPRTIYMEEGTLAAWALETCVRFGEKLVITDPKKNHWIGSSGQKDDPLDALKLAQLARGGYIKEIHHPVGHRRRFRELMIAYHDTVRSTTRIKNKIKAKFRQNGILCTGTTVYSETYRKEWVEKLPQEMTLLLILEGLWRQLEQSEQTEKELLAAARAQAKRYPEIKRFQAIPGIGFIHAATISALLETPYRFANKRKVWMYAGLGIMRKSSGGKVYSEKLSTDYNRLLKYTMKQAASAAIQAKDNPFRRKYLDKTLLHGIAPHRAKLTIARDMLATMWIMWRKGEKYNPEIKEKAAYKQS

SEQ ID NO: 468574 - protein, 339 aa, unidentified
MAILYVGIDLAKNVFAIHGVDEHGKPALVRPSVPRARLHQLVAALPPCTIGMEACSGAHHWARLFAQHGHTVRLIAAKFVAPYRMSGKRGKNDAADAMAICEAVQRPNMRFVPVKSQDEQARLCIHRVRQGLVEQRTAIINRIRGLLSEFGIVLPQKAASVRREAAAHLEDLPGWANTAVGDSLSELHRLDERIAEYDRHVVHMAREDARSRALMQLSGIGSTTASALVSTIGNARDFKNGRQLAAWLGLVPGQYSSGGKTRLGGITKAGDGYLRTLLVLGAKAVLAAARNKDDRLSRWAMALEVRRGYWKAVVAIAAKNARMAWAVLAKGENFKLLEA

SEQ ID NO: 468575 - protein, 353 aa, unidentified
MRTYYVGMDVHRASIVIVVLNGAGKVVMQSVIETGAERVRGFLKQLRGKVYVTFEEGTQANWLHEVVRALVTEVVVCDPRYNKLLQSGNKNDRVDAQKLAELLRNGALKAVYHGDNGMRTLKEFVRSYDCLVSDTTRVMNRLKAIYRGRAIGCAGHDIYRQDRRERWLEKLTERGAKQRASCLYQQLAALKPLRHEAKRMMVKEARRQPAYPWLMSVPQFGSVSVAQLLAIVSTPHRFRSKRQFWTYIGLAVVTRTTADHEVVNGVLRRSNRPLSTRGLNRNHNHLLKRVFKNAANGACHGGPFKAAYELRVAQGMVPSLARLTVARQLAAITLAVWKRGEQFNPERMKQQAA

SEQ ID NO: 468576 - protein, 387 aa, unidentified
MTQVDDLSRSLVSFDQETSLIVVVEMSQSSWLVAGMIPGVDRHPLKKLVPDPDGLLRLLERWRADAGKAGRTIEQLVLAYEAGRDGFWLARWLQARGIEVHVIHSTSVAVSREHRRAKTDRLDTAMLMRVFLGWLRGERGHCGMVAIPTVDEEDAKRPSRERENLVGERTRIVNRMKSTLARLGICGFKPALRKAPQRLDALRTPEGEAIPTNTIDELRRDMARLAVVRSQIEEIERVRLERLKQAPQAGPNAMVVLLSRILGVGVETADMLVQEVLSKNLRDRRAVARYAGLTGSPDESGSKRREKGLAKAGNARVRRGLIQLAWRFLMFQKESRLAQWFRARTEGAKGARKTTMIVALARKLLIELWRMTTTGVVPEDFVLRQTA

SEQ ID NO: 468577 - protein, 410 aa, unidentified
MGLYCGIDWATEHHDVAVVDDDGRVVARGRVDNDAGGFAQLLTLLAEAGDTAKHPIPVGIETDRGLWVAALRATGRVIYPINPLAASRYRARYAVSGAKSDATDAVLLANIIRTDPDAHRPLPADTELAQAIRVLARAQQDAVWARQQVGNQIRDLLKDFYPAALVAFAGLPSGGLARADARTILAAAPTPAQAATLTPARLRRLLIRAGRRRDLDRDVARLRQVFTDTYLHQPPVVENAMGIQLSALLRQFDAVCTAAEELAQAAIAHFERHPDAEIITSFPGLGNLAGARVLAEVGDDRTRFADARGLKAFAGSAPITRASGKKTVVLHRHIKNRRLAAVGPIWALASLRASPGARRHFDARRAAGDWNHQAQRHLFNKFLGQLHHCLHTVQLYDEHRAFPPPLPLAA

SEQ ID NO: 468578 - protein, 405 aa, unidentified
MAVMIGVDPHKASHTAAAIDENEVTLGELRVRSAADQVERLLAWAAPFAERTWAVEGAGGLGYLLAQQLVAAGERVVDVQPKLAARVRLLATGNSNKNDPNDARSVAVAALRSPNLIEVVAEDHGAVMKVWAKRHRDLGRHRTRMACRLHAVLCELVPGGVSGEISAAQATRLLDSIEPRGAIETARHEVGLEFVEDLSRIDAQMRDTKKRIAAVVAASKTTTTELFGVGPIVAATVIGDVGDVSRFESRDHFAAYNGTAPIEVSSGPRKIYRLSRRGNRRINHAIHMAAVTQIRFRHSDGRAYYDRKIAEGKTGKEAIRALKRRISDALYSRLQQDARRAADAKGTGPGGQTGNDSVASVTGSHPEHRLFGQATPGPDATLRQNATSNRPKKAAPPTRRVQKAS

SEQ ID NO: 468579 - protein, 460 aa, unidentified
MNEYFLGIDASKGYSDFVMINEKKQTVIENFQLDDTFQGHTRLYELLHGFNQDYPEATIYAAVESTGGYENNWFQSLLKFQASLPIKTAHLNPLGVSHNSKADLKRNNTDKISAKNVAEYMIAHPEKVSYQHQDSLASLRKQWGFVTMLTKQSTQLLNQLESLVYNANPEILIYCKGDTPQWILKLLTSYPTALRLSRAKVKVLARIPYISLDRAKRLVATAKKSVASASDKVTEQLIVATVKQIVHLKKTIKVQSEVLANECQIPEVALLKTFTGIGDYSAIGLMLQIQSVNRFLTSKKLASFFGIHPEYKKSGDGTYKYRMSKKGRKEGRRVLFIVAMSAIQSNPLIRDVYQQAVERGMEKMSAMGLCMHKILRIVYGMLKHNKAFDPQVDLKNRQKKPSRQRKVGQDKDRRYQNFDSNAPISRRQKMKRKERKQSQNVINVEYGISEASVPSTQLAN

SEQ ID NO: 468580 - protein, 381 aa, unidentified
MTTAATHHEHGNTPAGTLFVAFELSEKTWKLGFTTGHGQKPRERTVTARQQERVLDEIAQAKRRLRLPDTAPVVSCYEAGREGFWLHRFLQGHGITNHVVDSSAIEVNRRRRRAKSDGLDVRKLLSMLMRYAQGERQGWQVVKVPSVEAEDHRHLHRDLETLKQERASTTTRILGLLRSQGLRVTSLTKLPEQLEALRLWDGSPLPPGLRRRVLRVYAHHTFLSAQIAAVEAERRAQLHASTDARIDKVRQLMLLKGIGINGAWLLVMEFFGWRAFKNRREVGGLAGFTPTPYQSGESAREQGITKSGNRHVRWMTTELAWSWLRFQPDSALSVWFRERFGGGGKRLRRIGIVAVARKLLIALWRFLETGVFPEGAILKAA

SEQ ID NO: 468581 - protein, 314 aa, unidentified
MGSNGGEVLIGVDVSKAWIDTCQSGTRRVERVVNTAEALTAWVKRAQPALVAMEPTGGYERALCSALAEAGVRYVKLHPNAIVAFRKTRGLRAKTDRIDAMLIAQYLADAKARAELPRTFHANERLRALAARRRQLIDARHAERCRAELASDPLVRDSLAAVIDTITRSLDAIDEAIERHIAGDGELARLAKALRSGRGVGPVVAATLIADLPELGHLSGKQIAALVGLAPHIHESGKRSRPARTGHGRPLVRAALFNAARAAIRYPCQLKDFYDRLVKTNNRPGKVALTAVMRKILVIANAVARDHLKAAQPA

SEQ ID NO: 468582 - protein, 317 aa, unidentified
MTKTSTAVAGIDTAKDKLDVALYGQASHWCVENNLRGWKRLRSELAKVGVERVGIEATGGYERGVVRHLQEAGFTVLVLQPIQVRAFAKAHLRRAKNDMLDAALIAAFTAVMEKPRIEPDQRLSRLADRLTFLEQIEEDMARFKVRLEHIDDPELRHDVLGDIARLRARRLTQIRFIARQLRAHRDLAARLDLVLSIPGIGERTALALIIRMPELGRISREEAAALAGLAPFDDDSGKHKGQRHIAGGRKRLRRSLFAAALPAAFRWNKDLISLYARLKAKGKAHTAALIACARKLLVYANTVVARGTPWTESPALS

SEQ ID NO: 468583 - protein, 313 aa, unidentified
MSFVGIDVAKAQLEFAVRPSGETGTVANDEAGIQELVTRCQGLAPALLVLEATGGYEAAAVAALAAAGLPVVVANPRQVRDFAKATGQLAKTDALDAHILALFAERVRPAPRPLPDDALQALDALLTRRRQLLGMLTAERNRLLIAVPAVRRDLQQHIRFLERRVHEADGELHTAVKASPAWRVKDDLLQSVPGVGRVVSLTLLAELPELGRLSHKEIAALVGVAPLNRDSGTLRGKRLVYGGRAPVRTALYMAALVASRCNPVIRAFYERLRAAGKPAKVALTACMRKLLTILNAMARSGAAWQPARTFVRT

SEQ ID NO: 468584 - protein, 348 aa, unidentified
MAHFVGLDVSVQETAVCVVDEAGKVVCEQKVATEPDDLVGLLTSISGDYGRIGIEAGPLSQWLVNGLAAAGLPVICVETRHLNSLLKARQVNKSDRHDARGIAQMMRVGLFKPVHVKTLASQEKRMLLTSRKLLQRKMLDIEFDLRGTLRNFGLKVGVVSTAGFEARVRDLVAGMSSLSAIVEPLLTVRRVLRQEFARMHKMLLEVVRQDPVCRRLMTAPGVGAVVALTYRATVDQPQRFVHSRAVGAHVGLTPRRHQSGESDYDGGISKSGDTMLRTMLYEAAQTLLTQSRHWSWLKAWGTRVAQRRGMRRAIVAVARRLAVILHRMWVDGSDFRWGRDPAATVEAA

SEQ ID NO: 468585 - protein, 407 aa, unidentified
MEENRKRSIGLDVHKHYLIALGVDADLNVVLPARRVDLFRLESWMKKTLTKQDEVVLEMTTNTWQLYDELIQYAGSVTVVHPPHVALITRSQVMNDKIAASILARLLAKGLLVGIWIPPQEIREARGLVAQRQKMTRLATQAKNRLHAVIQRHHLFPPAGNPFGVSNQAWWQTLSLGKLEKLNLQSDLETLQFAEKQERQLTEIMEGMVAEQEEIGRLLHLAGFGVVTAFTVWAAIGDIRRFAEPRYLVGYAGLGTRVHDSGMTSRSGKITKAGRRDLRTALIEAANVAANSHPHWKAELARLEPRLGRNKAVVAIARKLLIAVWFVLQGKTDKFAEPEVVAQKMLKFAYTVGKANRPKGQTAAQFARIRLDALGLGSELTSIAWGSKKPIPLPPSKLKERSDVPNK

SEQ ID NO: 468586 - protein, 411 aa, unidentified
MEVVHARCAGLDVSKKDAKVCVRVAGAGRRKTVETVTTWSSMTGQILSLREHLVAERITCAVMEATGDYWKPFYYLLEDAGFELLLVNARHVKNLPGRKTDVADATWLAQLGAHGLVRGSFVPPEPIRQLRDLTRARTALTRERSREVQRLEKLLEDAGIKLSAVASDICGVSGRAMLDALIAGNRDPAALADLAKRRLRSKIPALTEALSGRFNDHHAFLARVHLDLIDQHTAAIDQIAARIEEAIAPFQGFRDLICTIPGISVVTAEVIIAETGADMTRFPTADHLASWAGTTPGNNESAGKVKSSRTRPGNPYLQGALGAAAMACAQNPRTYLGARYRRIAARRGPQKANVAIQHSMLVAIWHMATNGCLYDDPGADYFTRLNPARAKKRAIHQLEAMGYEVTLSNAS

SEQ ID NO: 468587 - protein, 369 aa, unidentified
MGQYTEAFVGIDAAKARNAIAVAEGGRGGEVRYLGEVDASEQGMRRIVARIAAKYDRVHFCYEAGPTGYGLHRLITGLGYECTVVAPSLIPRRPGDRVKTNRRDAVTLAKLLRADELTAVWVPDEGHEAIRDLVRARAAAVETLRVHKQQVAAFLLKHGRHFPRKTPWGARYMRWLQEQKFAHPAHQIVLQEAVEAVRLAKERVERLERLIEEFLPTWSLAPVVTALQALRGVNLIVAVTFVAEIGDLRRFESPRRLMAYLGLVPSERSTGDAVRRGGITKAGNGRVRHLLVESAWTYRHPPRIGAKKLAQLERVPPKVREIAWKAQSRLTARYRALAGRGKRLTIVCTAIARELAGFMWSIARESQPA

SEQ ID NO: 468588 - protein, 352 aa, unidentified
METTVGMDLGDREHVACVLDDGGEVVRRVAVANTPDSVTKFLDEFPDAGSVTVAIETGTHSPWMSDLLESRGFRVLVGKSRKLRAIWDTEFKDDGRDAELLARMARFDPKMLSPIRHRGRSAQADLAMIRARDSLVRARSSLASSVRGMVKSFGGRIPDCSVEALPSKAGEHIPKDLRPALAPVLSSISSLTVQIRAFDKSIDRMCRKKYPETERLAQVAGVGSLTALAFVLVLENPRRFRKSRDVGPYLGLVPGRDRSGQTDKPLPITKAGDTLLRRLMVGSANYILGPFGPDCDLRRYGERIAGSGGKVAKRKAKIAVARKLGVLLHRLWVTGETYEPLRNTNSKSAKAA

SEQ ID NO: 468589 - protein, 323 aa, unidentified
MNKYKETFGVDISKDVFDVYGSECGHSQFKNDEQGFKLFVKTLASDSLVVMEATGYYHYRLAQFLHKNDVCVSVVNPLSVKRFIQMKLSKIKTDKSDAKAICNYGLSNEVPLYNALTDVQAECLQLFRLMDSYLKKRTVTKNKLHGEEVLGTPSKYVYRSLKRDLKHLDKEVKGIEDRLLELVKQDQQQQLTLLTSIPGIGIKTALFLVVITDGFSKFEKASQLCSYVGITPTIRESGSSVRGRSRISKVGNKKLRNLLFLCAFNAFKHNKGCREIYERIVAKGKSKKLALIAVANKLLKQAFAIAKSGLPYDENYVSVLTKG

SEQ ID NO: 468590 - protein, 343 aa, unidentified
MGEVSTIGLDIAKSVFQVHGVDDAGTIVMRKRINRSKVLQFFGDLAPCLVGLEACPSAHYWGRELQALGHSVKLMPPSYVKAYLQRSKNDANDAAAICEAVTRPSMRFVPIKSEQQQSGLMLHRTRQLLVRQRTMLSNAIRGHMAELGIISAKGRNGTAELLQIIDNVADDRIPPVARFCLDLLARQYLTLNAEVASIDKRIHAWHRSCEESRRLEEIPGIGPIVATALVAEIGDWKAFRSGRGLAAWIGLVPKQHSTGGKERLGSITKRGNRYLRWLLVTGAMAVIRYARAHGTKRAWLTRIMDRRPAKVAAVALANKIARMAWAIMVRGERYTEPKLLLAA

SEQ ID NO: 468591 - protein, 385 aa, unidentified
MNRELCLKTASSPYLDTLAFLNGDLYKKLTFLLLRFLGDVQYPFPLQIAKHKDMENFYFIGVDVSKKKLDFCVLLNGTIVLEEVVNNNIPSIRRFLETFLVDFKTSIDNLLVCAEHTGQYTFPLSIACQSLSCGLWLENPAQIKYSSGFSRGKNDKVDAHRIARYASRFSDNARYYQRPREEIERLKQLRNEQDLYKSDLAKYKGQLSDQREFMLARVYQEKAQRLERLIEELEKLIKDIDLLVETIIRSCRVLWRQRELLLSVEGVGPSVALCLIIETEAFTRFDDPRKFACHAGVAPFRYTSGSSQHSRNKVSQRANKQIKTLLHMAALSITGRKSGELKAYYERKVKEGKNKMTVINAIRAKLIARMFAVIKKDQFYTPVYS

SEQ ID NO: 468592 - protein, 377 aa, unidentified
MGNYNEAFVGFDTSKSRNSVAIADGGRGGEVRFLGEIENTAAATAKLVRKLSAKYKRLTFCYEAGPTGYGLHRQIKGLGFECVVVAPSLIPKRPGDKVKTNRRDALSLAKLLRADELTAVWVPDGGHEAMRDLTRARETAMLDLRTKRQHVSAFLLRLGRPYPEGKKTWTKAHLSWIAGQKLEHPQQRLVLEEMMLAIRQAQERLARLEQAIAAAVAEWSLAPVVTALMAMRGMDLISATTLLAEIGDLSRFRTPTELMAYLGLVPSEDSTGEAVKRGPITKAGNRRARRMLVECSWSYQHPPRVGQAKQPKVDAAPPAVREIAWKAQCRLYRRYRTLIRKGKLKTVAIVAIARELAGFIWAVARAVSAARVAAATA

SEQ ID NO: 468593 - protein, 350 aa, unidentified
MKYYAGLDVSVKETSVCIVDESGKLCREKKVVTHPDDLVAVLSDPAFNFERIGLEAGPLSQWLFEGLAKAGFAVVCIETRHTKAFLKAQQLNKSDRNDARGIAHMMRVGLFKDVHVKTLTSQKRRALLTARKLLQEKAIAMENDMRGLLRNFGLKVGTIRAFKFDERIRELVEAAPDLAEIIESLLAARQKLREEFVKLDRKIRGEARVDPVCRQLMTVPGVGPIVALAYTSTIDIPSRFRHSRAVGAVLGLTPVLNQSGESSRIGHVSLCGDGMLRGLLYEAAQVLLIRVKKWSWLKAWAMNVAKRHGIKKAIVALARRLAVVLHRMWVDGSEFRWTREATPTTTDATA

SEQ ID NO: 468594 - protein, 343 aa, unidentified
MTYFVGLDVSQKMTAICVVDDTGRRLWRGQCPTNPEQISIFVRRHAGDDARIGIETGAMTPWLVHELRNLGLEVVCLDARHARAALEMQINKTDQNDAEGLAQIVRTGWYRSVHVKSFESHRARALLGARTQLIGMTTRLSNHIRGVLKTFGLLPGAMRGLPFDRKVEALILHRSDVALIVRPMLVAWRQVREQIAVFDKAIRVLVRSNSACRLLMSVPGIGVLSALAYVSTVEDPGRFSRSRSVGAHLGLTPRQYQSGEVDRSGRISKCGDTLARTLLYEAAVVILTRLKKASSLKDWGHAIARRSGNGKARVAVARKLSVILHSVWRSGQPFRWPEHANVA

SEQ ID NO: 468595 - protein, 342 aa, unidentified
MQVTTIGLDIAKRVFQVHGVDCTGAVVIRKKLRRSELAQFFAHLAPCLIGIEACATAHHWARELMALGHQVRLVPPSYVKAYLKRGKNDAADAEAICEAVTRPTMRFVPVKSEEQQGVLVLHRGRELLVRQRTMLVNGLRAHMAGFGIIVPQGIQRVPELVAMLKDETTGIPQIAREVLAAMVVQINNLTTSIRQMEKRIIAWCRASDAARRLATIPGVGPITASALAATITDPTLFRSGRHLAAWLGLVPRQHSTGGKAKLGRITKMGDQYLRKLLIVGMTAVIRSARRTKAPAFAWVNALLERRAARLVSVALANKAARIAWAILIRGETYRAPTMKVAA

SEQ ID NO: 468596 - protein, 367 aa, unidentified
MAKGITYVGLDAHQETIHAAILLSGRREAVVEAFANTSEGIRRFVRRLKEQAPGPIEGCYEAGPLGYGLQRSLIALGLDCVVIAPSLIPQKPGDRIKTDRRDARKLADLLRAGLLTEVHAPTPAQEAVRDLCRAREAVKEDQKRMRHRLSKFLLRRSIRWTAGRKAWTVAHGQWLRGLRLEHRADQLILDDHLFALEQLEGRLAAFDAQIEAFASQEPYAEPVGWLRCFRGIDTLTALSIMAELHDLRRFASPRALMAYVGMVPSERSSGGQERRGALTKAGNRRLRRLLIEAAWHYRHRPAVGYRLKKRREGQPAHAIAVADRAQQRLHRRYRRLVERGKPHNKAAAAVGRELVGFVWAALQPQAS

SEQ ID NO: 468597 - protein, 411 aa, unidentified
METLIARCCGLDVHKAQVTACVRLLINGAVTEIVETFGTTTPDLLALRDWLTSHGVTHVAMESTGVYWKPVYYTLEDEFEVLLVNAQHVKHVPGRKTDTIDAGWIAKLLAHGLLRGSFVPPKPIRRLRDLTRFRKALIEERTRAVNRLHKLLEDAGVKLACVATDVMGVSGRAMMRALIEGQAEPEALAELAKGKLRKKLPELRKALTHRFSGHHAFLLERMLAHVEELEDDIGALSVRIEEEIGPFEPAVELLRSIPGVERRAAEVLVAELGTDMTVFRTAGHLASWAGVCPGQNESAGKRKSAKTRKGSKWLRKTLTESARAAARTRETYLSERYRRLAARRGDKKAVIAICHEILCAAWHMLQTGELYREQGADQFRQRDQDRIRKRAINQLEKLGHKVILEELPQAA

SEQ ID NO: 468598 - protein, 345 aa, unidentified
MEIRTIGIDLGKTVFHFVAVNARGEVVVRKKGSRAQLLRFTSNLRECLIGMEACGGSHFLGRALREQGHDVRLMPAQYVKPYVKTNKNDYIDAEACAEAVTRPTMRFVPIKSDDQLDLQSLHRVRERWVVRRTAVINQIRGMLLERGITIRKGRHHIEESLPGILEDPDNKLSGALRVLLTQLRSEMQYLHGQIGETDKLIARICGEVEQCRRLVAIPGIGPITATATVAAIGNGAAFKKGRGFAAWLGVVPGEHSTGGKQKLTGTSRRGNKYLRKLFVQGAHTVLLQKTKQSSGLSMWLVNLASRKRKQVATVALANKMARMAWAVLFKGEAYRPPTVAQVNAA

SEQ ID NO: 468599 - protein, 337 aa, unidentified
MTDVHILAIDLAKRSFQICATAAGGAVLFNRMISRAKLETVPREQTPCIVAMEACATSHFWGRFAQGLGHEVRLIPPIYVKPFVKRQKNDAADAAAIAEAALRPNLHFVAVKSAEHQARAVAFRTHQSFVGQRTQLINALRGHLGEFGLVVAQGPTGLKTVAGMIDDNATELPDAVRDIVRLYLDQIAVLTQKIDDLHFKLRAAIKVDDAMRRLCTVPGVGPVTAGAIMAFAPDLRAFASGRNFAAWLGLVPRQRSTGGKTRLGGVSKMGQADIRKLLIVGAMSRIRWIIRRGVLPDSWLGRILGRKPRMVAAVALANKMARMIWAMMTREQNYRMA

SEQ ID NO: 468600 - protein, 347 aa, unidentified
MKHYAGIDVSLNSSSVCVVDESGKIVREVKVASEPVALIHCIQSFGVRVERIGLEAGPLSQWLYGALRECELPVELLETRHVKAALSAMPVKTDRNDARGLAQLMRLGWFRPVHCKSMAAQEVRALLTARKLVQSKLYDIEMSLRGILRGFGLKVGPTTSRSFAARINHLAAGHPSLEMVAEALLSTHAAALCAFKNLEKNVRQISRADARVRLLMSAPGVGPLVALTYVSAIDDPKRFTSSKRVGAHFGLTPKKYQSGETDISGRISKIGDSSVRAVLYEAAHIILTRPIHGGALKSWAMRLAKRAGMKKAKVALARKLAVVLHRMWVSTSIFDFEKANGCMHAVA

SEQ ID NO: 468601 - protein, 347 aa, unidentified
MTEAYDGRQVVGIDLHRRRSVIVRMTEDGRKLETVRITNSAAALRREIAKAGKRPRVAVEATYGWYWAADVLEAAGAEVHLAHPLGVQAYSCRRVKNDQRDAADLADLLRMGRLPEAWIAPPEIRELRELTRYRDKLVKLRTSVKDQVHAVLAKLGIPVTCTDIFGTWGNTWLDGLDLPQPYAGKVASLRQLNTELTGEITLLEQVIGDLLAGHEGYAAIQQLPGIGPVLGAVIVAEIGDIRRFRRPEQLCSWAGLTPRHRESDTKISRGHVTKQGSRILRWAVSEAIQRQPDGTRPQQVKDGIIARRGTEARNTAKIAAARELLTLVFYGMRDGCIRRAVRPGQAA

SEQ ID NO: 468602 - protein, 366 aa, unidentified
METIYIGVDFHARQQTICYLKTETGELVTCELKHLDKHAVRAFYAQFHGRVIVGLEASGYSPWFERLLEELGCEVWLGHATEIRRRARWRQKNDRRDAELILELMLHNEFPRLHRGAVQSREVLRMLRYRQKLIKIRTMSKNSLQAIALQSGLARGSRLFTKEGQQQLSTAEMSPVMHWQREHWLQLMEPLNQQLLETMVWFKAESKGDVCVRRLRTHPGIGLLTSLCLVHTLQPVSRFRNTRKVAAYAGFDPVERSSAERKCFLGISKAGSRLLRYLLVEATQTAVRKDEDLKRFYQRLAERRGRPKAKVAAARKLLIRAYIMLRDEIDYAEFRHRAVAARLARRGQGPSNVPEVLIGQPASPEQ

SEQ ID NO: 468603 - protein, 386 aa, unidentified
MHQATTLPAPQRTCSRGDCATLFVSLELSRSTWVATALAPGSNKMSKYTLVGGDGHKLLDLLARLKSRAEQRIAAPVKVVTIHEVGLDGFWIHRLLEANGVESHVVDPASIAVPRRHRRAKTDTIDGETLLRTLMAWQRGEPRVCAMTVPPSPSEEDRRRISRERAKLLQERVRHTNRIRGLLFGQGITNYNPLHKNRRKNLEQLRTGDGRSVPAHLKSAILREIDRLELVLRQISEVETERDEMLQLAQPSSPAALLMRLKGIGAEFATVLYLEGLFRRFDNRRQLAAYAGLTPSPWKSGSIDQEQGISKAGNPRLRTTMVELAWMWVRYQPASALSCWFRQRVGSKRGRIRRISIVALARKLLIALSRYVSHGEIPAGAVMNAG

SEQ ID NO: 468604 - protein, 363 aa, unidentified
MDKYIGFDIDSKKTVVCVVQKGKRDKYATLRTDIEQMKKFLRSESKADEKLHLTFEISGQAGYRYDRLCGHAEDITVSNPSKMTWIYRTATKTDRMDARKQAILLSIGEVPSVHIPSSQVRQWRVTILHRRNTVNKITAVKNRIRALLKANGFVKAPERGSWWKVANRTWMRSLAEEVKIEDEGLWRMNLVDMLEELCLLEGQLRRTTRYLDGYLGKQAGGRLLMSIPGIGPRTAEAVLAYTDDIERFGRSKQYCAYFGLTPRLDESGSSRRLGHISKQGPSVVRWLLVEAAWRTIKKSVALRTFYERVMCGQKGRKKIAIVAVARKLLSIMRAMQFTGELFNERLVCNECGVRRIAKVKNSA

SEQ ID NO: 468605 - protein, 336 aa, unidentified
MNLTKQIIGIDVSKDTFFSCCGTYDADNKRVFSKTKKFNNNKEGYIKLLSWSKTKTDEKKMPVIFVCEATGIYHENLLYFLSSRNVSVSVILPNKAKAFSRTRDMKSKTDKIDAVMLTELGLEKELKLWKNPDKTLKKLKELSRAIKATKDKQIIVKNQIHALEHSHEPNELIRLTLLEELAMHKKTIKKYEKVVKELIKTDEVLEQKINNILPAKGIGLSTIVTVISETDGFALIENQKQLASYAGMDVVQRESGLFKGKTRISKKGNAHIRAALYMPALSAIRSNTKFKGFYNRILQTRKIPGIGIIAVARKMLLLIYTLWTNKTSYDANYKTS

SEQ ID NO: 468606 - protein, 373 aa, unidentified
MKVLRFELMIERGLFGNNDKHQERKRSMKHYAGLDLAVKETAICIVDETGAICREGKVPSHPEDLLRVLTDPAWTLERVGLEAGPMSQWLFSGLAEAGLPVTCIETRHTKAFLKAQPNKSDRIDARGIAQMMRVNLFRPVHVKTLTSQKRRALLTARKLLQEKAIAIENDIRGLLRNFGLKVGVVGTVKFAYRIRELTEDMPDLAEIFEPLLDARDKLRHHFAALHRKVMMLARKDDTCRRLTTIPGVGSVTSLAYTATIDIPQRFRNSKAVGPILGLTPVLHESGESRRIGRITLCGDGLLRSLLYEAAQVLLKRSTKWSWLKAWAMNVAKRRGARKAIVALARRLAVIMHRIWVDGTKFRWTRQDLVHVAG

SEQ ID NO: 468607 - protein, 336 aa, unidentified
MFQLGIDVSKNTLDLCLLREGVKGRVKTRRLKNDVNAASSVITWLGKQQCAPADVHIIMEATGVYHEPLAYGLYKAGAKVSLANPHRSREFARGMDILTKNDQIDAYMLACYGALKEPEPWVPPPESIRYLSALLRRRDALVTDRSREKNRLEKCRATDIPPVIAESIENVLRNLSAEIERLDELLLTHLNQHPELKKDFDLLTSIKSVGFRLGLNMLVILRGHRFDTAGQLAAFLGVVPVEKSSGTSIRGKPKLSKNGPPEIRAKLYLASMCGLRFNPVMKAMYERLCLSGKAKMCAIGALMRKLVHLCYGVLKTQKPFDAEHLSSDAPSACKAA

SEQ ID NO: 468608 - protein, 350 aa, unidentified
MSIVGGLDIHRKQLTFDYLDTASGEVRRGQICPADRAHLAAWLEGRFTGETADFAMEGCTGWRYAAEELAAAGITPHVGEPADTAALRGRKRHAKTDKTDSRHLRVLLADGRLPECWIPPSHVLECRALLELYHDLRTEHTAWVQRIHAVLFHQGARQLGEQSLRTGEGLAALRSVAAAELSPAGQLQITVALDMLQVLEGHLDALRRRLIQAARQLTGARELHARLYGVGPATALALCCWLGGAGRFSSARKAVRFTGLDITVWSSDRKGPPGRLSRQGPEVLRWCVYEAGKAHARRCAPDHAYYAQVKERIDGKRAAISEARKIIRQAVHILGELGDDALTMDPRPSR

SEQ ID NO: 468609 - protein, 307 aa, unidentified
MNFYTQQHKQYCGIDLHARAMYVCILDQHGTKLVHKNLPTTPDAFLRVIAPYREDLVVAVECLFTWYWLADLCAKEGIAFVLGHALYMKAIHGGKAKNDKIDAHKIAVLLRGGMFPQAYVYPAEMRATRDLLRRRMHLARKRGELLAHVHNTNSQYNLPAIAKKIAYKANRDGVAERFADPAVQKSIEVDLALIGYYDTLLRDVELTIVKTAKHHDANTLYLLQTVPGIGKILSLVLLYEIHDIERFPRVQDFASYCRLVKCARESAGKRSGTSGTKIGNAHLKWAFSEAAVYSCEIIPPRRNFSPD

SEQ ID NO: 468610 - protein, 410 aa, unidentified
MRYYLGVDWADQTHAVWVVDERGTKITERAVPHTAEGLGEWGRELDEWRAQGIDLWAAIERPDGRVVDVLLDHGVVVYPVNPKALDRARDRFRQSGAKSDPFDARVLADFLRTDHAHLRALQPSSEAAQELKLLTEDCQRHIRQQTRLVNQLTATLKAYYPRALEVAELTSALAREFLPAYPTPEALTALTERQWQRWARAHRLPEARTADLWAVLQQPQLPVPAHVVRAKARLMRTLVEQLMPVVAAVAQYRKAIDDFFASLPAAQWARTLPIGKHGITAPTLWARLGDAPGRWESFRHLQAHAGTVPVTKRSGKQQRVVHFRFACDKALRHVVDQVAFLSLLSSTWARAYYDQQRARGHAHRQALRALGAKWLKIIFVMWERHVPYDEQYHLATMTRQQLRQRQEQIA

SEQ ID NO: 468611 - protein, 405 aa, unidentified
MKVYIGIDWSTQKHDIVFLNEEGGIILYQTIPHSPAGFEAFNEQRMKLGVSVEDCLVGIETKHNLLIDFLTSRQYKQIYVIPPSTIRDSRGRFGASKANNDRSDAHLIADMLRTDRARLHIWHADMLLTQQIAALVSLEIFLTRTITQTTNRLRNVLWRYYPNAARVFSSLDEQIALEFICAYPTPQTAADLTIEQFKGFAKLHRYPQPSKLPACYARLQKPQPVARQETVLAYQFEAVRLAHLALQAVQDKVSTLKEIQELFVDHPDYPIFSSLPGAGVLLAPALLAKFGDDRQRFPTAQVMQCVAGTCPVTKASGKHKYVAFRHACDHEFRLIVQQWAKCSIGSSVWANTYFQTIRPQCDSLSHAYRRLANRWLEIAWRLWQDRVPYDEVRHLRQHALRVKPN

SEQ ID NO: 468612 - protein, 352 aa, unidentified
MKKIVVGIDISKEKIDASAIDVREGQIGLVKLGYQVFENRPMGFRRMIVWAKRLIKGTRHEEVLFCCETTGGYDRALCDYVYAKGLDIWRESALQIKRSMGVRKGKDDKADSLMIAEYAMRHMDKAVFYETPSEAVRELKTLFLYRYKLVQEKTEKTVRMKEMEATAAKSKSMTFILRDARKSIKAIDKSIKECERQILQIYSDNENLKKNYDHINSVSGIGIVNATAFIAYTNNFANFTTANKIASYWNCASFRERSGTSVDKKAYVKCYSSSLLKAYLTQAAECTVKNHGIYHDYYLRLNAAGKPYGVIINNVRNKLIHMVFSLVNNDMDYEENHEFIREKRKGKQKLSA

SEQ ID NO: 468613 - protein, 303 aa, unidentified
MSKSWVDVHVRPDGTALRCNTDGAGLAELVRRVRPLTPRLIVMEASGGYESIVAVSLAEAGLPVAIVNPRQVRKFAEALGQLAKTDAIDARVIAHFAEAVRPPPRPMPDPMITQLQELLARRRQLVVMINAEKQRFAKAESRITQRSHQAMLRSLEAEQARIDRAIDKLVRQSPLWCAKLDLLTSVPGVGDIVARTLIAELPELGTVDRHQIAALAGVAPFSRDSGRRKGKRFVRAGRVQVRAPVYMACLVAIQHNPPLKTFYRRLRAAGKPTRLALVAVMRKLLTMLNAILHGNQPWAFAHS

SEQ ID NO: 468614 - protein, 342 aa, unidentified
MNVARIGLDLAKSVFQVHGVDVVGQAVVRRRLARSQLLAFFGRLPACIIGMEACSSAHHWARELTRLGHEVRLIPPQYVKPYVKRNKTDAAGAEAICEAVGRPHMRFVPIKTVAQQAVLALHRVRSLLVRQRTATINAIRGLLSEFGLVAAKGPARLDELRRRLASAAPEQVPPAARLAVEALFAHVDDLRARAEAIEAEILAWHQGNEASRRLAAIPGVGPLTASALVAAVGEGRQFRSARHFAAWLGLTPRMASSGDKQRIGRISKGGDRYLRTLLIHGARAVVGAINRPNLRPRPWLTPLLARRPIPVAATALAHKTARIVWAMLSRGEAYRLRAATAA

SEQ ID NO: 468615 - protein, 485 aa, unidentified
MARRKLSTFERLQRGERLNRKERREVQQRLNLDDPGLDIIHRDAAGIDVGNESHFVSVPPDRDPQPIREFGSWTGALEEMARWLKRCGIGTVVLQSTGVYWIALHDVLQRQGLEVNLVDARGTKNVPGRKSDVQECQWLRKLHTYGLLRPCFLPPPEIQAVRSFWRLRSQHVRDAGRCIQQMQKALIQMNVQLHIALSDLSGVSGQAIIRALLAGERDPKVLAQLRDSRCQASEEEMVQSLQGNWKEVLLFELQQAVDAYDFYHQQMRKCDQQLQRSMAALPTRATVPTAASVSPLPSAKQGKQGRARKPRKPIGNQPRFDLGAELERILGVNVATIDGIDVMTIQTVLAEVGPDLSAWKTERHWTSWLNLAPKRDISGGRVIRHVRQHHTNRAGNAFRMAAQSLVRSQSYLGARYRYLRAKLGGLKAVKAMARFLACLYYRLLTQGQIWVDRGTEEFDRRSQQRELAALQRKARKHGLQLVPAA

SEQ ID NO: 468616 - protein, 411 aa, unidentified
MSQKSNCAIAVIGIDIGKNSFHIVGHDQRGAIVLRQKWSRGQVEARLANLPPCLIGMEACVGAHHLSRKLQMLGHDARLMPAKYVRPYSKGQKNDFRDAEAIAEAVQRPTMKFVATKTADQLDLQALHRVRERLVGQRTGVINQIRAFMLERGIAVRQGLRSLRSELPGILATRTDVLAPRMLRIIEDLAGDWRRLDARIEDLSSEIEALARQDKGCERLMTVPGIGPIISSAMVAAIGTGDVFSKGRDFGAWLGLVPKQISTGDRTILGKISRRGNRYLRALFVQAAWVVLVRVKCWERYGLKSWIEAAKKRLHHNVLAIALANKLARIAWAVLNKGRAFECVKTEETASLACLILAPCSGPSRRSLAAVEQDVRTARRPALTALARGASARAGRDEGTTARHEQRNSAK

SEQ ID NO: 468617 - protein, 368 aa, unidentified
MNNYNTVVGLDVHKDMIVAAVLAPGSDTFALTTKIENQPMQIESFIRRLQPRGRLEFVYEAGPCGYEVHRQISAMGHACTVIAPGLMPRKPGDKVKTDRRDAEKLAKLQRAGELTAVRVPTREEEAARDLTRVREDALTDRLRARHRLGKFLLRQGLVWRETSAWGVRHRVWIRSLRFEFPAQEQSFVAYLRAVEESEARIAALDAQIEELAQTTGFREIVSKLRSLRGIDTLSALTIAVETQDFGRFVSAREFMAFTGLVSREYSSGGSVRRGAITKVGNAHIRRVLVEAAWNYRQGNRTGKALEDRRRDCPPEVLGIARKAQERLTQKFRRMTGRNKPSQVAVVAAARELAGFVWAIGRTCVKAQA

SEQ ID NO: 468618 - protein, 339 aa, unidentified
MNQTQFFIGIDVSKPYFDASLLPVINHLKKDIVSERFDNTAEGIKVFGRWLKTNKVSFDENTLLVIENTGIYHRLLWSFCSKMNLSLHIGNAAHIKWSFGIIRGKNDKIDSLRLCKYAYKEADALKSTPALNPVLLQLKDLMTARTRLLSQINSIKTYIKELRNVSDKNIQKTLEGAHQTAMAGIALSIKSLEDEISKIIIQNKAIKGNYDLLVTVPGIGHLTAVYLICCTNNFSGKITGKQLACYAGVVPFEHTSGISIKGRNKIHSMANKNLKKMLHLCALTAIRKYPEFKQYYDRKKDEGKHSMSILNAIRNKIVLRAVAVVNKQVPYVDNVKNAA

SEQ ID NO: 468619 - protein, 431 aa, unidentified
MEVIHPRVAGIDVHKKIVWVAVRLPGERPGERAVTAKRFKTFWRSLRQMAAWLAELGVTDAAMESTGVYWWPVYHALVQAGIEVCVCNAAHMRNVPGRKRDIADCQWIAELHEHGLLRPSFIPTGAVAELRSRTRYRKKLIEQRTSEGQRLAKVLEDAGIKIDSVASRLLLKSGRAMIEALIAGERNPGRLADLALGRLRRKTEELQLACDGRFTAAHGQMCRLHLDAYDHLTAKIAELDALVAEAAAPFAALIARLETIPGIGRRTAEVIVAETGGDMARFATAARLAAWAGLAPGDNESAGKRKHAAARKGNRHLRVAMVESAWATARTRTRPGARFRRLARRFGKGNEKKAAIAVAHTLICIAWAVLSRGQDYADAGEDYYEQRDRRDREHLIRHHQQALARLGYQVTLIPPGDGSPPPSATSKQPAA

SEQ ID NO: 468620 - protein, 339 aa, unidentified
MKTYCGIDLHSNNNVIVIIDETDTILLERKLSNNLGVVLDALSVIRKPISGIAVESTYNWYWLVDGLQEAGYTLHLVNTIAVKQYDGLKYSDDKHDAFHLAHLLRLGILPTGYIYPKDDRAVRDLLRKRAQLVQQQTAQILSIQNQLTRNTGHQFKANEVKKLTSFAIRRSIREPNIQEAILSNLCVLNVLASKIKSLEQLVLKQIKLKPEFIKLQKIPGIGVILAMTIMLETGDINRFEKVGNYTSYCRCVNSKHFSNGKQKGQGNRKSGNKYLAWAYMEAAIFSIRFNEKAKQFYQRKMAKTKRIVALKALSHKLARACYYVVKNNEDFDNQRLFSG

SEQ ID NO: 468621 - protein, 355 aa, unidentified
MSSEKYIGMDVHQATISVAVLDAQGKTIMESILETKASTLLEFLGGLRGTLNVTFEEGTWAAWLYDLLKPHVAKVLVCNPRKNALLKHGSKSDKIDAQKLANLLRLNDLKPVYHGETGVRMLRELARSYLAIVKDLTRVMSRVKAVYRSWGIPCGGRDVYYTRHRQQWLNKIQEPGVRRRAEQLYQQLDMLQPLRQQARRELLRESRKHTITAKLRRIPSLGPIRSALAVALIQTPNRFRTKRQLWTYSGLGLETRDSGEYHYVKGQVRRRKKQKFIRGLNRDYNHDLKGLFKGAALRATMLPGPFQDFYQRSVAKGIKPTMVRLTLARKIAAITLTVWKKGENFDADKVKPQAA

SEQ ID NO: 468622 - protein, 408 aa, unidentified
MPICQGKAAPTSRTETFAAFVGIDWADKEHAICVLDGDRMTFEQLEHSAEAIAEWAERIYQRFGGRLVAVAIEQSRGGLFHALLQYEHLKLFPINPKQAANYRKALSCSGAKSDPADADMLARFVREHHDQLRAWKGDTAETRLMARLCELRRKVVETRKSVAQRLTSTLKLYFPAALDLVGPLHGPLALELLGRWPSLRELQRANPKTLHKFFRRHGRRNDEQVKEQVQQIRALRPLTQDAAIIEPNALYVGMLVKQIEQFNGSLVKFDEQIATVFAKHEDAALFRSLPGAGEALAPRLLAAMGSDRERFSAAKEVQAYCGIAPVTRRSGQACHVSMRRACPKFIRQTFHEFADHARKWSAWSKAYYQHLRDQGKRHHAAVRALAFKWIRIIFQMWKTRTPYDENRY

SEQ ID NO: 468623 - protein, 379 aa, unidentified
MEISSSTLPAVAAERATMFVALELSKSSWLVALHSPVADKVSMHRFVGGDVAGLLALIARKQTQAEARLGRTIRVLSCYEAGYDGFWLHRLLCARGIDNRILDAASILVDRRSRRAKTDRLDAAGLLRTLMALDRGESRVCGVVRVPSVAQEDARRRSRERTRLVVERGQHSNRIKGLLMTLGVRDFEPTRRDWQERLGGLRTADGRELPACLKAEITRECRRLHQVLVMIAEVEAEQAAALDAEEGQAARLIRLRGIGLVSATVLADEVFFRDFRNRREVAGYLGLASSPWASGRVQRDQGITKSGNPRARRTAIELAWLWLRHQPGSLLTQWFRQRVGTTRGRMRRIMLVALARKLIVALWRYLSDGLVPDGAELKA

SEQ ID NO: 468624 - protein, 381 aa, unidentified
MKNVYTKRMGQAARPSVVGDRSVARVVPSLLPKSSNSCLGYPSPHVLQGRATLEQIKIIKEDCLLEVPLIFVGIDVCKAQLDVAIRPTTQILSVPNDKAGIKTLVKHLEKLRPTLVVLESTGGLERQVMLALVGAELSVVMANPRQVRDFAKSTGQLAKTDRIDAAVLAHYAEAIRPQPRPLPDELTLELRALTARRRQIIDMIVAEKNHLATASKAIKKRITAHITYLEQELDDADQDLDRFIGKNPLWKQNQEILCSTPSIGPVSSRTMLAELPELGTLGRKQISALVGVAPFPRDSGTLKGRRTIWGGRASVRGALFMATLSAIRFNSVIRDFYKRLKAKGKPSKVALVACMHKLLTILNAMIKNKTRWSENFFLKTT

SEQ ID NO: 468625 - protein, 419 aa, unidentified
MAQQKYTESVFIVHPVCCGLDVHKNKISSCLVYEQGGEVCIEIREFTAFTDDLIQLRDWLLEHQCPVVAMESTGIYWRPVHNILEGYLKVVLVNARHYKNVPGRKTDIGDSQWLAELLRYGLVKGSFIPPKEIRQWRDLTMQRKQYVLTEADFRRRVQKLFESANIKIDSIVSDLFGVSGRNLMSVLLSVSPEHISKEDIQACLRGSLVKKTDELFRSIQGFFTDHHRFILASYLDLIDVLRGKIDRINAHLSELMSKETQLLERIQEVPGIGPVAAATILSLIGTTMDTFSCAASLCSWAGLCPGNNESAGKRRSGRSPVRKHPLKEILVEVAWAAVKVNGSYYKDKYYRLKARRGAKRAIIGIAHRVLKAIFHIIKHEKYFHELGEEYLSKRNEKLQILRLKKMAERHGYELVAKAA

SEQ ID NO: 468626 - protein, 298 aa, unidentified
MRFYTKQHRYYCGIDLHARSMYVCILDNEGNTVVHQNIKTSRSSFLAVIQPYQEDLAVAVECIFTWYWIADLCRQQGIAFVLGHALYMRAIHGGKAKNDKIDSQKIALLLKGGLIPQAYAYPAERRATRDLLRRRMHLARERADLIAHIQNTVSQYNLPPLGCRIGKKSERQEVVEHFPDPVVRQMVALDLTLIEHYDEQLRVLEQDLAMKAKAHDAYAYHLVRSVRGIGRILTLVILYEIEDIRRFPTVQQFASYARLIKCSKESAGKTYGYSGKKIGNAYLKWAFSEAAVLFLRGP

SEQ ID NO: 468627 - protein, 460 aa, unidentified
MNRKKWKSKIDRTMPVVHPNAAAIDIGATMHMAAVRADRAPEPVRSFGTFTADLHRLVDWFAECGVETVVMESTSVYWIPIFELLDARGFTVFLVNARDAKHVPGRKTDVSDAQWLQRLHSFGLLRASFRPKGQIAELRAYVRQRERLLEYAASHIQHMQKALTEMNLQLHHVVADITGATGLRIIRAILAGERDPEVLACLRHYSCHSSAETIAKALTGSYRPEHLFALDQALALYDAYHEKASACDVRIEAVLKELRIHRGRDYGSAPPVSRRRNRTDQANALAFDVRAALFGLLGKDVTTIDGLGPYLSLKLIAECGDDLTSWPSAKHFTSWLGLAPSNKVSGGKMLSSRTRRSGGRAAALLRLAAVTVGRTDTALGAFYRRLSSRIGKAKAVTATARKIAVLFYNAVRHGMDYVDPGASSYEIRYRTRVINNLHRRAKAFGFVLQPLEPKAGAAVS

SEQ ID NO: 468628 - protein, 444 aa, unidentified
MVCSGMILIREVADAPVIMGISKPAGLKSPCGEVKIVNPLFVGIDVSSKNNVAYLMKPDGSKHSSFSVQNNLGGAKLLSERIVSALGSMQLERVVIGLEATSIYGDSLVYALREDGRLGRFQRKIHVLNPKQVRKFKEAYSDLPKNDWVDAFVIADHLRFGRINREVYMDDYRYKALQTLTRARFDVIQNLTREKQRFANYLFLKCSGMAQDKDIQNTSATTIALMEHFETVDDLANADLEELTAFITETGRGKFADPDATAKAVRAAAKGSYRLPKTVNDTVNQAMAVSIASMRALKGQVKVLDKAIEQQFEIIPNTLTSIPGIGKVYSAGIIAEIGDIHRFDSQASVAKYAGLVWNRSQSGDFEAEHSRMIKSGNRYLRYYLLEAANSVRRCDSEFRRYYDLKFKEVNKYQHKRALALTARKLVRLVFRLLKDNRLYIPSEG

SEQ ID NO: 468629 - protein, 310 aa, unidentified
MEQTYVGIDVSKDRLDVHVRPGGEAFVVSRDGKGLEELIDRLRTLAPTLIVVEATGGFETVVAAAIGGAQLPLVVANPAQIRHFAQAVGKRAKTDPIDAEMIARFAEAVKPTPRQVPDEAAHLLGELVARRLQIIEMLVAERQREGRVGNVRVRKSLVRHIKVLERELQDISDDISGLIRGSPAWRETEDLLVSVPGIADKTSSSLLAELPELGRLTRRQIASLVGVAPFTQQSGRWRGKSMIAGGRAAARSAIYMAALSASQHNPVLKAFYRRLLAAGKPKMVALIAVARKLLVIINAMIRDKTPWQYA

SEQ ID NO: 468630 - protein, 416 aa, unidentified
MEVLYPRCAGLDVHKDTVVAGVRLAAAGAATTEVRSFDTTTPGLLALSNWLAEQGCTHVAMEATGVYWKPVWHILSDGDFTLILANAAHVKNVPGRKTDVADAVWLADLLAHGLIRASFVPEAATQEMRALLRTRKQLVREQASHVQRLQKTLEDANLKLASVLTNVVGVSGRAILAALIDGERDPDKLLTLVQRGVKAPPERLRAALAGRITERHRFLLRLHLRQVDALDAAIAEIDAEVERELDPFRVAVRLLRTIPGVSDLTAQVIVSEIGTDMSRFPTAGHLISWAGLCPRNDESAGKRRSTRLRKGAPWLKTTLVQCAWAASHKKASYLQAQFQRLRHRRGPKKAICAVAASILTAAYHMLRDGTLYHDLGHDHFRRASPETQAARLAKQIARLGFTCTITPIPHAVEVSV

SEQ ID NO: 468631 - protein, 316 aa, unidentified
MSNYSTFLGIDIGKSEVFVGKYGTKSTTSFPNSKTGFNKFFKTYNTELSNAFVVLETTGGYEKLFLDALLDKNIAVHRANTRHVKSFIRSWGTLGKSDALDAQALALYGHDRHQRLVLFQKLSPQQIKLNALTQRRLDLTQMLVQEKNRLQSPHADPFIIKCCQEIIQTLEAQITFVTEEINALIKKDPLWSRKQEVLQTIPGIGPVVSAMLLAFAPELGQINRRQIASLAGVAPHPYESGQKVGYRRTQGGRQQLRSLLFIAAMAARCSHSPLKVFYEKLIAKEKKKMVALTALMRKILIIANARLKELEGVQAP

SEQ ID NO: 468632 - protein, 351 aa, unidentified
MSQEHALPIAVGIDVAKATLSVHARYQDGTGTALSIGNTKTDITRCLARQLAGYKGKVVMESTGHYHWLAALLLTEAGADVRVINPILGKKYTSASIRKVKTDPIDAKLLAEMCLKEEHLPPTFCQNAEAMRRRKKLGFIASLRTNLSSLKAMETSLREAHAIIGGALSAAEDQVLATVHELEKDIRRLEREFAKEARSVEGADRKFEILTSIPGVSPFMAATGLHWFSLDAGATPKSWTAYAGLDVSVRESGTWHGRCRLTKRGNNYLRRRLYSSAWGAVMHDPDFKKAYDSLRKKDGRAHVEALVILARKIVRIMFQVLSTDTVYDPLKAFPEPPDRQVASSFTKLSIA

SEQ ID NO: 468633 - protein, 406 aa, unidentified
MADIFALDVSMGKSYCVWYRGRHCLKEFSLVHTKTGFNNLLNIVKKAQKPILYFEATGIYSRVIEHFCEINNLRFCRLNPLELHLKSESLRRLKTDQKDAHRIVLTVQDNCFRLTISWSKDYLQLHELSRFYNQLNADWTYRLSHLHTALEQTFPELKQLFINQTSKLALNVVELFPHPALVNPYSRVKLKNILMSSTDKRISKMKAYKYADRLLDLAQESYPAVDSDAIQVDEVRYYARQLIALTKKKEEIIKQMETTAQHLPEYILYCSFPGIGKQTAAQLMGELGDISRFDNSNQLNAFVGIDIRRYQSGTYLGQDHINKRGNPVARKLLYFTVGNMIRQQHASPNHIVDYYYRLKEKRPHPKLNKVAMVACMNKTLKCLLSMIKHHEKYHYRYTDSMVPVKA

SEQ ID NO: 468634 - protein, 345 aa, unidentified
MEQIIRIGMDTSKHVFQLHGVNAAEVPVLRKKLRRKEMVAFFEKLAPTVIAIEACGASHHWARLLQSFGHTVKLIPPQLVKPYVKRGKNDAADAEALCEAMSRPTMRFVPVKTDEQQAALMLVSVRDRLIRNRTQLANAIRGHAAEFGLTAAKGMAHLVPLLDRIQADESLPALARELFALQANEYIQMQAQIKEIDAKLTAWHRADECSQRLAKIPGVGPIGAVLLRMKTPDPELFQSGRQFAAWIGLTPKDHSTAGKVRPGGITRAGDEGLRSVLVVGATAVIQQAQRSGKASPWLAALLKRKSPKLAAVALANKIARIAWKLMLTGETYTAKSVATAVAGVA

SEQ ID NO: 468635 - protein, 430 aa, unidentified
MKSNTQNAKIEAITEKTLVLGIDVGSETHYARAFDYRGIEYSKKPFKFSNTEAGFVTFKEWILDLKERHEKDKVVPGMEPTGHYWFNLGKFLQDNEMKPVLVNPHHVKKSKELDDNNPTKNDRKDPKVIAGLVREGRYMIPYLPDGVYADLRTASNIRFQLQAELTRIQNRISRWFNIYFPEYKTVYGKPDAKSGMLILKAAPLPEDILTLGIDGVNQIWRDAKLRAVGKARAKTLIEAAGHSVGSKEGAVSARMEIRMLLEDYESRNMRLQEVMVLIEELVKGIPMAEKLLEIKGVGIRTVSGFLAEVGDISRFNNPKELQKLAGLALVENSSGKHKGETTISRRGRKRLRYLLFEVAMSLVAKNPEFRELHNYYTTRRLNPLKKMQSLMAIAAKLIRVFYAMLTKGVDYDPKKMVSGIRRPEAYLQAA

SEQ ID NO: 468636 - protein, 433 aa, unidentified
MSKFFNSPTVGIDVSADFSFVAILAPNGDVFKKPFRIKHDVSGFNHLLKEIKKVEEEFNMKTAIFMESTGVYHLSLFHFLNKNFDNTFVINPLVTKCNKNVDIRKVKNDKKDALSIAQIGKFQNIKLSQSVSMDIFQLKSLVREYYKLTDNCSTYKKKLSTDLRVIFPGYKNVFSNVTSNSSIAILNEFPTPQAILSAPKDLIINILMEKSKKGLIWSEKVYSNLINYANEATIIGLPLHGFSVKITSTIKIIKTLEAEIKNLLEQIESLINSPNFSEQIRNNIEFIDSIPGIGRLTAVTLIAEIGDINGFLRPKHLVAFFGIDSSVNESGKFKGNQNKISKLGTRIGRRALYAAALACIRTNRNGVPINKILLDYYQINLNGKKPKVALVAIMHKIINYIFAVLRNQTPFEVRDPRIHKQMYLENKNKNTAA

SEQ ID NO: 468637 - protein, 346 aa, unidentified
MLYVGVDVGKSKCRASMMNAEGKIMKEIDFTNNSQGISSLTSLLSLDDHVVMESTGPYWLDLYNHLDDLHIPVVLANPLKTKAIASARIKSDKVDARILAHLLRTNLIPECYVPPKEMREIRSLVRHRVSIVKLRTMVKNKVHALVDRNGLKHEFSDLFGKAGMKWLKSLELSRLDRLMLDNYLLHLESLNVQIERVDDEITSKASVDGDVRILMSLTGISVYSALLIKSEIGTIERFADYKKLVSWAGLAPSLHQSGNVEYHGSITKQGSTMLRWIMVEAARVASNHDPRLRVFYERVKQRRGDQKAVVALANKMLKIIWFMLTWKEEYESANEKSYARKLNSLE

SEQ ID NO: 468638 - protein, 315 aa, unidentified
MSKKTLDTSYAQGQRKQARIFENSSDGWKQMLSWLKAKGSQPAHVGMEATGRYSLGAALMRHDAGHTVSIINPAQIRDFARSKLGRNKTDKADAALIREYTTLFRPQPWTPPSPAMRRLCELQTVRAGLVANRTEWKNRLGSGLGDSTAIQVAKAVIDALSSQLKVIDQAIAETIEQDGDLRGRRDLLLSVIGVGDTLAALLLAEMPEPGVLRHSAEMIAYAGLNPSHHRSGTSIDRPTRISKIGNATLRSALYMPALSAMRFNPVVAALAARLKSAGRLKPKQIVVAAMRKLLVLCFGVLKTGKPFDPAIAMPT

SEQ ID NO: 468639 - protein, 400 aa, unidentified
MTPRDQKTERRPSAPTRLRVMNPHAAGIDVHATVHWVAVPAADAPAPPPDHPPNLPPHVRSFGACTADLIALANWLTTCHVRTVVMESTGIYWIPLFELLESRGFQVLLVEPRQSRHAPGRPKSDVLDCQWLQRLHSYGLLSGSFRPAEQIVVLRSYLRQRQMLIRYAGQHVQHMQKALEQMNVKLTEVVSDVCGVTGMAIIRAILRGERNPLALAKLRNDKCKRTEAEIARALYGNWRVEHLFALQQAVTLYDCYREQLRVCDEQMQTYLATLADRSQGRPRPRRHGRARRERRRNDPAFDVAGALFRMSGVDLTVLEGIDPSTALVLMSEIGPDVSRFPTVKHFCSWLGLAPQHQMSAGKIRKRRVQGGASRAGQALRMAGQACYHAQNVLGAFYRRV

SEQ ID NO: 468640 - protein, 438 aa, unidentified
MSNKVIFNLDDLFISVGIDVGADFSWMSIALPNQQFVGKPYKILHNSIDSLTTAVSKIKEAEELYSLESRIFLESTGIYHYPLFCYLRDKGFNCSVINPIITKNSTNINIRKVHNDRFDSKKAALVGLKPDLKVSLMPSDLALNCRNLCREYYDLMDNRGAYVNKLQGELRMAFPQYLGIFSKVTINTSLTLLETYTSPSAFLEADKQEIIDIIKSTARFGLTYAQNKYNAIIQAATDANQFGYIIDSNIKRIRLYISFIRKYDEEINNILESLHELVDANEDADFVKQIHLIETFKGAGFLSAVSIMGEIGDFSAFSKPKQLFAYFGLDPAVKQSGKFEGTKVQMSKRGSAIARRVIHTLTLQSISISRNGEAKNPVLREYYLKKCDSKPKLVAMGAVSHKVCNMIFAILRDNKSFEIITPQEHIKQYNASKCDMAA

SEQ ID NO: 468641 - protein, 342 aa, unidentified
MEIITVGLDLAKNVFQLHAIDGAGAVVLRKRLRRAQVLSFFAELPGCVVGLEACGSAHFWARELIALGHDVRIIPPSYVKAYVRRGKNDAADAEAICEAVQRPNMRFVPGKSEDPQSALMLHKARNLIQRQRTMLINALRAHMAELGVVVAQGPSRVVDLIAIIEDDDDETIPHLAKAALRPMVAQLRACETSARELEGEIRGWHRDHEASLRLATIPGLGEITASAIAATVPDASFFRSGREFAAWLGLTPRQNSSGGKDRLGRTTKQGNRHIRSLLVIGATSLLRYWRGKLGAEAAWVNRLLERRPPRLVTVALANKLARIVWAVLVRGETYRRPSAAAA

SEQ ID NO: 468642 - protein, 343 aa, unidentified
MQVVTTVGLDIAKSVFQVHGVDAAGQVVIRRQLKRRYVLAFFEKLPAYLVGIEACASSHHWSRELKTLGHTVRLMPPAYVKPYVKRQKNDTADAEAICEAVTRANMRFVATKTPVQQSCLTLHRTRHLFIRQQTAVINVIRAHLAEFGIVAPVGRKGIETLLDVVANPTDKRVPVIARACLAALGAQLRRLKEQILEFDRMIMAWHRSNEASKRLDAIPGVGPVLATALVASIADPKAFRSGRNFSAWIGLVPKQHSSGGKDRLGNISKQGDRYLRSLFMAGALAVIRYAKIHGTTHRPWLTALLARRPTKVAAIALANKMARMVWAMMTRGERYKDPIALAA

SEQ ID NO: 468643 - protein, 334 aa, unidentified
MWHIGIDLHRQFIVMAAVRDNGEIMEPVKIACQETESILEAIRSLTPFRAVVEASGTYRWLYDLLRPHGTILLAHPLRLRAMIQRRSKTDKLDSQLLANLLRINQIPLAYVPPEPYQQLRDLVRCRAKLGQDRAEAKIKLRDMLARQNLLSPYAVPFGPRGFAWFRGQDFGMVGNMLRDELLARLEHFNRQIATFDEQLAHCQPDFPQTEAITDIHGIGVYSALLIVAELGEVERFRTAKQVGAYAGLTSRVHQSGGHCYQGSITRQGSPWLRWILVEAAMKTIREDAALKNFYQRVRKRSSAKIARVAAARKLAEICWKRLRRWEREHAGKAA

SEQ ID NO: 468644 - protein, 354 aa, unidentified
MSEKLNSVIAVVGIDIGKNSFHVVGLDGRGAIVLRQKWSRGQVETRLSNMPACLIGMEACVGAHHLSRRLKLLGHDARLMPAKYVRPYSKGQKNDFRDAEAIAEAVQRPTMKFVATKTADQLDLQALHRVRERLVSQRTGIINQIRAFLLERGIAVRQGIRFLRAGLPGILATPPDVLSPRMARVIEELADDWRRLDERIEGLSSEIEALARQDSGCERLMSVPGIGPTISSAMVAAIGTGEAFSKGRDFAAWLGLVPRQISTGDRTILGKISKRGNRYLRVLFVQAAWVVLIKPKSWERYGLKAWIEAARKRLHRNVLAIALANKLARIAWSVLAWGRNFEARKTDDAAAQSV

SEQ ID NO: 468645 - protein, 440 aa, unidentified
MQILYSRCCGIDVHKDSVTVCVLVYSGSAEPDIRKREFATHYKALLNLKMWLLAQKVTHVAMESTGVYWKPVWQALEGSFQLILANPQQIRSMPGRKTDVRDSQWIAELLAHGLIRPSFVPSGPTRELRDLTRYRVKLTEERNRIHNRIHKVLEDACIKLDVVASDILGATGRAIIQAIIAGQEHPDWLADKAKGTLRGKRPELRLALRGRITDHHRLMLHELMEEIDFVERKIKRLESQIAPKVEVEALARLATIPGIDLITAWTLLAELGSDMSVFSSPRHAASWAGLCPGNHESGGKRLSNRTRKGNRWLRRALCQAAWAATRKKNSYIAAFFYRKAGKHGIRKAIVATAHRLLIIAFCILRDGGEYRELGDNYFDRLHPERTRNRLVRRLQRLGLDVFLQPRVESLIAPPPVPPLIRKRGRPCKCAERAIPCKHTS

SEQ ID NO: 468646 - protein, 426 aa, unidentified
MKNENVLNTLFVGIDVGSQTNAVHATDFSEEKTFKCTVSNNQPGSELLVQKIVAFMKDKHLACLVIAMESTSVYSTHIASFLSTADILIPFNPKVYCLNPKITKAYKKTFIAEGKSDPGDAFSVADFARVGKIKSEPWRGGQYLAIQRLTRHRLHLVEAIAREKNYMLSNIYLKFSELAVIDDDRQPFSNRYGVTASAVLTEFLSTEDIASMPLPDLTAFVNQKGRGRFADPEATARLLQQAAQNSYRLDKCAYEPITLSLASSFNCLRAFEKEVKAVDKAILQTIKGFNTHEYQCFTSIPGIGPVFAAGVLSEIGTITAFKSHESLAKYAGIIWPPNESGKFKADDKRLSKQGNSYLRYYLIEAANSVRNHLPDYKDFYSKKYAEATTHKHKRALALTSRKLIRLIFGLLDKNQLYTPTGGVNTI

SEQ ID NO: 468647 - protein, 467 aa, unidentified
MQLRLGIDIACRAPHQASLADERGEFVFTGRRFRTSVEDLEHLWTMLPEGTESGDVTVIMEPTRNAWVPLAAWFRRRGARVVLVPPERSADLRAYYAKHTKTDRLDSRMLARLPLLHPEGLHEEHGLGPGDRLRRATRLHQTLTRRRSQSLARLDAMLEILGPSWLGVFGADLSNKTPLRFLAAGYACPHTVKRLGKARVARFLYRHSRGRWGEEEAEALLGAAAETLALWADDLEFAELADDIAIEARLALHLGEELKELDERIAIFLAEADPTGILTSVPGIGRVLGGQILGRLGDPNRFRTLAGVRSFSGLVPSLDASGVSGRHGGPTKRGDACLREAVFMAADQARRCDPSLAARYNRLMVEAGKHHTSALCHVAAVLLTRIVACWRAGEHYVIRDVDGTVVDLVEGRRIVAERYTVPADLRAVRRAGGRVEDRRGTDRRSKGSLRAPSTGPSLANATALAGA

SEQ ID NO: 468648 - protein, 344 aa, unidentified
MELFVGLDVSLNSVSICIVTADGVAQWQGKSLSEPAALITALSPYRNEIKLIGIEACPLSEWLYGALIESGFPTVCIETRHAQRFMSSRPNKTDRSDARGIAEMMRLGHFRPVHVKSKASQLVRTVLIARQKFVDHLVAIELTIRGLLKVHGLKIGAVHRCAFAAKVEALLADAPELRLAIEPLLESRNAMRKQKVLLDRRLSQLAREDEICKRFMTIPGVGPIVSLAFKATIDDPRRFQNSKGVAAHLGLTPRIYQSGEIDRSGNISKCGDKLMRHALYEAANSHLRISKKWSSLRAWGVKLAKRVGAKKACVAVARKLAIVMHYMWMEETDFRFGKTPMVSA

SEQ ID NO: 468649 - protein, 337 aa, unidentified
MEYFAGLDVSMAETHVCVVTRNGTVVHEAKAPSTPTSIAAALARVPNCRWILFETGRMAPMLYHGLSQLGLPVVCVESRQAHQALKSLATHKTDRNDARGLAHLARTGFFKPVYVKSLPAHAIRSLIIARKKLVGQRVTLENQIRGLAVVFGVRLPRALSPAFIRQALQASDGIPGLSAAMRGLVAARAAVLAAVVAIDGDIRKMARASGACRRLMSIPGVGQLTALAFTAAVDDPGRFRRSRDIGAYLGLVPRRYQSGEVDYTGGISKCGDRRVRTLLYEAANVMLTRYKGQLKLKDWALAIAKRSTMRKARIALARRLAIIMHAMLQHGTEFNPA

SEQ ID NO: 468650 - protein, 365 aa, unidentified
MSKSVTYVGLDVHKETIVIAKAAGRQRAEVVKKIPNDWPKLLKALDGLSPKERLRVCYEAGPTGYDLARRLNSTGVCCIVVAPSLIPVQPGKRVKTDRRDARRLAELLRAGELVEVKIPERETEAMRDLERARDDAKNAERAARQQLDKFLLRHGRIWSDGTKWTHRHWNWIERQEFAAEAQRRVLADYIRAVKEATARIERLEKDLEELVESWALAPLVRSLQALRGVGLLTAVILAAEIGDYARFRTPRQLMSYLGMVPSEDSTGQRRRQGRITRTGNGHARRILVEAAWNYRFRPRDSKAIRQRREQVPESVRAIAEKAEQRLSRRYQALVAKGKASPKAVMAVARELAGFVWAIAQATSAL

SEQ ID NO: 468651 - protein, 429 aa, unidentified
MNVYETVNCVGIDVSKGKSTIAIMRPLGEIVQSPHEVKHTLSDLKALETTLRQLEGETRIVMEYTGKYYQPIARFLNNAGFFVCAVHAKLIHDFANNSIRQIKTDKADAVKIANYGLTNWNLLRRYTNEDETRLLLKTYNRQYNMFMKQYVASRNNFISLLDQAFPGINDLFSGHRRPDGHEKWVDVATRFWHAECVSGQSLNAFTKIYKDWCSRNGYRGRDDKAEAIYRLAKESIPSLPKNDFTKAIIQQAARELTNTCLTLAELQQQMNFIASTLPEYPVVLDMGGVGTTLGPQIMAEIGDVRRFPRREKLVAFAGVDVPPYQSGQFEAKDRHITKRGSSDLRKNLYQVIGCLMQHSMEKDPVYRFVAHKKAEGKHFYSYMVAGCNKFLRIYYARVKAYLNHLEQQELDSLIDGSGGSEVVLQPLDC

SEQ ID NO: 468652 - protein, 434 aa, unidentified
MENHKHYVGFRNHTLILLKSAKDHFVTFAGFCHLLAGLQTLGIIPPSDGMFENEGISCEVFNLGYEDVPYKNTELMPMARKPTDFRGQNIYVGIDVHKKSFTVSVHGEGLFYKTFSQPADGQVLVKYLHRNFPGASYSAVYEAGFSGFWLQEFLESNGVNCIVVNPIDVPTTDKEKKQKRDRIDSHKLARSLKNGDLEGIYIPAFKVRQDRNLLRTRQQLVSDQTRCKNRIKSMLSFFGISIPEQFSHSGRYWSHRFMAWLKEVDLREESGNISMELLLKELLHLRELILRTDRAIWRLSKSGFYRDQVELLLTVPGVGRLTSMILLTELGNVSRFKSLDRLCSYFGLIPNVYGSGDTERIGEITKRGNGRLKRSLIESSWVAIRNDPALGLKYQELCTRMKGNKAIIRIARKLLNRIRYVLLNNTPYQMGVAA

SEQ ID NO: 468653 - protein, 415 aa, unidentified
MEIVYARVAGIDVGKREVAVAVRVPGQSPGQRGQQVRKFKTFYPVLQQMVRWLVEQGVTHVAMESTGVYWKPVFHALCESDSLEIVLVNARHVKNVPGRKSDVIDCAWLGQLLECGLLRGSFIPPPQIAAIRELTRYRKKLIESRTRELQRLSKVLEDGGIKIDSVASSITTLSARDMIEALIGGERDPRVLADLARGVMRKKIPDLTMACSGRFGDHHGLLARMHLEHIDHLTSMIDELDTRIERVLAPFAQQMSLLRTIPGIGERAAQVIISEIGVDMSRFPTAAHLASWAGLCPGNNESAGKHKSGRTRKGNQEVRTILTECAWSAGKTGSYPGAQFRRLHRRFGKKGGGKAAVAVAHTLIVIIWHVLNDLTEYRDLGGDYFTRHDNPEATRRRLIHNLEALGYDVQLTPVA

SEQ ID NO: 468654 - protein, 341 aa, unidentified
MSIITVGIDLAKNVFAVHGVDDNGKPALVKPKLSREHLLPLIAQLPPCVIGMEACSGAHYWARLFRQHGHTVRLIAPKFVTPYRMSGKRGKNDAADAAAICEAVRRPHMRFVPVKEEHQQIILCLHRTRTGFVEERTATYNRLRGLISEFGIILPQKVANLRRDILDRLEELPGYVNQCVGDLLAHADALNLRIEEYDRVIVKAAREDARSKRLMTLPGIGPNTASAMLASIGSGHDFKNGRQVAAWIGLTPGQYSSGGIARLGRITKAGDRYLRSLLVMGARAILSGLGDKQDRFSRWARSLVERRGYWKAVVAIAAKNARLAWAVLRYGEDFRMKAAAA

SEQ ID NO: 468655 - protein, 402 aa, unidentified
MNAVGIDVSKSKSVVAIMRPFGEIVSTPFEIKHTASDIHSLIELINSVEGESRIVMEHTGRYYEVLAHQLLEANLFVSAINPKLIKDFDNDSLRKVKSDKADAVKIARYALDKWQNLKQYNVMNELRNQLKTMNRQFGFYMKHKTAMKNNLIGILDQTYPGVNTYFDSPARSDGSQKWVDFASTYWHVDCVRKMSINAFIDHYENWCKRKKYNFSKSKAEEIYGKAKELVPVLPKDDITKLIIKQAVDQLNSASITVESLRTLMNETASKLPEYPVVMAMKGVGTSLGPQLMAEIGDVSRFTHKGAITAFAGVDPGVNESGSYEQKSVPTSKRGSSDLRKTLFQVMDVLIKTHPQDDPVYQFLDKKRAQKKPYYVYMTAGANKFLRIYYGRVKEYLASLPES

SEQ ID NO: 468656 - protein, 332 aa, unidentified
MLNCIGIDVSKASINVHIRKNSQDLVLENNLKSFRSLFSKLKKIYKKEIDDIVFIFEPTGSYSELLREYCSLQKIKCFIINPKQFSNYAKALGAEVKNDIEDARVLSKALHLAKENQIKVPVYNEDVERIKELMSFYKFTKKQTTQQKNHLEALSSKSGDKFSIKELEKSIKESKVKELRIIEQVQTLIDSTDEYRVAYENIISIKGVGQIGAIVLLHLFLKYPDANQRQITSLTGLNPIYRQSGTSIQSKYKISKSGATLYRSILFMSVFTAVQHDKNFKTFYERLKLKGKHTTSVQIAVMRKIILTAHSLYKNNKKYDENFNSQEASKMQ

SEQ ID NO: 468657 - protein, 360 aa, unidentified
MCLTFIDKFRQTTTEYSCGVDLHSRQMYICVMDRNGEVLVHRNVRGNNFEYFLKLVEPYKHSLTVCCECTFNWYWFADACMDAGFEFILGHALYMRAIHSFKSKNDRQDCFQIAHLLRSNLIPPAYVYPREKRAVRALLRQRTTFVWKRSEILTSLSMGVMANGNKPLNSCNKPRDTWLEELRAVYADADPILMLSVETSMHMVKEFDSIIAKLDWALHKHTKDHFGVEYNTLKTTPGIGVTLGLIVLYEIDDIRRFKSVQDFLSYCRLAKGTVASAGKIKGTQGGKIGNGYLKYAFHEAAVQGKRRNPELTKYYQRLEAKKGKHLANGILACKLARAVYFMLRDHKVFDIGKLTRKRAA

SEQ ID NO: 468658 - protein, 343 aa, unidentified
MKKIVKQVVGIDVAQKELVVCLGRMHDDWSPELYANKVFTNTEKGMEALELWAKKQTNQQISLRFVMEATGVYHEALAYFLEEKGYELSIVAPGKISNYVRTLEVKTITDKTASQAITMFGLERKLDCWKKPKDSYRKLRQLTRERDQLVQERTMVKNQLHAEQTEAFSNKNSVKRIKDRIVILNRQEKEIKLELAALIAQDDEIKKIVSIICSLPGIGLLTAATVLSETNGFNLIRNRRQLASYAGFDVREKQSGTSVRGKPRISKKGNKYLRKAMHLPALAAIRFDERFKAIFVRLVSKHGIKMKAAVAVQRKLLEMIYTLYKTNKLYDGNYLKKNEVIEA

SEQ ID NO: 468659 - protein, 399 aa, unidentified
MDLCLYRYYRFQQPEYKQARFSSFTKGLNELCDWLAKYNCTDVCMESTGKYWIPVFNILEQRQIWVTLSHPKYTKPMKGNKTDRKDAKWICDLYMCGMVKPSFIPPADIRELRDLVRYRSKLTCMITGEKNRAQNCLTVSNLKLDDVFSDVFGKSARSIAEHILQHPGEKFDVAPFVDKRCKTPIEEIQAAVDGAISKEQAVKLRQCLDHIDELKKHISEVEREILCLSDKYEPALNLIRTVPGFDKNPMTAIQVLSEIGGDMSVFPTAKHLVSWAGCCPRNDKSDSKIKSTRISRAGSYFKPVLVQIANALIKSKKHPEFTTRYKRIKARRGHKKAIIAICRMILTAIWHILSDLKPYTPEGFLEHRPRNESKVLTTSQALNLLRQRGYLIKDDPMPA

SEQ ID NO: 468660 - protein, 331 aa, unidentified
MKFTETIGIDVSKLTLDACIHGQQFLIQVPNTKKGHLKLLSWAKKNTGCSIENILFCFEHTGIYSFILARFMTKMKLNYILVPGLEIKRSLGIQRGKNDQIDARKIAQYAYRRRDEITPYQAPDESINKIRQLFSLREKLVKQRSEFMTTLKDQANFIEKSKNKLFFSVPNKLIKELNKQIENIEKEVDIVLEESAAIMDNFKLVISIIGIGRQTALLLIVVTNNFLWFNDHRKLASYAGIAPFPYTSGTSIKGRNKVSPLANKKLKSLLSSCAVSAIRNDPEMKIYFNRRTESGKHKMNTINAVRNKLLSRVFAVVKRRTPFVSLCKYAA

SEQ ID NO: 468661 - protein, 407 aa, unidentified
MFCGIDWASERHAVCVLDDAGRKATALEIAHTGDGFDHLVTRLRRFGDPATLPVAIERPDGRLVDRLLEAGHPVVPVQPNAIKAWRDAEILSGAKSDPGDAALLAEYLRLRHHRLRVLQPFSAQTRALRAVVRTRDDLVDQRVAATNQLAACLDAFWPGAKAVFADVESPIALDFLTRYPTPESAARLGEQRMAAFCVKHGYCGRRPAAELLARLRAAPAGLTGTVEVEARRDAVLAMVGVLRALNQAIKDLDRAVVAHLGEHPDAEIFTSLPRSGQISAAQVLAEWGDCRQAYDGPDAVACLAGAAPVTKRSGKHTAVHFRWACNKRFRKAITTLADNSRHASPWAAKVYTDAIARGCDHPHAVRVLARAWIRVIWRCWMDGVPYDPAKHGAIRNLAEMAALAPEG

SEQ ID NO: 468662 - protein, 323 aa, unidentified
MTRIICGVDVSSDCLETRIGREGAAASFSNHAEGIAALAVFCREHDVALVAMEATGGYEQQAFAQLSETALSVAILNPRAVRQFAQSMGRLEKTDRIDAGMIAWYAEVKQPPPVCLAPQNQQHLRALVTRLRQLTDIRTAQLNQQRLITDRSVQASFAKLLAFVAGQIRDLEQRIAKLIGQDPLWRELDQQFRTIKGVADRTVCRLMAEMPEIGTLSNKTISKLAGVAPLARDSGKYQGKRTVRGGRAAVRQILFIVASVVGRYEPDFMAFQQRLRAAGKPPKVVRIALAHKLLVRLNAKAREVRQRMVTLRPNSSALLLGTN

SEQ ID NO: 468663 - protein, 391 aa, unidentified
MLPSIHHIHHASTEQTASDSPDLTLYASLELSRATWLVTCLLPERDRMSKYSTPGGDGGALLGLLERMRARAQQLTGRPAKVVVIQEAGLDGFWVHRLLEANGIESHVVDPASIAVPRRRRRAKTDAIDGETLLRTLLAWTRGEPRVCAMVVPPTPEEEDRRRVCRERAILLQERIRHTNRIKGLLAGQGITDFNPLHKDRRQLLDAARTGDGRPLPHQLKAEILREIELIELLLRQIADVEAAREVLAGPKAAKAPSPVVLLEQLKGIGPEIASVLYLEGLFRSFGNRRQLAAYAGLAPTPWRSGTVDQEQGISKAGNPRLRSTMIELAWLWQRHQPASTLSRWFHTRVGNERGRIRRISIVALARKLLIAVWRYVTQGEVPEGAVLKAA

SEQ ID NO: 468664 - protein, 344 aa, unidentified
MVLIGCDFHPSWQQVCWVHTDTGETEGRKLVHAAGEAEKFYRQFAAPARIGMEATGNCQWFVEMLAGLGHEVWIGDAAKIRASDVRQQKHDRRDAALLLRLLMEGRFPRIWTPSSEQKDTRQLLIHRHKLVRLRAQAKNGLQHLAMNQGLQKKNRLWSKAGQKSLRELALPPWASRRREDLWNVLAMLDQQIESLDLAVKQAAEQNENAKLLMTQPGIGPVTSLAFVLTMGDVSRFPRGRQVASYLGLIPREYSSGGKQRFGPISKQGNRFMRMLLVEAAQVAVRCDPQFRSEYLHRCHEKPKGVAKVAAARKLAIRLYWMLRTQKRYPEIVHVESSSRVPVVG

SEQ ID NO: 468665 - protein, 428 aa, unidentified
MSNQEIIRRRQYCQIVKEITGSDQYLVVGIDVAKEKHHAFMGSATGKSLFRKLIFENNLDGFSRLLKTAEAIKSQNSLSKIVYGLEPTGNYHKPLARHLIRCDCNVVLVSGVAVKRNRELLNGRWDKNDTKCAANIADLVSRRRCLYYDCPSPSIIEIRSLLSLRRRLKREEHGLRMRIRNNLLAQYFPELDRFYNACESESLAIVQWILNPDTISAMEFGEFFHMVTTTRRGIAQTLRLRKIHGLATKSVGCPMGPATEFEADLLVEKLKQVRRQVKKTNALIEDFCLEFTEYNYLLTIPGFGPYISARVLASIADPFRFENRKQLIKLAGYDLCAERSGKKSAEAIPVISKKGNGELRYALYQAANVAATRVDLFRTYFTRLIRGRERERGIKTKMRVKLAVKMLVIGWTLMKKREVFNPAYLNIE

SEQ ID NO: 468666 - protein, 353 aa, unidentified
MEIVVALDVHRRQITYKALDRETGEVRRGRIAPAARAEVRAWLAQFAGCEAEFALEGTTGWRFVVEEIERAGHGAHLADPAETAARRGRKRRAKTDNADCDLQLRLLLAGELPESWIPPAQILELRTRVRMRKTLIDQRTAWQQRLQAQLFHQGIPAGLRLRTEAGRDALAQAELSPAGRELVALGLRMIDALDRELAPLDRELHAFARRQRGCRALIAGLYGVGPVSATAILAELGDARRFASSDDAVRHSGLDVTVYQSDSKRAAGRLSHEGPELLRWALFEAAVSAARAGSPDHAYYLQVAERLDHTRACLSVARKLCRRAYHILRELGDEALAPVDRDRQAEEAIAAAA

SEQ ID NO: 468667 - protein, 439 aa, unidentified
MAFAGGRAQADYMARVRGIPPEQCLVVPIDVGKHSAVSLVADHEGRVVHDPITFPMTATGTRTLVSAAGAAERATTAGSVRFGIEAAGHYHRVLASTLHASGLDVVELNPAAVKLARSQLGQARVKTDVRDCLAMVELLVRGQGWPLHRHDDQVALQAMWVAQRRRKLDAVQALTNQVHALADLAFPAIAATFKTGFDSPTLRMLLSTITGPDELAAMDVEQLVAHAATHGRRMLRPKARQVVAAAQDALRLPDGQQSTAQCLLAREIAALEQLRNEIRYCDEQLAAILPSTPAGVLASVPGIGVATASYYGAALGDPWRFTNADAAYRYSGLSPSSYDSAGRHHAKTQISRQGAVELRRAMITLGTSMGLSHPDFVAYRRRLLAAGKKPMVVAVALGHRSHRLAFAMMRSQIPYDDQRWTAAVAKGRSVKATEATATT

SEQ ID NO: 468668 - protein, 358 aa, unidentified
MIAMKYYTSTTQFNCGIDLHARQMYVCLMDRDGHKLVHTNIKNNDFDYFLQRMAPYRHDLTVCAECMFGWYWLADACQAAGLHFVLAHALYLKAIHGGKNKNDRIDSEKIAHLLRTNLIPPAYVYPAAKRPLRALLRQRILYIWNRSELLSRIQSHQLAYNRPTFRQTPYNRDPWEEKLLAQEDNPVRQLALQNDLALIRHYDAQINTLEVQLQQLTKASAGRDYALLQTTPGIGEHLGLTILHEIGDIARFPSVKDFLSYCRLVKGTVASAGKIKGLRGAKLGNPYLRWAFGEAAVIAKRDPVVIGPLAQRLEARMNGNKFKANTVLAIKLARAVYFMLRSHTVFDPERLVAALSHN

SEQ ID NO: 468669 - protein, 343 aa, unidentified
MESYVGLDVSLKRTSICVVGRTGKVLCEGTVNSAPEAIVGFVKSKAAGAVRIGLETGPTSTWLWTEIKALGLPVICIDARHAKAVLKMQINKSDRNDAFGIARIMQCGWYKEVRVKGLDSHAMRALLESRALLVKMKRDLENQIRGLLKNLGLIIATARGQAFHARVQELVAVKPFLAVAVLPLLETRNEIVRQIATLDREVLMLARNDSQVRLFMTVPGIGPITALCYRATIDEPSRFKRSRSVGAYVGLTTRRYASGEVDWTGRISKCGDAMLRSYLFEAAGVLLTRVQKWCALKAWGMRLAKRVGLRKAKVAVARKLAVILHRMWIDGTEFQWSADKVVA

SEQ ID NO: 468670 - protein, 318 aa, unidentified
MSESVFIGIDVSRDTLEIARSAQDGSWQRPNDSTGTEVLVAELVELHPALIVLEATGGYEFEAACALQSAGLAVAVVNPRQARDFARAMGVLAKTDRLDAHVLAEFARVVHQHPQRERFIKPLADEQQQRLHALVQRRRQLLGMLVAERQWLSLSHASARPSIELTIEFLKNQIGDIERDCAEHVQTHHAALAQVLGGVKGVGPVTLAVLLAEMPELGHLCRRRIAALVGVAPLNRDSGLMRGRRAIHGGRPDVRRTLYMATLSAVRFNPVLRAFYARLVACGKPKKVAQVAAMRKLLTMLNAIAKSGRPWDASLHPA

SEQ ID NO: 468671 - protein, 345 aa, unidentified
MELHTIGIDLGKTAFHLVGVNLHGEIVVRKKFSRKQLLHFTANLQVELIGMEACGGAHFLGRALREQGHEVRLMPAQYVKPYVKTNKNDFIDAEAIAEAVTRPRMRFVPIKTDDQLDMQSLHRVRERWVMRRTAIVNQVRGLLLERGITLPKGRSHLDAALPRILEDADLKLSGALRTLLAQLKLELDQMTMRIGEADAVLNKTARDNADCQRLMTIPGLGPVTATALIAAIGNGAAFRNGRGFSAWIGIVPGEYSTGGKQKLLGISKRGNPYLRRLFIQGARAVLQQRTKQPAGLRTWLELLFARTYPNVAAVALANKLARMAWAVLTKGEPYRPPLQATPVAA

SEQ ID NO: 468672 - protein, 344 aa, unidentified
MQTVTTIGLDIAKSVFQVHGVDAQGKVIVRRQLKRRCVLAFFQKLPPCLIGIEACASSHYWSRELQALGHTVRLMPPAYVKPYVKRQKNDCADAEAICEAVTRASMRFVATKTVEQQSCLMLHRTRHLLIRQQTAVINAIRAHFAEFGIVAPVGRTGVEELLKVASDGNDKRLPDVARVCIAALGAQLQMLKARILEFDRLIMAWHRSNQVSKRLDEVPGVGPALATALVGSIADPKAFRSGRDFSAWIGLVPKQHSSGGRERLGGISKQGDRYLRSLFVAGALAVIRYAKKRGSKHRPWLAALLARKPTKVAAIALANKIARMAWAMMARGERYKQPVALAAA

SEQ ID NO: 468673 - protein, 429 aa, unidentified
MTRISVGVDVSKNRSTVCIMDQDGKFIMRPFLVWHSTEELDFLADTLKRLNGEVRVIMESTSVYQYPIALQLKERGLFISIVNAYEMKQFANTDFRGGKTDKKDSRTIASYGISYWDKLVEWQIPKDTYFNLDLLNRTYMNAKKHRQIILQELQHYIDCAMPGMDKELHSLNLSTKKDFMLDFVEKFWHRDEIVNMTEAEFTEVFTAWAKKKGYRPVEGKAAKIYAIAKSCIPYYPANPTVKTILQCIVDKLSGVNRTLVTIVTQMIEEAKKLPEYQIVREMPGVGDPLAARFFGSVGDIRRFKNSKALVAYAGIDSPPDESGDFSSTHRHITKKGSKVFRDTGYEIMMALRAQKRTWEKVRKNPEVYDYMLRKEAEGKPPKVAKIAALNKFLRIIYARIKELYDNMALAERAKTKTRSKTRAKTKVTA

SEQ ID NO: 468674 - protein, 341 aa, unidentified
MKKTEYVVGVDIGAESISIAALKGPDGAGLAELSVTNDPEGFEGLKGWLTKQRLTIENAAFCLEATGVYGEALCYYLCSRGFRVAVEPPLKVKRAFQQSAHKNDTVDARQIAEYGHRFFDELSWWTPPAAVLEQMRVLLTAREQFTGQKIANVNALKALERKTITTRIAIQAYEQAIARLTQNIKEIDQEIKRLVKQDDSFNRMITAITSTPGIGMLLAANLVVMTSGFARTRNHKKIASYTGISPIEHSSGTSVYRRPRSRRYGPSRMRKLLYLAAMSVSTHDPTFRRYYLRKVAEGKPKRLVLNNISNKLLKVVCALVRSESTYIHNHRSVQPFLLKTA

SEQ ID NO: 468675 - protein, 342 aa, unidentified
MKEVSIVGLDLAKRVFQVHAARSDGSVVLRRKLSRGQVVTFFTELPKCTVAMEACATAHYWAREIGKLGHDVRLIPPAYVKPFVKRQKNDAADAEAIVEAATRPSMRFVVPKTESQQACSMLFRTRDLFVRQRTQLINALRAHLAEHGVIAPQGIANLTLLTEIVEDHDTGLDLIVVETARLYLDQIGVLSSRIASLEKALRSEAKRSQSTARLMSMPGMGPITAMAVVAFAPTMVTFRRGRDFAAWLGLVPKQHSSGGKQVLGRTSKMGQRDIRRLLIIGAMTVIRWACRKAPPENSWLARMLARKPRMLVAIALANKMARSIWAMMTKNEDYKDSALAAA

SEQ ID NO: 468676 - protein, 451 aa, unidentified
MRRPQVIDDEDHERVHERVAAIDVAKDSGMVCTRLPHPSRPGARRSTVWTVTARKNAIRALGRQLARDGIEVVTLESTSDYWRIWFFVLEMCGLAVQLVNAAQAKNLPGRPKTDKLDAQWLARLTEMGLLRASFVPPKPIRDLRDYTRARTRLVQERTRCFQRLEKLLEGALVKVSSVASKLTTLSAQDMIKALIAGQRDPKALAALARGKMKAKHDDLVEALDGMFDDHHGELAGLLVEQIAFLDDRIARLSARAAGLAAAMPAAWGINADGTTGPDAGTGPDAPALPAVARLAQIPGIREDQARTIIAETGLDMSRFPTAAHLVSWAGLCPSTRQSGPRTRTGKKGQGNAYLRGALGQAAIGAAGTDTFLGERFNRIARRRGKAKAQVAVARSILVIIWHLLSDPAARFTDLGSGYHQARTDKDKKIKNHIRQIEALLGHPITITPKAA

SEQ ID NO: 468677 - protein, 360 aa, unidentified
MAKARTLVGLDVHATKIVAAVLDAESGELQCFRMSGEIESAAAFCAGLPKPVRVAYEAGPTGYGLARELAKRRVQCVVAAPSKIPRASGDRVKTDRRDAEHLVRLLLAGKLHPVRVPGDEEEALRDLVRAREAVRVDLMRCRHRLSKLLLRHGIRFDDGKAWTQRHRDWLATVSLKWPAAQTTLSDIQGAIDALCHRREQLEREILQILPGSPWAVQAGRLRCLRGIDTLTSVGLGAEIGDFERFARAEQLMSYLGLVPWENTTGEQRRLGQITKTGSRHARRLLVEAAWHYRKHPAIGAKLKDRQAGQPPEAIAIAWSAQRRLHRTWTRLEARAKRRTIIAVAAARELAGFCWAICQIE

SEQ ID NO: 468678 - protein, 313 aa, unidentified
MIITLRCVGIDVSKRRLDIFDEGIGVSERVANAPHAIAELVARWRCDALVVFEATGVYDLELREALRAAGIRFARINPARARDFARASGQLAKTDPIDARMLAVFARAMRPAPEQVSSPARNALARLAKRRDQLVLMRAQEKNRRSEAGDRAMVERICRLIEVLDREIAEIEADISALIKAEPEISHDAQLMRSLPGVGPVASMQLIAQMPELGHVGPKQAAALAGLAPFNVDSGAYRGKRKIGAGRKRVRDALYMAALNAVRRADRFKAFYAKLRQAGKPAKLALIAVARKLLIILNAIMRDRKAYMPAQQT

SEQ ID NO: 468679 - protein, 349 aa, unidentified
MGIIGGLDVHRSQITYDWIDTDSGQRQRGQLAPATPEHLRMWLEQFAGQQAASAVEGCTGWRYVVEELGRAGIAAHLAEPADTSAARGPKRRAKTDQLDARHLRELLAAGRLPESWIPPTHVLEVRTLVRCYKALTDEHTAWLQRVHATLFHHGAPAERNLLAPDRRARLERGTGLSPAARQLITVALGTLDHLDAELDRLRAELVSVARRQPGCQALDALYGIGPVTAVAIWAELGDVGRFTSSRHAVRHTGLDVTVYSSDGKRTPGHLARQGPPVLRWALFEAAKCAARASSPDHAYYLQVKGRLGGNRAALSVARKLVRRCYHTLGALGDHAYAPPSEASIGGQVA

SEQ ID NO: 468680 - protein, 296 aa, unidentified
MADKLIVGIDVSKDWLDLCASNAAGVERIANTRQAVAAWLERVAPGLIACEPTGGYERTLIAAARERAIPFVRVHPNDVVAFRKSRGIKAKTDAIDARLIAAFVCDKLARAELRTSLIGDERLRALAARRRQLVDALPAERCRLDAAALPAVRASLEAVIAVLRQSLETLEAELAEAIAAHPPTAELAKLLQTIFGIGPVAAITLIADLPELGLLSAKQIAALVGLAPHTRRSGKTRYRETTGHGRPGVRRVLFNAARAAVRHPSLFKDFYDRLVTDNRRPGKSLPQRKRGSPSPP

SEQ ID NO: 468681 - protein, 353 aa, unidentified
MQLFVGIDWATRRARWCAVTPAGVVIDEGWVPADEDGLAALVMRLGPEASACMEMMSGAAWVRERLQAAGWTVQIADARKAKAVGSLAAKTDKLDARVLAELARRDLVPQVHVPTFADRELKERLGRRMHMIRLRTAAINRAHGVLSQFGVRLAFDRLRAPDAQELLVARGVPAVWRRSIAEAVAIVRVLDERLIPIEQELRPLARADERVRLLVTIPGVGDLLGLTIATEIGDISRFATARKLVGYSGLTPRVYQSGQKSRTGKLSRTGSTMLRWAAIEAAHQAWRPNNPWHQLYLDVKQRCGGKGNPAKAAVARKVLIASWHVLSLQQPFTPSRPRAAAPAPANSSCVLAD

SEQ ID NO: 468682 - protein, 375 aa, unidentified
MATIARLGIDTSKSLFQLHGVDEREEAVLRKQVRRGQFLGFVAKLAPTKIGVEACGASHYWARQLQALGHEVVLLPPQHVKPYVGRNKNDKIDAAAICEAMSRPRVRERFVAVKSAEQSAAQMLLGTRDGLLQRRTQLSNTIRGHAAEFGLVTPKGLAHIKPLLERIAADDTVPVLAKELFATLGEEFAELAPRIARLDKKLKAFQRSDELCRRLVEVPTIGPVIASSMVVKIGNPAAFRSGRRCAAWLGLTPKDHSTAGKMRHGGITRAGDEGLRAALVSGATAYIQQVKRGRTRPSPWLAQLLKRKPEKLAAVALANKTARIAWKLMVRGERYDRARAEARERLGATQHRGSTPSPSLHPHTADHGASTMTVA

SEQ ID NO: 468683 - protein, 376 aa, unidentified
MLDNRLWAGLDIGEDISFLSAIDVANDAVSEQALPTDPAAIAMALDELAPGRIVHIAIEASATAVHLVRELRARGYPILVCETRQVSRYLRVRINKTDTNDARGLAEIAKIGRSKISNVHVKSSEVQRLRSQLVFRHKLNLHRVACEGMIRSLIRLHGGKVKTALSAATFKRNVETALEQMRCDLNVDLSDEILPLLSLSLGLREFLATLSDRLTVWAKAHPVCSRFMDIPGVGAICAISFYSVVEDPDRFERPEDIGPYLGLTPLVLQSGKSLRHARISKRGNKMTRSHLTMAASVILLRCRPNPLRTWGKALSARAGPGKARVALARKLAVLMLALWKSGERYNPEFGIKQAVQAVIDRDVRPRGRPRSGTAQT

SEQ ID NO: 468684 - protein, 356 aa, unidentified
MRFYEQQHQFYGGIDLHSRNMRLCVLDPHGAVRCEASLPTSPTAFLDAVAPFRPDLVIGCECMFGWYWLADCCQREQIPFVLGHALYMKAIHGGKAKNDKIDAKKIARLLKGGTFPLAYTYPKGMRETRDLLRRRSYLVRQRSGLFTHLQILNAQYNRPPFPKKLSFAGNRLELDIAARFPDVSVRQSVAADLAVIDGLDEQIARLELYLTRTAKVDAVQTFHRLQTIGGVGKILALVLLYEVHDIRRFNHVGQFLSYARLVRCTHESAGKILGSGGQKIGNAHLRWAFAEAACLFLRASERARAWKQKQTKKRGEGKALAILAAKLARAVYHLWRRGEAFDEERFWQGQATPVPA

SEQ ID NO: 468685 - protein, 333 aa, unidentified
MLYAGVDHHTKTSHITLINEKGTVIQKKSLPSDGQSVKEMLSEYGEPIKATLEASYNWGKMYDWLDDVADEVILAHPLKVRAIAEARIKNDKIDSATLAHLLRADLIPEAYACPAEIRAIKRVLRQRMFLVRINTMIKNRIQALLHQHDLQKPQVTDLFGTSGRRWMEGLRLPTPDCEILSEDLTLLDVVRERIASSESLIKSLSRGDQAVRWLKSVPGIGDFLSVLIRYEVGDISRFPSPEKFAAYTGLVPSTYASGERTYHGRITKQGNKYLRWAFIEAVAPALKSSQEMRSYYERIKRRKGSKDARVATARKLAEITWHVWSEERFYEVR

SEQ ID NO: 468686 - protein, 418 aa, unidentified
MLKIVFPICCGIDVHKKFVVATVGTTNRSGVTNYQTRQFSTFTEDLHHLLDWLKSQSCINVCMESTGKYWQPVFNILEDYCDVVVANPKYVKGIRGKKTDVKDSVWLCDLHKHGLVPSSFIPPLAIRQIRDLMRYRFKLINFKSSEKNRIQNSLTVSNIMISSVVSDTFGVSSMKIINHILENPDDKDFDVSSMLHSSMRDKAETITKSINGNLTKPQADKMRVCFEHLDNIEECVANIESAVVGLVQPYLPQIQIILSLPSIKDIFTAIAIIGEIGSDMSVFLSSKHLCSWAGLTPQNNESAGKKKSVRVSRAGVYIKPLLVQCANAAIKSKKCKYFKLRYDQIKKRRGHKKAIIAVAHMLLNCIYHMLDKNEIFNFDLYKIDSKPKQTYAPNITEEMAVRYLQTLGYQIPDILNTT

SEQ ID NO: 468687 - protein, 350 aa, unidentified
MLIIGCDYHPGFQQIAFVDTETGELEERRLGHREEAEQFYGMLKQRSVGVRVGMEASGHARWFERLLSELQFELYIGDAAVVRTKRVRKQKTDRQDAQLLLQLMMEERFPRIWVADAENRDLRQLLWHRHRLVQMRTRVMNQLHVVALNEGLRRKKALWRPAGRRELESLLLARWAGRRRQDLLNLLDQLTPKIQELTRALEEEVEKRPVGRRLMTHPGVGPLTALAFELVIGTPERFHCGKQIASYIGLVPSEESSGDRRRLGHISKQGNSLLRYLLVEAAQVTVRSQPQWRSKFFHLAMRRGRKIAKVAMARKLAVRLFWMWRQGLDYGQFENFGSHAGEPGNRLGAQ

SEQ ID NO: 468688 - protein, 352 aa, unidentified
MTAGLDLGDRYSYLCLIDTENGEVIEEGRLRTTPEAFRRRFASERPLRIAIEAGTHSPWASRVLEECGHEVLVANARKTRLIYANKRKTDEVDAENLARLARVDPKLLYPLKHRGESAQAHMALIRSRQALIGCRTQLVNHVRGAVKSFGARLPKCPARSFHKSASEHIPEVLGPALGPILEQIGSLTERIRDYDRQLETIAKEHYPHETDLLRQVEGVGTLTALTFVLTLEDPYRFAKSRSVGAYLGLVPATDQSGDRDPQKRISKEGDEMLRKLLVGSAHYILGPFGHDSDLRRHGQKIASQGGKNAKKRAAVAVARKLSVLLHRLWVTAEVYDPLYNTHHRRQEQKQAA

SEQ ID NO: 468689 - protein, 423 aa, unidentified
MMKLKYSICCGLDVHKNVIVATIVTTNKDGISEYLQKSFSTINSDIQRFHNWLIENNCYHVCMESTGKYWIPIFNYLENDIDVCLTHPKYVKAIKGKKTDKKDSKWIADLYKFDLVRCSFIPPKDFRQLRELSRYRFKLVCMKSSEKNRIQNCMTISNVGIASVLSDPFGKTATEIISYLLEHTADSMDEKAVRKLIKKGAKSKSDEIIEAIKGYTIETDQAKKLELARGHLEYLDDMITQTEVELYVRIKPYYEFVEFVSTMPGMTELSSTIVLAETGVDMDIFDDAKHLCSWCGLSPANNESAGKKKSVRIAKAGDYLKPMMVQCALAAIKSKKQPYFAIKYGRIKKRRGHKKAIIAIARMMMVCIYHMVSEKKPFTPADYEELMDPQNHVESVVLNENNVFAYLESLGYDSSKLVKRNDN

SEQ ID NO: 468690 - protein, 340 aa, unidentified
MIAVGVDTHKNRHIAVALDRLGQLLGELSIEACAAGYLELRLWARALAEGGQQLVFGIEGAGSWGAGLCEHLQLAGCSVLEVERPRRRERRTGKTDRIDAISAAKRVLSDEGTSTPRQQGTRRALAALLVARRSATCERTRLLNQLQSLHATAPVALRERIGEGTGKQLERRLGVMRTRTGAPMDERAIFAVMRDLAARSRALAIDARRYERELTELVASLDQTLLGEVGVGPISAAKLLVCDPARFYSEAAFARCNGTAPLPASSGKTVRHRLSRGGDRQANNAIHTIALSRSLHHPETRAYLDRRISEGKTKREAMRALKRHLSRTLFKRLVEVPLTS

SEQ ID NO: 468691 - protein, 345 aa, unidentified
MNITAVGIDLAKNVFQVHAVDARGKVVLRKQLRRAQVAGFFSNMPPCLIGMEACASAHHWGRTFERFGHTVRLMAAQFVKPYVKTNKNDVADAEAICEAVGRRSMRFVPIKSVEQQAILSVHRVRQGFVKARTAQANQIRGLLGEFGLVIPQGIYNVAKRVPELLEDASNELPVPFRHLIERLTQHLKELDRQVKEFEKEIIEWHRSSELSRKLEAIPGIGPLAASALVASIADAHSFDNGRQVSAWLGLVPRQSSSGGKPTLLGMSKRGDAYLRTLLIHGARSAILAAKNKVDNTEGWLTNLLKRRHPNIAAVALANKNVRTVWALLAHGREFQADYMPTRMAA

SEQ ID NO: 468692 - protein, 342 aa, unidentified
MSVVGGIDIHRSQLTFDYVDLDSGEVFRGRIAPGDRVTLRRWLQRFTDRRGVAFALEGCTGWRYVVEELQRVGIESHVAEPAETATRRGPKRRAKTDRTDAQLLRDLLLEGRIPESWIPPEPVLEARALVRLYKDLLDERTGWLQRVQASLYHMGAVDLDVKTMSVAGRERIAAAALSPTTRTAVDTGMRQVDRLTEELGRVREQINWVARRQPACKALQAAHYGVGPLTSVVIWAEMGDTRRFHSSDDAVRHAGLDVTVYSSAGRRTAGHLARQGPVLLRWALYESAVYAGRPSSPDHAYFQQVKTRLDGQLALLSVARKLARRCHHTLRNLGDQVLAPAA

SEQ ID NO: 468693 - protein, 428 aa, unidentified
MLKINPLSTLYVGIDVSSKSNYVCALDFYKNKYINSSFANNQPGAEELALKILECLKEHPDITTIVAALESTSVYSIHIANYLSSCEELMRFKPYVFVLNPKCTANYKKSYIGLGKSDPIDAFVIADYARAGNIESEPWRGSQFLALKRLTRHRLHLVECMTREKTYLVSNLYLKFSELQMLEGDDQPFCDIYGATSSSVLMEYFSPEEILDSSEEDLIAFLAKKSRNRIKDISKTADLLKKAARDSYRLDKALYEPLNVSIASSFNCIETFKREIKVIDNAIEKEIKGLNPNAFIILQSIDGIGPVFAGGIIAEIGDITAFHSSDALAKYAGLTWKSNQSGDFDGEDTPMIKAGNRYLRYYLGEAANSMRKHNVEYGTYYRKKYNEVPKHQHKRALALTSRKFVRLVYGLLARNQLYSGVSLDTSNE

SEQ ID NO: 468694 - protein, 429 aa, unidentified
MSEEKSLELRVSVDVGYRRHSVAMGLSSGEVLEEFEIDHRIEGFEEFFSRIEKQRQKKNCAVAVAMEGYNGYARPLDRMVRQRGYRLYNLNNLKFARFKEIFPGSAKSDRIDARKGLELFQLSDHLPLAKEVLQEVSGTPPENEVLKRLTRRRRRLVNERVRVVNSLQADLQAVCPGLLEITAEASNQWFLNFLLSAQTLPQLARLRRNTLLKIPSVGVKCASIIEGWQKRAHFSQEVEWVGEMIQEDAKRCLELDGKVKRLEAQIAEVAKGSKITKILRSIPGFGAVCSSELAGEIGTIERFAAEASLSLYLGMSTLDNRSGKYQGTKTPKHVNTRAKAAMMIALDRHRKYVPESQRYYEKKRSEGKKHNRAIRSLGRHLSRIIYKMLKEERDYEIRPEKSNTKTKVSSRSSFKTQIRRSKISSKKTK

SEQ ID NO: 468695 - protein, 379 aa, unidentified
MSDCSAYVGLDVHKETIAVAVALPGRTEVVYRGEIKNTRTSVRRLIKTLSPDGEVVNFCYEAGPCGYGLYREIIETGHRCEVVAPSLIPRQAGDRVKTDRRDAIKLAKLHRSGDLTAVWVPGEEQEAIRDLTRAREDMKAIELKARQRLGAFLLRHDRIYREGKSRWTKRHFTWLEAVKFDNPLQQIVLQEYIDAVREAQSRVAGLEKQMYQAIEGWSLRPVLEGLIALRGVDRITAMTVLAELGDLTRFDSPRQLMSFLGLVPSEHSSGSRRRQGAITKTGNGHVRRVMVEASWSYRFAANKSAHLQRKAASASRQVQAIAWAAQKRLCYRHRYLRDSGKPSQQVCAAVARELVGFIWAIACEVMGRSHGTRLLGAQS

SEQ ID NO: 468696 - protein, 397 aa, unidentified
MDSFESTRLEQFRQFKKEIRGSERYLIVGLDIAKDQHHAFFGTATGQTLWKRWLVGNNQEGFQKLLLQTEALQVQHALPQVVFGLEPTANYHKPLGEYLIRCEHQVVFVSGVAVKRNRELLDGRWDKHDTKDAANVADLISQGKCLYYEHPDPRIRDLRLLLSLKKRLKKQEQAIRGRIRNGLVAQYCPELDPSFSRLIAPGKESDLLFAMQQTSSIGCAVHPEVAFAAQVMMEELERIRKVLKAVQERIQKLCAQFPEYPYLLSIPGFGPEVSSQVLAAIGDPFRFQHGGQVLKMAGLDLSADRSGKASDRAKPILSKKGKADLRYALYQAAFIASTRNPAFMAYYTQKLRGRAQEPGIRTKMRVKLAAKLLLIAWSLMKRKEVFDPERVIPSALL

SEQ ID NO: 468697 - protein, 327 aa, unidentified
MTASVSSHNHIFIGIDVGGASFEAAWHRGGCTQYQNRPDAIAAFVARLSAEKQIIRIAVEPTGGYEKRLVKALRGAGLPVEMVHTSRFAAYRTLIGAKAKSDTSDARLLAAYAAAPEEVRGRKAGHVVLPQDDVREQLAELAARRDQLKHMIHAETCRLSTVRSRSIRDDITAHLQALRHADRKTQDAMMQFVRQRDELRNAKRLLQTIKGIGDKTALTSIAAVPELGLISNKAAAALVGVAPFVRESGTMKAPARIHGGRAPVRNAFYMAAVTASRHNPVLAPFYARLIAAGKPPKVALVAVMRRLVVYANAVLRSGQPWKGAEII

SEQ ID NO: 468698 - protein, 320 aa, unidentified
MMAQNDLVVVGIDVAKDKMDACIRSLSQREMFPSTAEGRRKLITWLRKHKVTAAVMEASGGYERNWARALREAGMEVRIVDPKRVRNFARSAGRLAKNDTIDAEMIAWFAETFAAVSGQAHDARREKLAQIVNARCALLDLQTTLQNREEHPAPEPVRKMQARLLKQIARELAGLEAAIAAMIKATAHFAELAEIIESVPGLAEITSASLIAGMPELGQVSNAAIAALLGVAPYDDDSGKRRGERQIKGGRRRVRNLFYMACLGAATRHNPVLKAFYRRLIAKGKEPKVALVACMRKLIVILNTMIARREKWDARRYAVS

SEQ ID NO: 468699 - protein, 344 aa, unidentified
MGEVITIGLDIAKSVFQVHGVDEASAVMLRKRIGRAKMLEFFGKLTPCLVGIEACPAAHHWGRELQALGHTVRLMPPSYVKAYLKRSKNDANDAAAICEAVTRPTMRFVPIKTKDQQAALMLHRARQLLVRQRTMLSNALRGHLAELGIVSAKGRNGTGALLEIIADAADSRVPPVARGILDVLARQYGALGAEIGSIDRTILAWHRSCEASRRLEEIPGIGPIVATALLAEIGDWKAFGSGRSLAAWIGLVPKQQSTGGKDKLGSITKQGNRYLRWLLVAGAMAVIRYAQKHGTLKRPWLGRLIARRPTKVAAIALANKIARMAWAIIVHGDRYREPKPLLAA

SEQ ID NO: 468700 - protein, 432 aa, unidentified
MEDVHEEPLFVQRVAGLDIAKAEVEVTIRVPSDTSSGRRQQETRTFGTTRRQLLDLADWLRSWGVTKVGMEATSDYWKPVFFLLESRGFDCDLYNAAQVRALPGRPKTDRADSIWLAKITERGMIASSFVPPEPIRRLRTHTRYRRHLTQARTAEKQRVEKLLEDGHLKLSSVISDIHGVSGRDMLDALAAGQRDPHALAAMARGKMRGKIRRLEEALECSFFTDEHAAVLAMMLAVIDHHTAQISQLTATIEELAEPYLPQIGQLDAVPGIGQVCAQDIIAEIGIDMAVFPTASHLVSWAKWSPQVRQSAGKRKGSNATGRGNPYLGAALGEAGISAGNTQSFLGARYRKLTRRMPRKKALVATGNSMLTIIHALLSDPAAVYTDLGAGYYEQRMHARRQARNHVKSLERLGYKVTIEATNPATGELTAAS

SEQ ID NO: 468701 - protein, 339 aa, unidentified
MLMIGVDYHPSVQQIAFTDTETGKFGERRLIHSNGEAERFYRDLHERGILVRVGMEATGFSRWFERLLAELDFELWIGDPAEIKAKRVKKQKYDREDARLLLRLMREDNFPKIWVPSPENRDLRQLLWHRHRLVQMRTRIMNQLQALAMNEGKRWKSKLWSAQGRAELEKLALGPWASRRRKELLELLDRLNPSIEELTVAVEQEARKRPDALRLMTHPGVGPITALAYVLIIGTTERFHRGRQIGTYVGMIPSEDSSAGKQRLGHITKQGNSLLRYLLVEAAQAAARINPHWRRRYLHLAMRRHKSIAKVAMGRRLGIRLYWMWRNGCEYSPSFEFGS

SEQ ID NO: 468702 - protein, 324 aa, unidentified
MTEPALGIDIAKLKFNVCLINSQGKLRHKVFPNNQAGFEQLRQWLTKHGVQRVHACLEATGTYGEALSLFLHQAGHTVSLINPAAVKAFAQSRLSRTKTDKVDAELIARFCQAQGPPAWTPLPQEVRELQALVRRLESLIEMRVAEENRLSSGITVEAVQQSVQEHLAYLNEQIKHCEELIRRHINNHPGLKRQSELLDSIPGIAETTAALLLSEVTDIKQYRSARQVAAYAGLVPRERQSGSSVRGRTRLSKIGNARLRKALYFPAITALRCSPFFQSWAKGLQERGKSKMSIVCAVMRKLLHLAYGVLKNGKPFDPEWAKSA

SEQ ID NO: 468703 - protein, 299 aa, unidentified
MEQATTIGLDIAKHVFHLHGADAAGHVLFRKRITRAKLLGFLAAQTRCVVAMEACAGAHYWAREIAKLGHHVRLIAPVYVKPFVKRQKNDAADAEAVCEAAQRPSMRFVPVKTEEQQANGIVFRARDLLVRQRTQCVNALRGHLMEYGYVFPKGITHLETLVALVEDPHSSLPDGVRVILKLLVDTFTALEAQITALDAEINRRSKSDPTARRLMTIPGVGPIASTAITALVPAAEGFSAGRDFAAWLGLTPLQKSTGGKQKPLVVPAPSRRLLRHTLLPLTLTSSRPWSAYAAEAGVL

SEQ ID NO: 468704 - protein, 446 aa, unidentified
MSLEIVHPQAAGIDVGSKSHFVAIGQSTEDVREFGVYASDLLSLAQWLLSNEIKHVAMESTGNYWQNLYAELISHGLEVILVNGKFTKQMKGKKIDVLDCIWIQKLHSLGLLTGSFLPDENTAKLRAYSRQRKKLLEQAAQASLRMQKYLKLLNFRLDVVVKDVCGLTGMKIIKDIVENGNLDGQALAQHRHYNCRKSEAEIAKALQGNNKEEYLFGLRQDYETYHFFKEKVEECEAQIANFFDRYFDEQEQVVDDLPIEKPYKRRNKNNPKNMDLNILSYQYFGGVDLLAIEGVSYSTVLTIMSEVGAGGMHRFQSAKQFASWLRLAPNNKISGGKTLSNRTPKGSGRLKIALRNAANAIGNLKEGHLATFFKRIAYKKGRQIAITATARKLAMIIWNMVTKKQPYNPPEPYLFLDQKRKLGIVKRIRKKMAKFDISTNDLQLKT

SEQ ID NO: 468705 - protein, 350 aa, unidentified
MTHLKNFDVHVGIDVDKKSYAFTVYHNEMKKSKRIPSNADQLHSYFQKTYPKKNVLYAYEAGPTGYDLYDYLKSKDCECMVVSPNSIPKPSNEGVKNNRLDSQAIAVHLKAGSLTSIRVPEGPWRELRHLVRIREKYASQRKVARQRIKGLLLFAHLYSHIREEDTKWSNRYIKLLEKIPCSEAVRIRLDSHLSDLSYARKKLLEIHQQIKKFIEAHQDIQKNVEYLQSIPGIGIVTATNILGKIGNPVHLKNVNELASFIGLTPRERSTGDVVRRGQITHFGNKYLRRLLIEAAWTSIRHDSELNQFFYRIMNRNHPKGAALKAIVAVARKLTTRIYSVLKDQRKYEKH

SEQ ID NO: 468706 - protein, 401 aa, unidentified
MQDTQQHDAVDVFVGVDVGKGQHHAVALNRNGKRLYNKALPNDEAKLRALIAELKTHGRLLFVVDQPSTIGALPVAVARAEGVLVAYLPGLAMRRIADLHAGEAKTDARDAAIIAEAARSMPHTLRSLRLADEQLAELTMLCGFDDDLAAQVTQTSNRIRGLLTQIHPALERVLGPRLDHPAVLDLLERYPSPAALASTSEKTLANRLTKLAPRMGKSLAAEIVQALSEQAVTVPGTQAATIVMPRLAQQLAALRKQRDEVAAEVEQLVLAHPLWPVLTSMPGVGVRTAARLLTEVAHKAFASAAHLAAYAGLAPVTRRSGSSIRGEHPSRRGNKVLKRALFLSAFAALRDPVSRAYYSRKIQQGKRHNQALIALARRRCDVLFAMLRDGTIYQPKSAPNA

SEQ ID NO: 468707 - protein, 378 aa, unidentified
MPSSLNFWVGLDVHKGSVTAGVFRNRDPEPPRVDRLPYDLKKIRRYFQRLRAEGKVRACYEASGAGYVLQRSLTEWGIECQLAAPSLIPRRAGEHRKTDRRDAIKIARDFRDDRLVLIHIPTETDERVRDLVRCRETFQREIVKSRHYILKFTRRRGFVYREGTHWTVRHLTWIRQVLQPGTLAEEDRVVLAEYLALLEYKLQRRDDLDRRISAAALTPRYKPVVDRLCCFRGFKTQAAMVIATELGDVRRFENPRQLMAYVGLVPGEHSSGDRRRLGGITKAGNTRVRHVLIQSAWHYRRRPTVGAALRQRQRGQDPDVIRHAWKCQHRLYTLFHPLAERKPKQVAATAVAREMVGFLWAVLRELDVTELQEVNAAA

SEQ ID NO: 468708 - protein, 388 aa, unidentified
MQIVTDRPQAPTAIRTDLGAIFVSLELSRSTWLITSLSPGGGEKMSKHTVRSGDVAGLWARFSQLKDKVLVRTGQVVPIIVIQEAGLDGFWIHRLLQDERVESHVVDPASIATSRRRRRAKTDKIDGEALVRALLAYKRGEPRVCAMVRAPTPQEEDRRRICRERKTLTAERVEHVNRIKGLLFAQGISDYEPLLRKRQDRLEELRTGDGRPLPEHLKAQIGRELDRLELTLQQIKSVETERDAMLSPSGEGTPAPGAMLKNLKGIGPEFAGVLWSEGLFRSFSNRRQVAAYAGLAPTPWRSGSVAHEQGVSKAGNPRLRTTMIQLAWLWIRHQPRSILTLWFHQRVQLNGGRVRKVLIVALARKLLIAFWKYVTAGVVLEGAETTAA

SEQ ID NO: 468709 - protein, 336 aa, unidentified
MEKQYVGIDLHRRRSVIVRRDDTGTTHSMVRLDNSDFAGIVAKVRAAGPEPEVIVEATNGWYWLVDLLRAEGAHVHLAHPLGNNWGTRRVKNDERDATDLVDLYRLGRLVESYVAPPELREQRELVRYRQKLVGFRTSCREQVHAVLAKEGVAVPMTDLFGVAGLKLLDHVALGRGFAIRVESLRDLVEILDREVTMLDREIHRRLRNDPRFGVLQLLPGIGPVFAAVLVTEIGDISRFSSPERLCSWAGLTPRHRESDTTVHRGSITKQGSRLVRWAVIEAVQRQGHSELLGEAMARVAERRGRRIAKVAAARRLLSFVFYALRDGELRCLASAG

SEQ ID NO: 468710 - protein, 399 aa, unidentified
MAQPVWAGVDAGKADHYCMVINDDAQRLLSQRVANDEAALLELIAAVTTLADGGEVTWAIDLNAGGAALLIALLIAAGQRLLYIPGRTVHHAAGSYRGEGKTDAKDAAIIADQARMRHDLQPLRAGDDIAVELRILTSRRSDLVADRTRAINRMRAQLLEYFPALERAFDYNKSRAALILLTGYQTPDALRSAGGARVAAFLRKRKARNADTVAATALQAANAQHSIVPGQQLAATVVARLAKEVMALDTEIGDTDAMIEERFRRHRHAEIILSMPGFGVILGAEFLAATGGDMAAFASADRLAGVAGLAPVPRDSGRISGNLKRPRRYDRRLLRACYLSALVSIRTDPSSRTYYDRKRTEGKRHTQAVLALARRRLNVLWAMLRDHAVDHPATTTAAA

SEQ ID NO: 468711 - protein, 396 aa, unidentified
MVTIGIDPHKQTHTAVAADALGTELAQRTVPARREGFGQLLEWGRKLGERVWVIEDVRHVSGGLERFLVDHGETVVRLPPRLMADARRGSRERGKSDPIDALAIARAALREGIQTLPTARLAGPELEIRLLGLHRERLVGARTRMINELRWQLHDLWPEWELPPRALIHPAWQAKISRRLARAERSVRVQIARDMIRRVRELTQTIVELRDQLAGLVAQTAPQLLAERGVGVLLAAKFIGEIAGVSRFQSDAQLARMAGCAPIPVSSGRTDRHRLDPGGNRQLNHAFHMLAVVKLRHDPPTAVYIARQRAAGKTNKEAIRCLKRQLVRRVYHLLKDPNSIATTVCLTYRYENSRGGSTRAVVSGGGLNVVGPGGLGLSWENADRAGRDLLLGLRAR

SEQ ID NO: 468712 - protein, 454 aa, unidentified
MRKPRVVPDEDHEVMYERVAAVDVAKASGVVCLRTPDPARPGRFVNRIWDNVPATRAQIAGLGRELLRCQVQMVTLESTSDYWRIWYYVLETAGLAVQLVSPSQAKNLKGRPKTDKLDAMWLARLTQQGMLRPSFVPPAAIRRVRDFTRARQDLVAERTRCLQRLEKLLEDAMIKITSVASDGMKAKSVVAMVAALAAGERDPRTLADLAKGPLRAKRDALAEALDGMFDSHHGVIARMLLGQVAFLDQQITRMEDQAIAALAEVPGSWGVDASGQTGPGCGVTPGSPVLAAAHRLAEIPGISVWLAIVIIAEIGLNMAAFPTPAHLVSWMGLCRSAAQSGTRHGKGKPKKGNSYARAAAGQAAIGAARTATFLGERYARIARRRGKAIAQAAVARSIMIIVWHLLADPAARYRDLGPDFYASRINRDKKIRNHLRGLQALGVTVTITDDEQAA

SEQ ID NO: 468713 - protein, 343 aa, unidentified
MTRFVGLDVSQKLTSICVVDDTGRRLWRGQCHSDPEQIERAVRGHAGDDASIGIETGPMTPWLVHELRQRGLNVTCLDARHASAALKMQMNKTDQNDAEGLAQIMRTGWYRPVHVKSLDAHRARALLGARAQLVGMTTRLSNHIRGVLKTFGLLPGAMRGLPFDKRVEALLAERDELAPIVRPLLAAWRQLREQTAAFDKAVRALAKASPTCRLLRSVPGIGVVSVLAYVSTVEDPARFTRSRSVGAHMGLTPRQYQSGEVDRSGRISRCGDTLARTLLYEAAVVILTRVKRASRLKDWAQAIAKRSGVGKARVALARKLSVILHSIWRSGEPFRWSEQPSGT

SEQ ID NO: 468714 - protein, 412 aa, unidentified
MSVVQFTQVLSRDCGMDIHKKVVVATVQGEGICKETRSFDTFTRSLTQLREWLVSLDITHVAMESTGVYWKPIYNVFEDFIPHIWIVNARHIKNVPGHKTDKNDSEWICQLLMAGLLKPSFIPPKAQRELRDLTRYRRKLIQSVSANKNRIIRILEDGNIKLSSVLSDTSGATAVKLIDMLCDGKQITLSEIESVRHGRCQHTKEEMLEACTGCLDEHKVYMLGKIRECNASLKEGILDFDKRIKDVLSSYHDAIERMCEIPGIQNRVCEDLVAEIGLDMSNFPTSAHLCSWAGMCPGNNESADKKKSGRTNHGDKQVKETLVEAAWAVSRAKGTFFMERFNRLAPRKGSKKALITVGHSLLKCIHYVLSTGGRYKELGDNYVPNKKEQKRKEYLKKELQKLGYSVKLSKED

SEQ ID NO: 468715 - protein, 356 aa, unidentified
MSRISQLEPIRVTVGVDRHRDVHVAVALDQLGRRLDQIELATTRAGYERLLAWAERLGVVEAFGVEGTGCYGAALARHLRAREMLVVEVMRPNRQTRRRKGKSDSTDAEAAARAVLSAEAAGSPKAGDDLVEMIRVLRVARGTAIKARTQAINALRSLLVTAPPELREQPRALSTSRLVGKAAQLRPGALGSPLAASKLALRHLARRCQTLEVEIRSLDGQLARLTTTASPQLIEAFGVGADTAGALLVAAGDNPDRLRSEAAFSMLCGSSPIKACSGKTNRHRLNRGGNRQANAALHPIVLVRLRYHQATKDYIQRRTSEGKSKRETIRCLKRYLAREVYAALTQNNEGKLARAA

SEQ ID NO: 468716 - protein, 421 aa, unidentified
MKNSAARKMKQVPEGYLIVGIDPHKKKHAAVAITQDYTIRDRFKFDNNREGLESMINRIRIKMTDVGCRGVMFAIETGGHYWRNIAYFLDEKGIPFRFINQYTLKRRREGKDLNRRKNDYRDSEVAAQLLCTGEFTETRLPQGIYAELRTAHNTYRRLVKERTRITNLIKGLLDGLFPEFVRVCKDPCGLTAATVLTTCAIPGIIATMSEEEFVALIKATNRPQLRRNKLKAIHNAATTSIGIEAGAKSLAWEISFLIDKIDLIRRQVAITEQMLIRLVDEAEEGKYLLSIRGLNYISVAGLLAELGCFRAYRSARQMIKMAGSNPTESESGGKKKSRTPMSKQGRPVLRYCAWTAVVPMLRFNEDFRAWTKQLRERPVHANPLGGREVVGAALNRLFRLAFALVKNKTYYRLPVVAPVSR

SEQ ID NO: 468717 - protein, 459 aa, unidentified
MSAPKKVKTKSIRKTNTQLPTLHPHAAGIDIGATPIPVAVPWDADPKPVRTFSTFTDDLHALRDWLKQCGVQTVAMESTSVYWIPLFQILEAAGLEVCLVNARHCKNLPGRKTDISDCQWIQYLHSVGLLRPSFRPPEQICAVRSLLRHRANLIRYAGSHVQHLQKALTQMNLQIHNVISDLTGLTGLAILDAILAGQRDPHQLAALKDHRIKASRDTLARSLHGDWRPEHLFVIRQALDTWRHYQTLIAQCDEQIHQLLARFDSKVDLIQRPLAATRLQHKKPQRNEPAFDARTELYRLCGVDLTQVPGFQINTALVLFSELGPDFVRRFPTAKCFASWLGLCPDNRITGGHVISVKTRDVKSRAALALRLAAQSLWRSKDYLGDCFRRWKARLGTPKAITAMAHKLARIIWHLTKYRTPYDPAVWAQAEEKLKKKRLKYLQQSAAALGYKLLCASAT

SEQ ID NO: 468718 - protein, 384 aa, unidentified
MNKHNILFIGLDTHKVSTEVAHIEDQRGAKTVHQGKIKTTKAAITKLARQYQSKYPNATLHFVYEAGPCGYWIYRLLTSLGHCCYVVAPSLIPKKPGDKVKTDKRDAMKLAKLLKDEELTPIYVPEPEDEAIRDLSRARETAMKDLKDAKFQLKGLFLRNNITCKVNDNWSNQHLRWLTELVLPHPSQQIVLQEMIQTITERIKRVERLVNELAHQAKLWRYYPVVQALQAMRGIRFLVAVGTIAELGDLRRFDHPRKLMAYLGLVPKENSSGDNRKLGGITKCGNGRARRLLIEGAQTYKHNANVSTELQKRQETLPKVVIDIAWKAQLRLCRRYKHLMQRGKHRNIVVAAIAREMLAYIWAISREVILVPVDPSTRISRVPA

SEQ ID NO: 468719 - protein, 464 aa, unidentified
MAYQLFNHIQGKNGSRWTQFIRNHGAENILVVAIDAAKYINKALLCNLYGDVYIRPFEFDSTMQGFKRLRNQIEAIKKEECCTAVVVGIETTGHYYEDLVRLSSKEGYMVRVINAATTAEERKSLLNSSKTDNLDLLAIVQSIIHGRGQTSDLPFGRVAVLRKLTRLRREYVNQRTATGNTILGLVDHIFREYQGKKIKVNGKMKKVKVFSDVFGKASRFILRHFPHPSDILNLGKEGLRELSQRQNLKLRDDVIHSLLKYAGESISKPKEDLKAELFMLPLQLDQYEMLDKQINLLEREIEDILIDSEGAVLLTVSGMGVVTSAELYAEMGDITDFDHGGQLIKMAGTNPVVKQSGGNRPSYYAISKQGRKQFRNVVFQAGRTLSANNPEMKKKYTTLKERGKQYRQAYVAIGNRMIRLAFSMMKNHTLYQTTRPDYVLIKELKKKVSCKNVKRFYGKHVSAT

SEQ ID NO: 468720 - protein, 411 aa, unidentified
MQVMIERGCGLDVHQATVVACLLTQLPNGKCKKQIRTFSTTTRELMGLRAWLQAEGCTHVGMESTGVYWKPVYAILEGGFELVIANAQHIKRVPGRKTDVKDAEWIADLLVHGLVQASFVPPPAIRELRDLTRYRRKLVESRSAERNRLLKVLETANIKLASVASDVFGVSGQLMVAALVAGEATPAAMAALAKGRLREKLPHLELALEGKVEEHHRYLLRLQLKRLQAVEDDLAQLEAHLQEKLEPYREQEERLRKIPGVDSTLAAIIIAELGVDMSVFPTASKIAAWAGVSPGNHESAGKRRSGRVTKGNVYLKTALVEAAFAAARKKGSYLREKFYRLKAPRGHKRAAVAIAHKILTAVYHMLAHQLPYHELGDLYLDQLNQQNITRSLVRRLERLGYNVTLDPTVAA

SEQ ID NO: 468721 - protein, 358 aa, unidentified
MEKHPLFDYTGQHIYVGIDTHNNNWRTSIFTQDFEHKTFTQNPDPDILVNYLQRNFPGATYHAAYEAGYCGFWIHEALTARGIDCIVINPADVPTKDKERRRKNNRIDARKLARSLKNGDLEPIYVPDRASLEDRSLIRSRRNAIKDQTRYKNRLKALIRFYGIKIPAPFEKRNWSGAFIKWLEQVAFQRPTGKQSFQFYLDELKRFRHQVAELNRHIRQLAQEDRYRDRVNYLKTIPGVGTITAMILLTELVEIARFKTADQLASYIGLIPGEHSSGNEDDENFTDITPRSHHYLRSILIECAWVAVRKDPALALCYTKLLYRMISQKAIIRIARKLLNRIRYVLKTNHEYVLAVVQ

SEQ ID NO: 468722 - protein, 363 aa, unidentified
MAGRGILGVAMNYTGIDYHKRYSVACTLDGQGRLLKQARIDHNAPEAFAAYFEALDGPSEAVIEACWNWATLYDLLEDTPGVAKVVLSNPAKNRIIADAQIKNDRVDAKALATLLRGNFVATVHVPGKEVRQKKNTVRQRLWLARVRTMVRNRIHTVLDRHPRIERPAHKDAFCNQGKAWMKRVELPQPDRQLLDEDLELHELLDRHIRALEERVEADNVAHADALRLRTLPGVGKVLGPVIALEIDGVSRFKTADKFCAYAGLVPTTHSSGGKTSHGRMLPFCNRWLKWAFIEAAWVAIGCSDYFGFFYKRHRARGKGANEAISITARRLAKIAWQMLTEQRDYSKAPLVAKPLSPAALVSD

SEQ ID NO: 468723 - protein, 337 aa, unidentified
MSAELIGLDIAKNVIQVHGVNAVGAAVLTKRIKRSQVLEYFANLSPCLIAIEACAGSHYWARRLAGFGHRIKLIPAQYVKPFVRRSKTDARDAAAICEAARQPDMPTVAVNTEEQQAVQMLHRIRQRLMQERTALINQARGLLGEFGIVFPIHVSAFKEGARKLLADESDALPALARHLLLDLCTELTALEERINAVDGRVRRLAKEDERCARLQEIPGIGPVTATALIAAVGDAKRYRSARHMAASFGLTPHEHSSGGKQKLLGISKRGDRYIRWLLVQGARSIMRFASKRTDALSRWVCQLASRRGVNVAAAALANKLARIAWALLAKSERFASA

SEQ ID NO: 468724 - protein, 401 aa, unidentified
MKKMLVVGIDVSKNKSTVSILEQSGKCLKKPFEVEHCKSSLNALSDLLFSFNQEVKIVMEATSVYHLHILYFLQSRNFFVSVVNPLMLKRWRTQNLRPVKTDKHDSIAIAKYGCEKWFSLQNFYPENETYSELKILGRQYAHYMELHISALQELNHIVDQTMPGIKTFFPIINNPSGKNKFADFVEKYQHFDKITSFSENEFIADYNSWAKQSGYFPNSKKAKTVYEKATDSITLIPFNKTTQFLIFEAVRVLREIDSTLHKILSRMVELAKTLPEYPIVKSMRGVGDKLAVKLIAEIGDIRRFRSGKSLIAYAGIDVIPYQSGKFNAENRKISKRGSSLLRKIGYEVMLCIKAHKPKISDIVYDFIVKKESEGKSKRAAKIAGLNKFLRIYYARIKELYS

SEQ ID NO: 468725 - protein, 356 aa, unidentified
MSQKSSNAIAVVGIDIGKNSFHVVGHDRRGAIVLRQKWSRGQVEARFANLPPCLIGMEACVGAHHLSRKLQRLGHNARLMPAKYVRPYSKGQKNDFRDAEAIAEAVQRPTMKFVATKTADQLDLQALHRVRERMVSQRTGIINQIRAFLLERGIAVRQGLRFLRTELPGILATRSDVLSPRMLRLVEELAGDWRQLDARIEGLSGEIETRAHQDQHCERLMTVPGIGPIISSAMVAAIGTGDVFSKGRDFGAWLGLVPKQISTGDRTILGSISRRGNRYLRALFVQAAWVVLVKLGPKHWERYGLKSWIEAAKKRLHHNVLAIALANKLARIAWAILNKGRAFACVNTDAMASRPT

SEQ ID NO: 468726 - protein, 361 aa, unidentified
MAQSMSLVGLDVHASQTHAAVLDTATGELRGVRLRMAPTAVVEFLSSLPGPVRAVYEAGPTGFGLARAAIDRGIDVRVVAAGKVPRASGDRVKTDRRDAERLARLLAAGELRFAFVPSVADEQFRDVIRAIEDCRGDLMRGRHRLSKFLLRRDLRWTGPGSTWTQTHMRWLRAQRFDDLCSQATLIDYLAAVEMLLGRRAALLAALEQAIPDSSHAATIARLRCFRGIDTLSAAGLCAEIGDWQRFRPKQLSGFLGIVPTEHTSDQKRRQGSITKAGSVHARRLLVEAAHHYRHRPAVGDPLARRQHGQDPRVIAISWRAQRRLHQRWQDLAGQRRKPAGVVAIACARELAAFCWEAAVID

SEQ ID NO: 468727 - protein, 326 aa, unidentified
MSSVLGVDVSKAKLDVALLIQDGKYRSKVFANTQAGLEALLLWLQALLPQGLGAVHVCMEATGAYHEALALYLHDRGVRVSVVNPMRVKRFIELEGTRNKTDAGDAKSLARFCQMTAPEPWQAPSPGVRALQALVARLDALQEMRLSEANRLDVAHAAVQPSLREVLNTLDKAIADVKAQIRQTIDDDPDLRQRSELLHSIPGLGERTIPQLLAYIGSPERFKNVKALIAYASLSPVIRQSGSSIDKRHGTHPQGHRQLKRALYFPAMVAGKYNPVIAAFWQRLKAQNKPGKVIVVACMHKLLAIVYGVLKSRTPFDPSRFSAANA

SEQ ID NO: 468728 - protein, 327 aa, unidentified
MYVCILSQDGEVMLHRNMKASPDALLKAIAPYRDDMVIAVECIFTWYWLVDLCAQEGLPFVLGHALYMKAIHGGKTKNDKIDSQKIAVLLRGGMLPQAYVYPAAMRATRDLLRRRTHLMRKRAELLAHIQHTNSQYNLPEIGKKIAYKANRDGVAERFPEPAVQKSLEVDLALIGHDDQLLRDVELSILTTAKPHNAQTLYLLRTVPGIGAILSFVLLYEIHDITRFPRVQDFLSYCRLVKCTKESAGKRYGTAGTKIGNAHLKWAFAEAAVLFLRANPAGQKYLTTLEKKHGSGKALTLLGPKLGRTVYDMLQRHTAFDMGKFLNG

SEQ ID NO: 468729 - protein, 344 aa, unidentified
MDHFGGLDVSVKETSICIVDDSGRIVKEVKVASEPEALLKVLGNPTYRFKRIGLEAGPLSQWLFSALAEAELPVICVETRHMQAVLKAQINKTDRNDARGIAQMIRVGLYRPVHVKTLRSQKLRMLLTHRKLLQSKAIAIENDLRGTLRNFGLKVGMVGKVRFEARIQELVENIPDLAVLVEPLLIVRRVLREQIVILHRRLLAIVREDEVCRRLMTTPGVGPVVALTYRATVDVPARFRKSKSVGAVFGLTCSRYQSGEIDWSGKISRCGDEMMRTMLYEAAQSMMHSKKWSWLKAWAMQIARRRGIKKAIVALARRLAVILHRIWVDGTEFRWTREQAAAAA

SEQ ID NO: 468730 - protein, 349 aa, unidentified
MSQNLKTAVAVIGIDIGKNTFHVIGLDGRGAIVLRQKWSRGQFEVRLANMPPCLIGMEACVGAHHLSRKLQALGHDARLMPAKYVRPYSKGQKNDFRDAEAIAEAVQRPTMKFVATKSADQLDLQALHRVRERLVSQRTGIINQIRAFLLERGVAVRQGLRFLRAELPRILATPPDVLSARMVQVISDLAEDWRRLDERIDRLSREITVLAQQDAGCERLMSVPGIGPIISSAMVAAIGTGDAFSKGRDFAAWMGLVPKQISTGDRTILGKISKRGNRYLRVLFVQAAWVVLIKPRSCERHGLKHWIEAARKRLHRNVLAIALANKLARIAWGVLAGSRTFEASKLQVA

SEQ ID NO: 468731 - protein, 412 aa, unidentified
MRRVIGIDIHRTFGEVVFWEEGRLRHGGRIDMTRTALEGFGKALLAMDEVVIEATGNCMAVCRVLSPFVKRVVIANPLQVKAIAYARVKTDKVDAGTLASLYAAGYLPEIWVPDGGTERMRRLVARRYQVVRHRTRIKNEIHAILHAHLIAKCPHADLFNGRGRDWLARQPVPDDERLAIERHVRELDRLAEDLAILDRQIAENALDDSAIGRLLTITGVNLTVATGLMAAIGDITRFKSPEKLVSYFGLNPRVRQSGVGAAHHGRISKVGRSHARAMMVEAAWAAAKTPGPLHAFFVRIRARRGHQVAAVALARKLTVLCWHLLSKKEDYLWARPALVANKTRAMELQAGKPAAKGNRRGPAYAYNVKALRDQEMRVAEQAERSYEQFVTHWKPRPSKDRARGPLNPARLE

SEQ ID NO: 468732 - protein, 324 aa, unidentified
MSKNTLFVGIDVSKDTFDVYEPSMGHQKFKNDKEGFRLFHKWLNKECWCVIENTGSYHQPLAIFLHKKNYLVSVVNALVVKRFIQMKLQRNKTDKSDAKMIAMYGSNQPLELWEPDPEYIDCCKMLQSCIQTYFKQHTALSNKLHSLKSKGSEYKVLVKSLQRQKKSIQGEIQKLEEALETLIKENEPAMLSHVASIPGIGRKTAIFLIVSSNAFKNFESAGQLKSFYGLAPTERSSGSSVRGVSRISKSGNALIRNHLFMCSFTACQCNPACKSLYERLVAKGKSKKLALIAVCNKLVIQAFSIAKSGLMYDENYKSSLVVKS

SEQ ID NO: 468733 - protein, 350 aa, unidentified
MEYVGIDWSYRRAAWCAVSEVGKVVDEGAVAADEDGLGRLVIRRGVEVRAVVEMMSGAIWVRDTLAAAGWHVQIAHARKVRDVAPLACKTDKVDARVLAELCRRDLVPELWVPSLGDRELRERLRRRTHLVRMRASAMNRIFGLLTQWGLRLSLRRLREPDAMELLAQRGVPSVWRDSIVEALAVIDLLDARIAPIDRELGPLARGDARVRLLDTIPGVGDLLGLTLASEIGDVARFCSPRKLIGYAGLAPKINQSGDRSRTGALSKAGSRTLRWAAVEAAQHAWRPTNPWHQLYTDLAQRAGKNPAKAAVARKILIAAWHVLSRQQPFKAAAPRRPDPVSASSRCLLAA

SEQ ID NO: 468734 - protein, 373 aa, unidentified
MKKRSSSRQNPKPAVKAKRARQSVTIGMDLGDKTSRYCLLSDEGEILREGQVGTTKAGMTETFGRIGRARIAIEVGTHSPWVSRLLRSFGHELIVANPRQVKLITESSRKDDRLDAQTLARLARIDPQLLRPIQHRSEKAQTALMVIRVRAALIAVRTSLVNTARGLTKAVGERLPKCDADQMGVIQSESLPPKLRQVLEPLLKEVESITEKIKDSDREIEQIARKDYPETALLQQVGGVGPLIALTFVLTVADKDRFEKSRDIGCYLGLRPRRSDSGQSQPQLRITKEGDPYLRTLLVQGAHYILSRRGPDTDLKRWGLRLAERGGKRGKKKAVVAVARKLGILLHKLWISGEVYEPLRNQKSRQEAKKAAA

SEQ ID NO: 468735 - protein, 408 aa, unidentified
MEVVHERCAGLDVHQHTVVACVRVASDGKVVQEVRTFDTTTQGLLALCDWIAEHGCTHAAMESTGVYWKPVWHVLESSFELVLANATHIRNVPGRKTDVNDAMWIADLLAHGLIRASFVPPTPVQELRDLTRTRKQLVREIAQHTQRIQKTLEDANIKITGVISNVLGTSGRALLEALVGGETDPERLVELTSSRLKASRPQLVEALRGRVREHHRFLLKLHLGQIDGLNAAVRDVEARVGESLKPFHERAQLLTTMPGISETAAHVIVSEIGFDMSRFPTAGHLVSWAGLCPRSDQSAGKRRSTRVRKGAPWLKTTLIQAAWAASRKKDSYLRAQFLRLKSRRGPMKAIVAVAASMLTAAYHILRDGVPYRELTGTYFDSRDRTKLARRLIRRLSDLGVQVQILNAA

SEQ ID NO: 468736 - protein, 427 aa, unidentified
MAVVMIGVDPHKASHTAVAINAAEEPLGQLRVRASAVQAERLLGWAQAWPERAWAVEGAGGLGHLLAQQLLSAGERVLDVPPKLAARVRLLATGNINKNDPNDARSVAIAALRSADVREARRDDHGAVLKVWSKRYRDLGRARTQVACRLHQVLCELVPGGVPGEITAGRAGQILASITPAGAVDTARWELATELTEDLRAVDTRIRETRKKAAAAVRAAGTCLTGLFGVGPVIAAAVIGDVRHVSRFPDRDHFAAYNGTAPIEVSSGGRKVYRLSRRGNRRLNHAIHMVAITQIRYRHTKGRAYYDKKLAEGKTSKEALRALKRQISDAIFACLQEDARRAAAAAAKSPGGQPGNHSASRAAGSHPDDRLFGQATPGPATQPMTPAAPFPAPLPSRASERPGQGPGTARPRSGARKASSTRPRESR

SEQ ID NO: 468737 - protein, 398 aa, unidentified
MLSIGIDVSKGKSTVCGMKPGGEIVYTPFEVQHTREGMSELVSLLHSSGEEVRAVLESTGSYHCPVVAALLENGIFVSVINSLRMKRFCSQSIRKVKTDRIDAMQIALYGLAYWQELQPTRLPEDTYRELQLLARQYYQMTSLLIKAKVDFNAICDQVLPGMQELMNDHAGRHKLSDFVLRYRHTTHILEMGETRFRKDYCKWAEKKGYRNRERMAALIFATAQNGIPVLPNAPSTQIVITEAIRVLHTVEASRDAILTQMQALAKTLPEYSLVREMPCIGDTLAPRLIAEIGDVRRFHSKRALIAYAGIDAPPYQSGKFCANNRHISKRGNRYLRKTGYEVMQSYVMHKPANDPIFTFIEKKRSEGKSGKLAMVAGLNKFLRVYYGKVTELYRSLPQ

SEQ ID NO: 468738 - protein, 344 aa, unidentified
MKMKESKTTRRCMGVDLHPDSFLVCIREGGQSHWQRWSVEQADQFVSTLRPTDEIAVEATGNTRWFCQLLEKRVHRIVVVNPHQFRVISESVKKTDRRDAALLAEYLEKDLLPEVRQKSPQASMVAQAAQTRDELVKMRTMLKNSVHGLFCSYGARLQKKQLASRRQRAALRQIPLPPLADVQRKVLLDQIDSLDASIAVLEPAVIQEGRNLPGFKNIVSVKGIGELSSSILAATIGPVKDFAEPGNLGSYFGMVPRVAQSNQSEHHGRITRRGNKLARTTLVQCALIAKRYSPFLNRFYERIQRRRGAGKAIVATARKLLTILYHTLKNDWVFKDFPNFELAS

SEQ ID NO: 468739 - protein, 484 aa, unidentified
MAKRKKSTFERLTKGPLNRKQRRELGRRLVSDDPGLKIIHPNAGGIDVGNESHFAAVPADRDAQPVQEFGSWTADLHRMGKWLQSCRIDTVVVQATGVYWIPLYDILTEHGIRVVLVNAQHTKNVPGRKSDVQESQWLMKLHTYGLLRDSFRLTENLEGVRTIWRLRDRHVKEAGRAVQHMQKALTKMNIQLANVISDISGVSGQAIIEAILKGERDPYRLADLKHERIQASREEVARSLEGNWREDVLFELQQAVNSYQFAHRQMQECDGKLETYLAMLPTRVIDVAGQPNLQPTAVARKAQKPKKPRGNAPAMDLAAELKRISGVDLTSIDGIDVMGAQTILSELGTDLTAFATEHQFASWLGLTPSKDISGGKVIGRSRRKVQNRVAMSLRMSASTLLNSKSYLGARYRHLRKHLPTAAAAVKAMAHYLALLVYRMLTKGQAWVDRGAKQFEQKRTEWELSSLKSKALANGFKLVPIAEAQ

SEQ ID NO: 468740 - protein, 347 aa, unidentified
MTIVEDARGVTGGVDTHLDVHVVAALDPVGALLGTAAFPTTPKGYEALLGWLESFGPVVKVGIEGTGSYGVGLSKFLAQAGIRVVEVNRPNREERRRSGKSDPLDAIEAARSALGGKAKSIAKSKDGPVEAVRALLVAKRSARTARTSALIQMRELLVTGPDQLRSRLRGLRISALVAEAARLRPARSGDSVVIATKAALSSLAHRVQELDGELAELDGRIEALLMRHCPDLLGLFGVGSDTAAALIVCAGDNPERLHSEPAWARLCGVAPIPTGSGQTSGRVRLHRGGDRQANAALWRIAMVRIAHHPETTAYYERKLRDGRSKQDVVRLLKRYIAREVYRYLPRS

SEQ ID NO: 468741 - protein, 339 aa, unidentified
MKVTTFGLDLAKRIFQLHWVEMGTGEICRRQLKRHQVAEFFANREPSVVAMEACGSAHYWARKLRAMGHEVRLIAAQFVRPFVKSNKTDAADAQAIWEAAQRPGMKFVAAKSEGQQSVLMLHRMREQLVKMRTMQVNQLRGLLYEFGAELPQGRQRGIERMGSELERLEGIVPAMVIETIREQLKRIESFSKEIAGIEKKLALWKKEDQAVRRLLDIPGVGLLSATAAVATMGDAKTFKSGREFAAFVGLVPRQSGTGGRVKLLGISKRGDVYLRTLLIHGARAVITHAKERDASLQKLLARRPLNVAVVALANKMARTIWALLAHDRMYEKGYVARAA

SEQ ID NO: 468742 - protein, 433 aa, unidentified
MKAEPQEKNKRATNHPTQHHWHEMNRKQRRETMRKIQSEDLSLEVIHPDAAGIDIGNESHYAAVPPSRDSQPVRCFGCTTAELKAMAAWLQQCRIRTVAMQSTGVYWVAVYDILEQAGLEVYLVNARDTKNLPGHKSDVQESQWLMKLHTYGLLRNSFRPSQKIRTMRTYWRQRNDLVQSASRHILRVQKALTQMNVQLANVLSDISGVTGQAIIKAILAGERNPHKLAEFRDPRVQASEEEIAHYLEGNWQPDLLFVLKQEQDGYEFCQQQMAECDRQLEQYLQSTEDRSHGAPLPEEKRKGRLKKKKGNKPQFDLREGLFRMSGTDLTRIDGIDVMTATTVISEAGYDMSKWKTENHFVSWLRLCPDNRISGGKVIGKGRLPTNNPVSIALKMAATTLRQSKTYLGAQFRRLRTRLGAPMRSSGQRFALVV

SEQ ID NO: 468743 - protein, 408 aa, unidentified
MIYIGVDLSDKFFDSCITNSYGDVLTRNRFDFDHDGFCSFTKLISEHQANPSECVIGLENPRSRLVDFLAGRGYTVVLTNPNAICSYRKSKTSSNAKSDQADAQLIAEYVRENHKRLKCIQIPDETIRELSLLLEDRDKMVQQKVRFSNQLTSTLKEYFPQALDAFGSIDSKCTIQFLKRIDTFAQLKALSAEEKEKLLSDCGINRKDSKERFYEAMKKPVYHISPSVVKTKVKLKNVLVAHLDLLIQQIQDYESQIQNLMDDSDHGNIFRSLPGADYILGAKLLVIYSTRNFSNASEAQQLFGTAPYTSMSGQSRIVGFRKGANKLGRNTFQQLARGSIRSSKWAKKQYFKKRNQGKGSHHAFRCLANTWVKITFALWRDKTPYDESRHLVSIANHLINQPAFVNND

SEQ ID NO: 468744 - protein, 420 aa, unidentified
MPSHPSDFAAVIGLDWADRKHDICLFETGQESPEYSVLEHDPVAIDAWATKLRKRFDGRPIAVCVELARGPIVSALLEYDFFVIFPINPAMLAKYRRAFSPSRAKDDPKDAFLALDLFRHHFDRLAPLRRERPAMRALQRLVQARRTLVDDRCRLINRLTYALKEYFPQVLGWFRDKHTDVFVDFVMRWPTLDAAKRARRDTLVEFFRAHNVRYGKTTERRVDAIQAARPLTSDLAVIEPNRLMAESLLAQIGALSKAVGRFDAEITAQVAELPDFKLFAALPGAGAALAPRLLAAFGENRDRFPDAASVQTCSGIAPVVERSGNKSWTHWRFIASAFLRQTFVEWAGETVPHSFWAKAFYESRRAKGVPHQAILRALAFKWIRILWRCWHDRQPYDEARYLMALQKRHSPILAHAAQSP

SEQ ID NO: 468745 - protein, 367 aa, unidentified
MKKVSTTAAKPTSNFPEQKLTVGLDLGDRSSWYCVLNESGDLLLEQRLSTTPKAMREVFGGMPRSRIALETGMHSPWISRLLSELGHETIVAHARNVRLIGESRKKDDRLDARTLARLGRIDPQLLSPVTHRSAKAQADLTVIRARAGLVRARTALINTARGVTKSYGERLRGCNARNVNAEKAAGLSPELQAALEPLLAAVESLSEQIQEYNQRIEQLGKQSYPQVALLKQVKGVGTLIALTYLLTLEDPHRFPKSRDVGCYLGLQPGRRNSGQSEPQMHISKEGDPYLRTLLVQGAHHILGPFGADSDLRRWGLKLAERGGKNGKKRAVIATARKLAVLLHRLWVSGEAYEPLRNSQSTTMRAAA

SEQ ID NO: 468746 - protein, 343 aa, unidentified
MKEVSIIGIDLAKNVFQLHGAAADGSVVFRKKLSRPQFIRFMTAHPPCEVAMEACPGGHFWARELSRAGHRVRLIAPHYVTPYVKRQKNDAADAEAIVEAATRPGMRFVEPKTAEQQARAVVFRIRQKLVAQRIELINALRSHLYEFGYIAPVGPQHLPELAEVVADAASDLPDTARLACHGLLEQVDNLSRHLDRLNKQISDLGKEEGGAAQTLQTMPGVGPITALAIEAFAPPMESFERGRDFAAWLGLVPRQASSGGRTRLGRISKAGQHDIRRLLITGAMAAMVGACRRGVPEDTWLGKLIRRKPRILVAIALANKMARQIWAMLTKNESYRVPALVAA

SEQ ID NO: 468747 - protein, 340 aa, unidentified
MNTTQIGVDLAKSVFEVAVSHIPGRVHERHRLSRTRFRRFFAERAPTEVLLEACSSAHHWGRELQALGHRVALLPAADVARYRDGNKTDRADAKALLEAARNEAIDRVPVKSVEQQALSALHRLRQGYLQTRTARINALRGHLREFGVTIPLGAAQVLPRARAALAEERLPSYLRHALTEVLEEIATLQAKAAALQDQLDRLARQLPEASLLMSVPGVGILTATALLAFVGDIHRFRSGRDFAAYLGLTPREHSSALSRRLGGITKHGNSYLRMLLIHGARSALRAGHVAACPDDLRTWALALQHRKGHNIAAVALANKLARVCWRVWRDQRPFERRDAA

SEQ ID NO: 468748 - protein, 388 aa, unidentified
MIYVGIDIAKTNHYASIVDYSTGEVIEKPFLVTNNKQGFDLLYSKLRNFDKDNILIGLESTAHYGNNLIFYFHEKQFKLGIINPIQTSTLRKTRIRKVKNDKVDSMLICEALSLGYYNLLSDYDIKLLEIKSLCRFHKDLKEKASEAKIQLKTYVDQLFPELNSFFKDNLDLKTAHELLKCYQSPLDIINVNLTKLSNLLVCSSRGKYDKSRAIELKDLASNSVGINNHALSIQIKMTIELIELLESQIKDIEKQVSDFIKKSDNVITSIPGIGYMTAAIIISEIGDINRFHNPSQVLAFAGLDPSVKQSGNFNASSTRMSKRGSPLLRYALILAANNVQLNTKTFNDYYNTKRLQGKLHYNALGHCAGKLVRNIFYMLKHNVKFNLD

SEQ ID NO: 468749 - protein, 463 aa, unidentified
MPTEELRPGGAAVTEFPWGVAPACQAERQYRGDTLTTRPALLEVSMEPNRFRHYIGIDWATEAHRICLLDYNGQLCARVSIPHSGAGLDQLLEWLASHGVEPAFAAVAIETPRGALVETLVERHYAVFAINPKQLAHFRDRYTSAGAKDDDRDAWVAASALRTDEKAFQQVAIDAPELIQLRELYRTADELREEVQRLTSRLREQFIRYYPQMLALYPSPDQPVIWELLGLAPLPATAQQLTVLQVETVLRKCRIRRFTAGQVLEQLRATPLTLAKGAAAAASDHALILVAQLRVIYELRKQTLKRLGSIEKKMLQTTTGSGAPSDAAIIASLPGAGVLTTAALLSESSRAVAQRDAPALRAYAGVAPVTQQSGKSLKVSMRYACNNRLRNALYHFAMGSLRDPVARRHYDRLRGEGHSHARALRGVADRWVTVLMAMLRSGTLYDATRRKAWQAADAAGATA

SEQ ID NO: 468750 - protein, 339 aa, unidentified
MWYSGIDQHKQFCVITTYGAEGPRVKQARVPSTPLALQRYVADFPGEHKAVVESTGGWYWLADTLAAVSVELVLAHATRVKAIAAAKVKTDQVDSDTLALLLRADLIPMAHMIAPAQRGPRDLMRTRLRLVEKSVSAQNSIDRLLEKFNLTSVTELEACYELQADCHQSQFQLLDDQIATLERALYPHLIPNADVQRLLWIPGLGKVNAFTIYTEIDGIARFPSARQFFSYCRLVPGADNSAGRTRHRSGSKAGNRYLKLAFSHAAIRAVQYYPEIRAFFKAKARKKPIRIARTLVALELARIVYEVLSKQEEFNGRFKNRPLSRRKHAKWPRRASPPA

SEQ ID NO: 468751 - protein, 349 aa, unidentified
MRFYTKNHAHYCGIDLHAKTMYLCIFDRDGQILLHKNMRSCPETFLAAVEPFREDLVVAVECIFTWYWLADLCRSEGIEFVLGHALYMKAIHGGKAKNDKIDAFKIATLLRGGTLPVGYAYPREWRATRDLLRRRQHLVRRRGSLLAHIQNTHHQYNLPTPGSKIAYKANRVGVAEVFDELDARKSMEVDFMLIENYDTTIRDIENHLERRARQHDSQGYHRLRTVPGIGKILALTILYEIHDVSRFPKVQNFLSYSRLVKCEHSSAGKKLGTGGAKIGNVHLKWAFSEAAVLFLRCNPEGQRLQRRLAGRHGKSKALSILAAKLGRAVYLMLSQARAFDMERFLAHNK

SEQ ID NO: 468752 - protein, 347 aa, unidentified
MSHKTAATVAHTIGIDTGKNILHLIGLDDQGAIVFREKIARGRIAARLANVPRCLIGIEAGMATHYVARELSALGHDVKQVPPAYSKPFRQGHKNDFRDAHAIAEAVQRPSTRFVPVKTDDQLDLQALHRVRSRLVGQRTAVINQIRGFLLEHGIAVRQGLRFLRQQLPDIMAKRSDVLSPRMIRIIGDLSADWRRLDERIEHVTEEIEVLAHGSESCRQLMTVPGIGPLIASAMVAAIGNGAAFAKGRDFAAWLGLVPKQMSTGDRTILGRISKRGNRYLRTMIIQGARVILLRPANWAKHSFGPWLTAAANRLHHNVLATALANKLARITWTVLAQARSYEARVN

SEQ ID NO: 468753 - protein, 408 aa, unidentified
MQRYYLGVDWADKSHQLYAADESGKKIKELEVQQTAEGLAEFGRWLDERRSAGTELWAAIEKPQGRIVDFLLDHGVVVYPVNPKALDRARDRFRMSQSKSDGFDAYVLAEFLRTDHTHLRALEPDSAQGQELKMLTRDHQRLLRQKTRLLNQMTITLKEYYPRALEVFDDLETQIARDFLHAYPTPQGLSRMTRPQWKRFAKGEHHLSEARWQELWEKINKPQITIVDHVVRAKAKLLLALVAQLEVGVKAVHDYSQEVERFFAALPAAKIARTLPGAKSGTTMPTLWAELGDAKNRWNSFRHLQAEAGTVPVTKASGKSRMVQFRFACKKRLRTAMYWFAFNSLMRCEWANKYYRDQRAKGHSKHQALRALGAKWLKIIFVMWRDHKPYDENYHLANIARHAMRQAA

SEQ ID NO: 468754 - protein, 355 aa, unidentified
MNSVRYVGLDVHRDTISAAVLNESGRLIQQSILATRAAAILDFVGGMRGALHVTFEEGTHSAWLYDLLARRVARLVVCNPRKNALLKSGNKSDAIDARKLAELLRADMLSPVYHGEKSALEVQHLARSYAMLTEDTTRVMGRLKAVFRSHAIPCAGKKLYGRKHRDEYLSELGAGGLRRRAECLYAELEALQQLRRQAKRDMIVECRKYPESKLLCSVPFLGPVRAAVLIGRVQTPHRFRTKRQFWAYCGLALEMRDSGEYRMVDGQVERRKRPAQIRGLNWNHNHELKNLFKAAATSASACDGVFREFYLGLLKKNMQPEMARLTLARKIAAIALKIWKKGEAFNAEYLKLQAA

SEQ ID NO: 468755 - protein, 455 aa, unidentified
MPRRRARRENLPPQLQQVNLNAAAIDIGATSHFVAVPEGRDSLSVREFATFTANLHQLADWLQQCGIDTVVMESTSVYWIPVFELLEQRGFEVLLVDARKVKNVSGRKSDVLDCQWLQQLHTFGLLQGAFRPTDQIVTLRSYLRQRATLIRGAATHIQHMQKALQQMNLLLHHVVADITGLTGMTIIRAILAGERDPQLLAQHRDPRCKKSAEVIAKSLVGNYREEHLFALQQAVILYDTYQAQLAACDQQIEAYLARLERVTDERPPPPPKRRQSPVHNQPRFDARTYLYQITGVDLTRIDGIEAGSALGLIGEIGTDMTRWKSANHFASWLGLCPGTKVSGGRVLSSKTKPTATRAAVILRNSAASLHHSQSALGAYYRRMAARIGKPQAVTATAHKLARIVYSLLRYGTEYSDAGQDYYERQYKERAVRNLQQRAKSLGFELVPTPLESAVT

SEQ ID NO: 468756 - protein, 341 aa, unidentified
MAVAGGLDLHRGQLTFDYVDTGTGESWRGRIWPADRESLRGWLRRFHGVPDVEFAVEGCTGWRYVAEELQRAGITPHLAEPAGTAGLRGRKRRAKTDWADARHLRDLLLDGRIPESWIPPGHVLEARALVRLYKDLLEERTSWQQRVHATLFHQGIPVVPKLGTADGQQRLEAAELSAAGRRAVQAGLRQIERLTQEMASLRRELARLSSRQPGCRALRKAHYGIGGLLSVAVWAELGDCRRFSSSDDAVRHTGLDVTVYDSDGRRARGHIARQGPPVLRWALYEAALYASRPASPDYAYYCGVRDRIDGQRALLSVARKLARRCYHTLRDLGEDALAPAA

SEQ ID NO: 468757 - protein, 340 aa, unidentified
MGEYIGLDVSLKETALSVRRDGKRVWRGRCDSDPAVMARVLRKHAPEAQRIVFETGPLSVWFYHALRAEGLPAICIDARHAKAALDMAANKTDANDADGLAHLAEVGFFREVRVKGYDSMLVRTLVAARSKLVQMTTELSNQIRGLMKTFGLIVPGAKGGSFEAEVRRLLSGDHGLARVILPLLEAWSAVRRRAAELGRQLLAGARRSQACQRLMAIPGIGAITATAFVTAIEDPANFRSSRSVAAWFGLTTRRYQSGEVDYDGHLSRRGDAHMRGLLYEAATVLLTRSQVDSDLRAWGLKLRERLGFKRAAVAVARKLAVVMHSMLKSGQSYRAKAAMA

SEQ ID NO: 468758 - protein, 341 aa, unidentified
MSSFNPNSCMGLEPVPSKEGSWRMAQNGAIVGIDVSKDKLDVALRSAKVAAIFANNGDGHRELLTWLVHHGAAKVVMEATAGYEMACRKFLMKAGLEVVVVDPKRVRHFAKSAGQLAKNDAIDAQMIAWFGEVFDDLTGKAQDDEREELEHLLTTRRALGLMQAKVENWSGHERPKLVQKAYQALLRTLACQIDKLDDAIAAQINGTARFAERAEIIRSVPGLRDVSAAGLIAFLPELGRVDRQAAAALLGVAPFDDDSGKHRGRRVIMGGRRKLRTLLYMPLVGAATRHNPVLKAHYQRLLARGKEPKVALMACMRRLIGILNAMLARGEKWDPSKHALA

SEQ ID NO: 468759 - protein, 509 aa, unidentified
MNVNTKNTKNQAQERNSEKLTRAELRRRQKAEAKMEKSKEKKKITVKSPKTQEQEVLLQDAEAIFKNLKSYTWRDLETNGKFSKNDKLSFISDDMLIVGCDVGSETHYIRAIDTRGRELSRKAFAFDNNEEGFQKAKEWSVELAVRNGKDQIVLGLEPTGHYWFVLAAWMVANGVSVVQVNPYAVKQTKELEDNSQQKDDTKDPKLIANLVKDGNYGMPYLPEGVYADLRRLSMFRDQLTEDRIRNINRLHREMKIYFPEYREAFGKLDGAFSIRLLKKAPFPKDILELGEAGIRNIWKEARLRGRGYSKAGEIVRLAKESVGLNDGMEAGKAAVKWFAEKIEELTEQLSDIENRLHQKCREIPYAENILEISGIGENILAGILAEMGDIDRFDDVKEIQKLSGLGLVACSSGKHKGETRISHRGRKRLRYWLFQAAKSAVSHAGEFKMLHAYYTTRADNPLKKMQSLIVIACKILRVIYTILKKGIRYDPEKMLKDIRIPTSRQPVAA

SEQ ID NO: 468760 - protein, 359 aa, unidentified
MQSMDQGGRQRRVVIGVDTHKHVHVAVALDELGTPVSDTSVPADRGGYQRLLEWAVRQGTVMAFGIEGTGSYGAGLTSLVRRRSHRVVEVARPDRRERRLNGKSDLLDAHNAARAVLAGVATALPKDADGVVEMLRQIKVAKDTAVKGRTSAMITLKALIVNVDPALREELQALPKMALIERCAALRPGPVDTPIAASKHALRSMARRWRHLHEEIRGHEELLEDLTRSLAPQLLDAFGIAADTAAEMLIVAGDNPDRIRSEAAWAKLCGVAPIPASSGTTTRHRLNRGGHRQANAALYRTVIVRMRFHEPTIAYVERRTAEGRTKAEIIRCLKRFVAREIWALIRPLRTQPTPAAEVV

SEQ ID NO: 468761 - protein, 415 aa, unidentified
MADQRQWYAGVDWASESHHVFVTDGDGRKIGERVFKHSGEGLAEMAAWLMAASGAADPSQILVAIEVPHGPVVETLLERGFKVHAINPKQMDRFRDRFTMAGAKDDSRDAEVMSSALRTDARCFRLLAVADPMICELREWSRIAEELGVERNRLTNRMREQLWRYFPALLEFDSDLGAGWLLDLWQAVPTPDKAAGVRETTIAKLLKRHRIRRFDAAHVLSVLRKPPVQVAAGTIEAASAHITTLIARIRLVNRQIEQAHQRLDSLIARLSPPEEAAPGQNKQHDAEILASLPGVGRIVLATLLAEAHDALQRRDYAALRSLTGAAPVTKRSGKSCTVIRRHACHARLAGAMYHWARVATQHDPTSRAKYAALRSRGHSHGRALRSVADRLLNVACAMLRTGTTFNPDLAVQKTS

SEQ ID NO: 468762 - protein, 335 aa, unidentified
MARIWVGIDAGRQNHHAAAVDEHGQVLWSMRVSNDQDTLTELLDRVDAGDDVSWAVDLIGCETALLRAVLMAAGHQVIYVPGRTVKTMTGAFAGEAKTDARDAVVIANTARMRRDLTVVKPPTDLVARLALLVAHRADLIEEWVRGVNRLRRLMLGISPALERALTFTSAATLILLAQYQTPEQIRTAGRDTLIAYLRRHRALHTAKVADAALNAAARQSIALPAQDTAAGLVAELASHLLQLRQRVKNTDKAIEVALGVHPQAAILRSLPGIGPLVAAEFTVAVGDLSTFPSADHLAAYAGLAPVPRDSGKGTGNLHRPQRYTAGCGTSSPWPP

SEQ ID NO: 468763 - protein, 318 aa, unidentified
MFVGIDISKQQLDVAVHERNERWQFGRDEKGLVALVEHLKGLDQPNTLVVLEATGGLERDVAVALALAKIPSAVVNPRQVRDFARATGKLAKTDSIDAAVLAHFAATVRPAVQLVADKVALALEASMTRRSQLVQMLVAEKNRRAALIVQQTGSSAMVKSIQTHIDWLDKQIRELDDDIDDQIKKSPIWREKDDLLQSVPGVGPVTSRTLLSYVPELGALDRKEIAALVGLAPFNQDSGQASGRRAIWGGRAKVRNVLYMAVVAALRCNPVLRAFHARLKAAGKPSKVAITATMRKLLTALNAIVRDRAPWAPPALNA

SEQ ID NO: 468764 - protein, 344 aa, unidentified
MHIASIGIDLGKTTFHLVALGERSKVLVRRKFSRTQLLVHTANLPPSLIGLEACSGAYFLGAALREQGHEVRLIPAQFVKPYRKSNKNDFLDAEAIGEAVTKQNMRFVPIKTQEQLDVQAMHRVRDRLVQRRTALINEIRGFLLERGITFPAQPTHLRQNLPTVVEDCEQNLTPRLRWLLDRLWQEWKQTEIDIETVTDEIERIATEDERCRRLRQIPGFGPLVSTAMVAAIGNGAAFRRGRDFAAWVGVVPRQYSTGGKQKLYGISKRGNVYLRRMLIHGARAVLFRIKYDTAGLGQWVHRLSQRAPRNKVVVAIANKLARIAWAVLSSGRDYRHQPLQRAAA

SEQ ID NO: 468765 - protein, 427 aa, unidentified
MTQDTQLLPSQRPVVGIDIGKHRHAAAGVDPGGRDFGQPMMFDNNRAGVDRLEEKILTPLRAMGSVLVAMEATAHYWMCLFFELKRRGYEVVVLNPLETAKKQRRRLRKTKTDKIDARSIARFVREGAFGRSRIPDEPTFELRQIVRHRWRLQEVVAQLQIVALTHVDVLFPELPDVLRPWLKSFRALLRTEAGLRPSLLLAQADHTRATVTSASRRRIPDSRIDELLRCAHDTIGIRRGEAILDSLLRSSLDLIETIEKQIDALDRQLAVRIAGRSSPLESLGLSPHIIATIHAECEPVAGFRNSRQLVAYAGLDPATFQSGDPDPRGGHVSKRGPKRLRQALCLATMGLILKPGIFQDAYRRARGRGKHHLSALVKTASLLARVVFRMLHDNKPFNPDHAQARGNPNQAVGETPHRMPADASSRA

SEQ ID NO: 468766 - protein, 467 aa, unidentified
MAARKQKQKRMSAQVVEDEDYQLRYEIVAGVDVAKESAVVCVRMPPAAGRKHRTSHLQAVPATVPAITELAAELKAQGVQMVSMEATSDYWRIWFAVLEEAGLAVQLVSSSQARNLPGRPKTDKEDARWIARLTEMGMLRSSFVPPPEIRALRVYTRHIWDLTADRTRYWQRLEKLLEDALCKLTSVVSKLAGHHTARAVIEKMIEGERDPRVLAALGQGKMRNDKLPALAEALSGMRFGPQHAHAAASLLRAIDLLETELRDLQERVTAHLAAIPASWGVDADGVTGPEAGRAADAAALPAAERLDEIPGLGREAAMALIAEIGLDMSRFPTPEALVSWAGLTPTAQQSGPRKGRGKKGHGNTYAKRIAVLAAYAAANTDTFLGERFRRLSSRPGGGGRKKAGCAVGRSILVIVWHLLSDPAARYRDLGSDWHARHTDRSRKARNARRQLEALGYDVIITLREDAA

SEQ ID NO: 468767 - protein, 338 aa, unidentified
MSQSNQYVGLDVSLKETSICVIDDADKIVWRGQVDSTPEAIASAVKQHAPNAVRIGIESGQLSSWLFHELKEAGLPVICVDARHAKAALSLKVNKTDANDAFGLAQIMRVGWYREVTVKGLDCQAVRSLLVARAQIVSQITTLKNCVRGILKTFGRVLPKGLRSQFPARVRAAIDGHPVLGAITRAQLLVYDKAVIQCARSDDTARQLMSAPGVGTVVALAYMTGVEDPARFKRSSSVAAYFGMTPRRYQSGEVDYAGRISKCGDGMVRGLLFEAAKVLLSRSARPSALKTWGEALGKRIGAKKATMAVARKLAVILHRMWTTGTTFQWNAEAASPAT

SEQ ID NO: 468768 - protein, 365 aa, unidentified
MVDPTTRFLGLDVHKETVTAAVAEISGAPVLLGTVRNQPEQIRHLVQRLCERGPLVSAYEAGPTGYELHRQLVRLGVKSCVVAPTLTPVRPGDHVKTDKRDAVSLARLLRNGDLVPVWVPDPEHEALRDLVRAREDAKVDLLRARHRLNKFLLRRGVSSPGALAPWTRRHHDWLNGLSFELPAQQLAFEDYVGTVRAAEDRLGRLEAGLAECADRSPLLPVIAAVQVLRGFAFISAVTIVAEAGDFSRFPSARHFMAYTGLVPSEHSSGQSRSRGHITRSGNAHLRHVLVQAAHNARYRPNTQHLRRRLVDAPPDLVQVAHGAQQRLYKRYWHLQRRLGTAKAVTAVARELAGFVWAVSRRPAIA

SEQ ID NO: 468769 - protein, 341 aa, unidentified
MTEVSTIGLDLAKNVFQAHGADAAGAPVFRKKLRRDQVLAFFAAQPPCLVAMEACPGAHHWGREIGKLGHTVKLIAPAYVKPFVKRQKNDAADAEAICEAAQRPTMRFVAVKSEAKQASAVIFRTRDVLVGQRTQLINAIRGHLAEYGLIAPQGPAHIERLIAQIEDPASDIPPAARASLAVLVCAFRHLQEQTAALDAEIATRAKADDTARRLMSVPGIGPLIATAIEALAPPVETFRSGRDFAAWVGLTPVQRSTGGKERLGRTSRMGERTLRRLLIIAASAVVRWAKRKGVPADSWLGQMLARKPPMLVIVAVANKNARIAWALLTKGGIYRAPAVTA

SEQ ID NO: 468770 - protein, 450 aa, unidentified
MNLYIGVDVGKEFNYASFLNEKGLEIDKRFKFKNNYLGFLKLKDNIDKLTYDYNFNYNDILIGFESTGHYWINVDWFLTEKLNIKTVMVRNDAVRHTRALNSQGKGKNDSLDSRTIAECLKNGYYFDVQGRKEDYIVLRRLTRERSELEKEIARYKNRFRAWLDVNNPIFLENFSNVFSAGALALLKVYPSPLDIIKDTYLEVREKLREVGYSRTNKTLKIYYEEVETYKNIINGISYADRLEISEYIEALEMYMKKKENLDERIEALMNFLEGKVYTSLSEIKGMPKAQVASLIAEIGNINNFKSAIHLISYAGLNLQGEGSGKNKGHSWISKTGNRKIRKELYVITFNLVRHNDYFRGLYCYYKSYKRPNEKSSKEMLIALMCKLLRVVYGMLKYNVEFNLNEMLKNYDFRNINKEKFIDEFLGNNEKKQKIIPQEIEDIFLNNRKSN

SEQ ID NO: 468771 - protein, 414 aa, unidentified
MEVKYERCCGIDVHKKTVVACVIVAGPDGQPTKGTRTYDTMMEDLEGLSRWLGEQGVTHVAMESTGVYWKPVYNLLDGRFEVLVVNAEHVKALTGRKTDVADAEWIADLLRHGLLKGSFIPSAQLRELRDLTRYRTKLTDERKSEVNRLHKVLEDANIKLSSVATDIMGVSGRAILNELVQGHTNPALLAELAKGRLREKQDLLEKALRGTLKSHHRFMLAQHLSHIDFLEEAIQRLDAQIGEQMRPFEATIQRWDSLPGINRRMAAIVIAEVGPDLQPFEDAEHLASWAGMCPGNNKSAGKRFSGKTRKGSKWLRRALIQAAHGAAHTKEKYFQAQYRRLAARRGKQRAAVAVGHSLLGAGYHLITRQETYQDLGANYFDERDREGVKRRAVRRLEKLGFQVQLSPVAALAVS

SEQ ID NO: 468772 - protein, 430 aa, unidentified
MKSNTQNTKIEAITETTLVLGIDVGSETHYARAFDYRGIEYSKKPLKFSNDEAGFVTFKAWILDIKEKHGKDKVVPGMEPTGHYWFNLGKFLQDNEMKPVLVNPHHVKKSKELDDNNPTKNDRKDPKVIAGLVREGRYMIPYLPEGVYADLRTVSNMRFQLQAELTRIQNRISRWFNIYFPEYKTVYGQPDAKSGMLILKVAPLPEDILTLGIDGVNQIWRDAKVRAVGKARAKTLIEAAEHSVGSKEGEISARMEIRMLLEDYEFRNTRLQEVVALIEELVKKIPMAEKLLEIKGVGIKTVSGFLAEVGDISRFNNPKELQKLAGLALVENSSGKHKGETTISRRGRKRLRYLLFEVAMSLVSKNPEFRELHSYYTTRKLKPLKKMQSLMAVAAKLLRVFFAMLTKGVDYDPQKLVGDIKRPAVYLQVA

SEQ ID NO: 468773 - protein, 341 aa, unidentified
MKIVVLGIDLGKTYCSVVGLDESGAVVLRRRLGRVTLERFVGGLPPCVVAMEACCGAHHLGRVFGEQGYEVRLMSPEYVRAYVKAQKNDDRDAEAIAEAATRPTMRFVPVKSVAQSDVQALHRARERLVSARTALINHLRALLLERGIVAPQGRARLEAELCTFADEEAGSLSPRIRLLVEDLRREWRSLDQRIAAFDKEFVALARQDEAARRLSTIPGIGTINATALVAALGDARSFRRGRDLAAWLGLTPRQRTTGGKPRLLGISKRGNRYLRKNLIHGARAALRHLVAQDTPLGRWLRSLLQRAHKNVVVVALANKLARIVWAVLTQGRAYASGYQGV

SEQ ID NO: 468774 - protein, 482 aa, unidentified
MKPKPQEKTSKDSSGPEPGHWHEMNRKQRRETMRKIQSDDLSLEVVHPDAAGIDIGNESHYVAVPPTRDSQPVRRFGCTTAELKAMAQWLKQCGIRTVAMQSTGVYWIAVYDILEAAGFEVYLVNARETKNLPGRKSDVQESQWLMKLHTYGLLRNSFRPSQEIRTMRTYWRQRNDLVQAAGRHIQRIQKALTQMNIQLANVLSDVSGMTGQAIIHSILAGERDPDKLAEFRDPRVKASKHEIARSLEGNWEEDLLFVLRQEQDGYEFCQKQMVECDRQVEQYLQQREDRSKGTPLPEEKRKGRLKKKKGNAPQFDLRGELFRMTGTDLTQIDSIDVMTATTILSEVGWDMGKWETEDHFVSWLRLCPDNRISGDKIVGKGRLPTKNRVSIALKMAASTLRRSNTYLGAQFRRFRTKLGSPIAIKAMAAKLARLVYRMLRYGMKYVDQGAKFYETQHRILQVKQLKWKAAKLGFQVVQAPAA

SEQ ID NO: 468775 - protein, 383 aa, unidentified
MNDLIRIGVDTSKSVFQLHGVNAAEQPVLRKKLRRRQFIEFFQELPATRVGIEACGASHHWGRELSALGHEVVLLPPQRVKPYVERNKNDAADAEAICEAMSRPRMSFVPVKTAEQQAALMLVGVRDQLVGRRTQLSNAIRGYAAEFGLVAAKGTDKIEPLLIRIAGDENFPPLAKDLFATLGNEYVRLKPELRKIEARLMAWHRGNELSRRLAEIPSVGPIGATLSVMKVGNPHAFRSGRDFSAWLGMTPKDHSTAGKVRLGAITKAGDEALRSVLVAGATSVIQQVRKGRGRPSPWLVALVKRKPPKLAAVALANKTARIIWKLMVSGERYNPQRAPQRFVPPTDSLAPGTRRQGQAACGGDLRSALTAPALRAPSAPPSA

SEQ ID NO: 468776 - protein, 339 aa, unidentified
MKNKKYFIGLDVHKEKTTYVVRERLGNILLEGEAATLYNELYERLKPYLKSSVIGVEACTSYYTIYQSFLKKNYDIKVANTIQLRTLITKNDSLDAKRLSEMLRLGTFPCSYIPDEDIQRLRSLVQIRHSLMEEKTRCNIRIQAFLDRNGILMPSYKAFTKKWRHALMQHMGSGEVSLELRYEYDHFVYLEKKIEQLDQEMTGYTKKHWKAEYLYIQSITGFGPLLTCYIIAHILPIERFSSNRKLRRYAGVIPAFHESGGKTSKGHIPKTSSRKLLRWALVQAANTAGKTDTKLGRYYRMKKKQKKNAGIAKIAVASSMIDIIYKVLTTKKPYNPTVC

SEQ ID NO: 468777 - protein, 422 aa, unidentified
MMTDTAGTRTRDRSDDGPWVVAGVDTHKDTHHVAVLNAATGAGLGDMRVPATPAGHDQLHDFVRSRGRIRMIGIEGTGSYGAGLARALRAAGAPIREVIRPKRSHRRRGKSDPIDAYAAAGRALAEADALPVAKTGTGPCEQIRVLLVERRSAMKARVAAHRQITALLTTAPDTVRTRFARLSGGELIGALARTRPAPDADTPASATARTLRRLARRHRILTDEITDIDTELRALTARAAPTMLATKGYGVITTAALLVTAGDNPDRIRSEASFAALCGAAPIPASSGRTNRHRLNRGGDRQANWALHQIALVRLSGDPRTKAYAARLTATGKSRKEILRCLKRAIAREAWHLLTHPQPAPRTDDLRHLRHERGLTLTQAAHHLNTHPARISELERGTRPDTTLTAAYRQWLSTQQPQTHTT

SEQ ID NO: 468778 - protein, 348 aa, unidentified
MTISMIGLDTAKHVFQVHGVDAAGKAALKRKLRREEVIPFFEQQERCTVVLEACGAGHHWARMLTQLGHEAKLLAPEAARPFVKKGKKNDAADAAALCAAASRPEVKFVPVKSPEQQGVLALHSVRSLLVKQQTMLANAMRGLAAEFGLVVAKGVHRLDELEAQVQAEASMPAPAKQAFAELHGHSQAAARRIAGLEAQIVAHARQDATARRLATIPGIGPITASLIAATVGDTIGSFKSARHFAAWLGLVPRQHSTGGKTRLGRITKAGNGEIRRLLVLGATSMVFRAGQWNSAAGAWLRGVLERRPVRLATVALANKMARIAWAVMTRGEVYQAKGRAPAAAAAVA

SEQ ID NO: 468779 - protein, 348 aa, unidentified
MSGTAVAHRWFVGIDLHKETLTACVYCSCCGEIRFQKLACRCRKQIAEFFGSLPRPHVVAIEAVGFYRWLWEMLEPLVDKLLLADASQARALAGRRIKTDREDAQNVAELLACGRLPVAYAPPSEVQILRDCSRQRNAFARQRAQVLIRVKSVMNANNRPGPARMKSNGLVGYLEAYQHKLPERHARYLWQCVDQLLLFERQIGQLERELERLLTQPTFNASAAILHSFPGVGPVTCATVLAEIGDFRRFTYRKAIARYSGLDPRTFDSAGKQRTGHISKRGPRDLRWILGQAAWAAVRTDPQVKRIWLRISRNTGKKAAIVAIARRLLLWMWRAVCSGQPYRPPATA

SEQ ID NO: 468780 - protein, 419 aa, unidentified
MLTAQWFVGIDWASEVHEVCVLDRDGQVSERRQVKHTVPDLQAFVDALLARAHGESTTVAVGIEVPRGALVELLVERGFAVYAINPKQLDRFRDRFAPAGAKDDRRDALVIGDSLRTDPQAFRQVLLEHPLIIQLREWSRIDEDLGGELTRLTNQLRDLVYRSAPGLLALCPAADEPWFWAVLRAAPTPAAQRRVSERRLERLLRDHRVRRLTATQVHEVLQQPAVFTAPGVVDAVAAHLAVLLPRVELVAAQRRDAERQLERMLQALEQEMPPAGDQREHSDIAIVRSMPGIGTRVAARMLAEASQPLVDRAYHVLRACMGVAPVTKQSGRRRTVSMRYACNLRLRNAAYHWARAGAQKDPVSRTYYTTLRARGHSHGRALRSVADRLLRILMTLLSRGQIFDPNHGQQPPLPDAAGA

SEQ ID NO: 468781 - protein, 363 aa, unidentified
MFSERTSIGLDVHARSVVAAAIDGVTGEVTRARLTPSYEHIRSWIAELPSPAAVAYEAGPTGFGLYRALTDGGIRCEVVAPSKLQKPVGDRVKTDARDALHLARLLRLDEVTSVSIPSVNQEACRDLVRAREDCRGDLMRARHRLSKLLLRHGIVYYEGAAWTDAHDRWLRALAATQLPTLATRMAFDSDYEHVVMLQARRRGLDSAIEDIAADGEFTPVVRRLSCLRGVSTLTAFALAVEIGDWNRFTGNTIGSFVGLVPSEYSSGSTRSQGPITKTGNTHVRRLLVEAAWHHRSKYQVRAVMRARWDKAPAAARARGHEGNHRLHNRWVNFLARRKRSTVANVAIARELAGWCWSLAVMDD

SEQ ID NO: 468782 - protein, 365 aa, unidentified
MSKRSIQVQETRYCGIDVSAKSLTVAIQRMHQPVEQRSFPNTSVGHKALIVWLRKAKLPVRVSLEATGIYSLDLAFALDAAEGIEVAVLNPKVANRFAQTIRRSKTDAADAELLAEYARRMPFTAWVAPSPGSLRLRSIVRHVESLSVQSAQNQNRLHAAHGSTSTPGCIVQDLKRSVASLELRIHKLRREAMTLVRQDDLLRKRFELLVSIPGIAQVSAMQLLAELSTSPPDLTVREWVAHSGLDPAHEISGSSVRKASRISRAGNRHLRRALYMPALVASRCDPHAKAFFESLFARNKARLQALIAVARKLLHAIYGIFRSGLKYEGQSCFQGSRCPDPVSCRSASFRQLIQIRLICGHNPGG

SEQ ID NO: 468783 - protein, 411 aa, unidentified
MQVVYARCAGLDVHKESVSVCVSVCEGKKKRQETRTYGTFTGDLLALADWLKEQGVTHVAMEATGVYWRPVWAVLEGQLEQMLVNPQHIKVVPGRKTDTRDCEWIADLLQHGLLKGSFVPPTPIQDLRDLTRYRAELRQSQNRVANRIQKFLEQANLKLSSVASDALGLSGRRMLEAIIGGQDDPQQLAQLARGRLKRRIPQLEQALAGRVRDHHRFLLAEYLDEWNALGERIQRIEGEIDKRIAPFEEAVALWQSMPGVDHVTACNLVAEVGVDMQPFPTSQQLASWAALCPGNHESAGKRMSGKTRDGNKWLRRSLCQAAWAATRKKDCYLSAQFKRLAARRGVKRAVMAVAHTMLVIGYHMLKTRRGYHELGGDYLERINKHQLQRYYMKRLQRLGLVITVEPAVAPA

SEQ ID NO: 468784 - protein, 316 aa, unidentified
MDIASRSVEARVGQQGAAGSFANNPEGIAALEAFCRAHQVELVAMEATGGYEQQAFAQLSEQGLPVAILNPRAVRQFAQSMGSLEKTDRIDAGMIAWYAEVKKSRPVCPAPERQQHLRALVTRLRQLTEMRVAQVNQQRLVTDRAVQSSFKKLLAVLARQIRELEQRIAALLDQEPLWRELNQAFRTIKGVADRTVARLMAEMPEIGVLSNKTISKLAGVAPLARDSGQHQGRRAVRGGRATVREILFIVASVVGRYEPDFIAFQQRLRAAGKPSRVIRIALAHKLLVRLNAKAREVRQRLQLSNPLPPAVPAGSL

SEQ ID NO: 468785 - protein, 386 aa, unidentified
MSKSFDPRTPATAYDHTITIVSVLELSGKSWLFGAVAPGVDRRTKRSIETRDIEGVVKALEQLKIEARKAGFEVGRVVLGYEAGRDGFWIARALQMRGHEVYVMHPSSISVERRGRRAKSDRLDVDILLGTLLGWLRGEPRRCTMAPIPTEEEEDMREPGRRREAIVAARLKVENQIGALLVRYGVEGFKPRLKNAEQKLAELKTIDGRELPPNTMDSIRRLLAQHRLLSQQLKEIEAARQQVVTKADPDHVERKIQLLSGVFGLGLETATVLAQEVFARTFKDRRALAAFIGVSGTPYDSGGSRREQGISKNGNPCVRRLLGQLAWRWLKFQPESGLARWFHERVNGAKGRIKKIMIVALARKLLVALWRFVETGEIPDGVRFAA

SEQ ID NO: 468786 - protein, 344 aa, unidentified
MEPMYYIGLDVHKRKISYCMKDSGGKVYSEGSLSATRLDLDVWMKTLPQPWSAAMEATMFTGWIYDHLKPHAAALKVAHPLMLRAIAAAKKKNDRIDAGKICDCLRCDFLPECYMAPTAIRERRRTLRYRNLLVRQMVQMKIKISSLLMEAGVSYNKQRLHKAGYFRELLATNPDINEGLKPLLQLCRETVVRLQKTESAMVRSLERDSLLTDRVERLMTIPAVGPITALTWTLEVGDVQRFSSIKKAISYCGLCGAEKSSGSTVQRTPLSKQRNKHLQTTLIEAAKMAPRNSPELAMLYAKEKQKGNANRATLAVARKLVAYLMAVDRGQRNFQVLETNCIAA

SEQ ID NO: 468787 - protein, 346 aa, unidentified
MMLIGCDYHPSWQQICWLDTVTGETGEKKLEHASGEAEKFYRGLPGPALIGMESTGNCQWFVEMATTAGHDVWIGDAAKIRASDVRQQKHDRRDAALILKLLMEGRFPRIWTPSGPEKDLRQLLIHRYKLVRIRAQVKNELQHLAMNQGVTKKKKLWSKAGEKVLRELPLKPWASRRREDLFRVREMLNGQVDLLDQAVVEAAEKNEKARLLMTQPGVGPITSMAFVLTMGDVNRFQRGKQVASYLGLIPREYSSGGHQRFGPISKQGNRFLRMLLVEAAQGAVRCDPGFRNEYLHRCRRKAKGVAKVAAARKLAIRLYWMLRTNTGYPGVVRVESSSRVPLVGES

SEQ ID NO: 468788 - protein, 415 aa, unidentified
MTAQHRGVYCGIDWAEGHHDIALVGQDGTLIAKRRIKDSSNGYAELLELLAEAGDSGEEPIPVAIETARGLLVAELRATGRPVYAINPLAVARYRERWTVARSKSDHADALVLANILRTDAHAHRPLPADSDLVRSIAVLARAHQDATWRRMKLAQELRSLLREYYPGFLDALAVHGSNSLTGADMCVLLATAPTPGRGAKLTLARIAAALRRGGRRRNVELLAAKLQLALRCPQMRQPPLVEEAMGKNTLALLSVLDAACSGVDELGKAATEAFRQHPDHEIITSFPGLADISGARVLAEIGDDRARFSDARGLKAYAGSAPVTRASGRSVSITRRLVKNNRLAAVGYVWTFMAMTNSAPARAHYQRRRDTGDSHPAALRHLFNRMLGQLHHCLQTAEAYDQTKAFPAAEATAA

SEQ ID NO: 468789 - protein, 394 aa, unidentified
MTEIEYFCGIDVSKHSFSVAIKNGKFIVKDKVFTMNKEGFNGLENMLKEFKENLLIGMESTGIYHNNLFNFLRENGYNSRIVNPYMVFQFFKFSRNKPTRTDKKDAQTIANFLEFNKKALIKENYLGEEEKERIRYLVREKERTTHLIAQTKTEIRRILSVVFPEMEKEPGIFSQEILDLLSEFSSSQKIRTLPKEEFLSKTKEFREKGKGNHSKLSFERIYELANNSIAFEYPYYEELLKLKIKRLKDLLKEKDYINKIIEENANKIFKREIEILTSIPGIGRESAIYLMAELINIKRFENYRKLIGFCGLDPVIKQSGKFKASFRISKRGNAHARRIVWIMAGCVKKSCPYFREYYLKKRNEGKSYKEAVIATSTKLLRVIYALLSENRTFK

SEQ ID NO: 468790 - protein, 399 aa, unidentified
MRTDRPDIFLGLDVGKTDHWACALTDSGQVLWNKTLPNNEQKLTDIYTNLSAKGSVLVVVDQPATIGALAIAVAQHMGIEVAYLPGLTMRRIADLYPGEAKTDEKDAFIIADAARSLPHILRQLTKTDQDEAGLAMLTGFDLDLSQQVNQVSNRIRGLFTQIHPELERVLGPRLEHDAILEVLATWPTPQALRKAGRARIDAKLKKHGARRHTAWTEDILTALAKQSVTVTGTEAAGLVIPHLARQLLSLHAQRADVATEVEKIVATHPLYLVLRSMPGIGLRTAAVIIAELSGKTFTSSAALASYAGLAPTTRQSGSSIKSERVSHSGNKRLKRALFLSAFAVIRTDPVSRTYYDRKRAQGKRHNQAIIALAHRRLTVLYAMLRDGTLYDVPDTALAA

SEQ ID NO: 468791 - protein, 378 aa, unidentified
MNMNAVGIDVSKGKSMVAILRSYGEIISKPFEVKHTVSGIRSLIEQIQSIDGESRIVMEHTGRYYEPLVRELSKADLFVSAINPKLIKDFGDNSLRKVKSDKADAVKIARYTLDSWTELRQYSLMDEIRNQLKTMNRQFDFYMKHKTAMKNNLISILDQTYPGANTYFDSPAREDGSQKWVDFSATYWHVDCVRKLSLNAFIDHYQKWCKRRKYNFSRSKAVEIYEASKELVSILPKDDLTKLIIKQAVEQLNTASQTVEQLRTMMNEAASKLPEYPVVMAMKGVGKSLGPQLMAEIGDVSRFTHKGAITAFAGVDPGVNESGSYEQKSVPASKRGSSTLRKTLFQSWMFSSKQSHRMILSTCLWIRNEHKESLITST

SEQ ID NO: 468792 - protein, 361 aa, unidentified
MKKKLLLKYGIGIDMGSKKFDVCITSEWDDGHQKIESTKRFDNTASEHKNFHQWVEKHRKNKEVPYQILIEVTGVYHEKLLYYLYDVGAAVCLEMPKRVKHYLQSIGQYSKTDKLDSKGISRMACERKLTKWKPGSKHIRELRVVLRHRKSLIKSKNQFKNQLHALNHSSLEAKQIKDSLMEMIEKLDQQVKVIEAEALRISKQDKAQHEKAEMIAGSIMGLGIISLLTVLSETNGFEDMRSQKQLESYAGFDVVENSSGNHIGKTRISKRGNVHLRTAMYMPVVTMVRLKPKVFYDLYERLVRRNGGLKKRAMVAVQRKLLVMIYNLWKKNEKFDPDYQSKKHHETEKEVVLTLNQHYAG

SEQ ID NO: 468793 - protein, 362 aa, unidentified
MNYVGVDVHKKYSVLCALDETGRKLREGRVEGNASNGFAQFFAGLDGPSKAVVEASWNWGLVHEELEELEQVEEVVLAHPHKTRLIADAQIKTDRLDAHALSTLLRGNLVARAHVPRRETRARKNLLRQRLYWARLRTMLRNRMHVLLDRQRGLELPQCSDIFGVRGLGFLRRLQLPEPDATLLGEQLALHDLIAQQMKAQEKRIAAEFGSEPMHRRLLSVPGIGATLAAVIACEVDSIERFNSAEKLCAYAGVVPTTHSSGGKVAHGQLLPFCNKWLRWALVEASWVAIGCSPYFGTLYKQHRMRGKKANTAVLIVARRMCRIIWQLLHEKRDFEKRALSPNFTFPGCSVVRLTAVKASGP

SEQ ID NO: 468794 - protein, 356 aa, unidentified
MSRDIKYIGMDVHKEAIVIAVLNGSGKLVMESVVETKASSILQFIHGLQGELHVTWEEGTWAAWLHDLLQPQVEHVLVCDPRRNALLKEGSKNDKVDARKLADLLRTGMLRPVYHGEHGLRTLRELGRSYQTFSQDLNRVMNRLKALYRGWGIPCAGTQVYAPRYREEWLNKIPHAGVRRRAELLYQQLDGLQGLRRTLRPELLAESRKHRATKLLRQIPCIGPIRAARLLALMQTPHRFRSKRQLWTYSGLGIETRDSAQYRFVRGQLQRAKKPQQIRGLNRNHNHEMKEIFKGAATRASCGVGPLRDFYVALLDKGMKAEMARLTLARKIAAIALTLWKKEERFDAEQLKTQAA

SEQ ID NO: 468795 - protein, 348 aa, unidentified
MSCYLGVDLHRNCFTVCTLKEDGQSELRKWSIHALGEFAQTVQATDAVAVEATGNTRYFCQSLKDRGCRLVVVNPQQFQVISRSVKKTDTHDAKTLAQFLARDLLPEVRQKDALLAEIASLLQTRDKLVKLRTTLKNKINNLLAGRGILIRRESLSSDKGLEQVLQASVIGLERVELEVLIGQIRHLNGSIQKLEAAIKKQGPKLPGYQNLKSIKGLGDIGSSTLLSTIGDINDFASEGKLAAYFGIVPRVTNSNETARSGRITKRGNKLGRTTLVQCALIARRYSPYLAHYYARIKAARGTGKAIIALARKFLGIIYRTLKNGWVFEDFPRFVIAPAEGKTSLLKQG

SEQ ID NO: 468796 - protein, 492 aa, unidentified
MENTTSIYSKQNPKIRQILEQAGSPAKALCGAFDYAKAKHVVLLCNGFGDIIKKSFPVDNSPKGIEKLLEEVRSTCAHRGIKKEHVFFGGEDSPSYAQNFIQALSDKGYLVARVNAWEAKQQRDNHQASTDQLDVRAIAKTLLSKTSYCDQDQPKAILTLKEFCRTRSHFVDHSTEQKLHIHHQASRLFPQFLNQKQSGIAPFSRSGLALMAEGFCPEQIRRRRRDHLVGFLQRHGQEDPEQAADKLKALAAEVLAPCSQMLVCWQAALAQHVLQYQSLCQSVGALEKEMARSLAKTGGALLTTVGGVGVVLASGILAEFGDPAGWKAVRFLCSYSGIVPRTSQTGGPDKPAHTGTVQRRCNRRAKNWIVQAASSIGKCGPTELQSQYAQLQANGQHADFVMSKRLLRIFKDLVRRGTVYRPKALLSPETPTSELIAYYRELWDRLLKKWHGLIEWEELFDPCYPLGQWRQMAQELYKLSLPLPKKRPGKAT

SEQ ID NO: 468797 - protein, 458 aa, unidentified
METRTLGIDLGIRAAHKAVVLDQASNTFVSPVLSFHTDPADMDRLLSIARSGTSDDVRLIAVLEATGMAWYPVSVYLSSKGVEVYRVSGQQVADQRRVYQRRAKSDRIDARILARLPITLSERIHPLFLPTGPQMALQRACRELLRLTRQSTAIKLRLQATDRLAWLELSHVLSAHDPTLCWVREHWYDPWRVLEAGETAIAQAWLEASGESSPDLSWIPALVRQADRVVAVYGSHQRVAYDYLQTSVLREQARLEELQSQAHLLRLNTIRPLYRQLYPQRYLETIPGIGQDSAAIYIAFIGDVRRFPSLQQFQGWAGMIPFSKQSGDARASGLRITQAGPDPIKTTSFLNAQVARLRDPQIAAVYYNQMTHLGKHYLKAMCACASHLLDRVYIVLRDNRPYELRDVDGTPVDKHRAYSICQKLYHVPDNVRRRTAHRVRQTRRETRLERRHEQHSQK

SEQ ID NO: 468798 - protein, 338 aa, unidentified
MASYVGIDLHRQRSVIVVLDEDGNRVTWSRIDNSPANLAREVTAAGADAEAAMEACWGWYWAADVIAECGVRLHLAHPLGIAGYANRRVKNDIRDATLLADLLRMGRLPESWVAPPEVRELREEVRYRHKLTRLQTGLKCQVHQVLGKEGVIPETKGIWWSGGQRWLDELQLADVYTNRIESLRDLIELNHREIVQSDTRIHRRLKGHPGYEAIQQIAGVGRVLGAVFVAEIGDIHRFPDARRLCSWAGLTPRLRESDAHTRRGHITKQGSRLLRWAAIEAVSGAARDRRVASVKARVGARRGHNIGRVAAARHLLTLVYYGLRDGEIRCLAATDDAA

SEQ ID NO: 468799 - protein, 425 aa, unidentified
MPDRIAGIDVHKKMLAVVVADVEVDGDFYFERQKVGTTPADLRGLADWLVEHEVEEVVMESTAQYWRPVWEALEQHWRPRRRARDGAPRLAGTLHLAQAQSNRGPGGRKRDFPDAERLVKRLVAQELTLSFVPDAEQRLWRTVMRRKYQITRNRVQLHNRLEALLEEAHIKVSSVVSDLLGTSARRMLQALADGATDPAALAALAAPRLRATPEQLCDAFQVCPTLHPVYRRLLKLTLEELRVIEDHLGQLDQQMADLLAAHHDAVQRLAEVPGLGVDSAQQIIAEVGATAATFPSPKHLASWMGACPGNEESAGVNYSHRCPKGNRQMRRVLNQAANAAVKAKGTIFNVVYRRLVPRLGHAQAIGAITHRLCRLIWKMLHQRIRYEERGPAVSTEAKKVRARKMIRELRSLGYRVELATHGATA

SEQ ID NO: 468800 - protein, 417 aa, unidentified
MIRAVIECCAGIDVGKKILVACVMTGPADGEAREETHKYGTTNAGLQQLRDWLSSRGCTHVVMESTGAYWKPIFNVLEEVPGMEVVLANSQQVRNLRGHKTDPNDSRWLAHLLRHGMIRPSYIPPRYIRELREFTRRRKQLVRAGVQERNRVQAVLEDANIKIGNVLTDIFGLSGQLMMEALIEGQATADQIAELAQRQARKKIPQIQAAIEGHRMTEAQRVLIRFSMAHLAFLEQQIAQLDEQIFGHIERCRLGRTHALLQTVPGVKRLAAAAILAEMGPDMDVFGTGSRCSSWAGVSPGNNESAGKRKRAPVLRGNPWLRSTLVECAWGASHRNQSTFQARYQRLAPRIGHKRAIVAVAHGLLLTVFEVLRSNEPYSALGADRMPPEKTKRLIRHHSKRIIALHRWLTQTSRSAT

SEQ ID NO: 468801 - protein, 321 aa, unidentified
METQEQRRVLGVDVSKQTLDCATWPATNVWQEGRDAAGIARLVQWAIEHAVRLVVLEATGGLEIDVAAELARAGVPVAVVNPRQTQRFAQALGILAKTDQVDAGVLARFGAMTGVEPRPLKDEVLRELDEVVARRRQLVEMLTMEKNRLASARDPRVCKNLKAHIAWLEKRQSDLDNELRQRIKDSPVWKAKDDLLQSVKGIGDVNAATLIAELPELGRLNRKQIAALVGVAPFNHDSGKHKGKRSIWGGRATVRHALYMATQSAQRYNPQIKAMSDRLTAKGKVPKVVIVACMRKLLTILNAVMRTKQPWNPQHIVIQTA

SEQ ID NO: 468802 - protein, 387 aa, unidentified
MPQPNDLSRSLVALDQNSTIIAVVELSHSSWLVGGVVPGIERQPRKKLEPHPERLLALLHRWRDEAVKAGRTITRIALAFEAGRDGFWLARWLETRGVEAHVIHASSLAVSREHRRAKTDRLDTELLKRGFLGWLRGERGHCSMARVPTIAEEDAKRPNRERDCLVGERTRIVNRIKSTLARLGIRNFKPTLRKAAERLATVYTPEGMPLPPNTLAELQRDMARLGVVISQIRQIEEARQKRLEQQHETGPHAMVRLLARIVGVGVETADMLVHEVLSRPMRDRRAVARYAGLTGSPDESGAQRREQGLARAGNARVRRGMIQLAWRFLMFQKESALALWYRARTADSRRGTRKTMIVALARKLIIALWRFVTTGEPLEGVVLRPVT

SEQ ID NO: 468803 - protein, 345 aa, unidentified
MSELYSGRQFVGMDLHRRRSVLVRMTETGEHLETTRIVNDRDQLADVMSRAGESPEVVLEATYGWYWAADALAELGASVHLAHPLGVKGFSYRRVKNDERDASDLADLLRMGRLPHAWIAPPETRELRELVRHWAKLVAMRSQCKAHVHAVLAKGGIWVPMTDLFGVEGNLLLDKVTMPAPYKARIASLRRFIEGFDAEIDLFTGLVQRRLTHDAGYTAIQQIPGIGPVLAAVFVAEIGDVHRFAGPAQLTCWAGLTPSHHESDNTVHRGRITKQGSRLVRWAAIESVKILPDTSRIGAIREQVAHRRGNRNIGAVAAARKQLELVFYALRDHHVRALHRSPRAA

SEQ ID NO: 468804 - protein, 342 aa, unidentified
MKNTKYFIGLDVHKEKTSYCVRDRLGNILVENETATLYTELSQRLKPYLVSSKIGLEASTSYYTLYQNFLKNGHDIDVANTIQLRQLIAKNDKLDARRLSEMLRLGAFPCSYIPDERIQHLRNLVHVRHAFMEEKVRCNNRIQAFLDRNGVVMPMCTAFSKKWREALVQYMGSGDVSVELRYAYDHYVYLEKKQEQADQEMIGYVKKQWNQDYWLIRSVTGFGPVLPCYVIANVLPIERFLSNRKLRRYAGVVPVFKDSAGHTSKGRIPKESSRKQLRWALIQAANAIAKTKTRLGMYYRKKVKQKKNKALAKIAVASSLIDILYQVLTTKKPYNPSTLLNE

SEQ ID NO: 468805 - protein, 361 aa, unidentified
MERYIGLDVHAASCTLAIVSGTGRKLRDFPVETSGQALIEAISAIPGHRHLIMEEGTQSAWLYETLERHVDEIVVANVRESRGQKSDTRDAYALAEKLRTGTVQQSVFKAPAQFRRLREIARVHEMLVRDVVRVQARLKSIYRSRGVATPGATVYSVTHRQEWLAKLPQASAYAATKLYEHYDALSAIKDQTTAELIAEAKLCPIARILQTAPGLGPIRVARMVPIVVTPHRFRTKQQFWSYCGLGIVMRSSSDWVRTADGGWARAQVQKTRGLSRRHNHTLKAVFKGAATTVITQGKACPVYDDYRRLLDAGTKPNLAKLTVARKIAAAVLRMWKDEEVYRPNREIKEKSESNSPVQALV

SEQ ID NO: 468806 - protein, 350 aa, unidentified
MFIIGCDYHPSFQQIACVDTETGELDERRLVHPQEAEQFYGELKERNLAVRVGMEASGHARWFERLLAQLTFELWIGDAAEIRTKRVRKQKTDRQDAQLLLRLLLEDRFPRIWVPDAANRDLRQLLWHRHRLVQMRTRVMNQLHVVALNEGVRRKKALWRPAGRQELESFVLAPWASRRRQDLLDLLDQLTPKIQQLTQALEQEVEKRAVTRRLMTHPGVGPLTALAYELVIGTPERFHCGKQIASYVGLVPEENSSGDRRRLGHISKQGNVLLRFLLVEAAQVTVRSHPQWRSKFFHLAMRRGRKIAKVAMARKLAVHLYWMWRRGWDYGQLQKFGSHAGEPGNRHGVQ

SEQ ID NO: 468807 - protein, 345 aa, unidentified
MTYYTGIDVSLRSVSICVVDDKGEVCLEAKVAAEINAIVHRLRRFSSDVKSVGFEAGTLTQYLTYGLQAAGFEVICLEARQVSVTLAAMRNKTDRNDARGLAQILRTGWYSRVHVKSLHSHQVRALLASRKAILKKCVDLENELRGLLKVFGIRLPSRVGHGSFDAELRETVCSDDMLACALVPLLDARTVLYKTYLKLDNAVKGLVRVDPICRRLMSIPGVGPVTALTFKAAVDDPNRFKSSRTVAAHFGLTPRRFQSGEVDNPGHISRAGDADVRSALYVAAHSLLTRNAQWSSLKAWGVRLAKIRGHRRAVIAVARKLAVILHRMWIDGSEFRWGSPTATVV

SEQ ID NO: 468808 - protein, 402 aa, unidentified
MNAVGIDVSKGKSMVAIMRPFGEIVSAPFEIKHTASDIHSLVELINSVEGESRIVMEHTGRYYEVLAHQLSEANLFVSAINPKLIKDFDNDSLRKVKSDKADSVKIARYALDKWQNLKQYNVMDELRNQLKTMNRQFGFYMKHKTAMKNNLIGILDQTYPGVNTYFDSPARSDGSQKWVDFASTYWHVDCVRKMSLNAFIDHYQNWCKRKKYNFSQSKAEEIYGKAKELVPVLPKDDITKLIIKQAVNQLNSASTTVESLRTLMNETASKLPEYPIVMAMKGVGASLGPQLMAEIGDVSRFTHKGAITAFAGVDPGVNESGSYEQKSVPTSKRGSSDLRKTLFQVMDVLIKTHPQDDPVYQFIDKKRAQGKPYYVYMTAGANKFLRIYYGRVKEYLSSLPES

SEQ ID NO: 468809 - protein, 409 aa, unidentified
MEVVHERCCGLDVHKRTVVACLLTLGEGGQPAREVRTFGTMGADLLQMREWLLAAGCRQAAMESTGVYWKPVYNALEGAVELLVVNTQQVKMVPGRKTDVSDAEWLADLLRHGLLRGSFVPPAPQRELRELTRYRAALVRERAREVNRLQKTLEGTNLKLASVATDILGVTGRAILEAVARGESEAAVLAGLARGRLREKRAELERALAGEVKPHHRLLIAEHLEHIGYLNEAIGRVSREIEERLGPFEETLGRLQTVPGVGPRTAEVLMAEVGRDMSRFPSHRHLASWAGLCPGNNESAGKRKSGRTRKGSPWLRSALVEAAWAASHTKRTYLSAQYHRLAARRGGKRAVVAVAHTLLVIVYHLLKGGETYSELGGNYFDERDSWQVERRLVRRLEGLGYTVCLQPAA

SEQ ID NO: 468810 - protein, 427 aa, unidentified
MARAVGLDVHLEFCEVAIAEDGAVRSAGRVQTKPQDLELFAQSLGPDDRVALEVTGNAWEIARILEPLVARVVVVSPSDTGIRQARAKSDRLDARTLARLLWSGELDAVWMPDRVTWVMRRRLSRRGQLVWTRSRAKNEIHAVLLRCLVGRPPFADLFGVKGRRWLAELELPVEERETVDAGMRQVEFLDTEIAAVERLIARDALASEEIKRLMTVPGVNVIVAASFVAAIGDIGRFHNPRKLVGYLGLDPRVRQSGSGPASHGHISKQGSVRARHALVESCWSAVRQPGPLHAFYQRVRARRGHSVAIVACARKLACLFWVLLTREEDYAYAQPSLTRKKLRLLELAAGAQRYSPAGDGVWHANEAVRAAERELAHQAEIAYQRTVRDYHATQATTKGAGATPGRASSSRQSGKQRGRATVPDPAL

SEQ ID NO: 468811 - protein, 295 aa, unidentified
MFVGIDVSKDRLDVHVRPSGDAFAVMHDGEGITALVERLGELRPELIVLEATGGLQTRVAATLAAARLPTAVVNPRQVRDFARATGRLAKTDALDAEAIARFAEAVKPEPRPLSDEDGQALQALVARRRQLVEMRVAEKNRRQQVKAQLRKRLDDHIEWLAQAIAELDMDIDDHIKGSPVWRAKEDLLVSVPGIGNTTARALIADLPELGTLSRRRIAALVGLAPFNRDSGRMRGKRSISGGRASVRNALFMATIASVRFNPAIRTTFQRLVAAGKPKMTAIVACMRKLPSSSTP

SEQ ID NO: 468812 - protein, 426 aa, unidentified
MRSVGLDVHQSFCEVAIFEGGEARSAGRIRSDRAELELFAQSLGTDDQVAMEATGPAMEIARILEPHVARVVVANAQDVRAISHARVKSDRFDARTLARLLHAGMLDAVWVPDPATQALRRRVARRAALVRQRTRAKNEVHAVLSRCLLGRSPASDLFGAGGRAWLAAQELPEPEAETVAGCLHQIDFLDGEIEKIGRRLCQWATSSPEARRLMTIPGIGVAAAAALMAAIGDISRFDSPRKLVAYLGLDPKVRQSGEEPARHGRISKRGNTQARSVLVEAAWSAVRSPGPLRAFGERVRVRKGSQVAAVAVARKIACLCWQLLSKEEDYAFARPSLLRAKLRRAELDAGAPPLPKRHGGKAVRATAKEREAERELVQRAEAAYRRLVADWKATGAKGAGATTGRASSRPSTGQAARQDSAPEPAL

SEQ ID NO: 468813 - protein, 387 aa, unidentified
MASLASITADENSDTAKIPATCVYVGLDVHKDTIVLAARKGDERSEWLLEATFVVEDGLNKLIKCLKKLTKHGVVKCCYEASGAGFVIQRLLTDSGFECEVIASSLIPSKPGDKRKTDRLDARRLADYYRSGLLTPIAVPSKELEAARGVVRCRQAIRSKVTQSKNQLTKFLQTKGWAYRDGTAWTTKHRTWLAQLKFNDSLDKFTFDEYLSMLQYLEQRLKDLDAKLEELANTLFRKPVDILRGFRGVQTLTAMVLVTELGDLRRFPTPRHVMSYVGLTPSVSQSGESRNRSSRITKAGSARCRHVVVQAAWNYIRKPQLASSLKSRQKDSPAWLIEQSWKAQNRLFERFKHLESTIGKNKAIVAVARELVGFLAAALQRTDLSPN

SEQ ID NO: 468814 - protein, 359 aa, unidentified
MKLYVGLDVGLEETSLCIVDSEGVTVREVKVSTEPEAIRSELEGSADRLDRVGVVASSPGICLYRELQPAGVPIIVAEARHIRVSLSTMRNKTDRNDARGIAQMMRLGWYGAVHVKNIDMQKMRTLLSNRNLLKRKLIDIENHIRGALRAYGLLVGAVVRGAYEARIRELLERSDPIFAMTIEAMLDVRRAIFEGYERLHRVLLQVVQYDPVCRRPMTVPGVGPVAALSFKVGVDDPRRFARSRTVGAHFGLTPRRHQSGTSIDYEGRISKQGDVAVSGGAMRGGCKPSAAGQEMVGIAGVGPADRQTVEHPVRDRRGRAQACKYSASNVGQRNRLPRRLRCQGHATTQIEACAVIAAR

SEQ ID NO: 468815 - protein, 362 aa, unidentified
MHNHRTLVGLDVHAKATIAAGLELDTGELRFRRINGPPRSAVNYLEELPGPVMATYEAGPVGYGLAREAAARRIEVRVCAPGSIPRKPGERIKTDRRDAERLGRSLLAGELSFVRVPTVEEEQFRDLARCREAARADLMRARHRLSKFLLRREIEFPGPGASWSVAHWQWLRSIDLADHPSRSVLNDYLAAVLALEQRRDGLDAQIEIAAPRSPWALTIANLRCLRGINTVTAYGLCCEVGAFHRFEHPATLTAYLGIVPSEHSPGEQVKRGPITNAGSPHARRLLVEAAHHYRHKPAIYKDLARRQRGQDPRACAIGWRCQQRLHRQWQRLRLERGKPGNVVVIALARELANFVWEVGQLN

SEQ ID NO: 468816 - protein, 336 aa, unidentified
MKDTTKFVGLDVSKDTIAVAVAEGGRGEVRFVGTYPHTVEAVHKVVKQLGGPSVRLEFCYEAGPTGYGLYRLLPAMGLSCIVVAPSLIPTRPGDRVKTDKRGAVRLAQLLRAGELTPVWVPGEVDEALRDLVRAREDAVQDRLRARHRLSKFLLRWNRRPPEGTRAWSKAHRNWLDQLSWSDVRLQTVFQEYLHALDEIEGRIQRLEAAIHEQATQSDRVPVIQALQTLRGVAEVMAVSLVAEVGEFSRFRNTRKLMAYAGLVSKEFSSGTRRWQGGITKTGMPTCDGYSLRRRGAIDTNRQSKDRSGSGRKDSRPKSPTSPGVPRTGSIASIGGW

SEQ ID NO: 468817 - protein, 360 aa, unidentified
MDKYIGFDIDSKKTIACVVQKGKKEMYSTIGADVKSMRKYLQQQKADGSRAHLTFEISGQAGYIHDSLIDCVDTITVSNPSKMTWIYRTAKKNDRIDSRKQAVLLSIGEIPAVHMPSVEVRQWRNTILHRRNLVNKVTAVKNKIRAVLKSQGFTRAMHRGSLWNRSNRGWLKTLCEAKVGSMGLWCMNLYDLIEQLELLDGQVKRVTMYLDSYLSRQAGGGLLMSIPGVGPRTAEAVLAYTDDVRRFGNSKEYCSYFGLTPRLDESGTRRRLGHISKLGPSVVRWVLCESSWKVVRKSKGLRAFYEQVMSNGQAGRKKIAIVAVCRKLLSIMRAMMLTGEMFNEELVRRECGNERLRKVS

SEQ ID NO: 468818 - protein, 338 aa, unidentified
MKLYAGIDLHSSNNFIGVIDENDKRRYSKRHYNNIDTVLKVLKPFKKSLQGVVVESTYNWYWLVDGLQEQGYRVHLANPAAIKQYEGLKHTDDRWDSFFLAHLLRLNILPEGYIYPKEKRAVRDLFRRRLRFVRHRTSTILSLQSMFARHKGSTPPGNLIKTFSQWEMEGRLDCSNLTFAAQADVAEIENLNAIIKSIEKKIRPQVQLADEFELLLTIPGIGEILGMMIMLEVGDINRFKKVGNYSSYSRCVKSQRISNKKKKGEGNRKNGNKYLAWAYVEAAHFSIRYCAGARKFYQRKKAKTNGAVATKALANKLARASYYIMRNRVPFDEEKLFR

SEQ ID NO: 468819 - protein, 339 aa, unidentified
MNITIIGLDIAKSVFHVHGVDGEGSVQVSRALKRAKVEPFFAALAPCIVGIEACGTSYHWARVLRSHGHDVRLIAPAHVKAYVRRNKTDAADAAAICEATSRPTTRFVPIREEEEQAVIALHRMREMLVKQRTMLINGLRSQLAEFGVVAPRGHEGAGALCALVGDDEEQRIPPIMRPALKILAEQIAALEGQVATIEKQLKTWHGQDATSRRIASIPGLGLITATAIAAKVRNPQRFASARGFAAWLGLTPSQHSTGGKIRLGPITKAGDRYIRRLLVSCAQSLLTANKRRRVPDPWLAKLLAGKARMVAAVALANKLARIVWAVMTRQTTYRTAEPA

SEQ ID NO: 468820 - protein, 315 aa, unidentified
MEQPATTPSFVGIDVSKDRLDVHVRPSGQAFAIARDTKGLEPLVSDLRALAPALIVLEATGGFELTVAAALAAAGLPLAVVNPRQIRDFARATGRLAKTDALDAQIIALFAERIRPDPRPLADVDSQTLAELVARRRQVIEMIGMESNRLHQARDPRVQRTIKATLKTLEAQLAQLDREISDTVKGSPAWRAADDLLTSVPGVGDITSFTLIADLPELGQLDRRRIAALVGVAPINRASGQMRGRRTIAGGRTDVRNALYMAALSAIRWNPVISEHYQSLVERGRPKKVALVACMRRLLGILNAIIRTKTPWQSA

SEQ ID NO: 468821 - protein, 284 aa, unidentified
MPMLAEQVDGVIGVDTHRDTLTAAAVTRLGGVLAQITTSADAGGYQRLLDFAHLQLPGRRCWAVEGTGSFGAGLAGFLQQHGEQVLEVGRPKRPASRSGAKSDALDAVRAAREALGQDHLATPRRRGEREALRVLLTTRRCATLARVAAIGQLKALLVGAPEELRAELRGRSTAGQIDYCAGLRERPTRSLEHQATVRALRATAARIQALAAEADQLQAELTVLVGAIAPWLLEVPGVGPLSAAQVLVSWSHAGRFRSEAAVAALAGTNPIPASSGQVTRHRLM

SEQ ID NO: 468822 - protein, 375 aa, unidentified
MQDRHRLVPSWLVLLPSGKGDVMDRITRVGVDLAKNVMQIHAVDSAERVVVRKAIPRERFVSWFANLEPCLIAMEACGAAHYWARKLHALGHEVRLIPPQFVAPYRKGGAHVKNDALDAEAVCEAASRPHMRFVPVKSPAQQSVLVLHRMRTGFVEERTALVNRLRGLLAEFGVFLPQGIRRLHEHLIERIEDGSNELTGPARLALLRGCEQWQVLDEQIAWFDRQIAEHANRDPQAQRCMDVCGVGRLTASAAVATVVDARQFRNGRQMAAWLGIVPKQKSSGGKQRLGSITRQGNDYLRTLLFQGARSAVLTAHRRDDRLSRWIVQLQARVGYYKTLVAVANKHARILWAVLAKGERFDPSYAPARTGGATGA

SEQ ID NO: 468823 - protein, 359 aa, unidentified
MSTQSKPFSFKGQKIFVGLDVHLRSWSVTVLSEQAVLKKFTQDPSPAALNKFLTNTYPDAEYYSVYEAGFCGFWIHWELHNLGINNIVVNPADVPTMAGERLRKTDAVDSGKLARSLRSGELKGIYVPDSITTEIRSLIRLRDSLTKDQTRHKNRIKAHLRYLGIDIPEEFCRPGRTWTSRFVLWLKSLELETAYGKKTLDLLIAQYEDLRGQQLEMMKELRVLSRSERFDEPLRFLMSVPGIGQLAGLTILSEVDDISRFKDAAHFASFVGLVPMCYSSGEHEGTGNITVRRHAKLRWLIVEAAWIASRKDPVLSAAYVEYCRSMKPSKAIIKIARRLVNRIYFVMKHQQPYVNCYVS

SEQ ID NO: 468824 - protein, 341 aa, unidentified
MKKSIRIGVDLAKNYFQVHALVSDVGPAVTRKLRRSKVHEFFSQIEPSLIGMEACGSAHYWARELKAMGHEVLLMPPAYTKPYVKRGKNDAVDADACCEAMSRPGMRFVPVKSAEQQATLMLHKTRELLVKQRTMSVNALRGHLSEFGIIAAKGIGRVDELLDLVESDTTLPNAARASAKVLAQALEGLDKAIDDLENEITNAQAQNEMTRLLYKVPGIGKIIASVIAASVPDPSVFKSGRDFAAWLGLTPRQNSSGGKQALGAITKQGNRYIRKLLVLGATSLLNVVGKRKGALRDWIVGLLAKKPARLVTVALANKLARILCAMMKTGESFRTEMFAKA

SEQ ID NO: 468825 - protein, 343 aa, unidentified
MQTVTTIGLDIAKSVFQVHGIDAAGNVIVRRKLKRRYVLPFFQKLPPCVVGIEACASSHHWSRELQALGHTVRLMPPAYVKPYIKRQKNDAADAEAICEAVTRPNMRFVATKTPEQQSCLMLHRTRHLFIRQQTSVINAIRAHLAEFGVVAPVGRNGVEQLLDVVADVSDKRLPEIARACLLALGAQLRTLKAQILNFDRQIMACHRSNTTSKRLDEIPGVGPALATALVASVADPTAFRSGRDFSAWIGLVPKQHSSGGRDKLGNISKRGDRYLRSLFTAGALAVIRYAKIHGTQHRPWLSALLARRPTKVAAIALANKIARMAWAMMARGERYKEPVALAA

SEQ ID NO: 468826 - protein, 478 aa, unidentified
MEERRIIGLDLGIASAHTARVLDGQGQLLAKRKAVPTVESLTTLEQAALEGAPPGTVLEVVMEPTGPAWLPIAVFFTARGHKVFRVPSAKASDLRKYLSRHAKSNGIDADALARLAIIDPDSLRLLELNDVDRAALDRRVRACDRLTQQASVHKVRIKDLVRQLLPMTPLTGELGQADLAVLERWADPHELVKAGKSRITKVIATVSHGHLGAPRAAEWLAAAHDSLELYGDHPGVAFAELAAEVATEVRLLRAIQSELVTHEEARESAYRRVDPDGLARSLPGIKTIGGPALVATMGQASRFPSAAHFRSFTGLAPKASETGNTDRKGEPMSKAGSSLLRTTLVRAADTARKQDPQLARIYYVQMAERGKNHIAANCVVAAHLAERAWLVMRRGTPYVLRDIDGTVVTPEEAKAFIAERYTVTEVIRQRRRSNKGGKAPQQVLKGHQKSHTQGVDRTRRPSPVPNSAGSEAAVKRSA

SEQ ID NO: 468827 - protein, 377 aa, unidentified
MKRVKFVGLDVHAETIAVAVAERDGEIRSLGVIPNREDSVRKLVRKLGPVEELRFCYEAGPTGYALYWQLTKLGAQCEVVAPTLVPVKAGDRVKTDRRDALKLARNYRAGDLTAVWVPDADHEALRDLVRAREAAKKDQLRARHRLNKFLLRHGRRPPMGVKPWTVKYLEWVKRDVHFQARAQEVTLLDYLHEVEHAATRIARLDGAIEEAVKLAPPKMRAVIAALQALRGIAQVSAVTIVAELGEITRFSKARQLMAYGGIVASEDSSGERTRRGSITKTGNAHLRRVVVEAAWAYRHRPSVGATLGKRQEAVSEEVKEIAWKAQHRLHARYGKLLAKGKNKGVVVTAVGRELLGFLWAIGVQVEAEKKEPLQQVA

SEQ ID NO: 468828 - protein, 415 aa, unidentified
MLKIVYPICCGLDVHRDFVYACIATTVNGVTTYKSHRFSTFTKGLRELLSWLLASNCKDVCMESTGKYWIPVYNILETDCKIVLAHPKYVKAIRGKKNDKKDAKWIADIFKHDLVSGSFIPPADIRQLRDLVRYHAKLTNFTTGEKNRAQNCLTVSNLKLDSVFSDVFGKASSKIISHILASPSEKLSDVSAFRTKGMKATDEEILEAVDGEIYPEQAEKLRIIRDHMSSLDLCKANLQSLILSTAEKYIPEIDLVCTVPGIATFSAISVIGEIGVDMSVFPTSKHLCSWAGLTPQNDQSAGKKKTTRISRAGAYIKPLLVQCALAAVKSKNKHPEVYNRYSALKKRRGHKKATIAIARMLLTAIYNILKKHEPYNAEIYRKSDAPPEHRNVSVEEAIFILQRQGYLISSPVSIE

SEQ ID NO: 468829 - protein, 371 aa, unidentified
MKEKENTIFVGLDVHKNSIVIALADAGRDSDVRSYGTIDGDLEAVHKVVRKLQSKGSTLRFVYEAGPCGYNLYRSLTNKGFDCIVAAPSKIPRKSGDRIKNDRRDALSLARLHRSGDLTPVYVPTEEDEAMRDLTRGREDAVKALRVARQQLLAFLLRYGHRYSGKSYWSKAHWNWIAGIKMPHRAQQIMLQEYVHAVHENFERVQRLNDQIRELIPHWHLAPMVKALQALRGVSLVVASTTLAELGDLTRFSKPNQLMAYLGLVPSEQSSGDSKHRGSITKTGNGHVRRALTEAAQAYSYPPRESCVLLRRLEGLPQQIRQTAWEAQVRLCGRFRRLMARGKTRNKVATATARELSAFMWAIAQQMQPEK

SEQ ID NO: 468830 - protein, 355 aa, unidentified
MSQEKYIGMDVHQATISVAVRDSGGKLIMECILETKAATILEFIQGMRGTLAVTFEEGTCAAWLHDLLKPHVSRLVVCDPRKNALLKDGSKSDRIDARKLAELLRGNQLSPVYHGDHGVRTLKELGRSYLTITKDLTRVMSRIKALYRSWAIPCSGTTVYAARHRSEWLAKISEPGVRLRAERFYQQLDLLQPLHQEARRDFVRESHKHPAVKLLRQIPSIGPIRAALLVALLQTPQRFRTKRQLWAYSGFAVETHDSGEYRYVRGKLRRNRERISVRGLRDNYNRDLKNLFKSTAISASTRPGPFRDFYLALLAKGMRPTMARLTLARKIAAITLTIWKKGVDFDAKQLDQQAA

SEQ ID NO: 468831 - protein, 343 aa, unidentified
MELYVGMDVSLKETSICVVDGKGEIVSEGTVISEPAAIAVFVKAKADGARRIGLETGPTTTWLWHELRALGLPVICIDARHAKAALSLQINKSDRNDAVGLARMMQAGWYKEVQVKSLPCHEIRAVLNSRAQLVKIKRDLENQIRGLLKNLGLVIGKAGGNVFRRRVEDLVGEHRLLQEAVRPLLGVREIVRREIAGLTRGLLAMARDNEESRRLMTVPGIGPINALAFCAAIDEPSRFRRSRSVGAYFGLTPRRHASGEVDWTGRISKCGDAMVRTYLFEAAGVLLTRVPQWCKLKAWGHRLWKRIGFKKAKVAVARKLAVILHRMWRDGTDFIWSAKEAAA

SEQ ID NO: 468832 - protein, 367 aa, unidentified
MKKISTATAHAIRKVESQRLTIGLDLGDQSSWYCVLDETGEVLVEQKLSTSPKTMREVFGEMPRSRIALETGMHSPWVSRLLSELGHEVIVAHARNVRLIGESRRKDDRLDARTLARLARIDPQLLAPVKHRSAKAQADLTVIRARAGLVRARTSLINTARGLTKSYGERLRGCNSRNMKPEKASGLSPELQAVLEPLLAGIESLSEQIREYNEQIEHLAQESYPQVALLKQVKGVGTLIALTYLLTLEDAHRFRKSRDVGCYLGLQPGRRNSGQSEPQLHISKEGDPYLRTLLVQGAHHILGPFGADSDLRRWGLKLAGRGGKNGKKRAIVATARKLAVLLHRLWVSGEVYEPLRNSSQAMLPAAA

SEQ ID NO: 468833 - protein, 400 aa, unidentified
MLSIGIDVSKGKSTVCGMKPGGEIVYTPFEVQHTREGMSELVSLLRSSGEEVRAVLESTGSYHCPVVTALLENGIFVSVVNSLRMKRFCSQSIRKVKTDRIDAMQIALYGLAYWQELQPTRLPEDTYRELQLLARQYYQMTSLLIKAKVDFNALCDQVLPGMQELMSDHAGRHKLSDFVLRYRHTTHILEMGETRFRKDYCKWAEKKGYRNCERMAALIFATAQNGIPVLPNAPSTQIVITEAIRVLHTVEASRDAILTQMQALAKTLPEYSLVREMPCIGDTLAPRLIAEIGDVRRFHSKRALIAYAGIDAPPYQSGKFCANNRHISKRGNRYLRKTGYEVMQSYVMHKPANDPIFTFIEKKRSEGKSGKLAMVAGLNKFLRVYYGKVTELYRSLPAIE

SEQ ID NO: 468834 - protein, 347 aa, unidentified
MEAYAGQQFVGMDLHRRRTVLVRMTAEGEVLERVRIVNDAGRLAAVIARAGDSPEVVVEATYGWYWAVDALREQGARVHLAHPLGVKAFEYRRVKNDERDAADLADLLRMGRLPEAWIAPPKTRELRELVRHRAKLVGLRSHCKAEVHAVLAKCGVSVSMSDLFGVEGTALLDRLELPAPYAARIGSLRRIMDLLEFEIDHVAGMVRGRLALHPGYVAVQTIPGIGPTLAAVLVAEIGDIDRFARPEQLTCWAGLTPKHHESDAHVHRGRITKQGSRLVRWAVVESVQTLPDTSVVGQFRDRVAARRGRNIGVVAAGRRQLEYVFYALRDHHVRAFDKQLDEHASAA

SEQ ID NO: 468835 - protein, 343 aa, unidentified
MQNSNVIGIDLAKNVIQVCKIDKQGELTSNKAMNPSKLKALLAKSIPSIVAIEGCGACHYWARLARKHGHDVRIISPRRVKAFLQGHKTDANDALAVAIAATQFGMVFSQIKEEEQQSLQTLETSRKFLDKELTALNNHIRAYLYEYGITINRGQKSLRETMVIVLDDLDTRLPQCLKCTLNVLWERYQFTVVQLKETEKGRAALVKQLEPCKRLMALEGIGEVCAAMLYASMGDGREFKNGRQASVYIGLTPKQHSSGGKVYMMGIDKRGGNKALRAALYQGALSVISRLPSEPRTVKEAWLLKLIERAGVKRACIALANKTVRTAWALLTTGKSYVPVLLS

SEQ ID NO: 468836 - protein, 395 aa, unidentified
MFIVGIDVAKRSHEVCMITSDGQTVQRPFSIRNNCTGYNLMLEKIRKHTNIKSQIVFAMESTAHYWLALFTRLRKDGYHVILLNPIQTSAMRDMFIRKIKTDAKDSFIIAELIRFGRYAESNVAQDRLLALKELCRNRFYLVDMAGDLKRKLIALIDRVFPEYEAQFDTIFCKSSVALLKKYPTPQKLSNAHLDKLTELLWNSSNGHFGEWKARELKELARNSFGVEDCDGAYSTLILLMLDQIQSLSGKADALEKEISRLFQSFDTTVTTIPGVGAIIGAVILSEVGDISRFSSADKLAAYIGVDPSVNQSGEFQAAHAHMSKRGSPYLRRCIWMASQVAVQRDPMFRAYYEKKAAEGLKYMTIIGHVTRKMTAVIFAILRDHKVYEPVLPTAA

SEQ ID NO: 468837 - protein, 383 aa, unidentified
MDQSEPVGSCDASVTVLVAIELSKSAWVLAVYDPITDKISRRRVDSGDAAGLIATCEKARDATARRSSETVDIECVFEAGYDGFWLQRRLEQAGIACRVMDPASLKVDRRARRVKTDRIDAESLLRALQAWRRGDRRACNFVRIPTIEEEDARRPHRELNRLRKERVGHINRIKALLALHGVSDYQPLRQDRRARFAELRAADGESIPPRCRAEIDRELARLELVLEHSAQVEAALAPSDMTNAEEAIAMALEKLTCVGRETAVVLSREVFCRDFRDRRSLAAFAGLTPSPYSSGRLQHDQGISKAGNSIVRARLVQLAWRWVRFQNASDITAWFIQRTGSESRRSRRVAIVAVARKLLVAFWRYATQGLVPSGARLKPAAAG

SEQ ID NO: 468838 - protein, 338 aa, unidentified
MTIVMGLDQHRAQITAEWIDTATGEVSRQRVAPAHRAGVRRFAERFGDIELEVALEATTGWRFVVEEFTAVGARVHLAEPAETAARRGTKKRAKSDRADARHLRELLMVGRLPESWIPPEHLLDLRARVRLRHTLVDARREWQQRIQAVLYHHGVPPRSWLLGAEARAWVTGLELPPAAREQIAIALALIDAHDAQLVPLDQELREYAKRQPACRALMRHYGIGPLTSITILAELGDARRFSSSREAVRYAGLDITVHQSDARRAPGRLSRQGPAALRWALFEAAQCARRPGSPDHHYYLQTAERLGGNRACLAVARKLLKRSYHTLRELGEEALQPA

SEQ ID NO: 468839 - protein, 407 aa, unidentified
MKKNHLLGLDIAQLSAVAQLEAADGSPCWSGTLRTDQTGWQQLEGLLRERHLDFGAVTVLIEATGVYHLPWAQKLSAAGAEVYVLNPLLAAKLESVANALRGHKTDRVDVAKLCEVGRLHQEALARFRYRPDPARQGLRELDHARAKLRQALTNLKKSLRSHLELVFPALLVAKINPGTQQAARILQAAPTAGAWGELPLRQRRELAGAKAAALDEACGRTLADEALATACVPALRVLLQAQQAMAAQLAACQAAIQPRLPAGRVALIRSLPGFGERTAAVMATYLPADFAGWGPRKKITSRVQAFFGCDPRLRQSGQWTGKVKMSKRGIGAARTALFQAAFCSLETDPENAAYYQTLRRGGPNHPPKGHKAAMVDLMRKQLRRLVAVLCSGQPFIARWQPQRITAA

SEQ ID NO: 468840 - protein, 373 aa, unidentified
MPRYSTAFGMDVHLRSTTVCALDAETGEAVTRRFRGNPWGEVAEWMSGFPGPSLAAYESGYLGFAPQRELSGLGVDCVVAAVSRVPRSAADLSSKNDRNDAARMAKAILSHDVTPVWVPSPEIEGLRDLAAAHDAATARLAAAKQRLLAFLARRGYAYGGTTPAGNPRRYWTYGFLRWLDKVRPADDGGIRALAALRNEVEAAAETRDDLLAEYRAAVAAGPLSAEVEALQSIKGCGFALAAAFASEVGDFSRFRSGRQVTAYFGLAPKQGSSADSVRLGGISGAGNALVRRLAVEGSWSYVQASHQPKLMPKGSGVPLEVRMHGRKGSERLLRRREEMLARGMPQAKANAATAAELVRWLWALGAMCREATE

SEQ ID NO: 468841 - protein, 717 aa, unidentified
MSIDEFSLRYSDLVTGSYDCVDRIVLNAFFPLGYNPGGFRVWWRRWHDDSDAELDNTHLMRLAGRFARRVKAWGAANGVPVIFCTAGERKHRIAEAYLATHEVGIGVFLVLVAKAPAPVWKVVRSSKTDTIVNIERRREYVNHYSFHIIDPEWGHVTIKMSGHPPFGAQIILNGHEFVARQAGAAGIAFTKAGNCFTAVADPAGLARIADALSQDAAVGRLGQVCQRWIYTACLCFGLDRDEQHRSGFGYGFAVYQLEYSRNLIFADGTTMQRVFDTVVDRTRSRLDVPKVRTIFGSAQRPRRTRKRSSLIEAAIETPSYDLTVFKLHFGRLTGKAYTKDEMCWGTPSVQTLVAMASVMFQELEEVPMTMVGGLDVHRQQITFDYVDDDGLVHWGQIRPATRKTLRGWLAEHFRDGDADFALEGCTGWRYVSEELAAAGLGVHLGDPAETAALRGRKKRAKTDRADARLLRTLLVEGRFPESWIPPAHVVEVRTLSRLYCTLMDERRAWQQRIHAQVFHQGCPPIRALLTRAGREALAGAELSAAGRQYVDTALRRIDELSAEIDPLRTQLISFARRQPGCRALQRHYGVGWLCAVIIWAEIGDARRFSSSDQLVRFAGLDVTVYSSDAKRAPGHLSRQGSPELRWAAFEAAKSAARRGSPDHGYYHKLAAKHDGHNGKNPTLAVERKILRRCYHTLRELGDAALALPDIRPQEVAA

SEQ ID NO: 468842 - protein, 416 aa, unidentified
MKIIRFNCCGMDVHKNSVVATIGITNKDTQITRYIQETFSTLNTDLLRLKQWLIDHQCFDVCMESTGKYWIPIFNILEDTVKVHLTHPKYVKAIRGKKTDKKDSKWICDLFKHDLIRFSFIPTKEIRALREIARYRYKLVAMRSSERNRYQNCMTVSNIGIGSVFSDPFGKSAQAVMKEVLESKVIEDDRILKCIHGACKNRDKILDAIKHCHVGSDQRFKMNESMRHLEELQIHINNCEIEMIKRASRMFDSFMHITQIPGINTLSAILIISEIGVDMTQFESDKQLVSWAGLAPANNESANKKKSVRISKAGQYLKPLLVQCALGAIKDKESYFGIKYARIKKRRGHKKAIIAIARMILVSIYHMILTGESFNPSDYQSFKAPNSKKVIELTKESAIEFLRKSGFDVSKLTKLE

SEQ ID NO: 468843 - protein, 416 aa, unidentified
MTDEIRWFVGIDWATERHRACLLDAEGTRVAEHDVRHDGAGLQELCSWLLKMTGAGAQEIAVAIEAPRGPVVEALLERGFQLFAINPKQLDRFRDRFSMSGAKDDSRDAEVLGHSLRTDRHAFRRLTIDDPLVIELREWSRIHDELKQEQGRLTNRVRDQLWRYYPQAAELGDLNANWFLDLWEKAPSPAQAARASEKTIARILKTHRIRRFDATEVLRILRQPPLVVAPGTVEAATAHIRTAAARLRLVNQQIKEAEHRLDELCAAIEAAAETTPGQICEQRDMAILRSMPGLGRIITATLLAEACEPLRLRDYQVLRGLSGQAPVSRRSGKKWIVLRRYACNRRLQNALYHWARGAMQHDPISKQRYAELRQRGHGHARALRTIGDRLLYVLCTLLERQMLYDPDHRSPQPVAA

SEQ ID NO: 468844 - protein, 413 aa, unidentified
METGYKVAGIDVHKKMLAVVITDVAVRGEYQFERRKFGAGVADLHTLAEWLSQQQVQEVVMESTAQYWRPVWQILEPVCQLHLAQAQSNRAPKGRKRDFADAERLVRRHVAQELILSFVPDEQQRLWRTITRTKLQLTRDRVRLQNQLEGFLEDSRIKLSSYISDLLGVSGRRMLRALAEGETDAGQIAALATRLRATQQELGDALSAAATLSPMRRQILKLFMERLQLIDDQIEALENSIAEELREHQDSVTRLAEVPGLGADSAHQIIAEVGPRAAKFPTSGQLASWVGCSPGREESAEVSKSDRSPGGNRQMRRILNQAANAAVKAKGSVFQDQYRRLVPRLGHNKAIWAVAHKLCRVVWKILHDGVHYQERGYQPNEQTIRRRIDKLNRQLRNLGYQLQSISTTDDATA

SEQ ID NO: 468845 - protein, 520 aa, unidentified
MSTTRTRKRPSTRRPSVDVGKPRGVLHPRVQQVGPEHFGIVCFDPAKTRSKFFLADFYGHVLIPPTWVAHNRPELDAASARIRLAFADHELRDGLVAIERTGRYHRLVQRAFAAAGFETRILHPFVTKQYRQPVDPGNKTDDADLRAMHRATVTGCALVEATRDEAWTTLQLLIRHRRDLVRKGAALNCQIRDHLEAALPGYAACFDKLWESRIPWHLLRHYPTAAELLAAGVTTICHSLREASIRYQQRTIQAVVDWAERAAPGDVAAGQHRRIALALFDDRQRKTQEIQALERDLAGRLARTPYVLLLSFPGINVVSAADFAGEAGPMEHYANAKAITGRSGLRPSRYQSDTVDRANGPLVRHCNRALRTAILGIADNLIHCNHHFQHLAMHWASQGKDPRDIRVRVAMRFSRIAFQMVAGRQVFRHPCIQGRHYILDKLNVFHRLHETGMEQLLRDLKAAIDQLPTREYAAEAKPLQDEWQKIRDGRRRRPQVLGDILPIVFARLGVGAVQSTESGE

SEQ ID NO: 468846 - protein, 345 aa, unidentified
MFVAGIDAHATYSVIAIVSNTGQLVAGPIRIKNTQEDRLDDLLGQYQPLEVVVETSPAWPWLFDRLQDRGIQFVLAHAKRLRVIAESNYKSDDIDAELLARMRLAGLIPEVHPKCVEQREQAVLLRNRARLVRERTRMVNRIHAQIHNVGLHLERGRLLTQDGRQWVHDVAWPLLGEERRLFIDMQWELIDQIVPMIKTLDRRVEHMGRDIPAVALLETVPGIGSYRALLIATETLPITRFRTPGHLVSYAGLAPRSSQSGLRPIRHGSIPAGANRWLRGTFVRAVVSHVTHAPDSWLSQSYELIRQRLGWQVARIATARRLARAVHAMLRTGEVWHDEPMTRAN

SEQ ID NO: 468847 - protein, 406 aa, unidentified
MQDAIVRFGSVDWAANSHAACIVDASGHIVDQFSVDHTAAGLATLVRQFQRQHVARVAIERPDGPVVEALLVADLEVVVVSSRAVKGLRTRYGLAGNKADRSDAYILADCLRTDGHRWASLQPDAPETLALRASVRSRKDLVATRVATANQLRAHLQLVFPAAVSLFAAIDSPIMLRFLARFPSADKAAWLSERRVQAWLQANAYSGRRTPSELLERLRTAPKGVHGATAEAQAVVTLSLVRVLRVLVAEIAELETQIREQLAQHPDGPIFRSLPRSGTVRAAALLVEIGDCRARFPSPDMLAGLAGAVPSTRASGQHRVVTFRWTCDKKLRDALVDFAQDSVRASPWADQLYRRHRQAHKTHPHTVRILTRAWIGVIWRCWQDHQPYDPARHRALQRVLAPQGLT

SEQ ID NO: 468848 - protein, 377 aa, unidentified
MREKLRFLGLDVHAETIAVAIAEPDGEVRSLGTIANREESIRKLIRKLGPAEHIRACYEAGPTGFVLYWQLSQLGVACAVIAPTLVPKKPGDRVKTDRRDALKLARSHRSGDLTAVWVPDEDSEALRDLVRQREAAKQDQLRARHRLTKFLLRTGQRPPLGLKAWTERWMRWLAQVRYTQPAQEVTRLDCMNEVEHMAARVKRLEEAILEVVKLAPEPMQELIRGLQALRGVAHISAVTIASELGNISSRFQSARKLMGYCGVFPSEDSSGKRIRRGGITKCGNAHLRRIVVESAWCYRHLPRVGEKLRKRHQGVPAEITEIAWKAQNRLHKRYMKLTMAGKDQRKVMTAVARELLGFIWAIGIKAEAVASRQQFAA

SEQ ID NO: 468849 - protein, 402 aa, unidentified
MTYDYVIGMDVGKYFHHACVLDIDGTQVLSKRINQNEQSLRALFSALSAYDHKVLVVVDQPNNIGRLTVAVAQDIGIDVRYLPGLAMRQLSRIHAGNAKTDIRDAYIIAHAAKNLPESLRSVDRVEEAFLQLKVLNDIDEDLARSYTRLINQIRSALVGCYPQFEQALRGQIIHRKWVLHLLARYGGPTKIKRLGKAKAAAFARRYKARNPEPVLDAIFAAISEQTVTIAGAHYAEMGVAMSAKDALLKLEHRQQIEKEVIELINDIPHTQFLLSMPGIGPKTAAQILMTAGDMSDFPSAGHLASYAGLSPRTNQSGTSIMSNSLNRAGNKKLKNALWQSSFASIRFHERSRQFYERKRREGKRHNAAVVALARRRLNVLYAMMRNHEHYHDPAPSQEDLAA

SEQ ID NO: 468850 - protein, 350 aa, unidentified
MQQFIGCDAHKRYSVFVAVDDRGNATKPVRIEHVREDYAHFLSQLPEKSEIAVESTGHWYWLVDEMERAGHHVHLANPMEAKKRMGKTNKTDALDAKGLAILLRNGTLPESWIPPGLLRDQREILRTRMALRDLRSSLKHRIHAAVDRYGLHTDAITDLFGSKGREYLAFRLPEFPPETARMVKVQLCALDELAAHVERIEQRIHAEIAPTTEVQLLLSVPGVGQILAPVIGLEIGDVTRFPRAENLASYAGLVPRVFSSGGHTRLGGISRFVNQYLKWAYVEAANCAVRLKAHRHSHVGCLYQRLLAKRGHGRAIVAVARHLAEASYWILRKQQPYRAPRQNKISSRNG

SEQ ID NO: 468851 - protein, 369 aa, unidentified
MVPTMPKRIALSNPDRAGEPLLVFGGVDTHADTHTVAAISHLGAMLGHQSFPATAKGYRQLYGWLADHGTLMRVGMEGTSSYGAGLAAALTGHGVELVEVNRPARTTRRARGKSDPIDAEAAARAGLAGVATAVPKTHTGVVEEIRVIFVARRGAVQARTAAINTLHQMIITAPLQLRAQLQPLTRTQQITACAGLHTGDITSPTRATKLALRRLARRIGHLTAEITDATNDLTTLVQAHAPQLLTQVGVGSLSAAQLLITAGDNPDQMTSPASFAALCGTSPIPVSSGKTNRHRLNRGGDRQANCALHTIVLSRLRYHPETQAYAAKRQTEGKTERDIRRSLKRYLARRLFTLILTASQATDNTLIAT

SEQ ID NO: 468852 - protein, 312 aa, unidentified
MADMVRLAGIDVSKDKLDVHVAPSGESRTVSYDRRGLAGLRRWLVGLGVALVAVEASGGYEREVSEVLEDAGLIVHRLNPLRVRRFAQLKGRLAKTDRLDARTIAEFARAHPQERQLRRDPRRERLAEHLLVRRHTQEAILDCINQLEHLRDGRLRRLVAARKASMERTLARLDRCLVELIAEHADLAELSQRLRSVPAVGPVLATTLIALLPELGSLTRRQVASLVGVAPFDRSSGRQIGAKSIQAGRALVRNALYMAAMVASRHNPVIAAFAERLAGKPGKVRLVACMRKLIVTLNAVVRDGTQWQPRST

SEQ ID NO: 468853 - protein, 387 aa, unidentified
MTTDHLATALQTVVRVNDTKLFASLELSKSRWLVTVSAPGSEKLSKHVVIGGDGGALLNLLGRLRASAERRGGMAVQVVVIQEAGLDGFWLHRLLEANGIESHVVDPASIAVDRRHRRAKTDVIDGEMLLRTLMAWARGERRVCSMVRPPSPDEEDRRRLTRERGTLLKERTQHTNRIKGLLAGQGIADYDPLRKDRLARLDALRTGDGRPLPERLKAEIRREIERVELVASQMAVVERERDALVGMTSDPAPETAAAVLVRLKGIGPELGSLIWLEALYRGFSNRRQIAAYAGLAPSPWQSGGTDREQGISKSGNRRLRHALVELAWFWLRHQPASALSVWFRARVGQGRGRIRRIAIVALARKLLVALWRYATQGVVPAGATFKA

SEQ ID NO: 468854 - protein, 373 aa, unidentified
MNPRFRFASAIRSNRIRAVVLADQHAELTSRIEPLALSAKTHHPPMNHTHHLGIDIAKLKFDVCLLPGKNKESFANTPRGFKALVRWLQKHQVLPCHCHIALEATGSYGLALARFLHQQGFALSLVNPARIRFFAQSLLTRNKTDALDAEIIARFCQQQQPRLWNPPSDQLAQLQALSRLLQDLIGARQDQANRLEVAADPTVRSCLRQLHRQLQAHILKVKDQLRALIEAHPQFQRQAQLLVTIPGVGEATTATVLAELPVDRLNDARQAAAYAGLTPRLKQSGSSVRGRSALSKTGNSALRKALYFPALTALRCNPIIMALAKRLRAAGKSKMCIVGAAMRKLLHLIWGVLKTNQPFDPNWLLKSVASSPS

SEQ ID NO: 468855 - protein, 376 aa, unidentified
MRNVRFIGLDVHADTIAVAVAEPNGEVRSLGVIPNQPESIRKLVKKLAPAEQLRVCYEAGPTGYVVYWQLTALGVQCEVVAPTLVPVKSGDRVKTDRRDALKLARSYRAGDLTAVWVPDAAHEALRDLVRAREAAKKDQLRARHRLGKFLLRHGRRPSPAMNTWTQRHLEWVKTVHFAQGAQEATLVDYLHEVEHVAERITRLERAIDEAVKTVPESMRTVIEALQALRGIALVSAVTIVAEVGELSRFAKPSQLMGYSGAVASEDSSGGRIRRGAITKTGNAHLRRVVIEAAWAYRYRPAVGAALRKRQATVAPEVKEIAWKAQHRLHTRYRHLLAKGKCKQHVVTAVGRELLGFIWAIGVNVEAKRRQSEPVAA

SEQ ID NO: 468856 - protein, 343 aa, unidentified
MARFVGLDVSQKLTSICVVDDTGRRLWRGQCATDPEQIARVSSRHAGDDARIGIETGPMTPWLVHEFRARGLNVTCLDARHASAALKMQMNKTDQNDAEGLAQIMRTGWYRSVHVKSLDAHRARALLGARAQLVGMTTRLSNHIRGVLKTFGLLPGAMRGLPFDRRVEAMLTDRDDLASIARPMLVAWRQLREQIAAFDKEVRALAKKDPTCRLLMSVPGIGVVSVLAYVSTVEDPKRFARSRSVGAHMGLTPRQYQSGEIDRSGRISRCGDTLARTLMYEAAVVILTRVKRASNLKDWAQAIAKRSGLGKARVALARKLSVILHSIWRSGEAFRWSEKPAVG

SEQ ID NO: 468857 - protein, 359 aa, unidentified
MEAQRKALSFKGQNIYIGIDVHLKSWSVTLMSEATQLKRFSQSPDPDALYAHLVRNYPEAEYHSVYEAGFCGFWIHYRLVGLGIHNIVVNPADVPTTTSEKLRKTDAVDSAKLARSLCAGELKGIYVPGSESLETRSLIRLRDSITKDQTRLKNRIKSHLRYLGIEIPEEFSGPGRCWNRRFVVWLKGAETGTAYGRQTLDFPVRQYEALRGQRLEMLRAVRALSRTERFEKPLENLMTVPGIGQLTGMSLLSEIDDIRRFKSADQLAAFIGMIPMCHSSGEREGVGDITVRRSARLRSVLVEASWVAVRQDPALSMAYGNYCKRMAPGKAIIKIARKLVNRIYFVMKRNQPYVKCVVA

SEQ ID NO: 468858 - protein, 343 aa, unidentified
MQTITTIGLDIAKSVFQVHGTDATGQVVIRRQLKRRFVLSFFEKLPPCLVGIEACASSHYWSRELQALGHTVRLMPPAYVKPYVKRQKNDTTDAEAICEAVTRPNMRFVPTKTVEQQSCLMLHRARHLFIRQQTAVINSIRAYLAEFGIVAPVGRRGVEHLLEVVADPSDRRLPEVARACLVALGSQLRALKAQILEFDRRIMAWHRANATSKRLDAIPGVGPALATALVASIADPKAFRSGRDFSAWVGLVPKQNSSGGKDKLGSISKQGDRYLRSLFTAGALAVIRYAKIHGTQHRPWLTALLARRPTKVAAIALANKLARMAWAMMARNEGYHEPIALAA

SEQ ID NO: 468859 - protein, 354 aa, unidentified
MEADLMILVGCDLHARDQQVAVLDTATGEIQEQRLTHDGPSVEQFYAALPGPVTVGIESTGYALWFHALLHRLGHEVIVGDAAKIRAMVVRKTKTDRRDAAHLLDLLRHDRFPTVWLPDPAVRDQRTLVAHRMRLVRMRTMVKNGVHAIALNYRLALGPSLFTRAGVAQLQALSLPPHTSCRRSESLELLRWLDTHIKGLDDQIEEAAHAHPEAQRLMTHPGVGPLSALATVLVLGSVIRFPTSKHVVSYVGLAPAIESSAGKHRLGRITKQGNALLRYVLGQAGQAAIKRDPDLRRLYYAVLHRRGRSRAKIAVARKLLVRLYVMLRDQIDYQTFLYRAPAAARRKELMPTTP

SEQ ID NO: 468860 - protein, 334 aa, unidentified
MSNVTTVGIDLAKNVFSLHGVDARGVVVLRKTVSRARLASFVAQLPASVIGMEACSGAHEWARRFAQHGHTVKLMAPKFVVPYRKSGKNDGNDAAAICEAVSRPSMRFVPVKSVEQQTMLTLHRVRLGFVEERTATINRIRGLLAEFGVVLPQRAMEVRRGAAASLEQLPAAAARALADLLAHVRVLDERVNEYECELEQHARRDERAQRIQSLSGVGPISASAIVASVADAHEFKNGRQFAAWLGLTPKQYSTGGKTRLGHITAHGDPYLRTLLIMGARSMLQTALRRTDRLARWALGVRARRGYHRACIAVAAKHARIIWAMLAKNEVLQLS

SEQ ID NO: 468861 - protein, 420 aa, unidentified
MQETQSWFVGVDWASQKHDVWLADASGKCLGKRTFEHSGEGLAHMCAWLIATSGSKPEDMHVAIEVPHGAVVETLLDRGFKVFAINPKQLDRFRDRFSPSGAKDDSRDAETLSSSLRTDRRAFHQVALASPVIIELREWSRMADDLRADKIRHTNRLREQLQRYYPQMLQIDCDLAEEWFLKLWEAVPTPADALRLRASQVEKLLKGHRIRRIGVAEVIGVLKQAALTVAPGVTEAAVAHIRVLIASIRLFAKQLKESHRQLGKLCQLLAGPGSCEDGSTEPQQEQAQRAVAILQSLPGTGRIVLAVLLAEAFDVVQRADYAILRVLCGVAFVTRRSGKSCAVTRRLACNPRLRNAIHYLADAARRCDEKSKAKYLALRARGCSHARALRTVGDRLLYVACAMLKNGKPFDPCFEAQKCA

SEQ ID NO: 468862 - protein, 349 aa, unidentified
MVAEVVDYVVGVDTHRDEHTLALVEAATGAVLAQRTVASNGRGYAQALRFARQQAEGVRVWAVEGAGHYGAGLARYLSERGETVLEVGRSPRGERRLRGKDDQLDAVRAARAALGDERMPVPRSGERREALRLLLVARRGAVEVRREALVRLRSVIVTAPERLREELRGLPLQRLLGRCSRLRRSSSSTVDELAARLVLRTLARRIEAATVDAAELEGEILAHVRALAPQLLEEPGVGPIVAAQLLVAWSHRDRVRSEAAFARLAGVAPLPASSGQTSRHRLSRGGDRQLNRALHTVVLHRRQHDAATRDYIARRVAEGKSRREATRLLKRYLARRLYRLLQNQEPLMA

SEQ ID NO: 468863 - protein, 348 aa, unidentified
MTVYIGVDFHARQQTISYLTTEDGEIKRLQLDHAQPEEVRRFYAQFAGQRVVVGFESSGRAAWFEELLEELGCEIWIGHATAIRLFARRRQKNDRRDADLILDLLVRGDFPRIHRYSAESRAVLQQLRYRQRLVKMRTMLLNSLVFMAASRGVVLRSQLKTKRGLERLRQIDLPPALREQRDELCQLLLELKPKIDKVESSLAATAESDLRVRRLRTQYGIGPLTGLCLAHTLEHPERFANPRKVTAYVGFDPVEDSSGERRRIGSISKQGSRLLRFLLVEAGQIAVRRDPELARVYQRVLVRRGHAKAKVAIGRRLLVRAFIMLRDEIDYAEFQRRGVAARSSRGIA

SEQ ID NO: 468864 - protein, 485 aa, unidentified
MKQTKSSPCARAIPAHGGQLSRKERRELARQVQSEQVTLQIVHSNAAGIDVGKNTHYVAVPPDRDAESVRYFDSCTDGLQQMVAWLKKCGITSVALQSTGVYWIALYDLLQEADFEVYLVNARYTKSLPGRKSDVQESQWLMKLHTYGLLPNSFRPPQEIRWLRSYWRQRQNQVRSAASCIHRMDKVLTEMNVRLSRAVTDLSGATGLAIIQAIVDGERDPHELAAYRDPRVKATQEEIARQLHGNWQADLLFRLKQELQGYRFYQTLIAECDQELAQLLRAFPDRSAGVALPEETRKNRRKKKRGNSPQFDLRQLLYLMSGVDLARIDGIDVITAMTVVAEAGYDMSPWPTADHFVSWLRLAPDNRISGDKIIGKGRTPTQNRLSQALKMAASSLKASKTYLGAQFRRLRARRGPAIAVKAMAAKLARLVYNMLRHGMEYVDRGTEFYEQQQRERRLHALTKNAAQLGFQLVPTELSLAGTGTI

SEQ ID NO: 468865 - protein, 408 aa, unidentified
MNAVGIDVSKGKSMVAALRPMGEVAFLPQEFLHTEVGLEQMAYAIVALGEDTRVIMEATGRYHEPIAAALHEYGIYVCVLNPLFIKQSGGGSIRKVKTDKADAMKIAKYGLDNWVELREYTPMDTVRQQLKLCSRQYNLYMKTVVSLQNNLISLTDKTFPGVNELFSSPERADGHQKWVDFVMTFWHCDCICRVSEKVFTERYQKWCKRKGYHCSVEKALDIYASSCGHFTTLPKNDNTKLLIVTAAQQLLAGKTTLAALRAEMTRLASQLPEYETVRAMYGVGETTAAQLMAEIGDVRRFPHRSSIVGFAGIDPAVNQSGKHETQSTSTTKRGSPHLRKTLYQIVCTYLRKAPADEPVYQFLDKKRAEGKPYFVYMTAAQNKFLRIYYARVKECLETFDAHQKNTQG

SEQ ID NO: 468866 - protein, 360 aa, unidentified
MVLIGCDFHPGWQQVCWLDLVTGETEEKKLVHAPGEAEKFYRQFPAPSRIGLESTGNCQWFVDLLTSLGHEVWIGDAAKIRASDVRQQKHDKRDAQLLLRLLEDGRFPRIWTPSSEEKDQRQLLIHRHKLVRVRAQVKNELQHLALNQGVQEKRHLWSEAGQKLLRQLPLKPWAGRRREDLLKLMAMLDEQIKLLDEAVTKASEENEKARLLMTQPGVGPVTSLAYVLTMGDVTRFPRGKQVASYLGLIPREYSSGGHQRLGSISKQGNRFLRMLLVEAAQIAVRYDPEFRREYLHRCHTKPKGVAKVAAARKLAIRLYWMLRTNTRYSHREPPAGAPGQRKLDRRIDWALSSRCKSGFG

SEQ ID NO: 468867 - protein, 357 aa, unidentified
MVTIGVDFHKRTSTFQVLNEQGQPVKRCKLDNNKDNIRTFIQSIPGPKLLAMEATRSWGLFYETTQDLVDKFSLGHPKKMVAITSAEIKNDNVDAMMIAKLAYGGLLPPAHVSALPVRELKSIVRLRSFLVNQRRGVRNQIQTLLDRNIWPTDRPKSFKDPFCKKGLAWMASLKLSDRERFILDESLVMFNELNIKVNTIDQFLSSQKVDLPQMPLIQSVPGFKSGGINAYRVLIEISDITRFANSRGLLFYGGLIPREHSSGDKQRKGRLVKGCNLNLRTVVIESTFAAIRQDKVLKAFYKATKEKSGSGAAIIATARKLLCAIYYVLKEQKKYDQNYLIPSATACHSSQSVLLRN

SEQ ID NO: 468868 - protein, 391 aa, unidentified
MICVGIDVAKDKHDCCILDSEGTTLVDCFTIPNNMDGFKSLLQTIQDCSQKSDKIKVGLEATGHYSYNILGFLLDNDLPVYVMNPLHTNLYRKSLSLRKTKTDRVDAKTIATMLLSDVDLKSYTDTAYHNEELKSLTRYRFDKVQERAKLKQSVSRLVTILFPELEQLVSSIHGTSIYALLSEYPGAKQISEAHLTRLANILVKTSRGHYRKDKATHIRDAARTSIGSVMPAKSLELKHTIKLIQELTSEINEIEDAIRKIMDELKPPILSIPGMGFHFAAMFLAEVGDFSNFNSPDKVLAYAGCSPSTYQSGKLTNCYAHMEKRGSRYLRYALYTATKYVCYWNPVFTEYLTKKQAEGKHYTVALTHATKKLVRLIYALQKSGKAYLAVT

SEQ ID NO: 468869 - protein, 357 aa, unidentified
MLSSNVKYIGLDVHKEAIAIAVVNGAGKLVMESIVENKSSTVLDFLHGLRGELHVTLEEGTWAAWLYDVLKPHVREMVVCNPRRNALLKEGSKSDKIDARKLAELLRAGLLRAVYHGENGLQTLRELARSYLTISKDLKRVKNRLKALYHSWGICCAGKQVYAARHGEQWLSKIAQVGVHRRAELFYQQLDGLLVLRNTVRGELLAESQKHQAVKILRQVPSIGPLRAALLLALMQTPHRFRSKRQLWTYSGLAVVTHDSAQHRYVDGQLQRSKKPQQIRGLNQNHNHAMKEIFKSAALNASRCAGPLQDFYARLLAKGMKPDMARLTLARKIAAITLALWKKGGSFDAEHLKSQAA

SEQ ID NO: 468870 - protein, 414 aa, unidentified
MIEIVKKSCGLDIHKRFFIATILSTSSEKQQQRFNRDDDGILALKNWVISEKCDVVACESTSDFWVPIYDSLIKHLPVIIGNARDVKAFTHKKTDKIDSEVIAQLALNNMIQPSRVFPKYHREFRSYVRLRHKLVQKRTDIKNEAHAILALEMFNLNDVLTDIFGKNGRAILSGISSGKNVDEIIESLSPNVRKKSAQIKEILDREISQGAALRLQICLKLIKHLDDEIEALENEIFNYAYGKHKREMEILMSVPGIGELGAATLIAEIDNFKDFSSGDKLASWLGIVPNVYQSADKFYNGRITKRGSKEARWILTQIAQAAARKKNSKLKEFFNRKKKSIGHSKAIIALARKIATIIWHLITNDEMYEDETGYQKGQIQKRKIVETEIFSVDERIKIISGIIAVMGKEEGEST

SEQ ID NO: 468871 - protein, 340 aa, unidentified
MTFEKITVVGLDLAKNVFQVHAIDDVGNVIVRRQLRRNQLLHFFEQLPPCLVGMEACSTSHHWARELGALGFDVKLMPPVYVKPYVKRGKNDAADAEAICEAVTRPTMRFVPVKNCERQALLMQHKTRDLFVRQRTALINALRGHLAEFGIITPQGKFGLKAALEALHVAKDHLPEPSWQPFKHIQMQLEELSNKIAELDRTIMQWCRDQAAARRLMTIPGVGFLTAAAIAASVGNAEEFKSARQFAAWLGLTPRQNSSGGKERLGRISKQGDRTIRRLLVVGATAVIRRARIDAPSFPWIAKLLQRKPARMVSVAIANKTARVAWALLRREETYRHAAV

SEQ ID NO: 468872 - protein, 419 aa, unidentified
MGKRRNRVCGADIHNELIVATIQCSDDATLREEFGTTRSELERFKAWVISNGCEQVAFEATGAYWFPVYDVLSPSIDTVVGNPWMIKGLPKDKSDDHDSKSIASFCLNGQIKRSRVFSADDRDLRTMTRARSGYVKTRTQFRNRIHKYLALRGIKLRSGIRGIFGKSGRHVLNGLVDGESTDTILDGIPSGRIRKKREIIKDGISIGFDDTTKLLVKDALEVLDNLEGRIENMSREILRRTLNKSKDLAIVMSVPGISFVSGSQILSEIGDYRDFSTPEQLAKWCGIVPGLNESAGKKRSCGITKQGSKHLRTILVEVAQVVSRMKNNKLTRFFKRLEARKNRNVAIIALARKLICLIYHLLVNQELYEDGLQKAAKSKSKKKAQAQEPSSEDQLQDKVAAIVDAYYRLDAKIVLKGGG

SEQ ID NO: 468873 - protein, 322 aa, unidentified
MKYTPVGVDIAKHVIQVHFINEHTGEVVDKQVRRQDFLAYFSNREPCLIGMEACGGSQHWARELTKQGHKVRLLQARFVKAFVMGNKNDVMDARAIWMAVQQPGKEIAVKTEEQQSILVLHRSRRQLVKFRTAQINALHGTLLEFGETIHKGRAAMEREFPEALERMKERLPLYLITVLENQYNRLNELDSLIDDIEKQLTSVARQNETCRRLLDIPGVGPLIATAALAIMGKASVFKSGREFAAYVGLVPRQTGSGGKIRLLGISKRGDKYLRTLFIHGARAAALLTKEPGPWITELKKRRPASVAIVAMANKLARTVWAI

SEQ ID NO: 468874 - protein, 316 aa, unidentified
MKPSDSETFIGIDVSKHYLDLAVLPTEETWRTPNHPDELPALVERLAALRPARIVLEATGNLETPLVMALASEQLPVVVVNPRQVRDFARATGVLAKTDRLDSHVLASFAKAIRPALKPIPNKKAVVFKQLVARHRQLTDMLVRERNHRRSILPELLPEVDQMIGHIKKALADITMRMHQHLRQNPLWREKEQLLLTVPGVGPTVARTLIAELPELGQISHKQIAALVGVAPLACDSGQFRGKRRIWGGRSSVRQKLYMAALVASRFNPIIRAFYQKLIHLGKPAKVALVACMRKLLTILNAMARNQTPWNYQLQP

SEQ ID NO: 468875 - protein, 325 aa, unidentified
MKNFIIGIDISSKTLDICVKESQELSHFEIENSQKAILKFFRVYKENQVIVAMENTGRYNWNLFEVLPKFNFKIYVLNPLHLSKSLGLVRGKDDKTDAYRICLFTEKNKEDLTLWKPTPKAIKKLKIFITERTSRIKMKRRLLKQQHDYKLMKDVGLDKELAKLNKQFIDQIVKQIKLIEQKIQTIINEDSILKQQAKLISSVPGVGKILTWTMIAKTEGFTKITDPRKMACYTGVVPFEYQSGTSVYRKPRVSMFADKPTKAVLHLGAMSAIRLNNDLRVYYLRKVNEGKNKMLVLNAVRNKIIHRIFAVIKNQEFYKNPLVLS

SEQ ID NO: 468876 - protein, 335 aa, unidentified
MSSLVCGLDVHKNSVYATVMNYGGEIVDKRKLSNDEVVSFLSRYPIDKVAMESSTSIVPVYRALRGKGYEILVSHPKKTRLIAESRIKTDRVDSWAVTELARLDALPLSYMPPDDIAALREKVRRRAFLVRMRSKLKVKIKAQLTINGLTPPSDYGLFTVKGLEWLRSLQLDAVDSYLPVIHTLDIQVGKLSRELRVIAPQDEDVKLLMTIPGIGYYSALLIKSEIGSVDRFPDGEKLCAYAGLTPSVSISGKYRRHGSITKEGSRWLRWIMVECVHTHLNCDTSITRAYHAIAERKGARIAKVAAARRLLMCCYSVLQNRKPYYDPAGGYQPSS

SEQ ID NO: 468877 - protein, 416 aa, unidentified
MNKGQNTRGYQRYMALDIHREYILVGAQDEEKGWVLMPRRVSIEKFREWAKKNIRVGDIVVLETTTNVWATYDIVAPLASRVLVANAAEVGEIANARVKTDKEDVKRLLKLLIGGIVPEVWVPPMYVRELRAFISYRGRLVTTSTMIRNRLQSLLHKYNLKMSEAGLLDQAWWAAQKNISGLEQMQIRQELVLLQEVEKLRVAVDEELQRQSTSSTWNKAALQIMQLPGVGFVVAMTVLAAIGDISRFENAKQLVGYAGLAAGVHDSGKTHKDKKITKKGRRELRWAMVEAAWPAVRMSPFWKAEYEKHLSRMRKPNQAIVVIARKLLVTIWHVLSREETDVHASEEDLAYKMLLLSWSLSEEVRLGLTYKQFAKYALMKLGVETDITRFVRKNIPRRLAPREEVLARMTELGLSA

SEQ ID NO: 468878 - protein, 351 aa, unidentified
MEWIAFDSHKRYTLARIESQDGRVSREARIDHAPGVVRRFLERCTKGSPVAVETIGNWYWIVDEIESAGMIPQLVHARKAKLMMGHTNKTDRLDAQGLNRLQRSGTLPTVWIPPMELRDLRELLRTRMDLVVQRTGLKNRIHAALARYCLSLEEARDAFTIEGRKEIAQLFEKLPPQTRFANSLLLEEVDAVQKQIDRLEERMEEVLEDTATVQLLKTLPGVGRILSAVIALEVGDVKRFPSAGHLASYAGTTPRVSSSGGKTHYGKLRGDVNRFLKWAYIEAANVVARFHRKHSEARLSQVYAKLRKEKGHAKAVGAVARQLAEATYWMLTKNEVYKEPARTGTGSSTEA

SEQ ID NO: 468879 - protein, 348 aa, unidentified
MLADQLDYIVGVDPHRDSHALAIVHVVSGAVVFESTVIANNDGYARALELAEQHAPSRRGFAIEGTGSFGAGLTRFLTGRDERVLEVGRLRRERRSGGKTDALDAVRAARSVLTQQRPATPRAGGERQALQALVAAREGAVNAKRAGLCQLRDLLITTPEPLRSQLRPLTRAQLLHRLAATRPHSRPDAELRGSLLALRSIARRVLALTAEERELAHEIETITRKLAPQLLDQPGVGPHAAAQLVLSWSHRGRIESEAAFARLAGTAPIPASSGKTIRYRLDRSGDRKLNRALHMILVTRKRTHPATIAYIERRLQEGKTRREANRCLKRYLARSLYRVLEHGPPMTA

SEQ ID NO: 468880 - protein, 483 aa, unidentified
MKVYKVNCDKGKQAKGFIPYLNIDKMAKKAQKVKKGQRSELLIVNPDAAGIDVASTEYQVYVPEDRDENHNRRFDAFTCDLRSIVEWLKLCRIKTVAMEATGIYWVQLYIILEENGFDVIVCNAKHIKNLGEKKTDYVDASWIQLLHTYGLLTESFQPENKIREIKDLSRSRERLIERCNQSLLQVQKSLDMMNIKLHKVLSDIKGQSGMAILESIAKGEKDPHELVKHIHHRVKATKEEILKSLEGNWSESQVFILKQNLNCYHYTQGQIQELDLKMEELMKIYVQLIHKDEQGNSSKELIRSKKKMDANNAPAFDAERYSFEILGVNITRIPSISGLTALKVVSELGAGFIDKFPTPDKFCCWANLTPNNKKSGGKILSSKVPKRKNHVGQILRVAANTLKSHKGYLGNLFKSKRASLGYNQAIVAVAHKLARILYKMVKDQVEYNDQIETQKNILDMQKRVAYYEKKAQKSKNMLLAMAS

SEQ ID NO: 468881 - protein, 353 aa, unidentified
MTHEEVSYGASHRNHDLRLFVGIDVSATTFTVAWRRATDSPSRSFTLDQTPCGFAELQRRLRTQEPDAGAILIVMEATGTYWMTLATTLAAAGFAVSVINPAQAHDFAKALLKRTKTDAIDAQTLAELAARLQPERWTPPPQVYTELRQRLVHRDALVDVRTQFRNQLHALVQQPMVIRSVQTRLETLIATLDQEIAAVEQEIVQALQQDAAWAAAAARLETIKGLGILTIAWLLTTTVNFTLTTTPEAAANYAGLVPQLRQSGSSVRGRPSIGHAGNARLRHALYMASLSAVQHNPVIKPFYRRLRAAGKPGKVALCAAARKLLRIAWAVATKDQDFDPAHATCGCQELAGA

SEQ ID NO: 468882 - protein, 356 aa, unidentified
MKYYTSTTEFNCGIDLHARQMYVCVMDRQGKKLVHCNVKDNDFEFFLKLIEPYKHELTVCCECMFGWYWLADACHQAGLTFVLAHALYLRAIHGGKNKNDRIDSEKITHLLRCNLIPPSHVYPAEKRPLRALLRQRVCYVWRRTELLNRIQSHQLAHNRRPVKCTTRHNRAPWEQKILATESHPLRQLALQNDLAMVRHYDAQIWALETKLVNLAKEHSQRDFTLLLSVPGIGENLGLTILHEIGDIERFPTVKDFLSYCRLVKGTVASAGKIKGLRGARLGNPYLRWAFGEAAVIAKRDHAVIGPLAQRLEAKMGGHKFKANTVVAIKLARAVYFMLQNKTVFDSDRLVAVLSKN

SEQ ID NO: 468883 - protein, 366 aa, unidentified
MGKSSTVFVGMDVHKESIELAIADEKETRHYARIGGDAAAVDRAVRKLRSVHRELVFVYEAGPCGFWIYRRLVAQGLSCMVVSPSMTPRRAGDRVKTDRRDCLMLARLARAGELEPIYVPDARDEAMRDLVRAREDAVSMQRQARQRLQALLLRNEIRYVGKTAWTAAHRRWIAHLKLPHPAQQIAFEEYVQAVQEAGERLERLAASIAAELEHWRWRPVVQALQALRGIQVIHAVRLLAEIGDFARFQAPRKLMGYLGMIPSEDSSGSRRRQGSITKAGNSSARRALVEAAHAYAHPARVSWVIARRQTQLSKGVCDTAWKAQLRLCARFRRLAARGLNRNKIVVAIARELCGFVWAIAREIKPA

SEQ ID NO: 468884 - protein, 490 aa, unidentified
MNDLKLHRVIGLDLGVASQHSAVVLDGTGRVAARRRVSSTAASLGELERVALTGAAEGTTLIVVIEPTGPMWLPIAVYFGRRGHTVVRVSSAKAADLRRFLSRHAKSNGIDAETLARMPMVAPSGLHPVELSGADRASLDRRVRTVARLTREIGQRKVRIRALAQTAIPTIGAALGDDLNRTDLAVLERYAHPRALLAAGPARLTRLVHTESRGKLGAAKVEALRTAARQALELWAGDTAIALADLAEEIATEIRLLRLTETERARHEQARDAAHAQVDPAGLATSLPGLGPVGSTQLLAAMGRPGRFRSAAAFKAFTGLAPKASETGNTDRKSQPMSKAGNRALRTQLIQSANTARQLDPQLAAIYHAQMTERGANHLKALCVVAARLAERAWLTLSRGEPYTIRDLQDRPVTPAEARALIDEQFTVPAAVRRRRRSKKQAGRAPQHCTMQEKSQPTAGHEATRPSTTITSTPAAVNPDPTEVLTALPT

SEQ ID NO: 468885 - protein, 376 aa, unidentified
MSDYSAYVGLDIHKDAIAVAVALPGRKEPTYRGEIKNDRKSLLRLIARLSPNGEVVSFCYEAGPCGYGVYREITKTGHHCTVVAPSLIPRRPGERIKTDRRDAMMLARLHRAGELKAVWVPGEEQEAMRDLTRAREDMKAIELQARQRLGAFLLRHDRIYRLGSSRWTQRYFRWLEEQRFADPVQQVVFQEYIDTVTAARHRVETLETQMREALSRWSLCPVVEALVALRGVDMITAMTVLAELGDLTRFDSPRELMSFLGLVPSERSSGGRRRGGGITKTGNGHARRVLVEAAWSYRFPARKTAHLRRKASAAPPAVQAIAWAAQKRLCGRYRHLYHAGKAKCQITTAVARELVGFIWAIACEVMGRPQVTRALI

SEQ ID NO: 468886 - protein, 351 aa, unidentified
MNNSLTAFDPCGIEVSHLTLVVALRAHDHDEPPREFPNTREGHQAVLRFLERAGRSVRVCMESTGLYGLDLALTLHQAGVPVMVANPRGVRHFATALMQRSKNDQLDAQVLREYAARMPFHPWRPPSPAALKLVAVARRLEALTDMMAAEKNRLHAASLSEAVPAIIRRDVLRSIQTQQRAIDRLTRAAQEFIADDPELARRYELLLSIPGFGATSAVHTLAELTLLPVGMDVRQWVAYAGLDPREYTSGTSVHKKVRISKAGNKHLRRSLYMPALVAVRHDPHVRAYYEHLLARGKTKMQALVATMRKLLHAIYGMFKHDKLFDGQRVYASTSATLAPAPSNSEVVCSQT

SEQ ID NO: 468887 - protein, 362 aa, unidentified
MNYVGVDIHKRYSVLCAVDEQGCRLREGRVEGNAADGFARFFSGLSGPSKAVVEASWNWGVIHDDLEELEQVKEVVLAHPYKTRLIADAQIKTDRLDAYALSTLLRGNLVARAHIPRRLTRARKNQLRQRLYWARLRTMLRNKIHALLDRQRDLELPQCSDIFGVRGLGFLRRLKLSEPDATLLQEQLALHDLIGQQMKAQEKRIAAEFGSEAMHRRLMSVPGIGATLAAVIACEIDAIERFTNADRLCAYAGVVPTTHNSGGKVAHGRLLPFCNKWLRWALVEASWVAIGCSPYFGALYKAHRARGKKANHVILIVARRMCRIIWQLLHDQRDYEKRSLSSRVNFPGCSALALTVNPATAP

SEQ ID NO: 468888 - protein, 450 aa, unidentified
MGNASGVSRGDRNRNARLARLRALVPTQNAIVGVDLADRKQTVVVCDHDSKVLARRTFRCRAWDLGAALDWAADRAAARGFAGVTVACEPTGHRWRVLGQLAAQRSMPFVCVQPMQTSWARRSEDLTVDKTDDKDAVLIARLTAQLRCYLPEPVDETWGRLRHLGARREQLITEAGSQIQQIRALLECVWPAALDTARQPFRSKTWAAAMTVICDRDGGQLARTRRLGLARFERAVRRELSHRGGQRPSLRILRALFAALADPAGVTAHRLGALERVQLLLEDWQHAGQRLADTEARMAAVLDQLELTALATSISGLSPIGAAAILAETGDPRRFPTARALVKHAGLAPRENTSGAFTGRTKLTGQGRPGLRLAAWRTVWGAQKANPVYAARYHHLTTREHNKLTPTQAQTVIAAAILRHLHAVITTGTAWDPSIATHGTRHRQAAPIAA

SEQ ID NO: 468889 - protein, 343 aa, unidentified
MQAITTIGLDIAKSVFQVHGVDADGNVVIRRQLKRRYVLAFFQKLPPCLVGIEACASSHHWSRELQALGHTVRLMPPAYVKPYVKRHKNDAVDAEAICEAVTRPNMRFVATKTPEQQSCLTLHRTRHLFIRQQTSVINAIRAHLAEFGIVAPVGRQGVEQLLGVAADTNDKRLPEVARACVAALGAQLRMLKAQILQFDRMIRAWHRSNEESRRLDDIPGVGPALATALVASVADPKAFRSGRDFSAWIGLVPKQNSSGGKDKLGNISKRGDRYLRSLFTTGALAVIRYAKIHGTKHRPWLTALLTRRPTKVAAIALANKIARIAWAMMAKSERYKEPAALAA

SEQ ID NO: 468890 - protein, 324 aa, unidentified
MLPTLGIDISKDSFHLELSINDKLRHRKFANRKEGFGELCVWLVKHKATQVHACLEATGPYSEALAIYLHQQGHTVSIVNPVQIKAFGQSELRRNKDDRPDAGLIRRFCEKQRPAPWTPPPVHLRELQALTRHLENLIETRQQQINRLEATNTKNVAKSLRKLVAHLDAGIKRTEQQIDDQVDRHPDLKQQSELLESIPGVGKRTAAKLLAEITDISQYQSARQVAAYAGLTPRNNRSGTIRGKTRLSKTGNARVRKALFFPAIVAKRHNPIVRAFCERLSSHGKNKMQVIGAAMRKLIHIVFGVLKSGKYFDPTHELLLNSVS

SEQ ID NO: 468891 - protein, 337 aa, unidentified
MKYCGIDLHSNNSVVIVSDDEDRIVLQRRLTNDLGQIRGVLEPYREELVGVVVESTYNWYWVVDGLMDAGYRVHLAHPSAIRKYEGLKHSGDVADAAYLAQLLRLGLLAEGYIYPREQRGVRDLARKRMQLVRYRTAQILAIENILIRQTGARMKGEAVKRLTAEQVDTLALAPDVALAMEANRAVSQALGQQIEALERRLKERVSLRPEYRLLQSVPGIGEILATTIMLETGCIDRFAQVGNFSSYCRCVDSLRESNGRKKGEGNAKNGNKYLAWAFIEAANFALRCCPQAKSFYERKKSMANRVLALKALAHKLARACYYILRNQEPFDVSRCFG

SEQ ID NO: 468892 - protein, 343 aa, unidentified
MNDSKTVVGIDIAKRVFQLHWIDMETGEIVSLPLKREKFLEHFANRQPCLIGMEACGGAQHWARSLTALGHQVKLLPGKAVKPFVTGNKNDRHDARAIWTAVQQPHVKAVAIKSEEQQAILALHRMRSQLVKFRTAQINGLRGLLTEYGEVMAQGKAAIRKGITQALARLSDRLPAIVIDTLREQWARIEKMDAEIATIERRIKDWLKQDAACRRIAEIPGVGPLTATAAVAIMGDAKTFKSGREFAAFAGLVPRQTGTGGRVKLLGISKRGDTYLRTLLIHGARAVLTNAKDPGPWVTALRQRRPLNVAVVALANKMARTIWAILAHERTYQREFVTQPAQG

SEQ ID NO: 468893 - protein, 339 aa, unidentified
MELYAGIDLHSTNSFVGIMDREERKVFKKKLANEPGVILKALDRFKGDIVGVVVESTYNWYWLVDVLMGEGYRVHLANPSAIKQYEGLKHKDDNDEALWLGNLLRLGILPEGYIYPKEERPIRDLLRKRGHLVRLRTSLILSLQGIIMRNYGYKVPANKIKQFREDHVAPMLAGQEDLALSGRVSKETIDFLTREIRAIEKVVEGKVKVKEPFSYLKTICGIGKILSVTIMLETGSIDRFPKVGNYVSYCRKVPTSWTSNGKHKGKGNKKNGNKYLAWAFSEAAELARRYNEHARAYYNRKAAKSNFMVAHSALAHKLARAAYYVMKDCVPFDPYKLFA

SEQ ID NO: 468894 - protein, 346 aa, unidentified
MLYAGLDLSRKRLDFHLLDGEGATVEVGVAPPDVDGLRGLTQRLARRGAPIRAAIESMNGARFVHDRLELAGWQVEIADAQKVKGLAPLACKTDRIDAWVLAELARCDLVPAIWLPDPRVRAERERARWRLHLVRHRSSLKQRVHAVLLTHGKPCPVSDLFGMRGRQLLARLGLPEPWQATIDASLRLIDELDREITDCERELRRLGADHRYVPLLCTVPGISWVLAYTIAAEIGDIDRFPTPRKLAGYSGLCPRVYQSGERDLRGPLSKQGPRYLRWALVEAATHACTAPAYRDRYQKTKARIGKQRGAKVAQVDLARRLSEAIWHMLTRGERFAPKGANDPLAA

SEQ ID NO: 468895 - protein, 519 aa, unidentified
MHQTKYRGIITEAGSLTFPPWEPAFRLVKPLRKSVSPFGGDLCFGWLGSPRLYLYKPLGCVSAFWKWIPARKDKTMQYQKVLKMLESIPYLSVGLDVGADFTWMSIMLPNGTLTGKPFKIVHSDPQSRELAVAKIKEAQEAYSLKSRCFLESTGIYHIPLLCFLRDKGLDCSVINPIITKNSTNMNVRKLHNDKFDSKKAAKVGQDASLKTSIVPDDAVIDLRNLVRDYYYFKDLQSAIVLKLNAELKVSFPAYLNVFSKVTTQTSLKLLEAYPLAADMLAAPRDELVESIRQTARFGEKYAISKYDAICAAAKDAAIFGRALPSNALRIRLYIKTYREYQAHLDSILEELHKTVDNLQGDPVYDRICLLQSLQGVGFLSAVVLIAEMGSFDLFSSPKKLYAYFGLDPGVNDSGKFHGDRVHMSKRGSSLARRILHMIAINNLKVDKAAKAPVNPVIYDYYIRKCASKKKIVAVGAVMHKICNIIFAMLRDNKPFELITPEEHCERYAAEHPESVSIVA

SEQ ID NO: 468896 - protein, 430 aa, unidentified
MKSNTQNKKIEAITEKTLVIGIDVGSETHYARAFDYRGIEYSKKPFKFSNTEVGFATFKEWILDLKERHEKDKVVPGMEPTGHYWFNLGKFLQDNEMKPVLVNPHHVKKSKELDDNNPTKNDRKDPKVIAGLIREGRYMIPYLPDGVYADLRTASNIRFQLQAELTRIQNRISRWFNIYFPEYKTVYGKPDAKSGMLILKEAPLPEDILTLGIDGVDQIWRDAKMRAVGKARAKTLIEAAEHSIGSKEGTMSARMEIRMLLEDYESKNMRLQEVMVLIEELVKEIPMAEKLLEIKGVGIRTVSGFLAEVGDISRFNNPKELQKLAGLALVENSSGKHKGKTTISRRGRKRLRYLLFEVAMSLVAKNPEFRELHNYYTTRRLNPLKKMQSLMAIAAKLIRVFYAMLTKGVDYDPKKMISDIKRPTVYLQAA

SEQ ID NO: 468897 - protein, 444 aa, unidentified
MALSGMILIREVADAPVIMGISKSAGLKFPCGEVRIVNPLFVGIDVSSKSNVAYLMNPDGSKHSIFSVQNNLGGAKLLSERIVSALSSMRLNDVVIGLEATSIYGNSLVYALREDGSLGRFQRKIHVLNPKQVKKFKESYPDLPKNDFVDAFVIADHLRFGRIAKEVYMDDYRYQALRTLTRARFDVIQNLTREKQRFANYLFLKCSGMAQDKNIPNTSATTIALMEHFETVDDLANADLDELTAFIAKTGRGRFADPDVVAKAIQTAAKGSYRLPKTVNDTVNQAMSVSIASMRALKEQVKVLDKAIEQQFEIIPNTLTSIPGIGKVYSAGIIAEIGDIHRFNSQASVAKFAGLVWHKNQSGGFEAEHSQMIKSGNRYLRYYLLEAANSVRRCDSEFRRYYDLKFKEVNKFQHKRALVLTARKLVRLVFRLLKDNRLYIPPEG

SEQ ID NO: 468898 - protein, 485 aa, unidentified
MAAGKKKDTGVAGSAAGGPASLAAGDGGDGAEVSEDQVRVIERAAAIDVAKGSGMVCTRVPGSRPDRRRQKVWQVTATYREVIALMDHLRSEGIQRLVLESTSDYWRLWYYLAEAAGLEVWLVNARDVKHLPGRGKSDRQDCVWLCKLNERGMLRRSFVPPQAVRDLRALTRTRARLAQDQARHQARVEKILEDALLKISAVISDLFGASGRRFLDALVAGERSPAALVALGDPRLKATRRELEEALTGKFRDIHALEIKTHLRILDVINEETARLDQAIGEQLALVPRTAPACTACGEAGGSHTPGCAGEGTPLLGLTERIDEITGVGLCNAQVLIAELGTDPSQFPTPGHAAAWARLTARTLQSGQSARPGRTGKGNPYLRGALGQCAMAAAHTDARLGVMYRRIARKRGKQKAIVAVARVICEIAWILICDPGARFEELGPDYYTPRSPARRTRDKIREIERLNPGKKVILAPIDAQADTAA

SEQ ID NO: 468899 - protein, 338 aa, unidentified
MVYGAIDLHLRYSQIRIVDAEGQILVDRRIPTVRERLVDVFAGQGPMRILLESGTESEWVAHTLEGAGHEVIVADPNYAPMYGEIRRKVKTDRRDVAALAEANRRGWYRATHRRSAAQRALQQVLRSRRQLVQMRSGTVSLMRALLRQSGYRVGSGTAARIPTRVAALALPTPLATTLAPLGRMVETLTTEIAAIDARLATAAAADPVVERLQTVPGVGPIVALTFRAFVDDVTRFASASQVSAALGLVPREDSSAERRHRGHITKAGPSELRSLLVQASWACWRSAAAGTLRAWVDRLASRRGKRIAVVALARRLSRILFAVWRDGTRFRATTVAGA

SEQ ID NO: 468900 - protein, 348 aa, unidentified
MLADQLDYVVGVDPHRDEHAVGVVDVRSGVVVFETCVAAHSGGYADALAVAEKHAPGRRAFAVEGTGSYGAGLTRFLTGSGERVFEVGRLRREHRSGGKTDALDAIRAARSVLAQKRPATPRSSGEREALRALMAAREGAVAAKRAGLCQLRDLLVTTPEPLRAELRPLTRARLVVRLAGMRPEQRQDPELRGILLAMRAVARRVQQLTVEERELAREIETLTRRLAPQLLEQPGVGPLLAAQVALSWSHKGRITSEAAFARLAGVAPIPASSGQTIRYRLDRSGDRQLNRALHQILITRRRIHPPTIAYIERRTKEGKTRREATRCLKRYLARNLYRLLENGPPSTT

SEQ ID NO: 468901 - protein, 285 aa, unidentified
MVVIGADSHKRTHTVVAVDDVGRRLGVKTVCTNSKGHLELVRWSAQFEEVTFALEDCRHLTRRLEADLLAAGCRVVRVPTRLMAGAHRSAREPGKSDPIGAEAVAVAALRHPDHPVAQLDGPAREVKLLSDHRHDLVVQRTRIASQIRWYLHELDPDLATPSRGLKRHCIVAELLVELDRFDGTIARLARNLLDRCDELNHQTNALEAELRKLVRAIAPSLLDIPRCGILSAAVIIGETAGVHRFRNKDAFARFTGTAPVPVWSGASKGKVRLNRSGNRTINCCT

SEQ ID NO: 468902 - protein, 367 aa, unidentified
MQDTIVHHEGTVSLEIVGRKIKPGAAVIKIGLDVHARVYVAVAQFDHLLPKAARRFSPGEFVPWVEGLLRAGHTVRVVYEACGFGFGLYRQLEAAGARCHVIAPRKLDEQSTGVKTDPRDATTLCQRLSRYCDGNTRELAVIRVPSEEEEQARHVSRQREQLVQHRQKLEAQGRALLICHGLPSPAHWWKNQTWRRLGQLLPAWIIARLEVYRPALLSLQEQIAALSGQLEAAAPAAIPAGIGKLTTVVLTREICDWHRFNNRRAISSYTGLCPGERSSGSKRIPGSVTKRGNPRVRAALVECAWRMVRFQPQYPPVQKRLTVLAKGSPALGAVRKKAIVAVARHLAVDLWRIHTGRCSAAQLGLTI

SEQ ID NO: 468903 - protein, 324 aa, unidentified
MGHSMNNSSSKQVFVGIDVSGDQLAVHILPDDTFFETGTDPKSLQAFADRLAGMNPAKVLLEATGGIERPVVAELLHRDLPVIVVNPRQVRDFARATGLLAKTDRLDARIIASFAEAVKPDLRKLPDVDQQRLAELMMRRHQLMDMRTSELHRSHRVTDLKVKRSCMDHIAWLDKQIKDLDDEVGRLVESSPAWRAQDNLLQSVPGVGDNLSHTLLASLPELGRLDRQKIASLVGLAPIPHDSGKMKGRRSIWGGRSHVRKALYMAAVASVRCNPILKAYYFRLRLAGKPAKVAIVATARKLLVILNTMNREQTTWKYFQTQNA

SEQ ID NO: 468904 - protein, 343 aa, unidentified
MAIVAGFDVHRRQITFDALDTETGEVSRGRIGSTRAAVSDWVGRFPNQEIEVAVEACTGWLFVCEALAQAGARPHLAEPAETSARRGKKRRAKTDRADACHLRELLCQGRLPESWLPPAHVCEWRTRTRLRKTLVDERTQWLQRIRATLFHHGVPVADVPERLLSRQGRAFLTRVELPESARERIAVALALIETIEAQLVPLERVLRDLARSQPGCQALMRQFGIGELLAPTILCELGDVSRLSSSRKAVRAVGLDVGVHRSDRRSRVGRLTKQGSPVARWALYEAARSACRKTSPDHSAYLALKAHGLSHTRTSLTIARKLTRRCFHTLRELGPAALEPISD

SEQ ID NO: 468905 - protein, 388 aa, unidentified
MVILKRIGETLGVGMEGHRQVSALTDLTENTSPSRLPESMENLAANRRFVYKLTRKTRHPDFSSLFSIGGLMASEMFIGIDVASRELVISSPQGLTTITNTQAAIEAWLMGLPTGSHIGVEATSHYHELVADKAVMAGMVVYVLNPRDTRHYMLGLGRRSKTDRVDAGMIRRMVMAEHAQLRPYQPAAAVHRQLALLQRRRGGVVKHRQALSKALRQIGTLGTALDQALAALDTLIAQIDQQLDTLLNSQEGLAVDARRLETIAGIGRQTSTQLVTLFKRVGLANSDAAVAFVGLDPRACDSGQKSGRRRLSKRGSAELRRLLYNCAQAAARTQTWKPYYNQLKSGKFSTTQALVIIARKLLRIAFSLWQQPGVQFNAQKVACLGLIS

SEQ ID NO: 468906 - protein, 386 aa, unidentified
MQTLNDLSRSLIALEPASTLIAVIEMSLSSWLVAGIVPGIERQPLKKLAVDESALLRLLHRWRDEAEKAGCRIERIVVAFEAGRDGFWLARWLKARSIEVHVIHAASVAVSREHRRAKTDRLDAELLKRAFLGWLRGERDHCKVVAIPTLKEEDAKRPSRERQSLVGEQSRIVNRMKAALTRLGIRGFNPKLKRAAGRLDSLRTPEGEPIPPNTLAELRRDMERRRLISNQIRQIEEARLKHFEQAPNDGPHAMVRLLARVIGVGIETADMLVHEVLTRNMHDRRAIARYAGLTGSPDESGRKRREKGLARSGNGRVRRGMIQLAWRFLTYQKDSALAQWYRTRTENALGARKPMIVALARKLLIALWRFVQQGVVPDGVVLRPAQ

SEQ ID NO: 468907 - protein, 455 aa, unidentified
MKVKTVSVLRSKRGLHRVNGAEPQVVGLTPQTTGNRKTNTMKKYILRSANPVQPQSTLRAPRRRTQPVTTSPGVLGRPPAPTNGPVLFIGFDVHTDSIAVSLAPSDSVEIRRYGIIGGTHDDVLKLLTKLQATHPGTELRCGYEAGPHGFSLARCLHRHGYHCVLFAPSKIPRQPGDRIKTNRRDADQLARLYRAGELTAIYIPDPADEAIRDLIRARDQVGDQQHRSRQQLKMFVLRHNLRYTGQTAWSPAHLRYLAKLKLPFPVQQIAFQEMLDGITEAADRLERYDTEIARAVPGWRWEPVVRALMALRGFALLHAATIVAELGDLHRFSHPQQLMNYLGLVPSEHSTGDKRCQGGITKTGNAIARRALVEAAWQYRSPARLSPHLKKRQEGLPKAVTDIAWEAQRRLHHRYIHLTHTGKKKAQVAVTAVARELAGFVWAIACQVQPRATQT

SEQ ID NO: 468908 - protein, 412 aa, unidentified
MTAKDQFAAHVGLDWADKKHDVCVQFKNGDRIFHVIEHTPEALDIWLNELHQRAKGRIAIAVELKKGPVVYALQKYPFVTVFPVHALSLARYRQAFWPSGAKDDPQDAELALDLMLRYPHKIKAIEADNPDIRLLQQLVEQRRLLVEDKRRFVNRLINTLKQYYPQPLEWFSHRDSSLFCELIIRWPSLQQLKRARSDTVRHFMNAKGGPAVAYTEQRVASIASAIPLTTDKTVIEANALMATALASQIKLTGELIRTYDERIESLFDTLPDAELFKSLPGMGPCMGPRMLAALGDNRDRFNSAEEIQNYAGIAPVTERSGQKSWVHWRWQCAKFVRQTFVEWTAKTVNSSYWARLYYQSQREKGKSHQSAIRALAFKWIRIIYRCWKTRTRYDEAKYLLALEARKSPLLKP

SEQ ID NO: 468909 - protein, 351 aa, unidentified
MEYIAFDSHKRYTLASVEKPSGGQSCELRLAHQPGSIRQFLSRWTPGSPVAVETIGNWYWIVDEIEEAGMVPRLVHARKAKLMMAMVNKTDKLDARGLNRLQRCGTLPTVWIPSRELRDQRELPRTRMVFSRTRTRLKNRIHATLAKYGLSIPQLADLFGKKGRELLPQVLAQLPPHTLFSTEQLLAQLDSVEHQIQQFERRIKEVFAPSVELARVMSLPAVGFILGTVILLEVGKVDRFPSAAHLASYAGTTPRVHASGGKMHYGQLRPDVNRYLKWAFLEAANVICLNHRHLPQRHVHRLYQRVASRKGYQKAIGAVARHLAEATYWILKKEEPYREPQASKKVSSTKG

SEQ ID NO: 468910 - protein, 310 aa, unidentified
MGNCVGIDVSKHHFDWVLGGEGDVARVPNTPAGVRRMVAKLQCLEATLIVVESMGGYERAPTEALSEAGLPIVLVNPWRVRRFGEGLGVLAKTDPLDARILALFGERAQPERRPLPGPRQRQLADLVRRRRQLIAMIVAEKSRLDTASPIVRRDIISLVQLLERRVARLDERIDRSNADDPEKSEQWTRLQTAPCMGPGVARALIVDLPELGSLGRRQITSLVGLAPFAKDSEKKSGYRRIRAGRAAPRSALYLAAMNGARFNAVLKEMYQRLIVAGKPPKLALIALARKLLTILNAMVRDGTDWQQTTA

SEQ ID NO: 468911 - protein, 387 aa, unidentified
MPQPNDLSRSLVALDQNSTIIAVVEMSQSSWLVGGMLPGIERQPQKKLEPSAERLLGLLHRWRDEAVRAGKKITRIALAFEAGRDGFWLARWLNARGVEAHVIHPSSVAVSREHRRAKTDRLDTELLKRGFLGWLRGERGHCSMARVPTIAEEDAKRPNRERECLVGERTRIVNRMKATLARLGVRNFKPTLRKAAERLATVHTPEGMPLPPNTLAELQRDMARLGFVVSQIREIEQARQKRLEQETETAPHAMVRQVARVIGIGIETADMLVHEVLSRPMRDRKAVARYAGLTGSPDESGARRREQGLARAGNARVRRGMIQLAWRFLRFQKQSALAQWYRARTADSRLGTRKTMIVALARKLLIALWRFVTTGETLDGVILRPAG

SEQ ID NO: 468912 - protein, 408 aa, unidentified
MNAVGIDVSKGKSMVAALRPMGEVALLPQEFLHTAVGLEQMAYAIIAPGEDTRVVMEATGRYHEPVAAALHECGIYVCVLNPLFIKQSGGGSIRKVKTDKADAMKIAKYGLDNWVDLREYTPMDTVRQQLKLCSRQYNLYMKTVVSLQNNLISLTDKTFPGVNELFSSPERADGHQKWVDFATTFWHCDCICRVSEKAFTERYQKWCKRKDYHFRAEKALDIYAGSCGHFTTLPKNDNTKLLITTAAQQLLAGKMTLAALRTEMTRLAKQLPEYDIVRAMYGVGETTAVQLMAEIGDVRRFPRRSSIVGFAGVDPAVDQSGKHSAKSVPTTKRGSPHLRKTLYQIVCTYLKKSPVDEPVYQFLDKKRSEGKPYFVYMTAAQNKFLRIYYARVKECLEAFDAQQDTSQR

SEQ ID NO: 468913 - protein, 317 aa, unidentified
MGHFPERTWAGIDVSKRHWDVVVDGNKRVYHFDGDRCGSDQLLALLNEQGVTHVCLEATGGWEQGLMAAVDEHGLRVSVVNPRQVRDFARARGQLAKTDRIDAQMIAQFGAMMQPAPSEKPPEKQQKLRSLRARRRQVSGTLVQEKNRLATQRDQDARRSIEDAIDFYQKQLESLDAQIKRLIQMDPEFQQRLALLVSVPGIGDTTAAALMADLPELGTLNRRQAARLAGLAPINRDSGTLRGKRMIGGGRATVRQGLYMATLVATKHNPVIRDFYQQLVRRGKAKMTALTACMRKLLLILNAILKDKHPWKSTHPT

SEQ ID NO: 468914 - protein, 353 aa, unidentified
MGHKYVGLDVHQSSTVAAVHDEQGKSVMESILATEAEAIRDFLKGLRGTIHVTFEEGTQAAWLYEIVKPVVAEVIVCNPRRNKLLAVGNKADRVDANKLAELLRCGQLKPVYHGMPGVRLLKELVHSYDSLVSDTTRVMNRVKAIYRGRAIGCAGRDVYYPRNREQWLEKLTEPGVRQRAVFLYQQLDTVRGLRREAKKAMLKESGRHPAYATLKPIPVLGPVRIAQILAKVASPHRFRTKRQFWAYCGLAVVTRSSADYQFRGGKAEKRKRAPMTRGLNPNFNRRLKYVFKGAAVDGIHQAPFEGYYARLLVKGIRPEMARLTLARKIAAVTLTLWKRGERFDELKLSEQAA

SEQ ID NO: 468915 - protein, 341 aa, unidentified
MLIIGCDYHPSVQQIAWADAATGECGERRLTHCAEAEQFYRDLKQKGFRVRVGLEATGHSRWFERLLAELNFEVWIGDPAQIRAKQVRKQKNDRRDAAHLLKLMLENHFPRLWVPTSEDRDVRQLVLHRHRLVQMRTRVMNQLQAIAMNEGVRRKRGLWTRQGRAQLEGLQLPPWTSRRRQELLEVLDRFNPSIDELTKAIEQEAQRRPEVERLQTHPGVGPITALAYVLVVGTPERFDCGKQVASYLGLIPCEDSSADHWRLGHISKQGNALLRFLLVQSALSAAHLEEEWRRKYVHLSMRRHHAIAKIAIARKLAVRLFWMWRRGWDYEQLKKFGANAG

SEQ ID NO: 468916 - protein, 445 aa, unidentified
MAFKSLQQKRQFVNGKYIIGIDPSKIKHQAAVLDTNGIQRGKAFTFKTTHQGYHHDLWKRLDQIIPSDVDNDHIVFAVETACNLWQTLAFYLKAKGYTVLLVSPLSTKHTRPVMNHDFSKTDPKDALIIANNARDGYFDYYQEFTPLVNAMHRLSITYCKLNKNLTQNKQRLRSLVEQIFPEFITVLPPDTKTAIYLFKTYMTPQDFLNIDICKEAEQIKRISRHNHGIKTLLRLKEQAEHSIGIQLKNEEIIAERLSLTAWITMIETIEGQMESIIEQLITLAQQTPYWDVLISFKGKGVSEKLAALFIAETRDLDQYNHHKKIEKFAGYNLRQAQSGNYVGPRRMSHIGNKHLSWIIYKMTEETTKYLPEVRMKYLRRQMNTKSKYRKNIIACSSPLLNLIVALVKQRRPYELREEKVKELQQLEQKYQAYKQSKKSKRKKAA

SEQ ID NO: 468917 - protein, 427 aa, unidentified
MSYRIAAIDVHKKMLAVVVADVAGEGEYQFERRKFGATPDQLHLLAQWLCQQEVEEVVMESTAQYWKPVWGALEQYWQPARQKREGARKMSGKLHLCQAKSNRGRRGRKNDFADGERLIKRLVAQELVLSFVPDAEQRLWRTVTRRKYQLTRDKVRFQNQLESLLEQAHIKLSSLVSDLLGVSARRMLKAIAEGETDPAALAALADYRLRATPEQLRDALGACGQLHGVYRRLLKMALEELKLMEEQIEQLEQEASKLLQQHQNAVQRVAAVPGFGVDSAIQAIAEVGPEAAAFATYKNLSSWVGACPGEEESAGESKSTHSPKGNRTMRRLLNQAAHAAIKVKGSIFEMTFRRLLPRLKYQQAIWAIAHRLCRLLWKILHEGVRYEERGPAVSAKSKRTRTARMIKELKALGYRVEGGPLPAGTPA

SEQ ID NO: 468918 - protein, 394 aa, unidentified
MGKMYVGIDIAKDRSSACGIEEGGRTLFELTFTMDGAGFAELLKTIEANGGTPGNVVAAMESTACYHINLYSFLSAKGIDAVIINPLLIANYAKLSLRRTKTDKKDAKTIARFILAHKDSVTQLAISQDMQDIRDMARERESLCYQISAAKVEIQRVLQTTFPELAAMTNPLTKVMLHFIQRFPSARLVSIAKPSAIEKTLKEKPCSCRLRFTSKDLIEAARTSIATVSPAKELILSGKIETLIHLQKRRDELTKALTKYCESMIVEDLRIVTSISGINNTMATALLAEIGQIGNYLSHKHLIAFAGIDPTVYQSGKYEGASRISKRGNRHLRRVIWLMTISVIHHNSVFRDYFLKRRNEGQPFKKAVFATAHKLMRVIFAMLSKKTSFVAACV

SEQ ID NO: 468919 - protein, 367 aa, unidentified
MKKISTTAAKQTKNFREHKLTIGLDLGDRSSWYCVLDEAGSVLLEQRLSTTPKAMGEGFGAMPRCRIALETGMHSPWVSRLLGELGHEVIVAHARNVRLIGESRKKDDRLDARMLARLARIDPQLLAPVRHRSARAQADLTVIRARAGLVRARTALINTARGLAKSYGERLRGCSPRNVNPEKAQGLSPELQTALEPLLAAVESVSERIREYKERIEQLAQQSYPQVALLKQVKGVGTLIALTYLLTLEDPHRFRKSRDVGCYLGLQPGRRNSGQSEPQLHISKEGDPYLRTLLVQGAHHILGPFGADSDLRRWGLKLAERGGKNGKKRAVIATARKLAVLLHRLWVSGEVYEPLRNSSQVPVPAAA

SEQ ID NO: 468920 - protein, 359 aa, unidentified
MKRKITTYAGLDVSLEETHICIVDEHGKCLSEIRVPTDPEAVHGALKGAPGQLKRIGLEASSLSLWLQSELSAAGHPAIIIEARHAHATMQAQRNKTDRNDARALAQVVRTGWFRAVHAKSDDSRRMRMLLGNRRLLKRKLIDMENHIRGTLRPFGLLVGPVSRCKFDARVRELIDDVPADMTAFIETLLIVRRRLLEGYAELHRLVLGIVRTDPICRRFMLVPGVGPIAALSFRAAIDDPHRFRRTRDVAAYLGLTPRRWQSGSIDRTGSISKHGDREVRTALCEAAAALLLRTRKWTAIKAWGLRLAKRISMLNAITAVARKYAVILLRMWRDAADYKPGLGAKVTEKMRLSAPGTA

SEQ ID NO: 468921 - protein, 355 aa, unidentified
MNQEKYIGMDVHQATISAAVRNAHGKLLMECVLETKAETILEFVQGLRGPLALTFEEGTWAAWLHDLLTPHVSRLVVCDPRKNALMKDGNKNDRIDARKLAELLRTNQVKAVHHENHGTRALKELGRSYMTITKDATRLMNRIKSVYRSWGIPCTGTSVYTRRHRAEWLAQLVEPGVRIRAEHLYQQLDSLQPLRLEARRQLLRESGKHAAVKLLRQIPAIGPIRAALLVALLQTPHRFRTKRQLWAYSGFAVEVHDSGEYRWVRGKLQRNRERITVRGLNDNHNKDLKNLLKAAAIAASTRPGPLHDFYVARVESGMRPTMARLTLARKIAAITLTMWKKGANFDPNQLHRQAA

SEQ ID NO: 468922 - protein, 358 aa, unidentified
MSKRTGKVAESKSLVVAAEDSVYVGLDVHKKSVHAAWRLNGREVDTWVMAADVAAVVRSLSRFKPGLKQIVYEAGPTGYGLARALRKAGLPTEVIAPGKTPQPANRDSKSDRLDCRKLAEFAEKGLLKAVGVPTEEEEADRQTLRLRDQLTKKRRRVMQQIKSLLLQHGIPEPLGLKNWTKAGIAALSELELRPQIRLSLDCLVEELGHLTTLLGRAKRAMGTLLRQTRHREEQRRLRTHPAVGPTLAMAWLTEVYQPGRFRSAEALTKYVGLAPRVSQTGETRREGPLMKTGQGTLRALLVQAAWRWVAKDERAAAVFERIARNTGKKQKAIVAMARRMAVNLWCMLVRGEDYRRSA

SEQ ID NO: 468923 - protein, 389 aa, unidentified
MGKFSKYVGLDTHKETIAVGVADGAGGKTRYFGEIANTPAAIGKLLKRLSADGELVSYCYEAGPCGYGLYRQITAAGHACTVVAPSLIPTRPGDRVKTDRRDSGLLARLHRAGELTPVWVPGEEQEAMRDLTRAREDMKHLERQSKQRLNAFLLRHGQCYTGKSKWTQAYWRWLERLRFSQAVQQLVLQEYIDSVRQLHSRVSDLEAEMARALPSWELAPVVEALMALRGCRLITAMTVVAELGDISRFDSPRQLMAFLGLVPSENSSGPRQRRGGLTKTGNGHVRRVLIEAAWTYRFPAKKSAPLQRRAECTSPAVQAIAWTAQKRLCARYRHLDHRGLMGVKIAPAIARELCGFIWAIACEMQGKHTTAVAAMDGVDTTDGQWLASA

SEQ ID NO: 468924 - protein, 316 aa, unidentified
MSQPQRFVGIDVAKAQLDIAVRPTAERWAVSNDEAGIATLVAQLQAMAPTLIVLEATGSYQRAVVAALAVAGLPVVVVNPRHARDFAKATGQLAKTDGLDARALAHFADAVRPAPRPLPDAHTEELRALLARRRQLIAMRTAEQNRLDGASPRLRADIQAHITWLDTRVATLDDDLDTTPRASPVWREREALLRSVPGVGPVCTRTLLLDLPELGTLSRQRLAALVGVAPFNRDSGTLRGTRTVWGGRTHVRATLYMSTLVAVRYNPVLKVFYQRLRAAGKAAKVALTACMRKLLTILNAMVKHQKPWHVQEEPIA

SEQ ID NO: 468925 - protein, 392 aa, unidentified
MLFVGIDVASKKHDAAITAHYGEVITEPFTVSNDLEGFKKLRKEILSHTESLDEVHIGIEETGIYSKNISEFLALCGFVVHMINPILTSNSRKSQSLRLTKTDKIDALAICRYVEFNLKRLNSYTPTLYIYDEIKSLSRARIDIQIRLNKAKTEWARLLDLTFPEFKKVYSHQSKWVYKLFSVYSTTDQISRMHTKSLIELIGIQSDRTDAAIHIKKIAKKTIGQTSKTYGFLIKNTLSDIIHYSNQMEELKKEINNLITEHFSNILTIPGVGTITAGLIIGEIGDVTRFNTPSALVAFAGLDPTVYESGEFKGKRVSISKRGSRYLRTAIYTSTRVACVNPLVKDNKFKHKYLKKMAQGKHHGSAICNVCKNMINVIYSLLISGKEFNYNH

SEQ ID NO: 468926 - protein, 391 aa, unidentified
MEARVVNNLPPAAAHDGAVRCLVAIELSKKSWVAAVNTPLSDKISHYKLKPCDWKELLQLINRIRKRVSEELKKPVEVISCYEAGYDGFWLHRLLEAQGVRNHVIDPASLQVDRRARRAKTDGIDVGKLLRSLMAYLRGEPKVWSVVRVPTVIEEDDRRLHRERSRLINERIQHVNRIKGLLAIHGIYDYEPMHPERIQRLERLRTADRHTLPLHLKAEILRELQRLELVLGMIHTIETERDAIASAKSKSQQTTSAKKIQHLVKLKSIGPEFATVLVGEVFYRTFNNRKQIGSYVGLTPSPFQSGSTSRDQGISKAGNTKARTTMIELAWLWLRNQPDSLLSVWFRERVASRKGRIKRIAIVAMARKLLIALWRYLDTGVVPEGAVLKSK

SEQ ID NO: 468927 - protein, 321 aa, unidentified
MRIIGLDIHRAFAEAVAWDDGKLKRLGRVDMRRHLLEAFAKKLTKEDVVVVEATGNAASVAAVIALHVKKVVIANPKQVRIIAHAKIKTDTIDASVLAQLYASGFLPEVWIPDQPTQALRRQVTRRNQIVRQRSRLKNIIQSILHSHLIPSCPHADLCGASGRTWLFHQVLPEDERLAVERHLREFDRLGEDLKVIERDLARSALADDAVKRLMTIPGVDMVVALAIVAAIGEVRRFDRPEKLVSYLGLNPSVRQSGPGPAYHGRITKQGRGHARGMRAACSSRRHGRRPGRQVHCARSFCEYAPAVVSMSPPSRPPASSR

SEQ ID NO: 468928 - protein, 317 aa, unidentified
MEKTPAADRFVGIDVSKSWVDVYVRPDGVAFRCNSDGPGLVELVRRVQPLAPRLIVMEASGGYESLVAVSLAEAGLPVAIVNPRQVRKFAEALGQLAKTDAIDARVIAHFAEAVRPPPRPMPDPMITQLQELLARRRQLVVMINAEKQRFAKAESRITQRSHQAMLRSLEAEQARIDRAIDKLVRQSPLWCAKLDLLTSVPGVGDIVARTLIAELPELGTVDRHQIAALAGVAPFSRDSGRRKGKRFVRAGRVQVRAPVYMACLVAIQHNPPLKTFYRRLRAAGKPTRLALVAVMRKLLTMLNAILHGNQPWAFAHS

SEQ ID NO: 468929 - protein, 363 aa, unidentified
MEYIAFDAHTHYTLASVVRPNGDLVQEERIEHDRGSLREFLERCERGSPVAVETIGNWYWIVDEIEAAGCVPKLVHARKAKLMMGEINKTDRLDARGLNRLQRTGTLPTVWIPPGELRDQRDLPRTRMVLVRQRTELKNRIHATLAKYALHDLEVSDFFGVRGRALLRQRFDLLPPHTAYASQQLLEQVEELDRRVREFEQRIQAVFKPTPAIQLLLTLPGVGLTLGVVIALEVGDVARFASAEKLAAYAGATPRVHASGGKTRFGPSRPDVNRYLKWAFVEAANAICIGRGRAPHCHVSRLYERIARRKGHAKAIGAVARHLAEATFWILRKHEPYREPKASAVSPTGDKRGWPLSSRKLDR

SEQ ID NO: 468930 - protein, 351 aa, unidentified
MLIIGCDFHPGFQQVAIFDNQTGEIEERRWKHREEAEQFYRSLKGQQVRVGMEACGHYPWFERLLAECGIELWLGDAAAIRATVVRKQKTDRRDAEQLLQLLRDGRFPRIWVPSLEERDVRQLLVHRHKQVQARTRVKNQLQAMALSQGVQKKRKLWTQGGRAELEKLELLPYATVRREHLLKQLDQLEGEMAGLNRQVEEEVRRRPEGVKLMTHPGVGPVTALAMVLTLGPAERFRTGKQVASYFGLIPSEHSSGGGQRLGHITKQGSSFLRFLLVEAGQSAARYDRELGRFYRRLAMRKHRGLAKVAVARKLAVRLYLMLREDWTYAQLCQAVVQASPSHSVVEDGSTA

SEQ ID NO: 468931 - protein, 347 aa, unidentified
MLHAGLDLSRKKVDVCLLSERGEQLDQLAVPPDADALRGLARRIEESYRESVCAVIESMTGARFVHDTLEQAGWAVEIADAQKVKGLAPLACKTDTIDSRVLATLSQRDLVPAIWLPGPRVREERELARFRLHLVKHKSALKCRVHSTLINFGKPCPVTDLFGAEGRRLLARLRVPEPWRGNITASVALIDDLEDQITEINRRLKAGHADHRYIPLLMSAPGIGSVLAFTIAAEIGEIERFPSPEKLAGYTGLCPRVNQSGDKDRRGPLTKHGPTYLRWALLEATMHALKHPAYAQRYQRNKRRLGKQRGAKVAQIDIARRLSHAIWHMLSRNQQFAPRGAAFRLAA

SEQ ID NO: 468932 - protein, 355 aa, unidentified
MGGLKHQKEKRSMDHFAGLDVSVKDTSVCIVDGTGKIVREVKVASEPDALLRVLRNPAYRFKRIGLEAGPLSQWLFSALGEANLPVICVETRHMRAVLKAQINKTDRNDARGIAQMMRVGLYRPVHVKTLRSQKLRMLLTHRKLLQSKAIAIENDLRGTLRNFGLKVGIARWTKFEVRIEELVEDVPDLAVLVEPLLVVRRALREQIAVLHRRVLAIVRDDEVCRRLMTIPGVGPVVALTYRATVDVPARFRKSKSVGAVFGLTCSRDQSGERDRPGAISRCGDEMMRTMLYEAAQSMLVRSTRWSWLKAWAMQIAKRRGMKRAIVALARRLAVIMHRIWVDGTEFRWTRQAAAA

SEQ ID NO: 468933 - protein, 388 aa, unidentified
MEEVTDEPLYRDRVCGIDIGKAQMAATIRVPSDSNPARRASETRSFGTTRREVLALADWLRCWQVPAVVMEATSDYRKGPFCRLEAGGFECVLADARQVKNLPGRPKRDPSDSRWLAACFERGAVRPCFVATPEFRIIRLHTRYRRDLTEERTREKQRTEKLLESAGIKLSSVISRLHLVTGRDIMDHLIAGERNPKVLAQLARTAARRKIAELEEALEGAEFFTAEHAALLAMMLARIDRLTAGIDELTTVIERLLAPYEEQLQQAESMPGWQRRAAQDALAETGVDMTRFPTGAHLASWAGRTPVDHQSGTRKGRAKAKKGNRYLAGITGETARYQDLGPDYYERQASIRRQIAHHVGKLGALGFEVTLCRIPEPDPDPAGQTQAA

SEQ ID NO: 468934 - protein, 410 aa, unidentified
MVKENFIYVGIDLHKETHTAVMIDCYNQKLGEITFPNRPADFPKLVTKVKKCNTDAKEVVYGLENAYGYGRPLAVWLIDKRYFVKDVNTAISHRQAKHRGAMYRKSDSDDAEAIALATLNMLDKLPDACPNDAYWSLGQLVHRRDNIMKQRTRLVNQLHEQLCIAYPSYKQFFNDISRPTALYFWEHYPSRKYLKGKSVEDLRTELVPVSHNRCSTKNCEKILDAVASDKVKNNAYQDARDMVTLSIVSDLQHYDSQLAEVDKMLEQMYKMLGCTLTTIPGVNVITAVKILAEIGDIKRFSNANKLAQFAGIAPLHLSSSGKGKDLATKQGNRRLQATIYFLAIQMVQISSKGTPRNPVVRAYYEKRKAEGKTSQQALICISRRLISVIYGMLKNGTEYRMPVVENAGEK

SEQ ID NO: 468935 - protein, 398 aa, unidentified
MTRKNTLKSLPTDTEFRVVGLDLAKSDVSVAAIPVDDNTPSLVDRMTYADLLDWAGKISPTLFAMEPCNGYSLLCLQLENLGHEIKVISGSTVSMWINTHLSGQKTDLNDAIALARLAVSDAELTPIRHKSITEIRIQTVQAVRQQLMSQRSKSIVSFKALAQQWGIPCAAGHRNLKKLRESIEAKVDLITRPVANAMLFLLDAVKSLDRQIGQLNQTLQELVMSDERGRLLQSVLGVGTQISARVITVVGNIERFNSPRSLVAYVGVAPRNFITGHKNLTKKKHGNCPDLSHKGQGKISRRGDKLLRSLFIQGAACLYMQFCKDQLPECQLKRWILKQLARQKPYGKLMVSLAAKLIRIVWAVLTYREKFNIQKAGMTRSMWSEMALETPLNKEVPA

SEQ ID NO: 468936 - protein, 390 aa, unidentified
MRKPKQRKPNDLSRSLAALDVDHTLIAVIEMSLSSWLVAGIVPGVERQPLKKLKTDASALLELLDRWRAEAVRAGHKITRIAVAFEAGRDGFWLARWLKAHGIEAHVIHASSIAVSREHRRAKTDRLDTDLLKRSFLGWLRGERDHCKTVAIPTLEEEDAKRPNRERESLVGEQSRLVNRMKATLVRLGIRGFNPKLKRATGDLEALRTPEGAPIAPNTLAELKCDMERRRFICDQIRKIEQARIERLERAPNTGPNAMVRLLARVIGIGVETAELLVHEVLLRNMRDRRAVARYGGLTGSPDRSGSISREKGIARSGNARVRRGMVQLAWRFLLFQKDSALAQWYRRRTENAPRSRKTMIVALARKLLIALWRLVREGVIPEGIIMRPA

SEQ ID NO: 468937 - protein, 400 aa, unidentified
MTGSQLWAGVDVGKEHHWICVLDTSGTVVLSRRCDNDEATIRAVITEIDALAETVSWTVDLTTAYVTLLLTVLADAGKPVRYLSGRSVWQASSVYRGGEAKTDARDARVIADQSRMRSDLPVLRPDDELIRELQMLTGHRTDLVADRTRTINRLRQQLVAICPGLERLAQISSDRGWVVLLARYQRPKAIRRVGAARLATMLTGAGVRHAESIARAAVTAAKAQTVRLPGEDVAAELVAELAQAVIDLDARIRAVDAEIEARFRRHPLAEVILSLPGMGFRLGAEFLAAVGDPALIGSADQLAAWTGLAPRPRDSGKRTGRLHTPQRYSRRLRRVMYMSALTAVRCDPRSRAYYQRKRAEGKRPVQATICLARRRVDVLYALLRDHRTWQPTVPVTAGAA

SEQ ID NO: 468938 - protein, 415 aa, unidentified
MALKIVYKICCGIDVHKTFVVACIASTNDKGITSYESHRFSTYTSGLKTLLQWLLNRNCKDVCMESTGKNRIPVYNILENDCSIVLAHPKYVKAIRGKKTDKKDAKWIADLFKHDLVVGSFMPPADIRQLRDLMRYRFKLTCFQSSEKNRLQNCLTVSNIQLGNVVSDTFGKSAQAILDKLLENPADTSFDLEPLVYKSLKKKLPELRDAIDGYITPEQVGKLKVIKAHYESLESRKAELEELILALAAPYQQELAILQTAPGIRSDFTAIGIISEIGTNMEAFPSAKHLCSWAGLAPTNNESAGKKKSVRVSKAGCYIKPLLVQCANAVVTSKKHPEIRNRYLRLKKRRGHKKAIIAIARMLLTALYHMLKNGENYNAELYRKSDLPPADWEITVEQAIIIARNQGYKIKSATA

SEQ ID NO: 468939 - protein, 348 aa, unidentified
MSELTRIGVDTSKAVFTLHGVDAADRPILRINLRRAQMVPFFRKLSPTIVALEACGSAHYWARKLTALGHTVRLVPPQYVKPYVKRGKNDRNDAEAICEAAGRPGMHFVPAKTVEQQAAGMVLKARDTLVGQRTALINTVRGHAAEFGIVAAKGAAKVGVLFSAIEQQSDIPPVAKEMFVLLRQQINDINARIAELDVRLNASHKANPVSQRLATIPGVGPITALTLAIEIDPAQFESGRHLAAWAGLTPKEHSTGGKQRLGRISRAGNERLRRLLVAGATAVIQAASKPGSQQMTEWLRALLARKPRKLAATALANKMARIAWKLMTSGQTYRRDATVGVAKAQLKI

SEQ ID NO: 468940 - protein, 477 aa, unidentified
MTTFPLTDHAGPVPIRHQYYAGIDIGYKNHTVAAIPVEAFGGRKPDTWQRAPVCKFSSDASGFEDLQRYLDKRSVDPNDFLVVMEPTGGNYGLSLLFYLLGKSYKVVQVDNSAVGKYQELLAKETKTDPVDARTMARMGFIHEVIGQEFRIREVRQATEAQVALRILVTDYIRVQADVVRRRNQLQQVAAVGFPELKTFFKHSPTSATACAILAAFATPADIVSAGTEQVRRVLLEARAYTLAHHSDDLVALAKATIGVPLSERMRLRQTWLLEQIGTLEAQREQLLAQMEQASASHPYRPLIESLPVRSPIWTASLIAAIGDIAHFETPNEFRAYMGWFPMLDHSGKSANGTKLANRGVRLARRALGQMVFVLLTPRTADNPFRIYHQRLVARGMKPLKAVGHDAAKLATVLYYMLKTDRPYDEARHRRRMKLPQAQAAVVRPLDVPLEVLDAQVIEEQRHGYASDEIPQDEGAPL

SEQ ID NO: 468941 - protein, 339 aa, unidentified
MQITVVGLDIAKHVFQAHAADADGRAVAQVKLRRAQVLDYFRGLPPCLVGLEACATAHHWARELIALGHTVRLMPPAYVKAYVKRNKTDAADAEAIAEALTRPTMRFVPVKSVDQQSMLMLHRVRELLVRQRTMLATALRAHLAEFGIIAPQGIHRIQKLAAQVHDPAVPPPAREALKLLVAQLASTWRQIDEIEKKLVALHRTEAVSRRLASIPGVGPITAMAIASTVPDPTMFRSGREFAAWLGLTPKSHSSGGKDKLGRISKRGDRYIRHLLYIGAGNVIRFAKARAATGEAWIRALQARRPPKVVIIALANKMARIAWALMMRGESFRSPAAAAG

SEQ ID NO: 468942 - protein, 316 aa, unidentified
MVTENTVQGHPFWVGVDVGKENLVAYISTSKKTQTIPNKTQSIKAFLRQIPDATLVLETTGGYETAFITLALETGHTVYRANARRVRAFMESVCIYAKTDAIDAKALAHYGEANVQHLRPFTLPEPDMKELRQWARRRDELVALRTQEINRLQAPDNACLQPGIKKVLKCIEQQIELTEDRTKALVQRSALLQAKIKVLMGVKGVGLVTAVNLLVAMPELGQIDGKQVASLAGLAPFPRDSGKKKGYRRTRGGRIDVRRAIYMAALSASRSNADIKTFYNRLIKNGKRPLQALIASARKLLVILNAKLRDAALETA

SEQ ID NO: 468943 - protein, 350 aa, unidentified
MLIIGCDYHPGFQQIAVVDTETGELQERRLSHREEAEKFYRNLATQGMKVRVGMEASGHARWFERLLAELQLELWIGDAAEIRAKRVRKKKTDREDARHILTLVVEDRFPRIWVPSWDNRDVRQLLWHRHRLVQMRTRIMNQLQAVALNEGLRCKKRLWREQGRQQLESFRLAPWASRRCRDLLELLDRLNPRITELTQVIEQEAEKHPAAQLLMTHPGVGALTALAFVLIIGETQRFGCGKQIASYLGLVPEEDSSGESRRLGHISKQGSGILRFFLVEAAQVTVRSDPEWRNKYFHLAMRRGRKIAKVAMARRLAVRLYWMWRKQWDYQQLKKFGSHAGQPGTGVGVK

SEQ ID NO: 468944 - protein, 377 aa, unidentified
MDYTSTAAGSILHCALELSKNTWLLGIQFPDRPQPSLYPIKGGNTEDLMAKLTAARDRCAKLSGRAPSIVLCYEAGYDAFWLARFLKARGIECLVVDSASMQVNRRARRAKTDRIDVGKLLRGLIAWLRGDHHVWSVVRIPSVDEEDLRRSHRERDYLVHERTAHINRIKGLLFAQGIRGINVKRQYKTLNVDKLVTGDGHPIPPRLASEIVREIARLALVQEQIATLERERDERPTPCTATEKKRAQLMYLNGIGPAISAVMTREVYYRQFDNRRQVAGFLGLAASPYDSGEVERSQGISRGGRGQVRGTMIQAAWLWIKHQPKSTLTRWFLQRTMGQGGRVKRIMIVAVARKLAIALWRFLEHGLVPQGAILSSK

SEQ ID NO: 468945 - protein, 349 aa, unidentified
MTIVEDRPVITGGVDTHADLHVAAALDPLGGLLGVQEFPATATGYAQLLDWLGGFGTIAVAGVEGTGSYGAGLTRHLAAAGIGVVEVDRADRQDRHRQGKSDPLDAVSAARAAQSGRACGAPKGRDGAVEAIRALMVAKRSARHERTQAINQARALIVTGPDELRARFAGHSPAALVEAIAALRPRPGNVPGYATRVALRELGRRAQFLDTQLDRLDELIGPLVTARAPGLLSLYGVGPDTAALLLIAAGDHPGRLRSESSWAHLCGVAPIPASSGKVSRHRLNRGGDRQANHALWRIVITRLSSRPGHPATRAYVTRRTKEGLSKKEIIRCLKRYVAREVYHQLRAGA

SEQ ID NO: 468946 - protein, 331 aa, unidentified
MKNYSDSIGIDVSKSYFDAVIFNLGIHRRFTNDARGFNGLNKWILTQGFRLNDVLVCFEHTGYYSMRLSFYLHEKGIDYSQVHALHLKRSIGFRRGKSDKVDAKDIARYAWLNKEVIILSVPPTPNLIKLQQLKSVRDMFVRQSVALQNQIKSFDVVGDHKVSGSAKKALKAALRNLVKQISKVEQEIRDVIKSDDELRHNYKLCSSIVGIGLVVALEMMIHTQNFTCFDSWRKFAAYCGTVPYPFQSGTSIHGRPRIHPVCDRRMKSLLTMAAISAIRSDPELRIFYQRRLDEGKPKMSVINMVRNKILARIFATVNRGTPYVVLSKHAA

SEQ ID NO: 468947 - protein, 371 aa, unidentified
MKEYSTFIGMDVHKNSIEIAIAQRGRNGEVRHYGKIDGTLEALDKVVRKLVSKGGPLHFDYEAGPCGYEIYRHLTAKGHDCSVVATSRIPKKSGDRIKNDHRDACMLARLDRAGELTPVYVPFAEDEAIRDLTRAREDAKIDEKRSKQRLLSYLLRSGLRYTGKKTWSKAHMRWLSDIKMSHPSQQIVLQEYIDTITERSLRVQRLTDQIRQMLPQWRMFPVVKALQALRGVALIVSATTIAEIGDLKRFENPTELMSYLGLVPSEHSTGEKIRRGSITKSGNGHVRRVLVEAAWAYRLPARVSRVLLKRQEGLSKEVCEISWKAQVRLCARYRRLWAKGKPKQVIVTAIARELCAFMWAIANEIQISAAT

SEQ ID NO: 468948 - protein, 341 aa, unidentified
MRYIGLDVHKDNITACVLTSTGKPKFEKDFIKDSESWNLSELMEYGDKEGFCVMMESGTYAYQPFRFFSDRGVETHVVHAQALKVITQSDKKTDKKDAYTIARMLRLWKRKEIDLQMAFMPTREQCELKDICRYREEVSRKIGDETRRIKSHMSRNCEYLPESFDNFKTQRARNFVRFNFQSDITLMNRLAELERLFRERDSVQKEVESRLPGSREVEILMTIPGVARQTAVQIMSMIVDIDRFDDSEKLCAYFGMVPRVRDSGGKEHHGHMTKNGDRMMRAIMERVTESHVRNCDSSVTQYYKRKCSEMGTKKALITASRKMLSVIFAMLKSGSDFRLAA

SEQ ID NO: 468949 - protein, 320 aa, unidentified
MKFILGIDVAKAKLDVALQLVDGKTRSKVVDNTPQGFAVLSAWLDKYSVSGLHVCMEATGIYWEAVAEFLVDAGHTVSVVNPAQIKAFGAAELVRTKTDRVDAKLIARFCLAQHPEPWHAPSPAIRALRALVARRDALIAMRTQEHNRLLVARETVRAGIETHLAYLEKAIAEIDATLRQKIDDDPGLKVQQGLLDSVPGLGDKTIPVLLSYYGGVSRFTKVREAVAFAGLDPRQHESGSSVRGKPRMSKVGHAPLRRALYMPAMVATTRTVWGRAFRDRLAAAGKPPMLILGAMMRKLVHVAFGVLKSGKPFNPALHIS

SEQ ID NO: 468950 - protein, 349 aa, unidentified
MYYVGVDYHKRYSVATVLDSGGVMLARQRLDNRLDDFRDFLAPYDKAEVEAVVEATRSWGIPVDILEQLADRVVLANPGEVKLIAKARISTDKVDSLSLARLLRMDWVPEAYLRPKANREQQLILRLRCFLVQLRTRVKNRIHDLIDRQDESVREMTTGFSDLFGKKGMTWLRGLELGHPSGKLLGQLLAVYDALDKEVRQSDRLVAELFAVDDDCKLLVKTPGIGVFFAVLIKTEVGSIERFTNSSRFNSYAGVVPSTESSGGKVWHGRIIKQSNCWLRWALVEAVIPATVADAGLRAHYEYYRRTKGSKVAKVITARRIGCIVYRVLKERKPYFEQPVPRRGYRQTG

SEQ ID NO: 468951 - protein, 333 aa, unidentified
MSTLWLGVDMSKADFMAEVVADQEVTLGKFDNETTGFEQLAAQVALLEPAATNTVHLVIEPTGGYELALVAFAYEQGWQVSLPNPKQVRDWAKGRGQRAKTDGQDARILARYGATCQPQPQAPLPCEVSELDSLLKRRRDLEQLMQQEQNRLQELRGRPGIAAPVLDSLAQVLEALQEALCQVEEAIAAHLRHHAHLQQAMTRLLALPGIGPKIVLPLVVLLYRWQTLTNGDGSAKGLTAMVGLDPKTHVSGRSVFRHPAISKMGNAEMRRLLYMGALSAVHGHNPLHIFYERLVGRGKARKLAVVAAARKLLTWAWVIFSRQSTWNPEFHAS

SEQ ID NO: 468952 - protein, 473 aa, unidentified
MKTQRSPKGSAPANRIRPAKDLPVINSHAAGVDISSTDHWVCVPEDSVPAGQSPVRKFGAFTQDLDHLVEWLRECGVTTVAMESTGKYWIAPYEKLEAAGFEVILVNARDIKHVPGRKTDMLDCQWIQLLHSYGLLSASFRPAQDIRRLRVLLRHRSHLVIQLGQEVQHMQGALDEMNIHLHRVVSDLDGDTGFRILDAILGGQRDPEALVLLRDERIRKSTPQEMKAALRGDWQDEQLFILQQARHTYQWVQKQIDQCDERILQLLPSIKCNPVVVAEEDRPPNPVGVSPTKKKKKTKGNAPKYDFTAELMRICGIDLTQVVGLNILSVLMLISEIGVDMSHWRSAKAFASWLGLCPGSKISGGKRLSSRSRRVSNRVSILLRNLAPTIGRTETWLGIFHRRMSRRLGPAGANTATAHKLACLIYHLLKYKEGYIDVDRLVYEEKFRRQRLARLRKQAEELGLEVVAKTNPA

SEQ ID NO: 468953 - protein, 344 aa, unidentified
MNSTTIAIDVAKSVFEVAVSEHPGQVRERQRLSRERFRRFLAERPAATVLMEACGSAHHWARHAQAHGHRAVLVPPHVVRPYVLRNKTDRTDAKGLLEAFRNEDVHPVPVKSETQQALAALHRLRSTWLATRTARINTVRGVLREFGLIIPVGSHHVVPQVRALLEEADSGVPGMLRPALAVAVEEIREIEARIRAVEQQLEAAAAQTLSVGQLRTIPGVGLVTATALVAAVGDVQRFPSARHFASYLGLTPREDSTGPRRRLGAISKRGDTYLRMLLIHGARSVLCHAKAKTAPPPDRLRAWALQVERLRGHNKAAVALANKLARIVWAVWRHGKDYVGTPAV

SEQ ID NO: 468954 - protein, 387 aa, unidentified
MQVIADRPEAPSAIRTNLGAIFASLELSHSTWLITSLSPGSGEKMSKHVVHGGDIAGLLQRFAQLREKAVAQTGRNFPIIVIHEAGLDGFWIDRVLKNEGIESHVVDPASVATSRRRRRAKTDKIDGEALVRTLLAYKRGEPRVCAMVKAPTPEEEDRRRLCRERKVLITERVRHVNRIKGLLFSQGVCEYEPLHRNRRRRLDELRTGDGRPLPKHLKAQISRELDRLELLLEQIKAVETERDALLAAQQIAAPPSAAMLLAIKGIGPDFAAILWSEGLFRHFDNRRQIASYAGLAPTPWKSGSIDREQGVSKAGNPRLRTTLIQLAWLWLRHQPQSALALWFKERVVRNGGRLKKAAIVALARKLLVALWKYVAAGVVIEGAIMKA

SEQ ID NO: 468955 - protein, 395 aa, unidentified
MSPRIEPVAPTGAEFTTLYVSFEISRKSWVVGIKGPASERIGLHTLAAADVKELRILIERQRTKAERSLAGPVRVLCCYEAGYEGFWLARWLKQEMGLETVVLDPASLLVNRKAKQRKTDRIDAKKMVRALLAHDRGDAAVLSRVRVPSVEEEDCKRLLRERQRLVKERTALTNAVKGLLKLHGIFDLEPRTADFDAAFAAATTACGEPFPPRARREIKRIVERLGLVMRQIEAVEAERDAAVRRADADRCSARDAGSAAWADATIAMLSRLKGIGTNDATLLTHEVFYRQFRNRRELAGWAGLTPTPWASGDVQRDQGIGRDGPAWIRAQLLQMAWRWIRFQPGSVLSQWFEARTAGARGRIRRVMIVALARKLLIALWRYANTGLVPTGAHVA

SEQ ID NO: 468956 - protein, 410 aa, unidentified
MELLHRRCCGLDVHKETVVACLRLVADGKVTTEVRTFQTTTADLLRLSEWLAANGCTHVAMEATGVYWKPVWHILDDGEFALVLANAAHVKNVPGRKTDVNDAMWLAELLAHGLIRASFVPDTQTQEMRNLLRTRKQLVREQSSHVLRVQKTLEDANIKLDSVLTDLMGKSGRAMIEALIAGETNPAKLASLAHRRAKASPEEFREALRGRVTKHHRFLLRLHLNQIDALNAAVATIDAQVEANLGPFRTAVEQVISIPGIKNLGAHVIVSEIGIDMSRFPSDAHLISWAGICPRNDESAGKRRSNRLRKGAPWLKTTLVQCAWAAVKKKDSYLQAQFYRIKARRGPKKAIMAVAASILTAIYHMLKDGTMYKDLGRNHFDRRSTDQQKNRLVKRLTELGYAVEIKPLAA

SEQ ID NO: 468957 - protein, 392 aa, unidentified
MIYVGIDVAKDKHDCFAMNSDGEILIEKMTIQNNFDGFSSLFNSISQFNESFENIKVGLEATGHYSNNILNFLTSKGFNVYVINPLQTNLYRKGQSLRKTKTDKLDARFIATMLITENLKPYSNLSYHISELKSLVRHRFRLVQERSKFKTSLSRLITLVFPELEQIVWSTSQNSVLYLLNELPSVKDISECNLKHLTSILEKYSKGKYSRDKAIQIRELARISIGTNSRSLSFELKQVIQTVLFLQSQIDDIDKELKTLIDELNSPIMSIPGISYVSAAFILAEIGDINNFDSPAKLQAFAGLEPSTYQSGKYTATHSVMVKRGSKYLRWALLNATRLVCMRDKTFNEYKNKKLAEGKHYFVALSHTSKKLIRVIYYLLKTNKSYQLSKVA

SEQ ID NO: 468958 - protein, 423 aa, unidentified
MKPYSTSTFTAYVGIDWADKKHDFCLRAMGSDVYESGILEHTPQAIALWAQSLHERFGGPIAVCLELTKGPLVYALQRHDFFVIFPVHPSTLARYRQAFTPSGAKDDPSDARTALDILQRHPEQLEALQPSSQAMRMLSVLVEERRRLTDGVTRITNRLTSTLKQYYPQPLDWFEHRNTAIFCDFLSRWPSLAQVRRARTATLESFFRAHNCRRAYLVNERIAGIRAATPLTEDEAVIRPARMVVETLVAQLRVSLEAIERFDAEIDCVAQSLADYALFASLPGAGPIQTPRLLVAFGEDRSRFANAGEIQRYAGIAPVLERSGNRSWVHWRYACSTFLRQTLVEWAGSTIPRSYWAGLYYHQQRAKGSSHGMAVRALAFKWIRILFKMWKTGTAYDESTYLKALSAHGSSLVTTPMSDANTA

SEQ ID NO: 468959 - protein, 317 aa, unidentified
MERILGVDVSKDYLDTDTLPPTQQRRFTNDPAGTAELVEWARGFRPDRIVFESTGPYQKAAVGALLAAALPAVVVNARQVRDFAKALGILAKTDMIDAAVLARFGQVVPTIVRPLPTPEIQAFQELYDRRGQLVRMLAAEKNHRYAATSAKVIKNIDAHIRYLENQIETLEDRMDQFVQNSEAFKARDEILQSIPGVGPQVSRTLLAYLPELGQGTRQQLSALVGLAPFNDDSGTQSHTRHIRGGRAKVRLGLYQAAVVAIRHCPPMKDFYIRLKARGKASKVALIAVARKLLVLANALVRSMKPYDPANSVCLPSP

SEQ ID NO: 468960 - protein, 342 aa, unidentified
MSEIQYCVGIDIASKTFTATVGQMPWKLVVKPETFENVEDGYQMLLEWFAKHQLPASETIVCMEATGVYCEGLAYFLYAKGYRVAVEPPLKVKRAFKPYGRKNDAVDSEQISEYACRHWDELAWWKPRSDILEQVKALLAVREQFVTQKVAHHNALVALRRKAIRTAFGEQAYERLIEQLKNQVKAIDDEIRRLIESDPTLKEMLLLLLSVPGVGLLLAAHFLILTQYSLDYKVLASFLGIAPNEHSSGTSVYKHDTSRHFGPPIVRKLLYLAACSVCAHRPQFQTYLARKTKEGKPPRLVLNNVENKLVRIMCAVLNSRTAFIPNYHPVQPLALQLTLTGS

SEQ ID NO: 468961 - protein, 345 aa, unidentified
MEYFAAIDVSLELSSVCVVDGTGKIVCEKKVASEPEALAAFFRGSGLILTRIGLEAGPLSQWLHAGLTAAGLPAILIETRHVKAALKAMTVKTDRNDARGMAQLMRMGWFRPVHVKTVPAQEIRALLTGRKLLLGKLRDVELGIRGLLRGFGLKVGQVSKGRYEARIRELTGGHPMLEPVAAAMLQARVSLRAEYGKLHRMLLGIVRTDATCRRLMTVPGVGPVVAVNYKTAVDDPARFRKSKDLGPYFGLTPIKYQSGEADWTGRISKVGDAMVRTALFEAANVMLSRVTRFSTLKAWALRVAKLRGMKRAKVALARKLAVVLHRMWVDGTDFRWRKMPAATAA

SEQ ID NO: 468962 - protein, 350 aa, unidentified
MKIVGCDLHSKWQQIAVFDGETGEISEHKLMNGDGEAARFYGGLAQPALVGVEACGNSQWFLDLLERLGHEVWVGDAAQIRASYVRKQKTDRRDAGHILRLLIEDRLPRLWVPTVEQRDLRQLLMHRHKLVEIRTRVKNGLQHLAMNRGVQKHSRLWSVRGRACLEELPLAGWSAQRREDLLKLLSQLDAQIGSLDAAVEQAARQQEQARLLMTQPGVGPITALAFVLTIGDVRRFQHSNQVASYLGLIPREHSSGGRQKLGAITKQGNRFMRQLLVEAVQNTCRLDEGFRRQYQARCHHKPKAVAKVAAARKLAVRLYWMLRQDVGYPEIARIESSPGVPLTRCKRSRP

SEQ ID NO: 468963 - protein, 353 aa, unidentified
MDSKKYIGMDVHKESISLAVRNDAGKIVMECVIETRANAILDFIHGLRGELQITFEEGTWATWLYDLLKPHVSKLVVCDPRKNSREGNKNDRIDARELSDRLYMNKLSSVYHGGAGVRTFRELARSYLTISKDLEPVMSRVKAIYRSWGIPCAGKQVYAPRHRAEWLAKISEAGVRRRAEFYDQQLDALRPLRHEVRRELLSESKKHPATKLLRQIPWIGPIRAALLIALIQTPQRFRSKRPLWKYSGFGIEMHSSADYCKVQGQLQRSRKQVSVRGLNRDCNHDLKDLFKSAATIASVKPGPFQEFYAALLAQGMRPEMARLTLARKTATIVWTVWKRGVSFDAKYLKPQTA

SEQ ID NO: 468964 - protein, 412 aa, unidentified
MKEKVYVGIDLAKDSSRVAALDTNGEALVKPFSITNSKEGIKKLLSKISGYKPGQIVCGMEISSNYWENMCSYLKGMDVGIILLNPYQVKKYRQAVGAKIKTDSIDAEAIAGLICGRKYESLYISDDTAVEIRELVRIKYGFQRRVKDLKKSVLALLFLVFPEYTRMISRPFSKVSMEILSKYPTSCHMAKISPSRLVKIFRRYQGCNFDLNKAKELISAAKDSFYSGRASKSRGLSITMQLDEIRSLSEKIADIEEEIKSILCPDDPSGGSSSYDILNSIKGVGIGTIAAFLGCVGDVSRFSSADKLVSFIGFYPTIFESGKYKKSNPTIQKAGPKELRYMLYLASVACIKHNSELKKYYYDRVSAGMPVKKAIIKVAVKLARMMYSMLKYGSQYDSSRVFFQPESLKNAA

SEQ ID NO: 468965 - protein, 467 aa, unidentified
MKIYDSAGWEPSSGYTRITSQAVYSLRWNGCLSERKSNMNSLFISVGVDVGSDFSYMSLALPNQTIFGKPFKIVHNNLNSLEKAVQVIREASEVHSLPSRIVMESTGVYHYPLYCYLRDKGFYVVVINPIISKNSTNMDIRKVENDKSSSKKLALIGLKPDLKISVMPSDTVLDLRNLVREYYNLVDCRSAYVNKLRGILKVSFPGYAGIFSKLTVQTSLALLEKYPSAADFLSAKKSSITKIITKTARFGKAYAEAKYQAIIEAAKSAGVFGHFVPSNSTQVRLCVSFIRQYDKEVKDILAAIHKFVAQHDDELFVRQIRLIETIPGAGFLSAVTVICEIGDFSAFKSPKQLFAYFGIDPAVKQSGNFTGTQVKMSKRGSAVARRAIFIVAVVGIGIKCNGTANNPVLRQYYEHKCKSKPKMVALGAVMHKVCNIIFAVLRDNQPFTLISNDEHIRIYQEKLAAAN

SEQ ID NO: 468966 - protein, 316 aa, unidentified
MTHAPVCVGIDVSKARLEVALRPSADRWTVSHDEAGITALVARLGAISPALIVLEATGGLEGALTGALVAAGLPVVVINPRQARDFAKATGQLAKTDAIDVAILAQFAEVVRPPVRPLPDAQTQELAALIARRRQLIEMRTAESNRLGSAAKRVRPGIAAHLRWLDTQVARVDQDLTQAIRQSPVWRARDDLLQSTPGVGPVVTTTLLAELPELGTLTGKQIAALVGVAPLNRDSGLVRGTRTVWGGRASVRAALYMSALVAVRHNPVIKAFYLRLRAAGKAPKVALIACMRKLLTILNAMLKHQTPWRYEPAQLA

SEQ ID NO: 468967 - protein, 345 aa, unidentified
MVVCGTDDQGRVIFEQSVPTTAAALDAVLRPEKRRIKLIGLESGSQAIPLTRSLRRLGYRVAVYNARQSSKFLAIRQNKTDRNDARGLADIARLGRDSVSEVRVKSKECQRLRSMLVTRQKLVRLKVALDGALRSLIRLNGGKLERSANDVARRSKVATQLKLIRKREKIDLSEDVEAMLTLSEALGAFLTSMDSRLSKKAAELPVCRNFLAIPGVGPICALSFYSAIDDPARFKRNADVGPYLGMVPIVRQSGQSTSRRRISKMGDPMTRSYLSTAALVHLRFAKSALSQWGASLAERRGKRQAQIAVGRKLAVLMLAMWKSNEPYDARRGLETSTDAKDLILA

SEQ ID NO: 468968 - protein, 429 aa, unidentified
MTTTYATLWTLLVAIDISKHRHEVLISIPGKKRRRRMTIMNTLEDFQRLAINLASYDLPVRIGFEATGNYHRVLAHHLGQAGFELKLVSSVGLARTREALHNSWDKNDPKDAQVILHMLEIGAVQFFHDPLVTGTADIQELSKTHEIVSRSKTELWHRILTHYLPLYFPEAERFHRNSRTDWFLAFLEKYSTPHMITAMSREAFIADAWKVVGRKVSKERLLSDIYATAVGSVGLPVQPDSDAVRMFRLVLAEGRSLIRQRDIIEARAVELLSDLPDYQLLTTIPGIGPINAMTILAEAGDLRRFRHHRQFLKFCGMDLATVQSGMFRGQSRISKYGNARLRRTLWMAGQTAVLKRTNSFRDKFERYISKDRHNAHLRRKAYTAIAAKMARTVHAVVKHGEPYRPFFEGVSPGGRTSLCSSRGGSSLTS

SEQ ID NO: 468969 - protein, 420 aa, unidentified
MRTLIERGCGLDVHQATIVACLLVGKAGGKVRKEIRSFATTTAGLLQLRDWLMQEGCSHVGMESTGVYWRPVYALLEHEFTVVVGNAQRIKNVPGRKTDVKDCEWIADLLRHGLIPPSVVPERPIRALRDLMRFRRSLVDARTNCRNRIIQVLESANIKLANVASDVFGVSGMAMLKALAAGGKTPGEIADLAKGLLRKKLVQLELALQGSMTDDHQFMLNELLKSLAQDEQRIEAAEQRVDEKLKPYLREHGLLTTIPGVDWAGAAGMIAEHGVNLAPFGTVERFAAWSGSAPGNNQSGGKNRRARARKGNVYLKTILCTAAVSAGRTKTGYLREKYHRIKARSGPGIAAGAVAHKISIAAYHILTTGQPYRDLGADYLDKRSERRTKKHLLQRLERMGYDVTLTPKAPNAETPSCARG

SEQ ID NO: 468970 - protein, 323 aa, unidentified
MALSTLGIDVAKATLAVVLLHATRTYRKEFATTASGHASLLAWIAHHTSGQPVHAAMEATGVYGEAIALALHQAGHTVSVVNPAHIAAYAQSQGTRNKTDAADAALIARYCLKEQPPAWTPPAPEVRELRALVRQRQALVEMRQQEANRLSDRAPPASVRTVLTAHVAFLDAQMVALEQQIDQHIDDHDELRRQRDLMMSIKGLGRRAASDLLGELGDLRSFHNARQLVAYAGLNPREFRSGTSVHRHTRLSKQGNARVRALLSMPALTAIQHNPVVKALRDRLVARGKAKMAAVGAAMRKLLHLMYGVVKHNRAFDPNYAAG

SEQ ID NO: 468971 - protein, 414 aa, unidentified
MTNPLLVGVDVHRQTNTVCLMDRQGQEAGPRFTVDNNSPGTEAFIQRVAQQVLAGHFDAVKIAAEATGWYWFHFLQTLDQDPLLNQWPLELYPFNPRLTANFKKTYVDLDHSDPIDAFVAADRLRLGRDLPAPFHYEGRYFPLRLLTRYRYHLVHNLAREKAYCLACLYLKASEYTRKDKKPFSNLFGAASRAVLQEFASIEEIAAIPFDELVEFIDAKGKRRFPNPTDNARKLHLVAHDSYHLPEALQQPINLILGLTLRHITFLEGQEKRLNTALAQRMEAIPHSLDTIPGFGPVLSGGIISEIGGIERFDYNQAKVAKFAGFKWRKHQSADFQADETRLTRTGNRYLRYYFCEAANAVRRCDAGYAAYYQRKYEEVCKHQHKRAIVLTARKLVRLVVRLLTTNQPYQPRRC

SEQ ID NO: 468972 - protein, 431 aa, unidentified
MSKYLNDLVVGIDVASEFSFASILAPNGSQYKKAFKFFHTADGFNYFLGQIKKAEEELSTKPVFFMESTGVYHLTLFHFLKNNNFQTFVINPLVTNCNKNKDIRKVKNDRNDALSIAKLGKFEDIKVSSDSDLNIFTLKLLVRDYYKLIDTRSGFKKKLSSSLCISFSGYQNVFSNICGLVSINILKTYPYPQAVLSAPKQEIIDILLNSRKGLVWAEKKYSSLIEAAKNALFVSLSSSRLSISITTSISLYEALDDEATNLLSEIESFINSDEMPRSLSKNISLLMSIPGIGYITAITILAEIGGIDKFVTPKQLVAFFGVDPAVNESGKFKGDRVKMSKRGTRLGRRALYAAALASIRTKRNGEATNQVLLKYYQENLKGKKAKVALVAIMHKLINYLFAVLRNQQEYQLRDPKIHEKMFLENNNRQVA

SEQ ID NO: 468973 - protein, 346 aa, unidentified
MQHYVGLDVSLRQTAVCIVDEAGKIKREGVVASDPDAIADFIVNHASHVARIGLETGATSNWLWTELKKKELPVICIDARHAKAALKLQINKNDRNDAVGIARIMQCGWYKEVRVKDLDSHAIKAVLVSRALLVKMKRDLENQIRGLLKNLGLIVGRAKMGTFTARATELIGDKPALTAAVEPLLKAREAVGRQIADLDRKVMHLARNEPQVRRFMTVPGIGPITALCYLATIDDPTRFDKSRNVGAYVGLTTRRYASGEIDRTGRISKCGDALLRSYLYEAANVLLTRVAKWSALKAWGMRIAKSSSLSKAKVAVARKLAVILHRMWIDGTEFNWSTKEASVQAA

SEQ ID NO: 468974 - protein, 322 aa, unidentified
MNTVFYLGIDVAKAKLDCALLLSTGKFKSKVVANSPEGFVGLAQWLKKHDADHARVCMEATGVYWEALAEFLADAGFRISVVNPAQIKAFGGSRLVRTKTDRVDARLIAEFCQAMQPPLWVAPSARERQLRALILRLDALQRMHTQESNRLGVAREAVREGIERHLAWLREEIMAVTKAIAELIDQDPDLRRKRELLDSIPGLGERTISTLLAFYAESARFDNARQCAAFAGLNPRQQLPGSSVHGKTRLSKVGHALLRKALYMPAMVTLYKTTWGRAFRARLSQAGKPPMLIIGAMMRKLIHVAYGVLKSGQPFNPALHGC

SEQ ID NO: 468975 - protein, 427 aa, unidentified
MDFTQNERLKQINEQTLIIGIDIAKHKHVARAIDDRGIDLSKRLIFPNSQEGFKLLLEWAKDLSAQTSRPNLLIGMEPTGHYWMNLAYFLKSHGERPVVVNPMKVKKSKELDDDSPTKNDTKDAKVIAQVMRAGRYHEPTLPEGLYADLREGVKLFDIIQEDLSSIKAQIHNVLDRYFPEFLTVFKKWDGKTALYLLKCGYLPKDIQQKTEDDLLKEVKTSVTKNIGIERMRQLKKAAASSIGLTVGLRMAREELRYLVDQYEVLNARLEALKGELEELVRSVPGAISMMDIKGVGPMTVVGFFAEIGDLSNYRDPRQIIKLAGLNLMMNQSGKHKGQTTITKRGRRRLRTILYQVARPLAFHNKGFKALHNYYKHRRNNPLKGKQSYVALGRKLIKILFAMGTRKCAFSEERMLRDIPHITDVQAA

SEQ ID NO: 468976 - protein, 340 aa, unidentified
METPRHIGIDLHRNQFTCCVRLENGRNYLTEWKLEDLPRFVKKLRPADEIAVEVTGNTRLFYEAVAPSVARVVAVDPNQFKVISHSVKKTDPNDARNLALYLEKDLLPEVRMKDKTQAQLASLTQTRDTLVKLRTALKNKVNNILSAHGINLAKEALSSEKKLNEVLAMRFDPMVKIELEVIVEEIRSLNQRVAKLEKTIADEGSKLEGHKNLTSIKGIGPLTGSILLSVIGDIDDFADEGKLAAYFGIVPRVSNSNETERSGRITKRGSKLGRTALVQCALIAQRYSPYLKRYYEKIKARRGTGKAIIALARKLLGIIYRTLKNKWVFEDFPNFVLAEA

SEQ ID NO: 468977 - protein, 351 aa, unidentified
MKTYYIGADVHKQTTTIAVRQNKKIVHMTTIPTEIDQFIKFLEQFSGRKYLAIEESTLAAWLHCHLHDKVDKLIFCDPRRNRLICDDGDKADPVDAAKLTELLANNSLRQIHHSANQRHLDLKQWTTLYHDRVRDKVRQHLKLQACALQHGIHLSPCFMSDPAQRKAWLKDLPNRSLAGQLCLLFQGFDTTVRQVAQAQVQMVKQARNFPIIQKWQKLPGIGPIRAITLYAYLETPWRFKNKTKLWKYCGLGLDRCQSGIDRKGRPKPARLKLTPRGNRKLKNAMIGAARSIIDKGNNVFQKDYERMVHNGITKSNAQHTLARKVLTVMWGMWKNQRSFDPHLWQAPEALC

SEQ ID NO: 468978 - protein, 442 aa, unidentified
MSELVVLDPRAAFVDVGSEKMHVSIGGGPPQVFGAVTSQLQALRDFLIEHRVRSVAMEATGVYWLPLYSVLEAAGLDVRMVDGRQTRHLPGRKSDMQDCQWGSTLHAHGLLRAGFVPPAHIRRLQDYLRLRGEHVAAAAGHVQHMQKALERMNIKLHDVISSLTGASGLAVVRAILAGERDPAALLALCDVRIRKVKAERVVEALRGNWADEHLFALGQAVQSWDHYQAQIVDCDRRIAEVLAGMPGGDAPAAGAEQPAKRRTRPGVNTPQIDNLRELVQRMCDGKDATTLPAHSEYTVLQLVGEVGTDLTRWPTEKHFASWTGLAPGSAQSGKRRAAVKRRRNRAGQIFCVMARALARSKYIALGGYYRRMAARRGGLVANKALAHKLAILFWRVMVKGMDYVEKGLAHYEAKVLQTRQRLLRKLAKQFGQQLVPIQANPP

SEQ ID NO: 468979 - protein, 405 aa, unidentified
MNAVGIDVSKGKSMVAVMRPFGEVVATPYEVSHTDADLRKLASFLKGLSGETRVVMEYTGKYYQPVAKVLHEEGIFVSVVNALLVYKYGNNSIRKGKTDKLDAVKIANYCLDHWVNLEEYIPVDDVRQMLKTYNRQYGQYMKLKVMLKNNLISLLDETFPGVNSLFTSAPRKTDGHEKWVDFVAKFWHCECVCGLSENVFKERYQKWCKKADYNFSEDKAKTIYAKSSGHVNTLPKTDATRLLIAHAVDQLNTITETLATIQKEMLALSSQLPEYPAVMSLFGVGETLGPQLMAEIGDVRRFERKQSLVAFAGVDAPPYQSGAFEAKKRSISKRGSPRLRKVLFQVMSTVLQHAPPDEPVFQFLDRKRSEGKNYYVYMTAGANKFLRIYYGTIKAYLYQLDSLKQ

SEQ ID NO: 468980 - protein, 315 aa, unidentified
MNKDNRTPAVLGIDVSKEWIDAHLLPSEDTWRIPNDAKELRTWVSQLPDGIAIAVLEATGGLEIQAAVALAQIKVPTAIVNPKQVKAFGQAMGQRAKSDPIDAKLIALFGEKIQPRAKTLPDEDQSQLKELLARRRQLVADKVAEQNRFGSMRSKEAQKSINEHIQWLNKQIDKIDQKLDDTIKKSPMWLAKEQLLKSVPGVGPQTARTMLASMPELGQLNRREIASLAGLAPYTRESGKWKGKRFIGGGRSEIRSALYMAALSSTRRESAFSNFYRSLRDQGKPHKVAITACMRKMLTVMNAVVRDQTPWSECV

SEQ ID NO: 468981 - protein, 408 aa, unidentified
MKTLHPRCAGLDVHSDSVVACARLTVRTKVSHEVRHFSTTTQHLLELGDWMAAQGITHVAMEATGVYWKPIWHILEGRFELVLANAAHIRNVPGRKSDVNDAVWISDLLAHGLIRASFVPPAQIQDVRDLTRTRTQLAREIAQHIQRIQKTLENANIKLTSVISDIVGTSGRRILKAMITGETNPAKLAELGSTRLKCPRAELTAALDGRVTAHHRFLIAHHLRLIEELERHIAAFDARIEELLAPFRNAVAQLITIPGVSRVSAQVILAEIGADMTPFPTAGHLLSWAGFVPRLDESAGKRRSTRVRKGAPWLKPVLVQCAWGAARTKCTYYQAQFFRLKARRGPKKAAIAVAASLLTAAYHMLKDGTFHQELGANYLVKRDKAHIAARLAKRIKDLGYEVSFTATA

SEQ ID NO: 468982 - protein, 396 aa, unidentified
MPQIWAGVDIGKTHHHCVVLDAEGKRLLSRRVLNDESELLALLGDVLDIDEDAVWAVDVADGMATLLINVLLNHEQRLLYIAGLAVNRASAGYRGTGKTDAKDATVIADQARMRRDLTALQPDDEHAIELRVLTNRRADLSVDRTRRINRLRGQLATIFPALERALDLGNVGPLILLTGYQTPAALRRAGHKRLVTWLRNRHVRAADDLAAAALEAAERQHTVLPGEKITAQMIHTLAKEVLDLNGQIAEIGKLIEARFREHELAEVISSMPGIGPLLGAEFLAATAGDMDRYGSADRLASFAGVAPVPRDSGNISGNLHRPRRYHRGLQRVFYTSALISIRSCEASHRFYTRKRAEGKRHTQAVLALARRRVNVLWALIRDGRCFQRELPVTVAA

SEQ ID NO: 468983 - protein, 347 aa, unidentified
MRFYTKQHPFYCGIDLHARTMYVCILDQAGETLVHRNMTATPEALLKVIAPYREQIVLAAECMFTWYWLADLCAEHGIPFVLGHALYMKAIHGGKAKNDKIDAHKIAVLLRGGMLPQAYVYPAEMRATRDLLRRRMHLARKRGELLAHVQNTNSQYNLPAIGKKIAYKANRDGVAERFADPAVQKSIEVDLALIPYYDALLRDVELTIVKTAKHHDANTLYLLQTVPGIGKIVSLVLLYEIHDITRFPRVQDFASYCRLVKCAKESAGKRSGTSGTKIGNAHLKWAFSEAAVLFLRDNPAGQKLLTRLERKHSKGKALTILAHKLARAVYYMLKRQTAFDLETFLQA

SEQ ID NO: 468984 - protein, 345 aa, unidentified
MEHFAGLDVSVKETSVCIVDDTGRIVREVKVESEPEALLAVLKNPAYHFKRIGLEAGPLSQWLFSALAEAELPVICVETRHMHAVLKAQINKTDRNDARGIAQMMRVGLYRPVHVKTLRSQKLRMLLTHRQLLQSKAIAIENDLRGTLRNFGLKVGMVGKMKFEARITELVENRSDLAVLVEPMLIVRRVLREQIVILHRRLLAIVRDDEVCRRLMTVPGVGPVVSLTYRATVDVPARFQKSKSVGAVFGLTCAKYQSGEIDRSGRISRCGDEMMRAMLYEAAQSMLVHSKKWSWLKAWAMQIARRRGMKKAIVALARRLAVIMHRIWVDGTEFRWTRDQAAAPA

SEQ ID NO: 468985 - protein, 321 aa, unidentified
MGTQITGGVDTHLDVHVAAALDDHGGLLGTASFVTTPNGYRELAEWLRSFGDVAVVGVEGTGSYGTGLTRHLQGVGMIVVEVDRPNRQRRRRAGKSDTHDAISAARAAFAGDALGAPKTRDGNVEAIRVLRLARSSAMRDRTRALNQMRSLITTAPDELRDQLRRLTIPRLVRTAAGFRPAGRADVANATRLALKTLARRVLELDDEVRALDDVLEPLVAHTAPQLVEQLGVGTETAGALLVAAGENAHRLRNERAFARLCGAAPLDASSGKQQRHRLSRAGDRQANSALWRIVITRLSYDPDTRAYLRRRCDEGKTGSSR

SEQ ID NO: 468986 - protein, 329 aa, unidentified
MNMKTVIGIDIAKKSFDVCISENSDTFNFENSAKGFDELLNLDLVRKQQVSLFVIEATGNYHRALVDVLELNGFAVAVVNPRLIKNFSRAMGLRSKTDVQDARVIREYGIRMEPPVRQKCDSELLRLKAMVSRRRQLVVSRTMETNRLEAQTDEEIKSDIRRHIQWLTSEIKRIDAVLAERIGKIPMLKEKVKLLREVKGVGPVVMAGLLTQVPELGTLDRRKISALIGLCPYSRDSGNFRGKRTIWGGRSDIRSMLYMAVLSATRYNPEIKAFYENLIARGKVFKVAMTACMRKLITIINAIIRDGEKKNTLGQATLIQRPCLHKMKL

SEQ ID NO: 468987 - protein, 413 aa, unidentified
MEPIYTSCCGLDVHKKSIQACVRRGLGKSEPTQQTVRSFGTMTRDIVALADWLLQQEVTHVAMESTGVYWKPIYNILEGRFTILLVNARHVKNVPGRKTDVKDCQWLAELLQCGLLKGSFIPDRTQREFRDLTRHRAKLVDQRASVVNRVHKVLEDANIKLGSVATDIMGKSGMDMIRALIEGCQDSSEMAELARRQLRGKIPQLRLALEGHVTDHHRFMLSQLIDQLDYLDRQIDLFSQRIEEVSRPFAEAIEEVMRLPGFKRGGAENVIAEIGCNMGQFPSSDHLNSWAGICSGNNRSADKNKGGKTTKGSKWLRNALAQAAWAASNTKNSYFYAQYRRLAGRRGKKRAVIAVAHSLLTVIYHVLKNHVEYKDIGRDYFDKLNSKRIVPYLVNRLKNMGYEVHLAPLQSAA

SEQ ID NO: 468988 - protein, 320 aa, unidentified
MSALSVTVGIDVARAHVDVCVLGTHSDVQRFANDVDGHCALAAALQSMDVGLVVMEATGGYEAALACALQAVGLHVAVVNPRHARDFARSMGRLAKTDAVDARMLAELAAVLMRRDDLARFLRPVADERQQWLAALVTRRRQLLTMLNSERQRLQITPRKLHPSIEVIVAAIKAQLDDLERQMVGHVREHFGELDGLLQSTNGIGPVASATLIAQLPELGRLNRREIAALAGVAPVANDSGNRKGRRRVQGGRFEIRRVLYMATLTAARYNPVIRAFYERLRAAGKLPKVALVACMRKLLTTLNAMVRTGKPWDPSLHRA

SEQ ID NO: 468989 - protein, 356 aa, unidentified
MVQSNKKDFSGQNIAIGIDVHLRTWSVTVLTPSGFMRTHTQKASAKELFEHLNKHYPNGSYHAAYETGFSGFSTYYALTELGIKCTVVHAADVPTTQKEKVSKSDPVDSKKLAKALMRGELESVYIHSKDNLDDRALIRHRATIVKLSGGIKSRIKHLLYNNGVEYPEEYFRGNRHWTRSFIAWLQEDVRLLSGTRVSLDLLIAEILHYRERLLDVNRRLRSLARSDRYAEKYGILMSVPGIGSTIAMSLLTEIDDISRFGNQRQFASFLGLVPMMSSSGDKEYVGEKTFRGNKFLGPKIVEASWIAIRHDAELSAKFGALCARGMKSQEAIIRIARKLSNIIFAVLKSNRRYECR

SEQ ID NO: 468990 - protein, 369 aa, unidentified
MTFFIGVDLHKTQFTVHVRTEEESESLDQIKQYPTSPDGYAEFLARISRYKATGSDVKIGIESTGNTRFFKNQVEKAGAEVTVINTLKFKVINESAKKTDKHDASTISEFLSKDMLPESYLCGKETENIRRLLKSRERLVRSTVGQKNEIHALLVSLGLSDELRSLQSKKGRQRILDTLESNNDYVLEAQSVKLMFEIIERIEESVKIIEKQLVELTKEDEMVNRLLTIRGCGKITAWTIRAYTEDISRFASAKKYAAFCGLVPWVQDSNETIHHGKITKRGPQELRTCFVQLVLGIRRCKDTSNWRMMQRYEYMKTNKGSGKSIVAAARKMAEIVWAMLSDKKDFDAQKMIGKYKPMSLAEEALTAMN

SEQ ID NO: 468991 - protein, 438 aa, unidentified
MSNKVIFNLDDLFISVGIDVGADFSWMSIALPNQQFVGKPYKILHSSIDSLTTAVSKIKEAEELYSLESRIFLESTGIYHYPLFCYLRDKGFNCSVINPIITKNSTNINIRKVHNDRFDSKKAALVGLKPDLKVSLMPSDLALNCRNLCREYYDLMDNRSAYVNKLQGELRMAFPQYLGIFSKVTINTSLTLLETYTSPSAFLEADKQEIINIIKSAARFGLTYAQNKYNAIIQAATDANQFGYIIDSNIKRIRLYISFIRKYDEEINNILESLHELVDANEDADFVKQIHLIETFKGAGFLSAVSIMGEIGDFSAFSKPKQLFAYFGLDPAVKQSGKFEGTKVQMSKRGSAIARRVIHTLTLQSISISRNGEAKNPVLREYYLKKCDSKPKLVAMGAVSHKVCNMIFAILRDNKSFEIITPQEHIKQYNASKCDMAA

SEQ ID NO: 468992 - protein, 408 aa, unidentified
MELTPMHKRVIALDVHQSKITACALIEQEDGSVEADKREFGAFRRDRRALAQWAQEVDPEVVVMESTGVYWKSPFAALEAVGIIAWVVNARHVKAVPGRKTDMADAQWLATLARAGLLRASFIPPAHFRQLRLVARQRQKLVGMCSAEKNRLHKVLVDAGIRINVVVSDVHGSSARAMIKALIAGNPLHEVLDCKGRLRASREELFEALSTDQLSAAHRFVAEEIMAHIEQLELRIQRMDAYLLEGLQAWQPQLNLLQTIPGMDVQGAAMLLVEIGADMSAFGSAERLASWVGMCPGNNESAGKRKSGRIRKGNAWVRRLLCEFAQAAARTRCALKAKFDALAIRKGHKKSIVALAHKMLRIIYAMLDSGAHYQDRSVDYEALSVAKNAPRWIRMLRKHGHMPVPAVA

SEQ ID NO: 468993 - protein, 405 aa, unidentified
MNMNAVGIDVSKRKSMVSILRPGGEVVAKPFEISHLSGDVQSLIDRIHSLDGESRIVMECTGRYHEPIARELVAAGLFVSTINPQLIHDYQDGDSSLRKVKSDKADSLKIARYTLDRWEKLKQYGLMDEIRNQLKTMNRQFDFYMKHKTAMKNNLIALLDQSYPGANTYFDSPAREDGSQKWVDFAATYWHVDCVRKMSLNAFVEHYQKWCRRKKYNFSRAKAEEIHGTAKELVPVLPKDDFTKQILKRATEQLYAVSKTVEQLRTLMNETAATLPEYSVVMAMKGVGPSLGPQLMAEIGDVARFTHRNAITAFAGVDPGVNESGDYSQKSVHASKHGSPVLRKTLFQIMDVLIKTKPQDDPVYLFMDKKRAQGKPYYVYMTAGANKFLRIYYGRVKEYLASLPQ

SEQ ID NO: 468994 - protein, 348 aa, unidentified
MDATTVAVDLAKDVFQVSISPRGGYVATRRRLSRRQFNLFIESLSAGTTVVMEACSMAHYWGRRCEARGAIVRLLPAQYVRPYVHRDKTDRTDADALLEAHRCAAIHAVPIKSAEHQTLQALHRVRQQWQSTRTRRINLLRALVCEHGLVFPTGAVSVQRRLAALIDDSDAAIPALLRTMLRAGLDEIRDLEDHVSMIDRELQRIARAHPVARRLQQIPGVGVITATAFIGAVPHIHGFRRGRQFASWLGLTPLEYSSGHQRSLGHISKRGDCYLRCLLVHGARAVLRVAELRMRQSDPRATAFQRWAATLAARSGRNRAAVAVANKLARFIWAVWTRDVDFAAAVPA

SEQ ID NO: 468995 - protein, 416 aa, unidentified
MNAVGIDVSSRKSTVAVLRPLGEVVCLPFDVTHDIAGLASLVEKLKAIDGETRVVMEHTGRYYEAVAKALHEAGFFVCAVNPLLIKEYGANSLRRVKTDKADAVKIARYALDNWADLRDFTPMDAIRYDLKTLNRQFQLASKQRTASANNLIALLEQSFPGIRKCFDSPVRSDGTQKWVDFAHSFWHVDCVRKQPFAAFCERYRKWCKRHAYLFKLSNAEEVYALAKRAVVLTPKSKVVKVLVQEAANQLISISRSVEVYRAEMDRLAAMLPEYPVVMAMYGVGKSYGPQLMAEIGDVRRFERKQALVAFAGIDPMPNQSGDKNVRSNKSSKRGSPYLRKTLFNVIRTYLQCAPQDEPVFQFLNRKRAEGKPFYVYMLAAANKFLRRYYAKLRDYFASLDTLQPVAPIPTILKAAL

SEQ ID NO: 468996 - protein, 338 aa, unidentified
MTETQYFVGVDIASSTFTVSVGGTSWKVILKPKLFENTEDGFQTFLEWLASHQIFAKQTVICMEATGVYSEGLAYFLFAKNYQVAVQSPLEVKRTFKPNGPKTDAVDSLQIAEYACRHLDKLSFWQPRNDILEQVKALLATREQFVSQNVAHKNALQAIQRKPVRTPFAEQAHSQMIEQFKKQILAMDHEIRRLIESDPTFKEMLLLLLSVPGVGLLLASHMILLTQISLDHKELASYLGIAPHEYSSGSSVFRHTTSRHFGPSAIRKLLYLASCSVRTHQPQFKVYFARKTKAGKPARLVLNNIANRLIKIICAVLRTKTAFIKNYHSVQPLALTAS

SEQ ID NO: 468997 - protein, 354 aa, unidentified
MTRITTIGLDLAKKVFQVHGVDAEGKVIVARQLRRKQVLAFFAKLPPCLVGMEACGSAYYWAREIEKLGHTVRLMPPKYVKAYVKRGKTDAGDAAAICEAVSRPSMTFVPIKSIGQQGLSMLHSVRSKLVSQRTQLVNAVRGHLSELGIVAERGLLGLAELAAVVRDKTDERLPVAARAALLVMVNQIEMVGAEVAKLDTAMRKENKANDLGRRLETIPSVGPVIASAFRARVTKPELFKNGRHLAAWIGIVPENDSTGGKPKQKGLSKKGDRYLRALLVSGAMAVVRQAKMRPERYPWVANLLTRMSAKQAAIALANKNARIAWVVMVRGGVYEAGHRAPVYRGAALPVPAVA

SEQ ID NO: 468998 - protein, 345 aa, unidentified
MKYYVGLDVSLATTAICAVDEDGAIIKEGVAASDPDEIANWLGQLGLAFERVGLETGSTAAWLYSGLRDRGVPAVCIDPRRLRAVTKTMRIKNDRNDARAIAHCMRVGWYSVVHVKSEVSQVVRMLLTNRRTLQSKQIDIENEIRGTLRVFGIKLTGTITAGSFEGRVLELIAKTPHLEAMVRPMLVARAALREQCAVLHKMMLEMVRKSTTCRRLMTIPGVGAIAALTFLTTIDDPARFQRSRDVGAHLGLTPKKYASGETDRNGGISKCGDAPMRAVLYQAALALLMRSKKYSAIRVWGLGIAKRRGLRRAAVAVARKLAVLMHRIWADGTKYRWQREAAIEA

SEQ ID NO: 468999 - protein, 502 aa, unidentified
MALLGTWRRPPAVPAAIPDSECLVLPFVVVAAVGNNQRLEGVMMKIRIGVDIACRSPHHAACADETGAILWSGHRFRTDATELETLWARLPTEVDEVMVVMEPTRNAWVPLAAWFRRQGAVVVLVPTEQSSDLRAYFSKHTKTDRLDAELLARLPVLHPEGLHRAEALGPGDPLKRAVKIRAGLVHRRSTAMARLDSLLEILGPGWVDALGTRMTQTTFKFLAGYANPHQVRRLGAARLARWFQHHSRKAWGPERAAAVIEAATATLALWGNDGLDFEALAADIAAEASIALEVSEQIALLDRRIHDLYLEADPAGIVRSTPGVGDILAGQILGRLGDPARFASLAAARSFSGLVPKRNASGLSDHSGGPTKRGDACLRAALFQAADRARKVDPTLASRYQRLMCDTGRHHNSATCTIAAVLLTRIVACLRNGTAYELHDVDGAPITEAEGRAIVAERYQIPTEVRDARRSISKARSPTRRDERVEKGVARRSETPPVPTPA

SEQ ID NO: 469000 - protein, 397 aa, unidentified
MIAVGIDVSKSKSMVAVLDSYGTVLASPYTVNHDAADMNAFVAYLKSFEEPVTILMEYTGHYHYPVLKKLQDEGLPVCIINPYQMKKYGDVEIHKAKTDKKDALRIATYALEKAYKLTPYSSMEQKYEDLKFLSRQYNQRINLVSKLKVQLLDLLDQTMPGITKILQLKSRNPETCTLLLFVKRFKSFDEITRIGKTRFLSAYAALMKKTSDRYAPNKGLSVYELASGSITTRGDDPYIWSAQEQCINLLAASQNAADETIGQMQNIVETIPEYKVLRAMNGVGDRLGPIILAEIGDIRRFHSGKALNSYAGNDAPPYQSGQFESKNRHISKRGSSALRKACFEVMQALKLSKPQNDPVYLFIVKKEQEGKPYNVAKMAGVNKFLRIYYARAMELYQ

SEQ ID NO: 469001 - protein, 465 aa, unidentified
MSRQHTSSKYQSQSGKTKKRIAAHLEKINLFAAGIDIGSRSHFVAIPEELDDQPIREFNCFTGDLEAMADWLVRCGINTVVMESTGVYWIPAFEILESRGLEVKLVNARHVKNVPGRKSDVLDCQWLQHLHTFGLLRGAFRPDDQMCALRSFMRQRDNLVRYRASHIQHTQKALRQMNLLLDNVVTDITGQTGMTIIRAILSGEHDPQVLASYRDKRCKKSENEIAKSLKGNYRPEHLFALRQSVELYDTYDEKINACDVALEQQLNKFDSAGSPPGSPDSGSSAKRKSRSAPGFDVRSELYRVAGVDLTKIDGIDEKTALKIVSETGLDMSRWSSVKKFTAWLGLCPGTHISGGKVLKRATKRIPSAAACALRMAAFGLMNSRSALGAYCRRMRSRLGAPKAITATAHKLARLYYSMLKHGSDYVDKGQDYYEREYKNRVMKNLKNKASELGFTLVPVEPTMTG

SEQ ID NO: 469002 - protein, 424 aa, unidentified
MNLTQNDRLKQVTSDTLIVGVDIGSQTHFCRAFDWRGFELSRRVFKFSNTGMGFLTFLRWTEEIMNKTEMKKVIVGCEPTGCYWLTFQKFLQAHDVQLVTVNPFTVNRSMELDDNSPEKSDLKDPKTIALLVKDGRFSTSYLPSGVYAEIREASVCRDQIMKQHVRLSNQIQGWLQKFFPEYFECYADWDSTSGLMLLKKAPLPQDILRIGAGGINQIWRDAKVRAAGIKRAQTLVEAAQNSVGLEAGEAARLEIWVLVNDYILKAEQLKRLDEYLEEKVKEVPNVEKLLAIKGVGMSTVIGFIAEVGDIGRFTDPKQIQKLAGLEIVKKSSGKKKGQPRISKRGRRKLRRIMYESAKALMLWNPAFQDVFLYYRNRSKNPLGGMQAKIAVACKAIRVFYVVLQTGCDFDEEKFRKDIIRPEAA

SEQ ID NO: 469003 - protein, 422 aa, unidentified
MDVLIERCAGIDIGKDEVVACVRTPKPGGRGRIKTTRTFATFTASLEAMLEWFAAEGVSAVVMEATGSYWKPVWYLLEERPWELLLVNAHHVKILPGRKSDVLDAEWLAELLEHGLLRGSFVPPKTIRELRDLTRYRKRMIQAHTSECQRIQKTLEDAGIKLDSVASDVLGVSGRAMLAALVRGERDPELLAELARGVLRRKLPALRQALRGRFSEHHALLIGLALEHTAHLEAVITRLDERVDALFASSTSQGDHGGVPFARARDHLDTIPGVGKRAAETIIAEIGVDMSRFPTAAHLASWAGVAPGNNITGGKPGSGTTTKGDVWLIDILTQSAWCAARTRDTYLAAQFWRLARRIGKKKAAIAVAHSILVICWHLLHDDADYDDLGGDYFTRRNTDRQRDRLINQLHNLGYRVTLDKVA

SEQ ID NO: 469004 - protein, 355 aa, unidentified
MKSKNPEDVGEVVVIGVDIGKDTFHLVGFDDAGQRVLRKKIKRLALLSTFEKFPRCVVGMEACMSAHFVSRMLRKLGFEPRIIPAIYVKPFNKGQKNDYNDAETIAEAAMRPNLRTVTEKSQDQLDLQAMHRVRSRLVARRTATINQIRAFLIEQGITVRSGRHRLQSSFEAILENRRDEISPRMRGTLLGLYGDWLWVDERIKAISAEIEEISKSEESSTNIMTIPGIGPAISTAIVAAIGKGEVFDRGRDFAAWLGLVPRQFSTGGRTILGRISKRGNSYLRMLLVQAANVILMRPHRWDALGLGPWLRGVKARMPHNKAAVALANKLARTAWSILRHGTTYTVQGDEALGGI

SEQ ID NO: 469005 - protein, 345 aa, unidentified
MHYVGVDYHKKSTYVTVMDERGRVVKEGQIANTPEALAALLGGTAQGASAVLEAGRNWPVMYDWLDALVDEVTLAHPAKVRVIAEAKVKTDRIDSRMLAHLLRADLIPAAYVPGAVTREQRRRLRQRMFLVRLSTMVKNRIHTLIDRHPELSRQAGGWSDLFGKAGRAWLEQLELPASELQLLRTDLDLLTEIQEHIKAGDRWVAQLARKDARAKLLATLPGIGDFFAVLLAVEIDDVSRFPRPQKLAAYAGLVPSTYASGGYVHHGRITKQGNKWLRWACIEAVYPAIRQDPALRTLYERLKIAKGANVAKVAVAKRLLTIAYRVLSEGRPYRPADEQARLSRR

SEQ ID NO: 469006 - protein, 414 aa, unidentified
MDSMKKCCCGVDVHKSFIIAVIAKFRNGEVTFSKPMRFSTFTKGLREFKECLSLNNCYEICMESTGKYYIPVYRIVSDEQFHVDVVHPKYVKAPKGKKNDKRDAKRIADMYMRDHIAEYSIIPPAEILAIRDITRYRRKTINTMTAEKNRMSNCLTVSCIKLDEVLSDVYGKTGKALIGQIIEHGNCDFDPEPFIDRRVKTPVEKFKEALDGDVTPATLVKMKIIQKRLDSLDKEKTELESTMESLSQDFSRQIDLLVSAPGIDTISAMTIISEIGVDMNAFGSVKRFLSWIGLVPQNDESAGKKKSTRIGKGNHWLKPVIVQCANAAKNSKDHPEIRNKYLALKKRRGYGKAIIAIAKRIMTSVYYMLLRNEEYNPKTCVDHAPARGILSLQSIVNFYNSKGFTVVADNGDIL

SEQ ID NO: 469007 - protein, 339 aa, unidentified
MKLYGGIDLHSNNSVLVLLDELDKVVYEKRLDNRLELILSELKPYRKHITGLAVESTYNWYWLVDGLMEAGYSLHLVNTAAVKQYDGLKYTDDRHDAVHLAHLLRLGILPQGYIYPKEQRAVRDLLRKRMQLVQQQTANILSVGSLLTRLTGCRPTCHHIKQMTDEGVSRMGIEGEWKLALNANLSVVRCLSEQIKMVEKVVLSQVKPEPGFASLLSVAGVGEILGMTIWLETGDIGRFKQVGNYASYCRCVGSQKLSNGKKKGQGNRKNGNKYLAWAFVEAANFARRYYAPVESFYQRKRDRTNAVVATKACAHKLARASYYVLRDQVLFDINRAFST

SEQ ID NO: 469008 - protein, 433 aa, unidentified
MRVLYEHVAGIDVHKDMIKVAIRSPGEKPWTRKTEILEFRTFYGVLQEMARLLRRRGVTHVVMEASGVYTDPVYYALCEQDFAEVAVVNPAHARALRGHKTDAADCRRLAELFECGLLRGSYIPPAELREVRDLTRYRMKTVQARTSEIQRLGKALESAGIKLGSVASDITGKSATAMIDSLIDGERRGAVLADLAIGRMRTAGKLADLSMALTGRFTEHHALLCRLHRDRIAGLDAAVADLDDQIAGRAGRWQRELDLLKTVPGFGDVVAQTWLAEIGPAPHRHFASHEKLASWVTLCPGNNISARKRKHGRTGDAGAYIKPMLIQAAWNAIRTKGRLQARYSRLVRRFGGEKNPAAKKKAITAIAHTLLKIAYQVLKSGQPYQDLGADFYTRRESPAQQHAYLERRLQKLYPGQTIIITISPPPGGPAEAA

SEQ ID NO: 469009 - protein, 425 aa, unidentified
MKVMHDRVAAIDVHKDMVKVAVRVPGAKRGTRKTDVLEFRAFYGVLQEMGRELRRRGVTHVVMEASGVYTDPVYYALTELDFTEVMVINPSHARALKGHKTDAKDAIRLLDLYECGLLSGSYIPAPDLREVRDLARYRMKTVQARTSEIQRLQKTLETAGIKLSSVVSDVTGVSATAMIEALIDGERRGAVLAGLAQGRLRSRQKKADLSMALAGRFTDHHAMMCRLHLDRVRALGEEVAGLDARIAPLVARHAREAELLKTLPGFGDVVVAGWLGAIGPAPHEFFATAGRLASWATVCPGNYMSAKKSKGGRTGDGGAYIKPLLVQAAWAAIRVPGRLQAKFHRLVRKFGGPRNKGAQKRAIIAIAHALLKIAYSVLKTGTPYQDLGADFYTSRESAEARQDYLIRQLQKLHPGCVITITPEAA

SEQ ID NO: 469010 - protein, 315 aa, unidentified
MSPQVFVGIDVSKAHLDVAVLPPERRRRFPNDSPGFAELIAWLGEPEATLIVLEATGGYQVAVTAALSLAGFAVVVANPRQIRDHARSQGRLAKTDKLDADCLADYAAKNKPPVRPLPDEQTRLLQALMARRHQLVEMLTMEKNHLQQASAPLAKPIRKHIQWLEKQLQQLDDELDHQVRGSELWRENDELLRTVPGVGQVTSYTLLADLPELGQVNNKQVAALVGVAPLNRDSGKRKGHRVIWGGRAAVRTALYMATLSALRHNPVIKAFYQRLKKAGKASKVAIVACMRKLLTILNTMLKERQPWQPRLPKTA

SEQ ID NO: 469011 - protein, 408 aa, unidentified
MRTVHERCCGLHVHKKTVVACVLTSISKETRTFGTMTHELLEFVAWLEEERVTHVAMESTGVYWKPVFNLLEGRDFELLVVNARHTKAVPGRKTDVKDAEWLADLLRHGLLRASFVPDRGQRELRELVRYRRTLIHEKTRLITRVQKVLEGANIKLGDVASNVMGLSGRAMLKELAAGNTDSAAMAELAMSNLRPKRQQLAQALEGTVGAHQRFLLHSQIELIEMMEKQIEGINVEVEQRMRPFQAAIDLIDQIPGIAQHGAEQIIAEIGVDMSRFPTPAHFASWARVCPGTNESAGKRRAAGTGVGNPWLRSALIEAVLGAVRAGRAHPNFFAARYRRLAGRRGPKRAQMAIAHSMLIAIYHMLRDGAHFVDLGPEHWDQRHKESVARRSIRRLEQLGYKVTIEAVA

SEQ ID NO: 469012 - protein, 358 aa, unidentified
MAGKVTETAVVGGVDTHKDLHVAAVVDQNNKVLGTQFFSTTRQGYRQMLAWMTSFGALKRIGVECTGTYGSGLLRYLQNAGLEVLEVTAPDRMERRKRGKSDTIDAECAAHAAFSGIRTVTPKTRNGMIESLRVLKTCRKTAISARRVAFQIIHSNIISAPDELREQLRNMTRMQLIRTLGSWRPDASEYRNVTNVYRISLKSLARRYLELHDEIADLDVMIAAIVDELAPELIKRNAIGYESASQLLITAGDNPQRLRSESGFAALCGVSPVPVSSGKTNRYRLNRGGDRAANSALHIIAIGRLRTDDKTKEYVARRVAEGHTKMEAIRCLKRYISREVYTLLRNQNRQINSIPITA

SEQ ID NO: 469013 - protein, 421 aa, unidentified
MAVVMIGVDPHKASHTAVAISAAEEPVGQLRVRASAVQAERLLGWAQAWPERAWAVEGAGGIGHLLAQQLLSAGERVLDVPPKLAARVRLLATGDVNKNDPNDARSVAVAALRSAGVREVRRDDHAAVLKVWSKRHQDLGQARTQVACRLHQVLCELIPGGVPGQITSGQAGQILASITPAGAVEAARWELAAQLTEDLRGIDTRIRQTRKKTAAVVAAAGTSLTGLFGVGPVIAAAVIGDVRHVSRFPDRDHFAAYNGTAPVEVSSGGRKVYRLSRRGNRRLNHAIHMAAVTQIRYRHSPGRAYYDKKLAEGKTGKEALRCLKRQISDAIFACLQADARRAATVAAKSPGGQPGNHSASRAAGSNPGHRRFGQATPGPATHPTAPAAPAAFPLCCHPARAGERVKDRAQPGRAAAPPRRP

SEQ ID NO: 469014 - protein, 366 aa, unidentified
MRFYTNQHPFYCGIDVHARSMYVCIVNHEGEILLHRNMKAAPEPFLKAVAPYRDRLVVAVECIFTWYWLADLCAAEGISFVLGHALSMKAIHGGKAKNDKIDSQKIAALLRGGLLPQAYVYPADMRATRDLLRRRTHLMRKRAALLAHVQNTNSQYNLPEIGKKIAYKANREGVAERFDDAAVQKTIAVDLALITYYDELLRDLELSILTTAKQHDANTLYLLQTVPGIGKILSLVLHYAIHDIDRFPRVQDFASYCRLVKCAKESAGKRLGTSGKKIGNAHLKWAFSEAAVLFLRNNPQGQKYLARLEKKHDKGKALTILAHKLARAVYYMLKRKTAFEMDVFLRALVLRFKNSVMVFGLELWLK

SEQ ID NO: 469015 - protein, 354 aa, unidentified
MPSKADTAVARTIGIDTGKNTHMIGLDEKGAIVLREKVSRTRIAARFVNLPPCLVGIEAGMASHHVARELVALGHEVKQVPPAYSKPFRQGHKNDFRDAHAVAEAVERPSTRCVPIKTDGQLDLQALHRVRSRLIGNRTAVINQIRGFLLEHGIPVRQGYRFLRQQLPQILATRTDVLSPRMIRIVGDLMADWKYLDERIEGVTDEIEALAHADEGCQQLITVPGIGPIISSAMVAAIGNGAAFCKGRDFAAWLGLVPKQMSTGDRTILGRITKRGNRYLRMLFIQGARAVLLRPASWAKHSFGSWLTAATRRLHRNVLTVALANKLARIAWTVLAQGRRYEARVEPRVEPAAA

SEQ ID NO: 469016 - protein, 369 aa, unidentified
MKKEAGMRETITATDRGKLTVGLDVGDRYTQICVLDEDGGILEEGRVATSPRAFRQRFAALPPSRLVLEAGSHSLWAHRLLKEVGHEVIVANPRMLRFIYGNDSKNDRADATYLARVGKLDPGLLHPVTHRREESQAHLVLLRSREVLVHSRTRLISHARGLVKPFGVKLPHCGAHVFATKVREHVPEILLPALGPVIDIIAVLTEQIRELNDKVETLARETYKETALLAQVPGVGTLTSLAYVLTIEDPGRFSRARAVGSYLGLRPRQDESGTLKPQLRITKAGDTFLRHLLVECAHHILSNNSQDTDLKRWGLKLAERGGKAAKKRAAVAVARKLSILLLRLWTTGEIYEPLRGTPRSAEPEIVPSG

SEQ ID NO: 469017 - protein, 382 aa, unidentified
MTKRSSTPADAVLVAIDMFKHRQEVLLERPEGDRRRRMTVMATKADYDRLADDLTIIGKPVIVGFEATGNYHRTLAHRLLSAGFELRLISSVTLARTREALHNGWDKNDSKDAQVILHMLRIGATQRYVDPLAAGINDLQEMSKTHEAISKAKTQTWHRILTHYLPLYFPEIERFAGNSRSDWFLALIERFPTPSSIISIGREAFTEQAWPLIGRKVSKARVVNDIYETASASIALPIDEDSTAITMFRMVVAQARTLIQQRNEIERIAHDALAANRDYQLLRMIPGIGPINALTILAEAGDLRRFSHHRQFLKFCGLDLATCYSGMFVGARSCQSMAMPGCGAHSGWRRRSRSVSATTASAIRWGAMSPGIPTILIAVARR

SEQ ID NO: 469018 - protein, 345 aa, unidentified
MNKVMAGIDLHSNNLVIGIMDMDGKRVASQKLACKLKEVVAFLSPFKKRLEQVAVESTYNWYWLVDGLKELRYPVVLANPAGMEQYSGIKHADDTNDAFFLAELLRLKILPTGHIYKAQLRPVRDLLRRRLTLVHHRTALMLSFKSLYTRTTGQEMTLSQLKELEIKAAQELYDHPANQLIAGMQIKHIEQLTESIEKIEKAVLDCARELPLYTKLTTLPGVGTILGMTITMEVGDIKRFAEAGHFASYCRTVEAKRTSNNKKKAENNSKCGNKYLAWAFVEAANFARRYDEQCRKWSERKAAKRGKVIATKALACKLAKAAWHLMALGTDYDAKRMFGQPATTQ

SEQ ID NO: 469019 - protein, 310 aa, unidentified
MEQVFVGIDVAKAHLDVHVLPAGEAFAVARDGEGLANLVDRLQALSPALIVLEATGGFETIVAAALAGAALPLAVINPRQIRDFTRGAGQLAKTDRLDAAAIALYAERMRPELRPLPDEQTRTLSELVARRRQLIEMMTAERNRRARLSRKHLIKALDRHLALLQKDLSELEQEIDTTIRGTPVWREREELMTSVPGVGPTLARTILADVPEIGTLDRKQIAALIGVAPLNWDSGTYRGRRITWGGRAKVRTALYMSALVASRHNPTLKSFYQRLLRAGKAKKLALVAVMRKLLVILNAIIRDQRPWQNA

SEQ ID NO: 469020 - protein, 334 aa, unidentified
MMFNRTTRQVTVTRMICGVDISSASLAARIGRQGAAASFPNTAEGIHALGAFCQAHQVELVAMEATGGYEKQSFALLSEQGLPVAILNPRAVRQFAQSMGRLEKTDAIDAGMIAWFAEIKNSPPICLSPASQQHLRALVTRLRQLTEVRTAQLNQQRLITEPVVQASFAELLAVVNRQIAELATAIAALLDADPLWRQLDQAFRTIKGVADRTVARLMAEMPEIGTLSNKTISKLAGLAPLANDSGKHQGKRKVRGGRASVREILFIVASVVARHEPDFIAFRERLANAGKPPKVIRIALAHKLLVRLNAKAREVRTQLQITPQHHTIQKPVNA

SEQ ID NO: 469021 - protein, 360 aa, unidentified
MEIVGALDLHRTQITFKWLEMDTGEIRRGRIMPVTRESVREWLGQFSGQFKGRDMHLAVEATTGWRFVVEEMQAAGITPHLAEPADTSALRGPKRHAKTDSKDCDHMVDLLLHDRLPESWIAPTHILEVRTLVRVRKALVAERREWQQRMQAQLFHQGAPRGIELTTDRGRNQIQGLELSPAGRMVMSTGFATLDHLAEQLEPLDAQLISFAKRQRGCKALLKLYGVGHLSAVTTIAELGDCRRFSNSDDAVRYAGLDITVYDSNGKRPPGHLSRQGPEVLRWALYEAAQSAARKTWPDYAYYLKSKDRIHHNRACLAVARKLCRRAYHILKELGDTALQPVEAEIDSAPASSGRVEVAA

SEQ ID NO: 469022 - protein, 362 aa, unidentified
MISVGLYVHVRNSFACAKDAEGRVLARGRCGNTLLEFAELLAPVERAAKARGEPVRVVLETTTNSRAIKRLCDEYGRQAGIELHSEVLDARKLRIIAESVVKCDRRDAAVLCDLARTNLKLPDSFVPDDEVFQLRERLRARADFVRVRTTFKNRVQAALHRRGILRPARLDVFTKQGREYLASLALDDAGRRGLDGCLACIERLDEQVKEATKGLLVEGKRARWAKPFAVLQSIPGVGPITALTILAELGDAARFRSRAAVANYAGLAPIVRESNESRGRGGISHRGSAHLRAALVEAAWAAVGRAPQYADLFTRVAQRRGKQVAITAVARRILEDAWTLWRKEEPFRFLTPTPRSAASAAG

SEQ ID NO: 469023 - protein, 358 aa, unidentified
MRLLKSQTREPSVNQIIRIGMDTSKHIFQLHGVDAAEQAVLRKRLRRKEVLAFFAKLPPTVIGMEACGAAHYWGRELRKLGHEVKLMAPQHVKAYVKRNKNDGRDAEGTCEAMGRPTMQFVPVKTEEQQAALMLAGVRQQLIARRTQLSNAIRGYAAEFGVTAAKGLDKIEPLLARIAQDESLPALARELFAIEGREYAQVQAELKAIEAKLMAWHRANAASRRLAQIPGVGPIGATALVMKTPDPRAFSSGRHFAAWLGLTPKDHSTAGKTRLGKITRAGDEVLRSLLVAGATAVIQQVRRGRGHPSPWLVALLKRKPPKLAAVALANKIARIAWKLMTTGESYDGARMPGASALAA

SEQ ID NO: 469024 - protein, 343 aa, unidentified
MQTITTLGLDIAKSVFQVHGVDADGQVVVRRQLKRRYVLAFFQKLPPCLVGIEACASAHHWSRELQALGHTAKLMPPAYVKPYVKRHKNDAADAEAICEAVARANMRFVATKTPEQQSCLTLHRTRHLLMRQQTSVINAIRSHLAEFGIVAPVGRNGVEQLLGVVADSNDKRLPEVARACVAALGAQLRVLKVQILEFDRMIRAWHRSSEASKRLDQVPGVGPVLATALVASVADPKAFRSGRDFSAWIGLVPKQNSSGGKERLGNISKRGDRYLRSLFTTGALAVIRYAKIHGTRHRPWLTALLARRPTKVAAIALANKLARMAWAMMAKGERYKEPAALAA

SEQ ID NO: 469025 - protein, 429 aa, unidentified
MTRISAGVDVSKNRSTVCIMDQDGKFIMRPFLVWHSTEELDFLADTLKRLNGEVRVIMESTSVYQYPIALQLKERGIFISIVNAYKVKKFANTDFRGGKTDKKDSRTIASYGISYWDKLVEWQIPKDTYFNLDLLNRTYMNAKKHRQIILQELQHYIDCAMPGMDKELHSLNLNTKKDFMLDFVEKFWHRDEIVNMTEAEFTEVFTAWAKEKGYRPGKGKAAKIYAIAKSCIPYYPANPTVKTILQCIVDKLSGVNRTLVTIVTQMIEEAKKLPEYQIVREMPGVGDPLAARFFGSAGDIRRFKNSKTLVAYAGIDSPPDESGDFSSTHRHITKKGSKVFRDTGYEIMMALRAQKRTWEKVRKNPDVYDYMLRKEAEGKPRKVAKIAALNKFLRIVYARIKELYDNMALAERAKTKTRSKTRAKTKVTA

SEQ ID NO: 469026 - protein, 339 aa, unidentified
MTLYAAIDLHATNNVLVVIDDNDALVYKPKRLPNDPAVVLEQLAPFKPQLKAVAVESTFNWYWLGDALQAQGYELALVHTPAVKQYEGLKHGDDDSDAFHLAQLMRLGILPTGHVCPHPVRELRDAMRRREALVQQGTKCVLSLQSMYARILAMRPAIEALDEDAITKAFPRAGDRHAALALWAVRCEIRKQAAQLDRWIVSELKQHSKLTLSKICAIPGIGVVLGPMILLETGPITRFAAVGNYASYCRMVDTRRLSNDKRKGRGNRKSGNGHLCWAYIEAATFAVRYDPTIRRWFDRKLSQVKLRVIAIKAVAHKLARAVYFMLRDDKPFDVDRAFH

SEQ ID NO: 469027 - protein, 341 aa, unidentified
MKKFIRIGVDLAKNYFQVHALVSDVGPAVTRKLRRSKMHEFFSQIEPSLIGMEACGSAHYWARELKAMGHEVLLMPPAYTKPYVKRGKNDAVDADACCEAMSRPGMRFVPVKSAEQQATLMLHKTRELLVKQRTMSVNALRGHLSEFGIIAAKGIGRVDELLDLVESDTTLPNAARASAKVLAQALEGLDKAIDDLEDEITNAQAQNEMTRLLYKVPGIGKIIASVIAASVPDPSVFKSGRDFTAWLGLTPRQNSSGGKQALGAITKQGNRYIRKLLVLGATSLLNVVGKRKGALRDWIVGLLAKKPARLVTVALANKLARILCAMMKTGESFRTEMFAKA

SEQ ID NO: 469028 - protein, 343 aa, unidentified
MQTITTIGLDIAKSVFQVHGVDAAGQVVIRRQLKRRHVLAFFQKLPPCLVGIEACASSHHWSRELQALGHTVRLMPPAYVKPYVKRQKNDMADAEAICEAVTRANMRFVPTKTPEQQSCLMLHRTRHLYIRQQTAVINSIRGHLAEFGIVAPVGRKGVTELLHVVADPSDKRVPEVARACLAALGTQLLSLKQQILEFDRMIMAWHRSNQTSKRLHYIPGVGPMLATALVASVADPRTFRSGRNFSAWIGLVPKQHSSGGKERLGSISKQGDRYLRSLFVAGALAVIRYAKIHGTKHRPWLTALLERRPTKVAAIALANKIARMAWAMMAKGERYKQPVALAR

SEQ ID NO: 469029 - protein, 449 aa, unidentified
MKKLNSVRNGLPVINDHAAGIDIGSRFHVVAVPADLDEQPVRTFRAFTADLECMAQWLADVGVTTVAMESTGVYWIPVYEILESHGLHVVLANARDARAVPGRKTDVNDAQWIQRLHACGLLRASFHPDREIAALRSYLRLRERHLDYSAAHIQHMQKALTHMNIQLHHVVADITGATGMRIIRAIVAGERSEAALAAMRDTRCKSSIETIQSALVGNYQPEHVFALTQALAMYDAYQAQLELCDQQIAHSLLRLSQQNVPPREPLPKPRHRTRQPNALNFDVRTMLYQLVGVDLTQIHGVGPYLALRLVAECGTDLSRWPTAHHFTSWLTLAPGCRISGGKVLSAHTRKTKNRVTAHLRLAAVTVGRTNTALGAFYRRLSARIGKAKAVTATARKIAILFYNAMRFGMDYKDPGADHYEQKYRERVVKGLHRRAAEFGFTLQAVEGVS

SEQ ID NO: 469030 - protein, 405 aa, unidentified
MMLDMEIIFGIDVSKHSSNVAILIDGRTFKEFKITNNRPGYKILDDALNSFRSPKVIFESSGIYSRSIRSFLQRENWNYTEINPLAAKKDMDGFRHNKNDRLDAVSLAMAMAQHHYQSTFKEKAVYGELHDLERTYQEFNEDIVRAKNRLHQKLQLTFPEVEQFISTTDGALYWHVVQQFPHASLVLAIELPALAQFILKATPKNMSEKRAFALARHLHDLASQSAPAVDYNAHAVHSVIYLANEVEHLSGLKADIIEEMTKISSLLAEIPILESIPGFGIKTAVCLLAELGDISRFHSSNAINAYVGIDLIQYQSGDFEMMQHIRKRGNPYARKILFKAVLNMMSVAKYHPSNISIFYQRKKQSSSESHTKKIAIAAMGRLIRTIYHLIKNNELYDSAQFSPEK

SEQ ID NO: 469031 - protein, 310 aa, unidentified
MNTQDHNEINIGIDTGQAMLDIYVRPLGEYQSFENNAEGIRAAIRFIRKFKPTRVLIEATGRLEMAFFCVAHKTGLPVCVCNPIQVRKFAQSCGRLAKTDKLDAQDIAYYGEIMKPNLSRLKPAKLRLLSDLLTVRGQCLDMSTMQKNRLQRMPKTVPKPIRNVLKSITKEVARIDQQLDQLVAEIPHYQARVDQLTSAKGVGKVLAYTLISDLPELGNLNRKEIAALVGVAPMNRDSGKHKGKRKIQAGRRKVRTVLFVSMLSAIQCHPKLKPMYQRLVAAGKPKKVAIVACMRKQLVILNTMVKNGTY

SEQ ID NO: 469032 - protein, 387 aa, unidentified
MNDLTVERSPAANDCDPARIFVAIELSKKSWLVAVLTPLSDKIGVHTLPAGDGDALLKLVARVRGRVEAALGRSVEVASCYEAGYDGFWLDRLLQAHGVRNHVFDPASLLVSRRARRAKTDRIDVQGLLRALMAHLRGEPKVVSVVRVPSAAQEDARRLHRERHRLIGERVQHVNRIKGLLATQGIYDYEPLRRDRHARLAELRTGDGRALAPRLAAEIGRGLARLELALDLSGGIEAERDAIAAGRAEGHPHADKIERLVQLKSIGPEFATVLVGEVFHRSFANRRQVASYVGLDPSPFSSGGTARDQGIAKAGNPKARTTMIELAWVWLRHQGDSALSRWFRERVGALKGRPRRIAIVALARKLLIALWRYVETGLVPDGAVLKA

SEQ ID NO: 469033 - protein, 409 aa, unidentified
MDVIVERPGALDVHKEQVTACVRASDEGERRVAHVEQFKTTVRGLLVLRDWLKAHGVTQVTMEATGVYWKPVFHVLEDDFELVLVNARHVKQVPGRKTDVCDAAWLCQLAEAGLLRASFVPPKPIRALRLLTRYRKAQIGERQREANRLHKALEDTGIKLDCVASDILGVSGRAMLEALTCGTTDPSVLADLARGRLRAKIPALREALEGRFEPVHALLIGAILAHLDFLDEQIERLSDAIEVQLAPFGPAVELVCTIPGVAQRSAENMLAEIGLDMSVFPSAAHLASWAGQCPGNHESAGKRRSGHTRKGSKWLNEALKNAAMAAVRTNDSYLQALYLRLRPRVGHARAIGAVKHSIICACWHMLSTGEVYRDLGGDYFRRRDPERQTRRLIAQLERLGHAVTLQEVA

SEQ ID NO: 469034 - protein, 381 aa, unidentified
MTTTATHNAHDTTPGRALFVAFELSEKTWKLGFTTGHGQKPRERSIAARNQTRVLQEVAQAKRRFGLPETAPVFSCYEAGREGFWLHRFLEAQGIPNHVVDSSSIEVNRRKRRAKSDALDVRKLLSMLMRYAHGARDVWRVVRVPSVEAEDQRHLHRDLATLKQERASTTPRLKGLLSSQGVRLTSVNKLPEQLEALRLWDGSPLPSGLRRRVLRVYAHHQFLSEQIAALEAERRARLQSAHDASIEKVHQLMHLRGIGINGAWLLVMEFFGWRALKPRREVGGLAGLTPTPYQSGESAREQGITKSGNRHVRWMTTELAWSWLRYQPESALSCWFRERFGGGGKRMRRIGIVAVARKLLIALWRFLETGVIPQGAELKAA

SEQ ID NO: 469035 - protein, 412 aa, unidentified
MELLHRRCCGLDVHKETVVACLRLVSDGKVTTEVRTFQTTTADLLRLSEWLAANECTHVAMEATGVYWKPVWRILDDGEFALVLANAAHVKNVPGRKTDVNDAMWLAELLAHGLIRASFVPDAQTQEMRNLLRTRKQLVREQSSHVLRVQKTLEDANIKLDSVLTDLMGKSGRAIIEALIAGETNPVKLAGLADRRVKASFEEFREALRGRVTRHHRFLLRLHLNQIDALDAAMATLDAQVEANLGPFRTAVELIGSIPGIKNLGAHVIVSEIGIDMSRFPSAAHLISWACICPRNDESAGKRRSNRARKGGTWLKTTLVQCAWAAVKKKDSYLQAQFYRIKARRGPKKAIMAVVASILTAIYHMLKDGTMYKDLGRNHFDRRSSDQQKNRLVKRLVDLGYAVEIKPLAATA

SEQ ID NO: 469036 - protein, 366 aa, unidentified
MHLMETICNDPQVCRIVDLPVYYELETNNGNRDYRIQIGGHYMNYNTVYVGMDVHKESFTLCSCKYEDEKASHYQRTPASYKNVLRYLAFLRTIYGEDTRFVCGYEAGCLGYSLYHQLENFNVECVILAPTTMLEQRSKRRIKTDKRDAEIIARSLAQHNYSPVHIPTETDNQTKEFIRMRDDHKAELKKIKQQILSFCLRQGYQYDGSGNWTAKHVKWLRSLKPAGLYKEILDEYLLTYTILTDKLNRLDQRIEELASKEEYKESVSKLTCFLGIKTHTALSVIVEVGDFQRFVSARKFAGYLGLVPGQHSSGDDRNGLGITKAGNTHVRRLLVESAQSYTRGKIGYKSRVLRSRQAGNSETALL

SEQ ID NO: 469037 - protein, 340 aa, unidentified
MKKVSTIGLDLAKNVFQAHGADASGDVIFRKKLRRAQVLEFFATQPACTVAMEACGGSHFWGREIGNYGHRVRLIPPAYVKPFVKRQKNDAADAEAICEAAQRPTMRFVAVKSEAAQGAAVVFRTRDMLVRQRTQIINALRGHLAEFGLIVAQGPAHVAKLIMAVQDPKQPLPEAARPILCVLVDMLNLLDQRIKLLDIAIARRAKEDEVARRLMSIPGVGPVIATAVAALAPPAETFKRGRDFAAWLGLTPLQHSTGGKQRLGATSKMGERTLRRLLIIGASSVVRWAARKGAPAGSWLASMIARKPAMLVRVALANKMARVIWALMAKGGTYRAPVVA

SEQ ID NO: 469038 - protein, 345 aa, unidentified
MDQISRIGMDTSKHIFQLHGVNAAEVPVLRKKLRRKEMVAFFQKLAPTVIAIEACGASHHWARLLQSFGHSVKLIAPQLVKPYVKRGKNDAADAEALCEAMSRPTMRFVPVKTAEQQAALMLVGVRDRLIRNRTQLSNAIRGYAAEFGLTAAKGLAHLVVLLDRIQADESLPARARELFAMQATEYTQLQAQIDEVDAKLMACHRADECSRRLAKIPSVGPIGAMLLRMKTPEPELFRSGRQFAAWIGLTPKDHSTAGKVRLGGITRAGDEGLRSVLVAGATAVIQQARRGGRASPWLAELLKRKSPKLAAVALANKTARIAWKMMMTGENYAAKAAPAVLAGAA

SEQ ID NO: 469039 - protein, 392 aa, unidentified
MLFVGIDIAKRNHEAAVIDQQGHVVRKPMRFANSQLGYNKFMDMVRNQGEPVVFGMEATGHYWLTLYTHLRNDGCTVHVINPIQSDALRGMYIRKTKNDAVDAVIIADVIRFGRYCETSVEPGDLQAMRELCRQRFYIIDMASDLKRKVIALLDQVFPEYEKLFSDTFGASSMELLARYTTPEEMLSVDSGKLAELLEQASRGRLGEAKAQEIQAAARNSFGLVMASNSFALIIRQYIEQIRSLEASVDAFDAEIARLLAGFDTQLTTITGIGPTLAAVILSEIGGDISRFPSAVKLAAFAGVDPTVKQSGDFNGTRMKMSKRGSPYLRRAIWLASTVAAFKDPAIHALYERKRAEGKDHMTTIGHVCRKMVSIIFAVLRDNSPYVPAQLPD

SEQ ID NO: 469040 - protein, 339 aa, unidentified
MVYVGLDVSVGRTAVCIMDAAGHVIREQSVASTPEAIATVIRAHGVPVERVGLEAGVNSAWLARGLLEAELPAIVIDATHAAAALKTGFRNKTDKNDARGLADLMRVNKFRAVWVKSPAAQRDRALLTVREQLRRQSLDARNTIWSILQVEGLKPPKLTSPTFQALVVQALEDEVLAPLLRPLVAVAEHLDREVAGLDKVIAARAKASAACQRLMQVPGVGPLVALTYAAGVDDPARFRDSRTVGAHFGLTPRRFQSGTMDWSGGISRAGDAGVRRALYQAANVLIHHSRGWCALKSWAVRLAKRRGLGKAKVALARKLAVVLHRIWTTGEDYRLKAAA

SEQ ID NO: 469041 - protein, 422 aa, unidentified
MKYARIHVLPETPPGGLTAGIDWGSADHAVCVVDAAGQVPARFTVAHDRAGIGKLIAGLRAAGVSEAAIERGDGVLVEALLEAGLTLVVITSRQMKNLRSRYGSAGAKDDRFDAFVLADVLRTDRARLRPLAVDMPATAALRAVVRARRDLVAHRIAACNQLRAHLAAVFPGAVGLFAALDSQISLAFLARFPTQDAVDQVSEDDLAAWLGTLPRRGNAPRPGQLHARLHSAARGTAGADAAARAAITSALVATLITLAAQIKALEAEIAAQLAAHPDAHIFTSLPRAGTVRAARLLAETGDCRARFPDPESLAGLAGVAPVTRQSGKHISVGFRWAVNRQLRDAVCDFAGDSRHASCWAAAIYDAARARGKDHPHAVRILARAWIYVIWRCWQDGTAYDPAKHNALQRVQAEAAAGSGADR

SEQ ID NO: 469042 - protein, 355 aa, unidentified
MTFVGLDLHKRYITACALDASGTVVAEAKRLPATLDALGAFLAALVGPVTVAMEATLYWAWLTERLEAASCTVQVAHAYQVKLIWQARSKTDPIDARKLAELLRTHLLPTIWVADAATRARRQLLRGRAFLVRQRTQLKNRIHGHLTAENHACPMSDLYGKAGRAWLTSVALSPALREQVDVLLRLVDTLSQEIHALDRLVKRAARGNAVAAQLQSLPGVGPFGALMLEAEIGPIARFRSSHELAAYAGLVPSTHSSGGRTTHGGVGPAGNRWLKWILIEIVQTLKLAPGPVGTYYQRLLRAKGKAKATVAAARKLCCYLYWMLKEGWSYAEWLQQHDRSPSSEVRPVQRMGAMA

SEQ ID NO: 469043 - protein, 347 aa, unidentified
MRGAVHMQITTIGLDIAKNVFQIHGIDAAEKVIVRKQLRRGQVTAFFEALAPCLVGMEACATSHHWARELTKLGHEVRLMPAKDVKAYVKRNKNDAADAEAICEAVRRPTMRFVRIKSAEQQGQLMLHRARDLLMRQRTQVINALRAHLAEFGITAAQGREGIKELLAIVAQEEGSRLPSDAHASLTVLATQLQAVQTMIGSLEKRIVAQHRSNEASKRLETIPGIGVIGATTIAAVVPDPRVFRSGRDFAAWIGIVPRQDSTGGKQKLGPISKQGDQYLRRILIVGAHAVLRRARQQPETYPWLTQLLARRPFKVVAVALANKMARIAWALLAKGGTYRAPQLVAA

SEQ ID NO: 469044 - protein, 339 aa, unidentified
MIIQSEIIVQESKPLFAGIDVGAEELILVIRKNGIPHKAQKFANNPADRARLVKKLANLPGIIVCLEATGVYHFDLSIALHDAGVALMVVNPKAFHNFAKVLMKNSKTDAVDAETLAQYAERMDFVAWTRPSDEKIALRSFARRIDALTRQKAAARNNLHALSASQETPKAVLRDVKLAVSQLEKRIDRLSNEALALIGKHAELERVFRLLTSIKGIAKTSAIALMGELLLLPPGLSHREWVKFAGLDPRAFDSGKSVHKQARLSKAGNRHIRSALYMPALSAKQHDPHVKAYFQHLVDNGKKPLQAVCAVMRKLLHAIHGMLKDNTPFDNTRFYAIPA

SEQ ID NO: 469045 - protein, 345 aa, unidentified
MLTNSLKIIRRFTVLNCIGIDVSKATINVHIPKSNQDLVLDNNLKSFKSLFSKLKKIYKKEIENIIFIFEPTGSYSEALRKYCAEKQIKCFIINPKQFSNYAKALGVEIKNDVEDARVLSQALPLAKDGQVKVPVFNEDVEHIKELMSYYKFNKKQTTQQKNHLESLTSKDGDKFSIKELKKSIEESIKKEHKIIEQVQTLIDSTDEYKVAYANITSIKGVGQIAGIALLHLFLKYPEANQRQITSLVGLNPIYRQSGTSVQSGYRIAKTGAGLYRGVLFMATLSAIQYDKNFKAVYNRLKLKGKHSTSAQIAVMRKIILTAHSLYKNNKEYDENFNSQEDSKMQ

SEQ ID NO: 469046 - protein, 403 aa, unidentified
MIPLVRQFHRYPRPGRDARSGTFIAQFAVNEAIAEADTLYGMARPSSAPETSVFRQPIRMERVMQIEVLGIDLGKNSCSMVGLDGRGAVVLRRRMRRESIIKQLAKLPACVVGMEACCGAHHLGRVLRAQGHKVRLMSPEYVRPYVKSQKNDDRDAEAIAEAATRPTMRFVDLKSQEQLDMQTLHRARDRLVGERTALINQLRAILLERGVTVAQGRRQLERHLTNADALDDLSDRMRLLIEDMRAQWSELDRRIAQMDAELAEWARNEEAARRLMTIPGIGVLNATALIAAVGSAESFPRGRDLAAWLGLVPRQVTTGGRPRLLGISKRGNKYLRKLLIHGARAALPTLLDSPTPLGAWLRGLIARMHKNAAVVALANKLARMAWAVLRHAEPFRLNASVVS

SEQ ID NO: 469047 - protein, 351 aa, unidentified
MMLIGVDYHPSFQTIAFFVEETGECGEQELNHSEGQAEKFYRDLKQRGISVRVGMEATGYSRWFERLLAELGFELWIGDPAEIKAKRVKKQKFDREDARLLLRLLRENNFPQIWVPDPENRDLRQLLWHRHRLVQMRTRIMNQLHALAMNEGYRWKKKLFSEPGRAQLEKLALAPWASRRRQELLELLDRLNPTIEELSAAVEREVRKRPEAMRLMTHPGVGPLTALAYVLIIGTPARFQRGKQIGTYVGMIPCEESSARKQRLGHISKQGSSLLRFLLVEAAQAAARIHPDWRRRYMHLAMRRHKSIAKVAMGRRLAVRLYWMWRNGCEYSPSLEFGSYAGQLGIGNGVK

SEQ ID NO: 469048 - protein, 424 aa, unidentified
MKVTYQTCCGVDVHKSFLVATIVKTTGSIEPSYQKKRFSTFNNSILEFKQWLLDNDCHDVCMESTGKYWVPVFNLLEDDINVVIANPKWVKAVKGNKDDSKDSKWIGDLFRLGLVKGSYIPCKKVRILREYTRYRYKLVSCRSSEKNRYQNALTVCNVALDSVVSDIFGKSSMSIIDYLLEQSGTSINHEEIASKLLRNLKSKEDAVIESVEGYQMTDAQKYRMRLVRAHMDYITAEINDVDKMIENMISSNPDFENAVQLLCTIPGVKRDSAITIISEIGTDMSQFSSSKRLCCWAGLTPGSNESAGKKKSVRITRAGVYLKPALVQCAHAAVKSDKSPYYKKKYEFLVKRRGKKRAIIAIARMLLTAIYQMLSTGEQWNPSDLFKIDMPEALVEKQKAKAIKQAKKLLQREGLLPPDKSLAS

SEQ ID NO: 469049 - protein, 576 aa, unidentified
MRQSNAGQGLKVTHCRIDAITVVWGLKEQKNCLFFPALPFGLRIDHPLTRKVLAMPRPRNARPSRSRRKGFVLQKASGQLVPRVQQVGPEHFGIVAIDCAKARSRYFLADFYGRMLLEPTTLPHSRGDFQAAIDRLRQAALQHDLKDVVIAIERTGEYHRPVQLAFRQAGYETRLVHPFTTKQYRQPADPGNKTDDTDLAAIFRAATQGFGLAEPAWPDDYLTIQLLRRHRRDLVDKNAILQCQIRELLHAAMPGYAECFCHFWDDSPAPMIFARHTTSPEAVRQAGLAGLQQIAAQAQLRCRRDTLHKILAWAEQAPPGHAHALHLRRILSTLDDDRLAKTQQILGLERSLAPLVVRTPYVLLLAIPGVNIVTVADLAGELGPIHLYVNANAITGRAALMPSRYQSDQVDYANGPLRRRGNRRLRAVLMQTANNLVQSNHYFAARAERWSRTGKDPRWIRVKVAKSFSRLAFAMVAGRQLFPHPCRQPHHYVLGKLLEFHSEHGTEPEAMRRDLEAVVEQLPGRSRAAEARPLQQQLDQLAHRRGPQPLAQILPLVLARLAGRMVQSTPHESAGP

SEQ ID NO: 469050 - protein, 364 aa, unidentified
MERVKRRFVGIDLGKREYTMAIIGKEGKVSLHRGKTSIAGRAALCQKLHRGDKIALEAGNLAFIIAKEIQDKVGSEVRVLHTAKVRIIWDSITKTDKEDAMKLAHLVEEQPDRKLPVVPLPSEQEMERRKTLSSYRREVQSRTKLINTLHALFVHQGHTTIVRKDVAKPERREQAIEVLRGQEREDAAYLLKHLALHEQRLGELSRKIEDEVEADENMKLLQSVAGVGPVVSYAFVAHVGDGNRFSSGAQVSNFIGFVPRLDFSGTIKRSGGISKRGNGYLRCLLVQAAWSAVRSKSGGALKERYIYLTAFQGASKKKTIVSIARRLSEIMYSVLKNKTIYEPRTWNRPKNNKIASMVELAMGA

SEQ ID NO: 469051 - protein, 346 aa, unidentified
MLIVGCDYHPRWQQVAWLDPETGETGEQKLVNGNGEAERWYGQLPVPSLIGLESTGNSQWFIEMLQRLGHEVWIGDAGAIRASYVRRQKNDRRDAAHVLKLLQEGRFPRLWVPNGEQRDVRQLLIHRHKLVQIRARVKNGLQHLAMNQGMQKKAQLWSVEGQQALRALPLAGWAKCRRKDLLELLAYLDQQIVPLDMAAKQAAQQHPQARLLLTQPGVGPITALAFAVTIGDASRFRRGKQVASYLGLIPREHSSGGRQRLGSISKQGNRFLRMLLVEAAQSVVRLDEGFRKQYQHRCHSKAKGVAKVAAARKLAVRLYWMLRTETPYPEIVHIESSPRVPLAGKS

SEQ ID NO: 469052 - protein, 332 aa, unidentified
MNKKIIAQNEEIVIGVDVSDAKHNAAAVRVRGGELIRDDKVNPDFGSWQKYLEKFPGCEVTVVYESGPQGYNLCDAIKALGRKAAVVAPVKHVGVKTDKRDARAIARDWLAGSAKEVTVPGVQKREARQVLRSRGQLVKELVRIKNRRSALIRFHGLTGRLAPWRKGLISAHLQFCIASLDASEAFFKEQIRLFDKHIEQIAAESQWRPTVEKLTRIKGIGTLTALEVALEVADISKFKSSDAFASYTGLCPGEWSSGNTRRQGHITRRGPGRLRGALVRSAWILIRYDEAEKKRFQNLAARAGKKRAIVAIARRLAVTIWWTLKESDEKAA

SEQ ID NO: 469053 - protein, 487 aa, unidentified
MNSIFRKRNPDVQNLFESAGRPEKVMCIPFDYAKKTHTAMVCNGRGDCLRSAFNVENNRNGIDYLLSIVKGLCRKHTINIKHVFFGGEDGGAYSFNFIHALVSRGFLVLGINANEAKKERENTTASSDLIDTVGVAGSMIKMRGRTIGEATAQVSSIRRLRRQRGSLLKAHSACAHRVHRVVDELFPGFLDVELSGVLPFGKASLWLMDDNFSAASILARQHPALVRHLRELQLRDPEGAADKLKQLARIALPPPECMIPALRRSLHEEMAVYGLLESSMRSLDTDIAKLLAHTPGAMLTTLPGIGLRWAPGLYAELGDPLRRRNVHSMAALGGIVPRSKQTGGPEKPAVTGHRGKNCSAFLKHILMSGAVSISQYGHPEMRQAYQTDKDMGRDARAHMAQRLLRASLYLIDNQSFFLPPSLHRGGTRDQLREYYAQTWPKVLVKWRDSGAIKQAVAEGSPLRQWRDMAQELYDLELDLKSPQTGRK

SEQ ID NO: 469054 - protein, 431 aa, unidentified
MQLKQRARKLALVRGEPTVVVGIDIAKRKHWAWVVDGRTEVPVGSPFHFQNSREGFDRLLGKIARAKEKAGATRVVVGMEPTGHYWKPLAWYLQQVGFTVVIVNPAHVKASKELDDNSPTKNDRKDAWLNAQLVLQGRFSVPYLPDGVYAELRILTQARQQHRRKLNAALNQLQALLDEYFPEYTEVFADPLGQASLYVLQYRPFPQDVLAVPVTQLAAELRAASNRRVGLRRAQDLQEAARRSIGVPYGLDAARLQLRQILQEVIFWKERLAETEAAMAEALEKTGLAQYLLSVPGVGVVTAAAFLGEVGDLRRYADWRQLRKLAGYNLTENTSGQRDRSRTPISKRGRPGLRHVLYQMAMTAAAKNREFRALYEHFRTRQQNPLKGKQALVALACKLLRVLFTLVRKQCSYDPARALGAWRAEQLGLAA

SEQ ID NO: 469055 - protein, 428 aa, unidentified
MGRGFAQLTVAGLDDGGGGRGFAQLTVAGRGERRSRDNASRFTQLPVATRDDNHIGFLPRVRIHWGSGRLPAGAAQGWLMLNERSPNMRKTFFCGVDLHSNNAMYVITDQEDQPVLKKRLPNQLPTVLESLEPFRKQLKVVAVESTYNWYWLVDGLMDHGYPVVLAHPSAIDQYDGIKEADDLTDAAFLARLARLEILPTGYIYPREDRPVRDLLRRRTLLVRQRTAIILSLQNLALRQTGQRMGWRTIRDLSAEDRTELLGDHDCLAFVTTEQADLIQLLQEKIKRFEKKVLEHARLKPVYACLLTLPGVGVILALTIMLETGDIGRFATVGDYTSYCRCVRATHTSNGKSKGKNNRKNGNAYLAWAFVEAVHESFQTCPQAKRFYDRKRAQRNGALATKALAAKWSKAAYYMMKRQEVFDLTRVFG

SEQ ID NO: 469056 - protein, 457 aa, unidentified
MWMPAPGVMTVPPTGTRRPERTDRRETIMQPGDIDVWLGLDVGKSSHHACALDRDGNTILDTPVDQDEKQLRRTIAKLQRRGTVLVIVDQPNTIGSLPLTVARDMGARTAYLPGGAMRKAAQLLPGGSKTDRRDARVIASTALRMPETLRDCEPDDETMAALRLLSGWDEDTAHELTRTVNRLRGLLLHLHPALERALAGDRIKSDTALGLLEHYKGPDGLRRAGAARIREYARRHGLKGTAITDAVADAIAEQTVTVPGTRAAESLIPQLASDIRRLRDRRTDISRQVEELLADAPLLTVLTSMPGIAARTASQILLAIGGDISRFKDAAHLAAYAGIAPVTRQSGTSIHGERPARGGNKRLKNALFQTAFVAIRLDPESRAYYDRKRAEGKRHNAAVMCLARRRCNVIYSMLRNGTLYQPGGTHTTTTTPPRTGTTPTHAPRPRQDTTHPDTRRT

SEQ ID NO: 469057 - protein, 356 aa, unidentified
MEQLTTVGVDLAKDVVAACVLDVHGAVIERRVLRRGAFERWAEQLPSCRVAMEACGSAHHWGRWFAARGHTARLIAAEFVVPFRKGGKNDTADAEAIAIAARQPTMRFVPIKTVEQQAILAWHSVREGWKEERTALLNRVRGLLAEFGIVVGRSSERLLKALPELTEESRLPDAMRALLLEAREQFAALHARLARCDAQIAAHVRNSSAAQRASALLGVGPVTASALAATVSDATVFKNGRQFGAWLGLTPRQHSSGGKTRLGRISLRGNVYLRTLLIQGARSTLQAAMNSEPARASRLQRWIIELYGRKGYYKTLIAIANKHARILWAMLARGERYDASAWQRHPMNPLLLAGNP

SEQ ID NO: 469058 - protein, 357 aa, unidentified
MSDDKYIAFDVHQATTVVWVMNGAGQEVDSTIVPTQPQPLIRYLEGLRGRLHLTFEEGTYAAWLYDLLQGRVAELVVCDPRHNALLKEGSKTDQHDARKLADLLRTGMLRPVYHGSRSLRNLQELAHAYQALVQDTTRVMNRIKAFYRSRGLDCTGHGVYSQKQRASWLERLPAGASRLRAQLLHEQLDQLRRLRRKARGALLAESRKHTVAARLREVPGFGPLRVALVMAAMQTPHRFRTRRKLWGYAGLGLVQVGSSEYAWVEGRAVRRPRALQLRGLNRNHRPGLKALFKSAALAAIRQPGPFKDYYESRAQKGVDPAILRVTVARKLAALILRLWKKGGRYQAEGVKPAGKQA

SEQ ID NO: 469059 - protein, 343 aa, unidentified
MGGNRTTHVCVLDDGRRVVHRGHCATRRDAVLRTLQPDAGARVILEAGSQSTWLSAALREQGFAVQVADPRRVALISKDPRKTDRRDAEMLARLGSGCPELLGQVHHRDERTQADLSVLRARDLVVRTRTRVIQPVRGLLKAFGHRLPSTSSAAFARRVADRIPDLLQPAILPLLALLEQLEATLRGYDGLLAELAATRDPAAEVLQQVDGVGPVTSVAYVLTVADPARFASSRRVGSWLGLCPASRASGDRDPDLPISKTGDGYLRRLLVQCAQSILGPFGKDSDLRRYGLRLKGRGGAGATQRAAVAVVRKLAVLLHRLWTRGERYEPLRGTARAAAVTTG

SEQ ID NO: 469060 - protein, 399 aa, unidentified
MYDTGGIGVFLGLDVGKGEHHGHGLTPAGKKVFDKRLPNSEPKLRAVFDKLKTKFGTVLVIVDQPANIGALPLTVARDCGCEVAYLPGLAMRRAAEMYEGEAKTDARDAFVIADVARTNPRTLRQITVADETEAELAMLVGFDDDLAGESTRCSNRLRGLLAQIHPSLERVLGKRIHHRAVLELLSRYGSPQQLHNAGTDEIAAVLKPKAPRMAVRLAAAITEALAEQTVVVPGTAAAEVIVPSLARQLSEILTQRDALEGRLAALLEAHPLHQLLTSMPGVGVRIAATLLVTIGDGHTFPDADHLASYAGLSPATKSSGSSIKGEHAPRRGNRQLKRAMFLSAFAALHDPASRAYYDRHRNSGKTHTQALLRLARRRITVLFAMLRDGCFYESRPATA

SEQ ID NO: 469061 - protein, 482 aa, unidentified
MKKSSIYPNRSQELATLFEKASNPSKLMCVPIDYAKKDHLVMFCNGNGEVLRKPFSVKNSVDGVKYLLGQVNRSCRHRHIQSDLVFFGGEDVNSYAENFAHTIRSKGWLVANVNAHDAKKQRENLQASTDRLDLMGIATMLLNRRANCCPAQSGVYRNLRTIVRHRRKLVKMKTEVRNRIHTLIDRLFPGFLNEKKSGILPFSNSSLYLMQERFSAPQIRRRQRSALIRNLEKRGTKKAEQVAAKLQEYASQVLTTPDEYTATLQVSLASHVTHYRCLYDGAQQLVNEMAQLLAQTQGAFLTSIKGIGIVLASGVAAEIGDPLVQRSTDQLASYAGIVPKVKQSGGSQGSSVTSHVSKRSNHILKDFVVQSAFHIGRYGPKDLKDDFSRREAAGQHADFGIARRFVRMAMCMMRTSQVYLPPDMRSTHIKPERRADYYLAMWSYLRNKWSKAGGLNVAFAMDKPLGQWRYIVQEVYGIKLKM

SEQ ID NO: 469062 - protein, 355 aa, unidentified
MSRDIKYIGMDVHKEATVIAVLNANGNLVMESIVETKAGSLLQFIHGLRGELHVTWEEGTWAAWLYDLLKPQVQVLVCDPRRNALLEEGNKSDKVDARKLADLLRTGMLRPVYHGEHGLRTLRELGRSYQTISQDLNRVMNRLKALYRGWGIGCAGTQVYAPRYREEWLQKIEHAGVRRRAELLYQQLDGLQALRRTLRPELLAESRKHKATKLLRQIPCIGPIRAARLLALMQTPHRFRSKRQLWTYCGLGIETRDSAQYRFVRGQLQRAKKPQQIRGLNRNHNHEMKEIFKGAATRASCGVGPLRDFYVALLDKGMKAEMARLTLARKIAAIALTLWKKEERFDAEQLKLQAA

SEQ ID NO: 469063 - protein, 353 aa, unidentified
MRRPKDRLIAGIDLHSNNVMIGVINQDGKRVAHRKLGCDLSEVVGFLQPLKPQLQSMAVESTFNWYWLVDGLRDRGYPIDLANPAKIAQYGGMKHVDDKDDAFHLADLQRLDILPKAHVYDPELRPVRDLLRRRTNLVHQHTALLLSFSSLYTRTTGQKLDLGDAKKLEPKQAPKLYEHPANQLIAQVQAEHIQALAKSISRVEKAVLACAREIPLYERLLTIPGIGRILGMTITMEVGDIRRFRTDGDFASYCRLVDAKRLSNGKCKGENNQKCGNKYLAWAFVEAANFARRYNENCRRWYDRKAAKTHKVLATKALACKLAKAAWHVMAGAGNYDEKRMFPELATKAMNPS

SEQ ID NO: 469064 - protein, 316 aa, unidentified
MTMNDYPFSQFVGVDVSKATLDFVLAEGEKSVSIKNTEKQIVDKLIGVITDPLSTIVVLEATGGYEGRLVALLHQHKIAVAVVNPRRVRDFAKGIGLDAKTDSIDARAIALYGQVVKPAAQMAKSVEQKKLKALVEYRRQLLGLINQQKNRLQQTSDLEIQDYIRQSLETLEKQAKTIDQRLEKCVRADTKNARKIEIFDSVKGLGPVIASTFLAELPELGTLNRGQISKLVGVAPMNRDSGTMSGKRRTIGGRSYVRRVLYMATLVATRHNPRIKAFYQRLLARGKAKKVALVAAMRKLLTIVNTLIKNDVLWQD

SEQ ID NO: 469065 - protein, 337 aa, unidentified
MTTISMLAVDLSKGSFQVCAVGPDGTVLYNRALSRARFAALLADQPACVVAMEACATSHHWGRVAQASGHEVRLVPAVYVKPFVKRQKNDRADAEAIAEAAARPRMRFVAVKCAETQGRAVAFRTHQCLVRQRTQLINALRGHLAEFGVVAPKGPANLKVLEEALADEVADLPVAVRAMGTIYLDQIAGLTQVIERLADELETASRTDADLRRLCTIPGIGPVTAGAVAAFAPDLDTFDSGRNFAAWLGLVPRQRSTGGKAKLGSVSKMGQTDIRRLLIVGAMSVIRWVVRKGGSANRWLATLVTRKPKMVAAVALANKMARMIWAVTTKQEDYRMA

SEQ ID NO: 469066 - protein, 337 aa, unidentified
MKRYLGVDLHRTQFTVCVRQVGQVVEVRQWRIEQLPQFVEQLSEDDELAVEAMGTTARFYDAVVSRVARVVVVNPHQFKVISESVKKTDRRDCEQLGLFLEKGLLPEVRMKEKKQRELQPLLETRDLLVKQRSALKGKINNLLAAQGINLKREALSSRKALQRVLAIEASTVVKLELRILVEQIGHLNAGIQEVEKQILQEGEQLPGHKNLTSIKGIGELSATVLLTAIGPIQDFADENKLAAYLGLVPKVQNSNESQRSGGITKRGNKLARTALVQCGLVAQRHSPYLKQRYESIKQRRGAGKAKIALARKLVKIVYDTLKNDWVFADFPSFTLAA

SEQ ID NO: 469067 - protein, 358 aa, unidentified
MSIVAHLYSFFIGVDTHARNHVYTIIANTGALIDTGTFPTTQAGIKRALSWVGRRTDGDLDTLFVVEGAASYGAVLTGHITMAGYPVVEAGRMDAKARHGVGKSDELDSHRIAESVLRLEADQLRWPRQGEGVRQALRVLLAARDAMSKERTREINALTALVRTNDLGIDARTSLTADQVAEISRWRDRKEDIGLATAREEAIRLAKRVLALDEELAGNLAKLAELVKASPAAALLDEPGFGPFSAAVCFTAWSHPGRVRNAAAFAALAGVNPIPASSGNTHRHRLNRGGDRQLNRALHTVIMNRMIHDERTRDYVAKHYGEDPTKKSKKEIRRKLKWYLARRVYKILNALDTVPQPA

SEQ ID NO: 469068 - protein, 367 aa, unidentified
MKKVSTAAVRQAKNVSEQKLTIGLDLGDRSSWYCVLEEAGVILLEQRLSTTPKAMREVFGGMPRSRIALETGMHSPWVSRVLNELGHEVIVAHARNVRLIGESRKKDDRLDAQTLARLARVDPQLLCPVKHRSARAQADLTVIRARAGLVRARTALVNTARGLAKSYGERLRGCNVRNMNPEKAEGLSPELQTALEPLLAGIESLSERIRECNERIEKLAQESYPQVALLKQIKGVGTLIALTFLLTLEDPHRFRKSRDEGCYLGLQPGRRNSGQSEPQMHISKEGDPYLRTLLVQGAHHILGPFGADCDLRHWGLKLAERGGKNGKKRAIIATARKLAVLLHRLWVSGEVYEPLRNSHPAAMPAAA

SEQ ID NO: 469069 - protein, 359 aa, unidentified
MEHFAGLDVSMEETAICIVDDGGAVVLETSVATDPEAIAGALAAWGKTLKRVGHEAGSLSPWLHPALDNLGVPVVCLETRHVRAAMAAQRNKTDRSDALCLAQIIRTGWFRPVYIKSDASYRLRLLLTQRRNLKRKFLDIENSIRHSLKAFGIRLATTNRSGFADTVRELIGDDIMLAGMLEPMLRVRAVMWAEYTNLHKLLVQVVARDPVCRRFMAIPGVGPVTALQVKTALDDPARFRRAKNVGAYFGLTPKRWQSGTSIDVQGRISKQGDNDARRSLYEAAHIMMTRFQGWSALKAWGMKLAKAKGYKRAVAAVARKLATIMFAMWRDGSEYRWTADAEGKDWSRKKDVRLLGSLA

SEQ ID NO: 469070 - protein, 359 aa, unidentified
MVETMTYVGLDVHARSTHAAAIDVASGELRRARFGGGSEEPIAWLRMLPQPLKGCYEAGPSGFALYRAAEAAGLQIEVIAPSKTPRAPGDRIKTDRKDAELLARLLLAGQLKAVTVPPLAFEAARHLARAREQVRGDLMRCRHRVSKLLLLHGRVYEGSAWTKTHRRWLEAQRFDETATELAYLDCLAAVDGLIARKTALDERLSRLAFEGDWSETVARLRCFRGIDTLTAFVLCLEIGDFGRFPRPAKLAGWLGLVPSLDQSGESRRQGAITKTGSGYARRLLVEAAWHYLPQPSVGPALAERRAGQPDHVLQIALRAQRRLHRLYSRLRARGKPGNVTTVAVARELACFLWAAAVAE

SEQ ID NO: 469071 - protein, 335 aa, unidentified
MKHDMHVLGIDIAKRVFHAVGMDDRGNIVYRKRLSRHDLIPYIAQLPPVRIGIEACGGAHYWARRFRAHGHEVKLMAPQFVKPYVKSNKNDSRDAEAIAEAVTRPTMRFVPIKDVDQQDLQALHRVRERLMGARTALVNEVHGLLHEYGIIISKGVAKFRQAVVGKLESEKDKLTSLSREMFWKLVDEFALLEKQLAYDQEKRDTVATTHPECQRLMTIPGIGPFTATALVAAISDASAFKNGRQCAAWLGLVPRQHTTGGKERLLGISKRGDTSLRKLLVHGARTTIRWVGRKTDRRSQWMRQLLERRGKNRTAVAVANKNARMVWALLTSHQD

SEQ ID NO: 469072 - protein, 343 aa, unidentified
MATISMIGLDLAKNVFQVHGVDVDGAVVVRRQLRRSQVEKFFAELPPARVGMEACGSAHHWARVIGGHGHEVRLMPPSYVKPYVKRNKNDGRDAEAICEAMSRPTMRLVPVKSVEQQAVLSVHTTRALLVRQRTMAGNALRAMLSEIGIVAAQGIKGLRELMSKLDEPSAAIPELMRGALQMLARQWQALDEAERALERQIKRAAMADQDARRLMEVPCVGPIIASAVLAKVPDPRVFRSGRDFAAWIGLTARDRGTGGKSRPGPISKQGDRMLRALLICGASAYLRQARRRGITDPWLRELLARRPYKVVMVALAAKIARILWAMLAKGQHYRDRAHAPAQA

SEQ ID NO: 469073 - protein, 356 aa, unidentified
MDDRRYIGMDVHQASISVAVRDGVGKLTMECILETKATTILEFVGGLQGSLCVAFEEGTSAAWLYDLLKPHVGQVVVCDPRKNALLKVGNKSDRVDAQKLSELLRCGLLRPVYHGECGVRTLRELGRSYLTSSKDLTRVRNRLKALYRSWAIPCAGLRVYSPRHRCEWLEKLSEKGVRYRAEQLYQQLDVLMQIRGDARRQMLKESARHPAQELLRQIPRLGPVRVALLIALLQTPHRFRTKRQLWAYCGLALETRSSGEYRFRAGELQRAKKLPALRGLNVNHNHDLKNLFKSAATQVLRGGDPLGDFYQTLLAKGMKPTMARLTLARKMAAIVLRIWKKGERFDPEILKQQQAA

SEQ ID NO: 469074 - protein, 428 aa, unidentified
MKYNTQNAKIKSITEKTLIVGIDVGSETHFARAFDWRNYEYSKKPLEFSNTEAGFMTLKAWMADFAEKYGKNVVIPGMEPTGHYWFNLGAYLQDNGMKPVHVNPHHVKKSKELDDNNPNKNDRKDPKTIAALVNEGRFSYPYIPTGIYAEIRSLSNLRLQTQEEITRIKNRIARWFSIYFPEIKDVYRNPDSVSGLMILKEAPLPQDIVKLGVDGINKIWRDAKLRAAGLKRAKTLVTAAEHSIGSQEAPDSPRIELKNLLNDYEIYKNREEDLMSLTEEKLSEIPHIDKLLEIKGVGLKTVSGFVAEVGDITRFDNPKQLQKLAGYAIVECSSGKHKGESHISYRGRKRLRYVLYEAAISLIARNEEFKEVHRYYRTRKENPLKKMQSVIAVACKVLRIFYTILTKGVTYDGAKMMQDIKRPQMLAA

SEQ ID NO: 469075 - protein, 326 aa, unidentified
MQGKEASEQETKVQSNVGIDISKCWLDAHVLPGDDRLHVANTCAGIRQLKRWLSHYRIALVAIEATGKWHRHLHRSLVASAIPVAIVDPYRVRMFAKAQGILAKTDQLDARVLALFAAMMAPPVRPVAPQTMAELAELVVARASAVEAQTALKNQFGTAESAFLKRQLDRRISRAGKDIAALDREILKRIKADGSLARRYAVLTSIPSFGFAVAATLIACLAEIGSATAKQIGMLAGLAPIADQSGDREGTRVIWGGRPAVRRVLYLAALSASRFNADMKAFYNRLIDNGKPSKVALIAVARKLVVLANTLVSEDRTWQPRAPIQA

SEQ ID NO: 469076 - protein, 364 aa, unidentified
MELSRSTWLITSLSPGSGEKMSKHSVPAGDIGALLARFSEIRQKALARTGRSFPIIVIQEAGLDGFWIHRVLESEGIESHVVDPASIATSRRRRRAKTDGIDGEALLRALLAYKRGEPRVCAMVRAPTAEEEDRRRLCRERKVLTNERILHVNRIKGLLFSQGVSDYEPLRRDRRRRLDELKTGDGRQLPPHLKTQISRELDRLELLIEQIKAVEGERDATLAPQQVSAPERAAMLLAIKGVGPEFAAVLWSEGLFRHFDNRRQVASYAGLAPTPWQSGSVDREQGVSKAGNPRLRTTLIQLAWLWLRHQPQSALTLWFQERVKRNDGRLKKTTIVALARKLLVALWKYVTAGVVIEGAVIKAA

SEQ ID NO: 469077 - protein, 497 aa, unidentified
MSTIMYRDPNENLSHTIFMGIDVSKDQHAICCIDSSYRVQKKLVIPNRKKGFQTLESILLGFKEQGVTVLAGLESTGVYGQSIYGFLQPLVSSVSLWNPFKVEAYRKFSPHPTTKTDAEDAFLIACFTYHQWTHPTSSPINLSASFSKRLAILREYTRVRIYYTEKRSNQVRRLSTLVEKIFPEFFDVFTSRWNQTAFHLMRHYPSPEQLGSVPTQELGHQIERWSKKQMKASVAGELQDLAKNTIAHPLDGEVIAMEIGHTVELILWFQDQLKKVEQRILAMSDEFPSVKILQTIPGMSTIMAMSIVSEVEPLSRFSRVESLRSYAGMDPRIKESGKSVHGKSFISKKGSRYLRRSLYYAANSVRQKDPVFGDYYKRKRNPHHTHRYAVLSTANKLLAVVYALLKKKQSYQASYEWNTKKNVQEQEKTLKVEKTILPSTPSNGSKTKDAPPQTPSPTSIPLEILFPSLQKRMENAQKANVRTPALPVYISLEKLLQ

SEQ ID NO: 469078 - protein, 367 aa, unidentified
MKKHTTMNKPVSATDVSVCTTVAVDLAKKVFQVAGEDALGQLAYEQRIKSREAFQVFLQKLPEGVTVLMETGPGAQAWARLLQAQGNPVRILPAQRVAEHRSGAKNDRNDAHAILRAGRDSSIASVPVKSVAALAMQAWHRVRRGYVQRRTAMGNQIRGLLLEQGIALAQGDVGLKQGVTRVLEDASQPLPALLRELIDEMLNEWQRLGERIAALTGRLEACAAADPTAKRLMTVRGIGPITATALLAKQVEPERFANARQFAAYFGIVPDQHSSGQKVRLGKMTKRGDAYVRSLMVVGSHAVLKQLRPDSEHPDDRRLQRWLQRLGRKGAAVRLANRNLRIAWVLLCSEQTYQRKPNACREMEMSH

SEQ ID NO: 469079 - protein, 413 aa, unidentified
MRNLLEVCCGLDVHKEVLVACMLKGGIDEEPEPVIKEFPTLLYGLDEFKKWVIENGCHDVAMESTGVYWFPIYNVLESIFYGDGQVNIIVANPHHMKNVPGKKTDIKDAHWIANLLRAGLLAPSYIPPKEIRELRDWTRYRDILIKELVGHKNRIEKHLQQCGFKLSTILSDIFGMSGFELIKKLCDKGKLTQLDVEVCLHGTLRNKSNEVQQAVAGQLSSHDKIFLSNLVKVMENCQKEIEEVERHIEGYAYQYEPTLLLLETIPALQRRASTIIISELGVDLSMFPTAGHLCKWAGLCPGDNESAGKKKSTRITKGNPRIKSVMVQCAWAATRCKSFFLRDWFYRLRARRGTKKALIAVARKLLSIVWHILTTGEIYEESRYEETKKNQEERRKQKLKAEAAKLGFKLIPA

SEQ ID NO: 469080 - protein, 428 aa, unidentified
MNYNQLKKINQITDQTLIIGTDVSKNFHVSRAQDFRGIEFGKSIRFNNDIIGILEFEKWFKQLMTDNGKTEVIIGMEPTGHYWIPLARCLKKMGYNVVTVNPAATKKAKELDDNNQSKTDHRDARVIAQLVKDGRYTEPNLLDGLYEELREVTKIKRILTGDMVRTKNQITNWFDRYFPEYTKVYKQWNKKTLLWIIKKYRFPILIAKLDPEEIYLEIKKDIKKGIGRTKVKEIIDAAKTSIGITEGLKSASIEFDYLISKYEKFTDDLINLDIYIQELIQGYDETSRIKDINGIGLNTAAGLISELGAISQYKSPKQLSKMAGLSLVEDSSGKKRGKRVISKRGRSNLRKLLYQCIVSMLGHNKEFQELYAYYTKRNINPLTGKEAIIALMNKLLRIIHALITKKVKYDPEKMLNDIKRQEGYFVVA

SEQ ID NO: 469081 - protein, 315 aa, unidentified
MTSTQVFVGVDISKAQLDLALRPEGQFSVPNNEAGFAQVLEHLNAVHPTLVVLEATGGLEIPLTGVLAAAGVPVVVVNPRQARDFAKATGRLAKTDALDAQMLAHFAEVMRPEPRPLPDEQTQALAAILARRRQLVEMLTAEKNRLGTAGKPVRKSLRTHIAWLERELSHTDRGLAQTIRESPVWREKEALVRSTPGVGPVVTTTLLATLPELGTLTGKQIAALVGGAPLNRDSGTWRGKRTVWGGRAQIRAVLYMAALVAARCNPVIRACYQRLRAAGKAKKVVLTACMRKLLIVLNAMLKHRTPWRAELVQCA

SEQ ID NO: 469082 - protein, 405 aa, unidentified
MTSDRRVVIGADTHLDTIHLAAITDTGQLLSDAEFRTNPTGYWAAICWARSFGEIVSAGVEGTSSYGAGFTQALQANDIHVVEVNRPDRSARRRQGKSDPLDAYSAARAVLAGHGLAVPKDPHTGALKALLIARRGAIKARTAAIQQIKDLLVTAPAELRERYRRYATTLRLVEALARCRPTAHEDPTTVSVLTACKTLAQRIEFLERQDRELTAELDSLTSALNPALRAAYGVGPDTAAQLLITAGTNAHRLRSEAAFAMLAGAAPIPASSGKTTRHRLSRGGDRAANNALHRIALVRWSHEPRTRHYVNRQLAAGRAKTDILRLLKRAIAREMFRHLTAPCPIDDYSDLRLTRQAKNITLSTVANHFGVWPNDISRLERGLKRDDTLAAHYRHWLNIQLIDAA

SEQ ID NO: 469083 - protein, 330 aa, unidentified
MNYSHFVGLDVGKKSFDACLVSSDKELSHHTFPNTPGGIEELLHRVKQRGVEVETTLFCAENMGSYVIDLCLSSYQFHFPLALECPLTIKRSIGLQRGKNDRIDARRIARYACLHYRKLRLYELPDKDLVKLRNWMVIRDNLVKQKVSSLKLLELTRETSGLADLVTAMTFLEKQLSLVKEKISYVEQEMEKIISSNIALLTNYQLLTSIKGIGPINAIVLLCVTGNFHRFSDPRKFACYCGVAPFEHSSGTSIRGKTKTSNLANREVKVYLTRAAITAISWDPQIKAYYKRKTGEGKHKASVINAVRAKIIARCFAVIKRKTPFVTLRA

SEQ ID NO: 469084 - protein, 388 aa, unidentified
MNVTADQPEAPTAIRTDLGAIFVSLELSRSSWLITSLSPGGGEKMSKHTVRGGDVSGLLQRFAQLREKARVRTGKVFPLIVIQEAGLDGFWIHRVLQNEKVESHVVDPASIATSRRRRRAKTDKIDGETLVRSLLAYKRGEPRVCSMVKAPTPEEEDRRRLCRERKVLTAERVLHVNRIKGLLFCQGISGYEPLRRDRRERLEELQTGDDRPLPQHLKAQVDRELDRLELLLKQIKTVEGERDALLAAAQTAMPAPAAMLLDIKGIGSEFAAVLWSEGLFRHFDNRRQLAAYAGLAPTPWQSGAVDREQGVSKAGNPRLRTTLIQLAWLWLRNQPQSALTIWFHERVRRNAGRLRKTTIVALARKLLVALWKYVTTGVVIEGATMKAA

SEQ ID NO: 469085 - protein, 371 aa, unidentified
MEHTRFIGLDIHKERISIAVAESGRAGAVEYHGEIANDPGAIGKLCDRLRRPGKPLAFCYEAGPCGYGVHRQLTSLGHRCDVVAPSLIPTKSGDRVKTDRRDATMLARLHRAGELTPVWVPDADHEAMRDLIRLRSVVRQIVTRARQHLQGFLLRHGRKHGGGTAWRMAYRRWLSTLAFEHPAQQIAFQDYVDAVMDAERRLKRVEEQIVGLLPEWNLRPVVDALQAMRGIALINAVVLVTEVGDFTRFSNPRQLMAYFGLVPGERSSGQTVRRGGITKTGNAHARRALIEGAWAYRMKPRIGRHKVDRIEALPKVIRDIGWKAQIRLCARYRRLSARGKTANVVNVAIAREMVGFIWSIACAIQSTPTAA

SEQ ID NO: 469086 - protein, 347 aa, unidentified
MECTTVAVDLAKDVIELAVANQQGRIVKRHRLGRRDFSQFLATHPACSIVMEACGSAHYWARTAKACGHGVRLLPAQYVRPYCRRNKTDRADCSAILEASKNSEILPVAVKTVDQQVIQGLHRLRSQWQATRTARINAARGLLRELGIVIPKGATTALKRIPETLADDAVPPVLRDALHELLAEIRQLESRIDGIEQQLETLSRNDPAITRLRQVSGIGLMTATALSASAVDAKHFRSGRHLASWLGLTPREHSSGNTRHLGGVSKRGDVYVRMLLTHGARSVLARARQLQATSPESLNRLHRWALDVSERRGFNKATSALANKLARIAWATWRYERTFDPNHAVSV

SEQ ID NO: 469087 - protein, 310 aa, unidentified
MQKQASQIIAIDISKETLEVLSEKRSFSVANDEQGLAELLKHVRTFENPFTVFEATGGYERNLIEALASKALAFARLNPARVRSFAKSEGVKAKTDPIDTRMILRFAQQKEIRPDCPASPTRQKIADLLDRRNHLSAALTQEKNRLQNSPKTIHHSIKRISKTLEKELHAIETRIRKLVKSDSALHEQAKVAQSVIGIGEITAWTILCCLSEIHALSRNKIVALTGIAPFNDDSGKTRKKRRIQEGRAKVRKCLYMATKTAAVHNPVIKEYVENLRKRGKPYNCAIVAGMRKLLLHLQSLLKKHALTLAS

SEQ ID NO: 469088 - protein, 433 aa, unidentified
MYLLCAFTAAFASQTKMNFNKLLSGNITNISQKAGIIMISVGIDVSKSKSTVCILKPCGEVVKPPFEMNHTADELDSLVSLINSFDEETRVVLEDTGHYHLPVASYLASHNIFVCCVNALRMKKYCAQSIRRAKTDKIDAAHIASFGITYWSELTQAYDAPDTYDELRFLARQYYQFTSILVKAKVNFSNLLDQVMPGISDLLQNQKDNHKLTEFVDRYIHFQTILDMGEKRFTADYCKWAKKMGYRCNERKASEIFALAQNGIPSLPNSQSVKIAVREAIKMIHSTEESRNTILAQMQDLCKTLPEYYIVREMNCIGDVLAPRIIAEIGDVRRFRNKHALIAYAGIDAPPYQSGAFSASERKISKRGNSYLRKTGYEIMQSLIKHKPAADPVYDFIQKKRSEGKSGKEAMIAGLNKFLRVYYGKVMELYSET

SEQ ID NO: 469089 - protein, 324 aa, unidentified
MTLPTFGIDIAKLKFNVCLINLTGKLRHKVFPNTRTGFEQLRQWLTNQGAQSVHACMEATGTYGDSLSLFLHEAGHTVSVINPAAVKAFAGSRLSRTKTDRVDAELIARFCQAQQPPAWTPLPAEVRELQALVRRLDSLIEMRVMEENRLSSGIVVESVRASVEEHLTYLNQEIKRTEELIRNHLNNHRGLKQQSQLLDSIPGIAKTTSALLLSEITDIKQYRSARQVAAYAGLVPRERQSGTSVRGRTRLSKIGNARLRRALYFPAITAIRCSEFFQAWTRGLRERGKSKMTIICAVMRKLVHLAYGVLKTGKPFDPQWAKIA

SEQ ID NO: 469090 - protein, 368 aa, unidentified
MKKETITSDGISGASLVNDVNRVLNLGLDMHYRQVTVAMQEDGGRIKAAGKMGHLDFLNWVPKKLEEGWEIYSCYEAGASGYWLHRELEKLGVKNLVVVPKAMGQGGKKQKTDQRDAGELCDSLDRYLRGQKKALSEVAVPTEEQEEKRALIRYHRQIMADRGRCEARGKGLLCAQGIQVRGRWWRGDSWLELTSDPRLKDWMKEQLVGWRNKILSTDEEQSALRERIAALAPAILPKGVGAYSAAVLHYELRGFEHFKNRRQVGSITGLCPGVHLSDGRGKEGSINRCGIGIVRWTLVEMVWRLMIWQPQYPPVRRLAAGLVKSKRARKRLVVQAARRLAIDLWRLSTGQTTPEKLGLVMQSNATGN

SEQ ID NO: 469091 - protein, 424 aa, unidentified
MKFKMQDKQNQLIERISDKHLVVGVDIAQQFHVARAVNFRGIVVGEPLTFENNEEGFTFLWHWVNKLKITNNLDAAIVGMEPTGHYWINLSKWLFEKNIDVVTVNPYHVKRNKENRDNTQSKSDKKDALVIADMVKNGYYAIIRPTSESFEELRVLMSNRDVIVKRLVSTINQLNRWVDVVFPELRQVFKDVKGKGAIATLRLFPTPIELRSMQSQNVVIGWKTLMKRQPGLKKAQLLIHLAKRSIGTRQALDAYKFHLQQLLEEYDLATTQLERVEQQVTEVLTQIPYANQLLTIKGISEISLAGILGEAGDLSGFSHGNSLLRHAGLNLVEASSGKWKGQIVISKRGRSRLRRFLYLATMSLVMNNPEFQAIHSNNVKVKKMKKMKSIMKLVGKLARIFVGMAHRNESYCPDKVQPLTELAA

SEQ ID NO: 469092 - protein, 391 aa, unidentified
MPMYFVGIDISKYKHDCCIISAADQQIISKFTITNDKDGFEQLLTSLNSLSNPEDIKIGFESTAHYALNLELFLENAHHSFMEVNPVLIKEYKKSTTLRRTKTDSVDCESIALWLITVEYKPHSKGFYHAYSLKSLTRLRDRLIRQRSFYLVKITNVLDHTFPEFKPFFNERLSKTALYLLENYGSAEKMARMNSASYDKLRCISRGKFSIQQFLRLKELASNTVGVNNSIFDLELNTLLTLYKSLSDEINTLETEIIKLIEEVHPHYMSIPGIGPISAAVIYAEYGDISNFSNPGQMLAFAGIEPGINDSGTESHGGRMVKHGSSQLRYVLLNACLPLIRFDLTFATYYEKKRAEGKKHRVAITHVAKKLIRVIYALERQDVDFNAQKLR

SEQ ID NO: 469093 - protein, 424 aa, unidentified
MKVTFQTCCGVDVHKSFLVATIIKTTGGIEPSYQKRRFSTFNNSILEFKKWLLENECLYVCMESTGKYWIPVFNLLEDEINVTIANPKWVKSVKGNKDDTKDSKWIGDLFRLGLVRGSYIPCKKIRILREFTRYRYKLVSCRSSEKNRYQNALTVCNVALDSVVSDIFGKSSTSIIDYLLEQSGTSIDHEVIASKLLKRLKAKEDAVIESIEGYQMTDSQKYRMHLVRAHMDYITAAINDVDSEIESLIASDPDYENAVELLCTIPGVKYDSAITIISEIGIDMSQFCSSKRLCCWAGLTPGSNESAGKKKSVRITRAGVYLKPALVQCAHAAVKSDKSPYYKKKYESLVERRGKKRAIIAIARMILTAIFQMLTTGETWNPCDLYKIDMPEALLEKQKQKAIKQAQKLLIREGLLPPTEPIAS

SEQ ID NO: 469094 - protein, 412 aa, unidentified
MKIVHEVCCGIDVHAKMLVACLLLANGEKKIRSFSTMTDELLQLRDWLVTAQCTHVAIESTGVYWKPVFNILEDALTVILINPEHARALRGRKTDVKDAEWLADLLRHGLLKASFIPPPEIRELRELTRYRESLVREQTAVANRIQKVIESGNIKLAQVVSDALGVSGRAILWALARGETDPGQLAKLAHGKLQPKRAQLERALHGRLTPNQCFVLRESLQHWEDLEAADQRVTKEIDRYLQDHPKLARARDNLDTIPGLGPRAAEIIVAEIGVEMEVNFSSDAQLASWAGICPGNKSTGGKRLSGRTRKGNTYLRAALVQAAWGATMKKNCYLSSQFFRLVKRLGRKKALVAVAHSLLVIIYHVLQSDQSYTELGGDYFDRQNAGQQREYFVRRLQMLGLKVSVEELPAAA

SEQ ID NO: 469095 - protein, 399 aa, unidentified
MKTTDRTATAIGLDVHRRFSTVTARNAEGKIAWRQRLEHEDRDDLRKRVATWPREIPVILESSFGWEWMCEELEQAGVEPQLASSRKVAAWRNARGMAKSNRTDADLLSELGRQTDRWWRVWLPPREVRDRREWMRYRMSLVRLQTGLKNRVHAILHRHGILHDFADLFGAPGRRMLTRLAHDAKNPRLRESGRATLKGYLQLLDHLRRQIATVTRTLYRQLRATPQAERLQGLPGVGPILAHTILAEVGDFGRFRSAKHLVSYSLLAPRAFDSGEETDEAPKGRHVGHVGRRTLKWAWIEAAHSAVRRGGRFREIFDRYTDGGKRNRNRGYILVGHELCRTAYAIGKKETEYRDDPPARPGSSKKGAASRERDRRRRAKSQNSRPGTGQPDPGLVVVG

SEQ ID NO: 469096 - protein, 336 aa, unidentified
MNNVPFRCGLDIAKQIFAVHAVNSNEKPVFQKLIPRRKVLSFFAQLPPCIIGIEACGGSHYWARELRKLGHEIKLISARFVIPYRRKAKNDLNDAEAICEAISRPSMNYVSIKSEEQQTILMAHRIRFQSIATRTALTNQIHGHLLEFGIVVSKGRKKMRRDLHEVLEREGIPALLCELIHDLLAAVDREEERIEALDRRIEQWVKRNEIASKLLQLDGVGSLTASAIVATAGDAKVFKNSRQFAAWLGLVPRQHSSGGKSRLGKITKAGDRYLRTLLIHGSRTVLLMSKNGRGKHSDWVESLRERRPDNVVAVAYAAKQARMAWAIMMGKEAEAV

SEQ ID NO: 469097 - protein, 425 aa, unidentified
MDQRDTKLKFVAGALVCGIDIAKVMHWARLFLPTGITATKACKFKNNRKGFQELLAQIRTTLQENGLERVVVAMEPTGPYWRPLAQFLMDEGIPVVIVNPYHAKRLKEHSDNTRSKSDIKDCRIIADLARDGNFMWPMWLHDAYAQLRQLTAARLEVRRGLVAAMARVQAWLAERFPEFPEVFKDPMGRAACWALEHCPLPSQVMGMSFEELVAGLQQASQGRVGVKRAARLLAAAKDSIGYREGAAGAEVRLQGYLQDLKHWAARLTALEEQMNRWLERTGLAEYLLSLPGVGMVTAAAFLGEIGDPKSYRNSKEVVKLAGANVAENSSGQHRGRSQLNKRGRPGLRLVIYLAAVQGVRHCPELQAFYRDLIERKTHPLRKPQALIAVGCKLMRMMWHVARYQERYDPGKVLGGERARKLETAA

SEQ ID NO: 469098 - protein, 452 aa, unidentified
MRASKLAKSKKMKLPKHLQHINPYAAGIDVGCRSHFVAVPEGSCEQPVREFSSFTDDLHQMADWLLSCGVTSVVMESTGIYWIPVFEILESRGLEVRLVNARHVKNVPGRKSDVLDCQWLQRLHSYGLLEGAFRPAEHVCTLRAYVRQRMTLVRYAASHIQHMQKALAQMNLQLANVVADITGATGMRIIRAVLDGERDPLVLARLRDRRCKNSEQTIARSLNGNFRPEHLFSLKQAVDLYEFYQGQIAECDRQILDQLTRFDAADPSDSGPDAEPPASLGEALQRMSGVDLTRIDGIDTNSALKIIAEIGIDMSRWKSAKHFASWLGLCPGTKVSGGKVLSAKSKPVANRAAAALRMAAFTLFKSKSALGAYLRRQRSRLGAPKAITATAHKLARLVYTMLKHGTAYVDAGQEYYEERYRTRVVQNLKRQAQKLGFSLVKIAGLQPQNANS

SEQ ID NO: 469099 - protein, 426 aa, unidentified
MNYTQNQKISQVTETTLIVGVDIGSETNFARAFNWRGQELSKKVFRFNNSQEGFQSFLAYLNTYTTIASAKQIIVGCEPTGHYWFNLARYLEENNIKLALVNPYHVKQIKELDDNSPKKTDLKDPKTIAKLVVDGRYSYPYLPEGIYADLREAVSSRERIVKELNAITNRIKRWLKIYFPEYLVVYKNFSAESGLTVLETVPLPQDIVQLGPEGVNQLWRDKKLRAVGMKRALTLVEAAHNSIGLPGGSCARMELQLLLEDFRTKQSQLEMITEVLEEETLSVPYADKLLAIKGVGLITVAGFLAEVGDVRRFDSPKQIQKLAGLEVKENSSGKHRGRSSISKRGRKRLRKILFQVMLPMIQNNAEFGEIYQYFTTRQKNPLKGKQAIIAAGCKLIRVFYAILKHGVDYDPGKLRADMIHPELEAA

SEQ ID NO: 469100 - protein, 406 aa, unidentified
MELVALHKRVIGLDVHQAQITACAIIEEADGTTRIEQRQFGAFKRDRRALADWAASLLPDEVVMESTGIYWKSPYAALEAVGIRGQVVNARHVKNVPGRKTDVGDAQWLATLARAGLLRGSFVPPMLLRELRLISRQRQKLVGQLASEKNRLHKVLTDGGIRLGVVVSDLHGQSARAMVKAIILGQPPNEVLQFASRRLKASREEIFDALQGELTDSHRFVLDELMRHVEEIEARIARFDTRLLDGLKDERNTLALLQTLPGVDLIGAAMLLVEIGTNMDAFGTADRLASWVGICPGNNESAGKRKSGRVRKGNLYVRRLLCEFAHAASRTTSVFQSKFKSLIVRRGHKRSIVALAHKILRTIFFMIKRREHYRDSTTDYEALSVQRNAPRWIKALTRFGFIPAVA

SEQ ID NO: 469101 - protein, 351 aa, unidentified
METAYDGRQVVGIDLHRRRSVLVRMTEDGRRLGTARITNSPAELRREIARAGRSPRVVLEATYGWYWAADVLEAGGAEVHLAHPLGVKAFTYRRVKNDEKDAADLADLLRMGRLAEAWIAPPGIRELRELTRYRHKLVHLRTSCKDQVHAVLAKLGIPVTCSDLFGKAGSAWLDGLRLGQPYAGKVTSLRQLTGELTTEITMLDEVIADLLAGDRGYQVIQQLPGIGPRLAAVIIAEIGDAARFRTAGQLCSWAGLTPRHRESDTKVTRGRVTKQGSRMLRWALIEAVQRAGPDTAAGAVKARIIARRGNQTRNIAKVAAARKLLTLIYYGLRDGQIRALSAPAAHTAPAA

SEQ ID NO: 469102 - protein, 309 aa, unidentified
MLIIGLDYHPGFQQIAYVDSETGELQERRLQHREEAEKFYRELAAQGMKVRVGMEASGHARWFERLLSELQFELWIGDAAEIRTKRVRKQRTDRLDAQLILKLMLEGRFPQIWVPSWENRDLRQLLWHRHRMVQARTRIMNQLQAVALNEGLRAKKRLWREAGREQLAAFRLAPWASRRRQDLLELLDRLNPSIAKLTEAVEQEAEKCPEAQRLRTHPGVGPLTALAFVLVIGTAERFRCGKQIASYLGLVPEEDSSGERRRLGHISKQGNSLLRFLLVEAAQVTVRSNQEWRSKFFHLAMRRGERSPR

SEQ ID NO: 469103 - protein, 351 aa, unidentified
MIIIGVDYHPSFQQIAFLDQETGECGERQLHHSDGEAEKFYRELQQRGVSVRVGMEATGYSRWFERLLAELGFEVWIGDAAEIKKKRVRKQKTDREDARLLLKLLLENRFPRIWVPSPENRDVRQLLWHRHRLVQMRTRIMNQLQAVAMNEGYRWKKKLFSEQGRALLEKLSLAPWANRRRKELLELLDQLNPKIAELTAAVEQEANQRPDVLRLMTHPGVGAITGLAYVQVIGTPDRFPCGKQIGSYIGLIPCEDSSAGKQRLGHLSKQGNALLRYLLGEAAQAAAQCNPDWRRRYVHLAMRRHKNIAKAAMARKLAVRLYWMWRNGWDYSQLVSFGSNAGKLATGHGVK

SEQ ID NO: 469104 - protein, 337 aa, unidentified
MKYSGIDLHSNNSVVVVSDEEDRVVFGKRLPNDLGQIGAALELHRQDLVGVVIESTYNWYWLVDGLMDAGYQVHLAHPSAIKKYEGLKYSGDFADARYLAQLLRLGLLAEGYIYPREERGARDLARKRLQLTRYRTAQILSIENIMTRQSGTTLKGEAVKRLTAEQVDEFAFAPDVALALQANRAVSEALGQQIEVIEKRLKESVGLRPEYHLLKTAPGIGRILATTIMLETGSIRRFAQVGNFSSYCRCVDSLRESNGKKKGEGNARNGNKYLAWAFVEAAIFAIRYCPEARSFYERKKRKANRVLAIKALAHKLARACYHMLREQKPFDVGRCFG

SEQ ID NO: 469105 - protein, 465 aa, unidentified
MKKRTYSTVDVEQIDLLPILRLLTVGCIVAVDVAKTKFVAAIATAAGQVVRLVRFEHPRQTLLFLRFLDALRDAKLEPRVAMEPTGTYGDALRYQCHQRGVAVHMVSPKHTHDIAEVLDGVPSMHDPKASAVIAFLASVRPTKAWMPDSDAKRDVRALLDQRAPLAKTIALHHGLLEGMLARHWPELGAFIDVHQQRSWMPFLLAYTGPQAVAAEPEAAAETLHSASRAQLAPQRIAKIVDSARTTVGVPMTENEQARLRSSVAHIAGETAEMDAVDTKIAAVVRKDPVMSQLAAVVGPVCAASIVGQIGSPCDFKTPRALEKAMGLNLKERSSGEKKGQLSITKRGSPEVRQLLYLAALRLLQADETVASWYRARSAYRSGKPVKLKAVVAVMRKLARALWHVARGETFDAKKLFDVRRLDLKSLSNETNEASRPDGQKKPRPFVRKSAPQEPPKKRSIAQQTA

SEQ ID NO: 469106 - protein, 377 aa, unidentified
MKRIKFVGLDVHAETIAVAVAEQDGDVRSLGVIPNREESIRKLVKKLGPVEQLRFCYEAGPTGYVVYWQLTALGAKCEVVAPTLVPVKSGERVKTDRRDALKLARTYRAGELTPVWVPDAAHEALRDLVRAREAAKKDQLRAKHRLGKFLLRHGRRPPTGVKPWTLNYLSWVKHEVHFEQMAQEATLLDYLNEVEHAELRIARLNLAIEEAVKLTPPKMRAVIQALQALRGIAQVAAVAIVAEVGEVSRFTRARQLMGYGGITASEHSSGEGSWRGGITKTGNAHLRRVVVEAAWAYRHRPSLGVALRKRQEVVSEDIREIAWKAQHRLHTRYRKLTARGKDKGKVVTAIGRELLGFIWAIGVKVEAAQKLTDRQAA

SEQ ID NO: 469107 - protein, 341 aa, unidentified
MKHFVGLDVSMKETAVCVVDDHGQRIWEGSVASSADAIAMIIRQKAPDLVRAGMETGPQAVWLWHALRERGVAVDCIHARRAAAALKLQANKTDRNDAFGLARLVHSGWYEPVAIKSFDRYRMRAVLTARERIVRMSTTMINQIRGLAKSFGLTLSAGKGQVFEQSVRRALPSDAVLRDLFESLLTVLSGLKDQRRAFDRQLARFAREDEACRVVSSAPGVGNLTAIAFVTSVDDPARFRSSCDVGAYLGLTPRRYQSGEVDIGGRISKAGDRLTRKLLFEAATVILYRASPSIALKQWGLRISARSGSWKARVALARKLAVTLLTMWKTNTMFENRSFAG

SEQ ID NO: 469108 - protein, 397 aa, unidentified
MILLGVDPHKSTHTATAVEPESNQQVGTMRIEASLTDYRRLLAWAKRWPQRKWAVENANGLGRHLAQWLIARGESVVDVPAAATSRVRELSRGGRRKNDQIDAAAAATVACLQGDGRDVEPEDHTTALALLDERRVNLAQARVRTVNQLHALLRDLLSGGAPTQLSADLAVKLLRSVRPAGDVETVRKDIAWDLVAEIRRLDKQLTDNAARMQSLVEASGSALMDTPGIGPVMAARLIGRTRRAHRFPTSAAFANYAGAAPVEIASADKARHRLSRSGDRQRPRPAVAGRRQHRSDRHQHHAHAPLPLPAQFTAGLGRPAGTGRHPARHPGVGPDRGGRLPGTAAHSDQCGLKPVRCRPGRVSCRKAQTGLTEASRTPSAVGHRPAGCGSSSGASTG

SEQ ID NO: 469109 - protein, 328 aa, unidentified
MNVKTIGIDLAKNVFQIHGVDEHGKRLFNKQLRRAQMASFFANIPPCLIGMEACASAHFWANKLISMGHNVKLMAPQFVKPYVKTNKHDAADAEAICEAVTRPNMRFVPVKTAEQQAVLALHRSRQSFIKQRTAQANQIRGLLAEFGIVVPRGIQQLQRRLPELVEDADNPLPVLFRTQLSLLQHHMAYLFDVIATLDKQIEQCYRQNALCQRIGKIPGIGPVTASALIATIGKANNFENGRQLAAWLGLVPRQHSSGGKQVLLGISKRGDTYLRTLLIHGARAVLQSAKHKQDAVSSWANQLMARRNNNIASVALANKNARVMTPTY

SEQ ID NO: 469110 - protein, 366 aa, unidentified
MKKTSTVRVNGNMIFKGHKLTIGLDLGDRWSCYCVLEEAGEVLLEQKVATTPEAMKQIFEKIPRSLIALETGTHSPWVSRLLRELGHQVLVAHAQKVQLITKSNRKDDRHDARTLARLARIDPELLGPVRHRSAKAQIHLTVIRARAELVKARTALVNTARGLVKSYGQRLPKCGTQQVNRELAAGLNAELREILEPLLKEIESLNERIQEYEVRMEKIAKESYPQVELLKQVKGVGTQIALTYILTLEDPHRFPKSREVGCFLGLRPGRRDSGESQPQMHISKEGDRYLRTMLVQGAHYILGPFGEDSDLRRWGLKLAARGGKSAKKRAVVAVARKLAVLLHRLWVSGEVYEPLRNSHQAMRAVA

SEQ ID NO: 469111 - protein, 372 aa, unidentified
MRRFAASLNFTDTSRLPRITWTLTIVETRAVTGGVDTHADTHVAAALDRIGGLLGVAEFPATPAGYTDLVGWLGGFGTVQLVGVEGTGSYGAGLARHMAAAGVRVVEVDRCDRQDRRRQGKSDPLDAVSAARAALSGRALGAPKGRNGAVEAIRVLMVAKRSARSERTQTINQARALIVTGPDELRTRFARHTPAALVAGLATLRPRAAQVPGDVPGYATRIALRELARRAQFLDAQLERLDVLIVPLVNAHAPGLLALHGIGPDTAAMLLVAAGDQPARLRSEAAWAHLCAVAPIPASSGKVTRHRLNPGGDRNANHALWRIVITRMSAHPATRAYVQRRTAEGLSKKEIIRCLKRYVAREVYPHLRPDLS

SEQ ID NO: 469112 - protein, 356 aa, unidentified
MISRCLVHVPKIIVGVDTHKEEHVAVVIDKLGARMGQLSLPTTNMGYAALEHWARNLGEIEAFGVEGTGSYGAGLARFLRGQGHTVIEVNRPDRSTRRRLGKSDPTDAEMAARSVLAGVARDQPKSGVEEVEMIRMLKSVKDSAMKGRTQAINQMKALIVTAPVELREVLSGLTSSQLVARCSGWHSGQLDTPTTAAKYALRSLARRYTRLTEEIKGLNKELARLTVAFAPMLIESIGIGPDTAADLLVTAGSNPERLKSEAAFAALCGVSPIPASSGKTNRYRLNRGGDRRANAALYRIVIIRLRYDIRTRTYLERRTAEGKTKTEVIRCLKRYVAREVFGILHEIGLQHTFQNA

SEQ ID NO: 469113 - protein, 395 aa, unidentified
MFIVGIDVAKRSHEVCMITSDGQTVQRPFSIRNNCTGYNLMLEKIRKHTNIKSQIVFAMESTAHYWLALFTRLRKDGYHVILLNPIQTSAMRDMFIRKIKTDAKDSFIIAELIRFGRYAESNVAQDRLLALKELCRNRFYLVDMAGDLKRKLVALIDRVFPEYEAQFDTIFCKSSVALLKKYPTPQKLSNAHLDKLTELLWNSSNGHFGEWKARELRELARNSFGVEDCDGAYSTLILLMLDQIQSLSGKADALEKEISRLFQSFDTTVTTIPGVGPIIGAVILSEVGDISRFSSADKLAAYIGVDPSVNQSGEFQAAHAHMSKRGSPYLRRCIWMASQVAVQRDPMFRAYYEKKAAEGLKYMTIIGHVTRKMTAVIFAILRDHKVYEPVLPTAA

SEQ ID NO: 469114 - protein, 345 aa, unidentified
MTLTIVETRAVTGGVDTHADTHVAAALDAIGGVLGVSEFPATPAGYAGLLAWLNSFGPVCLVGIEGTGSYGAGLTRHVTAAGIRVVEVDRSDRQDRRRKGKSDPLDAVSAARAAQSGRAAGAPRGRDGTVEAIRALMVAKRTARAQRTQAINQARALVITGPDDIRTRFTCQTPAELVAELAALRPRPGSMVRYHTLLSLRELGRRAQFLDAQLERLDELIMPLVTARAPGLLQLYGVGPDTAAALLIAAGDHPGRLRSEAAWAHLCATAPIPASSGKVTRHRLNRGGDRQANHALWRIVITRMSSHPPTRAYVTRRAKEGLSKPEIIRCLKRYAAREVYPHLRG

SEQ ID NO: 469115 - protein, 353 aa, unidentified
MMVIGVDPHKRSRTAVAAGELGRKKAHKTVQARRDGHRELIAWAREVAPAGRAWAVKDVRHVAGGLIRELLAAGEAVVFVPPELMAGTRRGGRERGKSDPVDALAIARAALREDAYLPAARLDEQVLEVRRLTDHRDDLVAERTRVISRLRWLVHDLAPEPAPAPRALAGVRTRARLQAGLRALPDSAGRRIALSQLARITVLTAEAGQAEQELAVLARRLVPELLQVTGVAVITAAKILGEIGDIRRFRSLAAFARHHGTAPIPASSGTGDHGPHRLNRAGNRQLNAALHRIALVQSCYHDGARALLARRAQTTQETRKASLRVLKRHLSDVIYHALTADAWRLDDPAQQAA

SEQ ID NO: 469116 - protein, 344 aa, unidentified
MSSMPEPRRIVVGVDTHAEVHVACVIDEQGRRIGITDIPTTLAGYERLLSWSSSLGQIVMIGIEGSGSWGAGLAQFLIDHGHQVVEVQRPSRQQRRGRGKSDPIDAEAAARAALAGTAGPIKNRDGLGEMIRSLRTARRSAAEMRTDALNRMRALVVTAPHDLRDQLRDLSVVDLVKTCQRLRPGSITDPRAATKLALRSLARRIRSLEEELRELDAHLLELTKRAKPELLAIKGVGPDVAGTLIVTAGDNPHRLHSEAAFARLCGVAPLPASSGRTDRHRLNRGGDRQANKALWRIVISRIRSRDQATIHYLERRMAQGLTKRETIRCLKRYVAREVYQALTS

SEQ ID NO: 469117 - protein, 525 aa, unidentified
MREDIDWFVGFDWASQTHVVCLLDRNGRVTAERQVAHGGADLAELCDWLVAKSGAPPARIGVAIETPHGPIVEMLLERGFLVFAVNPKQLDRFRDRFTVAGAKDDRRDAHVLADSLRTDRRAFRPLAVDDAIVIELREWSRIADELTQERNRLGNRIRQQLWRYYPQMLQLGDDLTAENFLALWECAPTPAKAAKIDEASLARVLKAHRIRRFEAAEALRVLRQKPLQAAAGASEAAVAHIRVVAERARLINRQLKEAHRQLDALCARLEQPKESEAGQSSEQRDVAILRSLPGVGRINLATLLAEAAEPLRRRDYPVLRVLSGVAPVTRRSGKARFVLRRLACNRPPARRPLSLGARRHAGRSGQQEALRRPAPTRPQPWTRAANPGGSPAGRGLRHAREPDPVRPQPQSRAARRRLTIPGFDRNRHPFVPTCRRAERRAQRKSPRIPRLGIDDSSCPALCRASTPSRSRFAERNATLYQPLANGWKQLRRVDARHKAGHDGGWKSLELVEGGVAQRSTAPLRG

SEQ ID NO: 469118 - protein, 349 aa, unidentified
MEHYAGIDVSLELSSVCVVDAKGKIVKEAKISSDPVALVTFFRGLGIAIERIGLEAGPLSQWLHAGLTQAGFEVVLLETRHVKAALSAMTVKTDRKDARGIAQLIRMGWFRPVHCKSVGSQEVRALLVGRKLLLGKLLDVEFSIRGILRGFGLKMGMVTRRNFEARVRELCAGHSMLEQICAAMLAARSALQTEYTKLHKAMLTIVRKDEVCRRLMTTPGVGPLVAITFKTGIDDPSRIGKSKAVGALFGLTPKKYQSGETDVTGGITRVGDEMVRTALYEAANILLSRVTRFSTLKRWGMDVAKRRGAKRAKVALARKIGVILHRMWVDSTNFRWTKEALTAPRPIQA

SEQ ID NO: 469119 - protein, 424 aa, unidentified
MSKKKSSVAGLEALYARVCGLDVHKKVIVACVRILDAKDGTVQSTLRQFGAMTADLKELRQWLAELKVTHVAMESTGVYWQPVFNLLEGHFKTWVVNAQHIKKVPGRKTDIKDAEWIAQLLQCGLLRPSFVPERQQRELRDLTRHQTKLVQQRNAVDNRIQKVLETANIKLGSVASDVMGVSGRKMIEALIGGEKDVTVLAELAQRKLRGKIPELQRALEGELTEHHRFLLFRLLGQYDFLEKEITSVSERLGAVAPPSFRAAVEQLDAVAGVGERGARALLAETGTDMSRFPSHKHFASWAGQCPGNHESAGKRRSGKTPAANRHLDAVLTEMAHAAVRTKNSYFKAQYHHLAGRRGKKRAIGAVKHSLLVTVYFMLRDNKPYKDLGVHYFDKLNPQQRIRYHVRKLQELGQEVELSPMAVAA

SEQ ID NO: 469120 - protein, 359 aa, unidentified
MGSMLASVVDFVVGVDTHRDTHTAAFVDARTGGVIDQITVPTDAFGYRRLRSFADQQAPERRVWAIEGTGSYGAGLTTSLLEHGEWVVEIDRPARPARRDGAKSDDLDAVRAAREALSREHLAAPRARGDREALRVLTAARQGAVVARTKAIGQLKALIVNAPQSLRDQLRRGTTDQQLQRCARLRTLPQHSIEHRATIRAIRGTARRALALEAEAAEYETELEQLVVAICPVLLAQPGVGTITAAQFLISWSHAGRIRSEAAFASLAGAAPIPASSGTVTRHRLNRSGDRQLNRALHTVALSRLRIHEPTKAYAARRQAEGKSPREIKRCLKRAIAREVFRLMNTHAAAVTGSLPMTA

SEQ ID NO: 469121 - protein, 349 aa, unidentified
MTAIAVETIGCDVSDKKSELFILTGEGRTERPDPIRSTREGYRKFFQQRPLAHVIIEVGPHSRWINDLLQKLGHQVTVANPRRVKLISESDSKTDRTDAELLARLGKADVQLLAPIQHRGEGAQADLAVAKARSALVACRTKLVNHARSVVKSFGERLPTCTPESFHTKAWPHVPERLRPALKPLFGTLQQLHLEIRTEDQTLARIAKRYPEVEVLSQPDGVGLLTALVYLLTLEDKNRFKNSRMAGAFIGLRPKKDQSGKIDKQLRITKAGDPFLRRLLVGCANYILGPFGKESDLRRWGLQLASRGGKNAMKRAKVAVGRKLAVLMHRLWVTGEQYQPVGYSKPLAV

SEQ ID NO: 469122 - protein, 323 aa, unidentified
MTRIICGVDICSASLQARIGRNGAAGSFANNPEGIAALAAFCRTHQVELVAMEATGGYEQQPFALLSEQGLAVTILNPRAVRRFAEGMGVLEKTDALDAGLIAWFAEVKRSQPQSLSSTSQQQLRALVTRLRQLTQIRTAQRNQLRLVSSPAVLASFTELLALVARQIHELEAAIAELIAQDPLWQHLDQVFRSIKGVADRTVARLMAEMPEIGMLSNKTISKLAGVAPLARDSGKHQGKRAVRGGRASVREILFIVASVVGRHEPDFIAFQQRLSAAGKPRKVIRIALAHKLLIRLNAKAREVRQQFAAPQLERSGPVVVTH

SEQ ID NO: 469123 - protein, 362 aa, unidentified
MLVVGIDIGAESHHVAVVDRAEAVVVKATAFAENVAGYQELFALLARAGARGGEDLPLAAASAEQDRTLVVMEATGHYWQNLFAALVAQGYAVALVNPLRTHRFAGEELARTKTDSIDCLQLARFGAQKRPAVTCLPEAAVGELRELVRLRARLMQDVVDRVNQLHRLVDLGFPEFTRYLKNLNTQLATAILRQYPTAAAVRGLSCKRLAKLNYDGRHRVGEELARQLIAAAAVSVGSQHTTAHQTGVRYACEDLETLRQRLKQLDGDITARLQQHQVGKLLTTIAGIGDNTAAMLIAELGDPARFHSAASLAAYVGLCPGHRHSGKHQPKSSSLTPIGNRRLRQALWMPTLSAATCSNPPG

SEQ ID NO: 469124 - protein, 322 aa, unidentified
MSVYIGIDVSKATLDVGLVSARGREHARFENSPAGFVQLGRFLTKRRAKGGQVCMEATGQYGEALADYLHAAGYRLSVVNPAQVRGYAQSRLSRNKTDKVDAYLLADFCREHHPPRWTPPPAEWRELRALVRHYEDLSEARQQTLNRLEIESAAPLVQHQLKAHLAFLDSQLALTKQAILDHLNQHPDLRQQKDLLTSIPGIGDLTAGKLLAECRSLTDFTNVRQLVAFAGLNPQHHQSGTSVHKHTAISRCGSASLRHALYMPALVAIRHNPILSAFAKRLSAAGLPKKAVIVAVMRKLLHLVFGVLKSGRPFDPNFLAAT

SEQ ID NO: 469125 - protein, 416 aa, unidentified
MPFALPDALFFTGIDWAAETHAVCVLDAGGKIAAAFTIEHSADGIAALIRRLARYGDPGGMPVAIERPDGRLVDLLLEAGHPVVPVKPNAIKAWRDGEVLSGAKSDAGDAAVIAEYLRLRAHKLAIAAPYSDQTRALRAVVRARGDLVELRVAATNQLSALLDAHWPGARAIFADVESPVSLEFLTRYPTPAAAAHLGEKRMAAFCIKHGYSGRRSPAELLARLRAAPAGTGLESLTEALRDAVLAAVSVLQALNAAVKNLDRSAAAHLREHPDGKIFTSLPRSGQINAAQVLAEWGDCREAYAAPDSVAALAGVTPVTTQSGKHRSVHFRWACNMRFRAAITTFADNSRHASPWAAQIYASAIAGGKDHPHAIRILARAWIRVIYRCWLDGIPYDPARHAAAAALAEHPAKQIAA

SEQ ID NO: 469126 - protein, 348 aa, unidentified
MLAEVVDAVVGGDTHRDTHALELTALSGATIATLMIGNDERGFAEAIAWVAEHAPGPRVVVGLEGTRSYGIGLARVLQAAGLTVVEIERPRRGERRRGKSDPIDAHLAALHALRLDADRLPTPRADGDREALRILLGARRELTTAKTRTINRLRALLLTGSDADRALSRGALSSDRLAAITRRRGGQHETREYAVRRAEARRLALAISGIDRELADNKWHLADLVTHLAPQLLAKRGVGPVSAAQAIVSWSHPGRCRNDAAYAALAGASPIPASSGRIVRHRLNRGGDRHLNRTLHDILLTRWRTCPRTRAYIARRRAEGKTDPEIRRCLKRYIARELYRSLNTAMAA

SEQ ID NO: 469127 - protein, 347 aa, unidentified
MIIIGCDFHSRFQQIALLDTETGVVEERRLEHESGETQKFYAGLQEPALVGIESTGCAQWFAEMRSELGHELVVGDAAKIRAKESRKQKHDRRDAEHLLNLLVKGDFPRLWLPSAAARDARVWLEHRHQLVQLRTRTLNGLQAMALNHGLCLRQKLWTKQGQAELQKLPLREGRARRRADLLALRAQLDRWMAELDQRIAQEVAQRPDAQRLLTHPGVGPLTALGTVLILGPVERFPDAKHVTSYVGLIPQEESSGGRQRFGRLTKQGNGLLRFLLVEAGQTAARLDPGLRRAYRRLTFRKGRASAKVAVARKLAIRLYIMLRDQIDYAEFCRRGSPAGMLGEVALA

SEQ ID NO: 469128 - protein, 412 aa, unidentified
MEVIHRIIVGLDVHLAVVVACLRVQRGREITREQRRFGTTVPELLKLLDWLVEVGCPLAIIESSGVYWKPVFNILEGAVDVSLVNAYHAKAIAGYKTDRLDAERLAELGAHGLLRPSFIPPAPIRELREITRYRKALVESRVREINRAEKVLESANIKLSAVVSDIVGVSGRAMMRALIAGERDSATLAALAKGSLRGKTDELMPALTGRFMAGHGFLLARILDHIEYLEEQIVAISEEVARLCEPFREAVDLLMTIPGVGSITAQVVVAEIGIDMSRFPTANHLASWAGVCPGNNETAGKRRSGRTRKGSRWLRATLSEAAWSAAKTKGSAYQALFRRLAYSRGKGTKKARVAVSHAILIAVWHILKDMTPYCDLTPTQRTATDPEKIKQSLVKRLEHLGFSVTLEQLKAA

SEQ ID NO: 469129 - protein, 387 aa, unidentified
MARKRTLSTLDTSIAYEAVGLDLAKTDVALAAFDSDHKEPYLIDRIPYDKLYELLADMAPTLVAMEPCSGAHQIAEQIQELGHEVMMISGRHVQAWVKDHCNGQKTDLNDAFAILNLAYDRWLTPIRGKTREECRLLALQSSYRQLKGQRTKTMVHVKATLHAWGFPIRTGSFNQKALHELIDANREAFGDEVVETLHLMINRVHDLDHDIATVLKLLTEATQRDPRASLLRSIPGFGVLTTSRWCAVVGDIARFDTPKQTMAFIGLVPNNRITGHHTETSSGREARGQGKMSKRGDKMLRSLCILGAGALCLMVRNDRLPDCPFVASIKERLASPRPWFKVLVYVAAKLVRIATALLKYGETFSFEKAGISKAVLKQWELEQAKAA

SEQ ID NO: 469130 - protein, 412 aa, unidentified
MDRVYDKCCGVDVHKKLIVACFRDGSEQEIREFGATTRELLQMADWLKSKGCQMVAMESTASYWKPLYNILEYSDLDAMVVNAQHMRAVPGRKTDVKDAEWIADLLQHGLLRASYIPDRAQREYREVVRYRKSLVDERSRELNRLQKMLEGANIKISGTISDINGKSARAILEHLLSGQRFDEATYDEMKSKKVIARNLKASKEAIIDDLNGVMSDIQRRMMRELLKHVDELNEHIHNLDDEIDRLMTQEEKEASEAIQAIPGIGKTSADAIISVIGTDMSRFPTAAHISSWGRICPANNESAGKRKTGRLMPGNSFLRRTLILCAHSAAKNVGSYFHAQFMRISARRGKKRAYVAVAHSILIAIYYVLKENVPFKDLGANYYNQFNKERKINACLKKLKELGWEPLNTAVV

SEQ ID NO: 469131 - protein, 316 aa, unidentified
MENISGFVGIDVSKDHLDVHVRPEDRHERFSYDHDGVNALVAMLTQVQPQLIAMEATGGYEQQLVATLASQQFPVAVVNAKRVRDFAKATGQLAKTDRLDAAVLSDFAEKLRPAIRALPDESREELRALLVRRRQILDMITAEKNRQTIAPKKIRHHIQTHINWLQKRLAEVDDELSGSIKSSPIWKAKDAILQSAPGIGPTTSTTMLAALPELGLLNRRTIAALVGVAPMNRDSGKWRGRRAIQGGRQSVRTTLFMCTLVATKHNPVIRALYQRLIAAGKPKMVAITACMRKFLTILNAMVKTNTHWSPDHAKVG

SEQ ID NO: 469132 - protein, 411 aa, unidentified
MRIIRKRCLGLDLHKKQITGHLRVHQSSDQEPERIDIRFGTMPEDLLRLRSWIVDHQVSDVVMESTGVYWMHVYELLEPLTTPAVVNAAHVKKVPGRKTDVNDAQWLSELHAHGLLRLSFVPPKEIRELRLIARYRTKLVAMRTSARNRTIKMIELAGVKLSSVVCDSFGKTGRALLDALAEGPVTRTTIENVAKASLRKKTSELEAALRTPFSDYQRELLAMHLRAYDAIDGELAQSEIKLMERAKPYAAAIEKLDAVPGINPLAAITVLAETGLDMSVYRDAHHLTSLAGLAPGNNVSADKRRRIAMPKGNHYLKRISVQIAWAASRKTDSFLRSRFNRLSYRIGRNKAIVATARHILIIVYHLLAGDHQYKDLGPQFYDKRNKERSIQRHVRRLEQLGFTVALEPTTE

SEQ ID NO: 469133 - protein, 484 aa, unidentified
MEAKSKRERAPKRITYPAGEPKWHQMNRNQRRELTRQMQSQEIRLEVIHPDAAGIDIGNELHYVAVPPNGDRESVRHFGCTTAELKALADWLKQCGIRTVAMQSTGVYWMAVFDILEEAGLEVYLVNARDTKNLPGRKTDVQESQWLMTLHTYGLLRNSFRPGQEIRRLRTYWRQRNDLVRSASRHIQRMQKTLSQMNVQLANVLSDITGITGQAIIKAILQGERDPRELAAYRDPRVKASEEEIAAHLEGNWQEDLLFVLKQEQDGYEFCQKQMSECDRQLEKYLAHMENRSESAALPEEKRRGRLNKKKGNAPRFDLRRELFRMAGTDLTRIDGIDVMTAMTILSEVGYDMSKWKTENHFVSWLRLCPDNKISGDKIIGKGRLPTNNRATLALRMAASTLRASNTYVGAQFRRLRTKLGPPVAIKAMAAKLARLVYRMLRFGMDFVDQGAEVYEAKSHQMQVRHLEWKAAKLGFHLSEIPAS

SEQ ID NO: 469134 - protein, 367 aa, unidentified
MHATPETAGVATVAVDLAKDVFELAFADADHRIVERKRLSRRAFAHVLDNRGPLRVVMEACGSAHYWARRFAGQGHTVRLLPARDVRPYVRRNKTDRTDVAGILEADRCAPIDPVPIKSPEQQGVQALHRIRERLKAQRTSTINLLRGVLREFGLVIPLGAAKVRPAVLAVLEDGDNDVPMALRHTLGELLDRLAGLQADMTAIEQRLEGFAENDPASRRYQSVPGIGVLTATALRASVGSLDRFRSGRHFAAWLGLTLREHSSGAQRHLGAMSKRGDGYLRLLLIHGARAALRAAQVRQRKDQPLDRLQTWALALQARQGHNKAAVALANKVARRVWAMEHHHAAFDGNHCSVRPAVAAGVACASE

SEQ ID NO: 469135 - protein, 422 aa, unidentified
MSYCPVAGIDVSKRFSDMCILSPDNKIFAQEKIYHDETSINRANALLQKAERLFFSKPVIVMESTSHYHLILFQFFSEHGYDVIVVNPLQSNSMKDFSIRKRKTDRVDAFKLAMMYRTKTLRPSQIPQTATRALRQLCRHRAELLNDVSSYKNRLTALLDQTFPGYDKVFSDVGGVTSCAVLVRFPTPTILLVEEESELVEVIAAASKSGYSFAKKKAGLLISAAQKAQTLGIHSCADETLIVCTIQMLRTLSESVLQIETAIDNLLAQIKEMRNNVSLLQSIPGIGSHSAALLLGEIGDISLFKKPKQLAAYFGLDPTERQSGSFRGTRNKLSKRGSSYARAALHMGIVNSICKRGKDSAANPVLLSYYEKKCKNKPAKVAQAASMHKLVFIIFAVLRDQKPFELKTPEQHAVEQGFVKAA

SEQ ID NO: 469136 - protein, 412 aa, unidentified
MDEVVEFCAGLDVHRDTVVATVRFPQGRRRGSETKTFGTDTAELVALGDWLVSHQVSRVGLESTGVYWKPVFYLLEDRVDQLWLLNAQHLKNVPGRKTDVVDSAWIAQLVEHGLVRPSFVPPPPIRELRDFTRHRRVLSEERTRMVQRLEKVLQDAGIKLTSVASTVLSKSARAMLEAMLAGESDPAVLAELAKGRMRSKIPALTDALRGSFRVCHHGVLVRQILAHVDFLDGQLADLDEQITIRVATFEPIIERLQTIPGVARKCAIGMISEIGVDMRVFPTPAHLASWAGICPGNNASGGKARSGRTRHGPVALKTVLTEAAQAAARTKNTYLGARYHAIRGRRGTFKAVGAIRHDILIAYWHIVDGEVEYRDLGADWVVRRHSREYQIARLAQQIEKLGAAVEITMPAA

SEQ ID NO: 469137 - protein, 307 aa, unidentified
MTVSVGIDVSKHSLEWVAGPEGAIHHLCNEPRPIAGLVHRLLSLGPERILVESTGGYERLLVAKLAEAGLPVVVVNPRRVRSFGEGMGMLAKTDRIDARLLALFGEKVRPPIRPISQGRDRLLADFVARRRQVMTLIVAEKNRRDTASDPVRRLMAPLLRQLEQHLEKLDDRIETLLLEDPERAELHELLQTVPGVGPGVARTLLVDLPELGHLGRREIAALVGVAPFARDSGTFRGIRRIRGGRASVRTVLYLAAMSAARFNPVLRAFYQRLRKAGKPPKLAFVAIARKLLTILNAVAREKTAWQN

SEQ ID NO: 469138 - protein, 432 aa, unidentified
MRKRMQQSEPAYAALIGLDWAHQSHVVSILDTASGAKSTETLEQSPGAIEQWVHDLQQRYPGGKVALALEQSRGPVVYALMDYEIFDLYPINPVAMSSFRKTFSTSGAKDDPTDAELIRMLLEKHRDRLRPLVLDDELSRKIRLLCEKRRKIVDIKAGLSNRLIALLKEYYPQALKLIGRETGGILSCDFLIKWPSFEELRRAREETIRSFYYRHNCRSKKRIEARLDLIGREQPLTRDEPIIEASKMMAVALCKQMRQLNASVTQFDRAIAEAFRCHEDRRLFLSFPGAGECLAPRLMTVFGTDRDRWQAATDIQKFTGVAPVISRSGKSLWIHKRSACPIFIRQTFQEFAAASIKFSVWARAYYDQQRARGAGHHAAIRSLAFKWIRVMFRCWKNHEEYDEVKYLQALQRAGSDVLKYIGAKPVHVPAGS

SEQ ID NO: 469139 - protein, 411 aa, unidentified
MEIVYPRCCGIDVHKASVCVCISIKDGGAMEKHKRCFDTTTAQLRELAAWLGQYQVTKVAMEATGVYWKPVWNALEEGFELLLVNPQHLKSIPGKKTDYKDGERIADLLQHGLLRGSFVPPQAIRELRDLTRMRATLAQERSSVISRIEKTLEDPNVKLGVVASDVVGVSGRAMLEAIVKGETDPAKLAELARGTLRKKIPQLKLALEGNLTEHHRFMLRQWLDMLDFLDGKIAQLEAQIVDKSRPFETTVQTWMQVPGLRRINAYSLLAEIGADMKPFPTAAHLASWAAVCPGNRESAGKQTSGKIRPGNPWLRRTLCEAAWAASRTKKSYFRALYRHLARSRGKNRALIAVAHSLLVTVYSFTTASQPYRDLGLDYFDRLNKGQLEKSLVSRLEKLGHKVTLEPKTAAA

SEQ ID NO: 469140 - protein, 322 aa, unidentified
MSNKNYGGIDVAKQNVVIGIFGYPKTKTEANNPNGHTNTVEYLKKHNVNLVVLESTGGLEVPLANALYAAGMRVVIANPQRTHKYAESFSLGKTDHLDAKMLADYAQALDARKMVDDILYVPPSAEIQELEALVKRRSQLVEMRKMEKNRLEQTHASQKASVAALIAHLGELIVALDKDIDRYNKSGFNGKGTILSEMKGVGNTTCATLLSMMPELGKVAHKRAAALAGVVPLPHQSGDKEKKTGCIGGRKMVRNALYMAALTATRFEPKIKVFYERLMNRGKPFKVAINACMHKLLRILNARMRDYLASLEQTKASTPQTA

SEQ ID NO: 469141 - protein, 331 aa, unidentified
MFPVGIDVSKNTLDLCMLYDGIKGRIKTRNIQNNRHSVENILRWLRLQHCGPEDVHVVMEATGVYHERLATELHDAGFRVSLANPHRSREFARGMGIMTKTDKVDAYMLACYAFLKKPHHWEPPSPEIRYLAALLRRRDVLLGDALREENRLEKYLSTDTPADIISSCRRMAQLLREEVSNIERQIKAHIKASPALRRDYTLLNSIKSVGPQLGMHMLVELRSHNFASAEQAAAFLGVVPIEKRSGTSVRSRPRMSKIGPPQLRARLYMSALCGKIYNKRMRNIYDEMCLRGKPKMVAIGALMRKLVHWCYGVLKTGTVFNDEGLKQVLST

SEQ ID NO: 469142 - protein, 322 aa, unidentified
MATLSFCGIDVSKDRLDAMVLPEQQSSSMGNHPAGWAQLVEWLSDFSIAAIGLEASGGYERGVMRALLAAGLSVRQINPFKLRQFANASGVLAKNDRLDARMIASFIAVMPTRAAQRRTPGIEQMSEIVTVRRHLSDQKIAAENATKLLEDPMLQRLSRRRIAQLASDIAQLDNRLAEIVAADSALSRRYQVLTSMPGVGLVLACTLIALLPELGRMSRKQIAALVGVAPYDFDSGKLKGKRCIWGGRAPVRHVLYMAAMSAGNWNPTLKAFRHRLKTAGKVPKVTIVAVMRKMITTLNAMVRDDVAWADHLAGRRSAPTAR

SEQ ID NO: 469143 - protein, 342 aa, unidentified
MQMTTIGLDIAKNVFQVHGIDAGEKVVVRKQLRRGQMLAFFEALPPLLVGMEACATAHYWARELTKLGHQVRLMPAKDVKAYVKRNKNDAADAEAICEAVRRPTMRFVQVKSAEQQSQLMLHRTRDLLMRQRTQVINALRAHLGELGITAAQGKAGLTELLAIIAGSADERLPTEAHASLMVLAAELQVMRTLIASIEKRIITHHRSDEASKRLRSIPGIGLVGATAIVATITDPKAFRSGRDLAAWIGLVPRQDSTGGKQKLGPISKQGDRYLRRILVVGAHAVLKLVRQKPEKYPWLTQLLARKPFKVVAIALANKMARIAWALLVKGGPYRARALVATA

SEQ ID NO: 469144 - protein, 349 aa, unidentified
MILVGCDLHTRKQHVALLNTDTGELWDQELVHDGGAVERFYAALPPPVIVGIESTGYSLWFHALLQRLGHSLLVGEAAKIRAMVVRKTKTDRRDARHLRDLLKDNRFPRVWIPDPTTRDLRALIKHRLRLVRIRTMVKNGLHAIALNQRLALGSSLWSRQGLAQLQALVLLPHTRQRRDDSLELLQWLNGHIDALDLHVAAAAAADPDARRLMTHPGVGPLTALTTVLTLGPVARFPGSKHVVSYIGLAPAVNASADKYRLGHISKQGSALLRWVLGQAAPLATRSDAQLKRVYFAVLRRRGRPKAKVALARRLLVRLYVMLRDQIDYDEFCRRGCAQRPGLETARVPG

SEQ ID NO: 469145 - protein, 353 aa, unidentified
MKYVGIDWAYRKAQWCALSPGGQIASEGQIPADRDGLARLVLELGDEVKACLEMMSGALWVRDQLVDCGWQVEVADARKVKTVAPLAAKTDKVDARLLAELSRRELVPALWLPSLDERALRERLRRRMHLVRLRTSAKARIAGLQTQWGVRVSLQRLRRADGMALLERAGVPEVWRRSVSECLSVIEFLDARIAPLDAELRPLAHADPRAVLLDTIPGVAELLALTIAVEIGEVSRFSSPARLVSYGRLAPRVHQSGQARPHSGPLSKSGSRLLAWAAVEAAQQAWRETNPWHDLYADVARRSGNKNSAKAAVARKILIAAWYMLSRNQPFKPAPRCTRGTSVPASSRLALAA

SEQ ID NO: 469146 - protein, 375 aa, unidentified
MQKKVRFLGLDVHAETIAVAVAEQDGEVRSLGVIPNRAESVRKLIRKLGAGEHLRACYEAGPTGYVLYWQLAELGVECTVVAPTLVPVKAGDRVKTDRRDAAKLARCHRAGDLTGVWVPDASAEALRDLVRTREAAKQDQLRARHRLSKFLLRTGRRPVAGVKVWSQPYMVWVRQLRYEQAAQEWTRLDLLHEVEHMAERVKRLEEAIREAVKLAPAAMQEVIRGLQALRGIAEISAVTVVAELGQISRFENARQLMGYSGAVPSENSSGRRQQRGAITKTGNAHLRRIAIEAAWSYRLRPAVGPALRKRQEGVPEEIKEMAWKAQLRLHKRYARLAAAGKEQCKITTAVGRELLGFIWAIGVKTEAAARRAIAA

SEQ ID NO: 469147 - protein, 323 aa, unidentified
MQRIIIGVDVSQDFLDCHIRPTSVRQRFANTSAGIAELVAWARPLAAERILFESTGPYQIAAVGALLAEGFPAVVVNARQVRDFAKAMNYLAKTDTIDAAVIAHFGEVATTKVRPLESEEIRTLRELYDRRGQLVHMRAMEKNQRHSASVARASANVLHSIDKHIEYLEKQIHDLEQRMDRLIENSAVFQARNEILQTITGIGPHVSRTLLVHLPELGQYTRQKIAALVGLAPFNDDSGEHVGHRHIRGGRNKVRVGMYQAAIAAIRHCPCMKAFYAALKARGKASRIAIIAIARKILVLANALVRDMKPYEDRTNSICLKTT

SEQ ID NO: 469148 - protein, 352 aa, unidentified
MMIIGCDFHPRFQHISFLLEESGECGQRRLLHTAEAEQYYRSLSGTRVRVGIEATGSYGWFRRLLSELGHELLVGDATQIRASNPRRQKTDKRDAEHILGLLAQDRFPAIWQPPAENAQLRQLLLHRSRLVRLRTRVTNQLDGMAKNEGLLVPGGWSGKRRMAIEALPLPGWYGERRKDLLGLLDRLEERIAPLDRAVSQAAAHNAEACLLMTHPGVGPVVSLAYVLTIGNWQRFARGKQVSSYFGLIPAEESSGDKRRLGHISKQGNTLVRWLLVEAASTAQRYDASWHRQYLRLSMSKHHGVAKVAIAHKLAVRLYWMLRSGEDYQHARERGSHARQSECPGGRNTRPIE

SEQ ID NO: 469149 - protein, 347 aa, unidentified
MNFYIQPHKHYCGIDLHARAMYVCILDQSGTKLVHKNLPTTPEAFLRIIAPYREDLVVGVECMFTWYWLADLCQKEGLAFVLGHALYMKAIHGGKAKNDIIHAHKIAVLLRGSMCLQASVYRAEMRANRDLLRRRCHLARKRAELLAHIHNTNSQYNLPEIGKRLANKANREDVADHFPDPSVRKAIEVDVSLIDQYDQLLGEVELYLTRSAKAHDVQTFARLQSVPGIGQILALVILYEIQAIARFPRVQDFVSYCRLVKCAKESNGKRLGTSGKKIGNVHLRWAFAEAAVLFIRQSQPGKEYFAQLEHKHGKAKALTVLAHKLGRAVYYMLSREQAFDRQRFVTA

SEQ ID NO: 469150 - protein, 372 aa, unidentified
MSMYFIGIDISKYKHDCCIISAADQKVVSKVTIKNNKAGFNELLTIIHSLANPADIRIGFESTAHYALNLELFLENSLLTFMEVNPVLISEYKKSKTLRRTKTDSVDCESIARWLMTVEYKPHSKGFYHAYSLKSLTRLRDKLIRQRSFYLIKITNVLDHTFPEFKPFFNERLSKTALYLLENYGSAEKMARMNSASYEKLRSLSRGKFSPQQFLQLKELAANTVGVNNSIFDVELNSLLSLYKSLVKEINTIEKEINKLIEEVHPHYMSVPGIGPLSAAVIYSEYGDISNFTNPGQMLAFAGIEPGINESGTESHGGKMVKRGSSQLRYTLINCCLPLIRFDMTFATYYAKKRGESKPHRVAITHMVKRLI

SEQ ID NO: 469151 - protein, 310 aa, unidentified
MESITVGIDVSKNRLDVAVRPSGEVFAVERNAAGLEQLTIRLRELAPQVVALEATGGFETIAAAALASARLPVVVVNPAQIRAFAKAIGQRAKTDPIDAATIAHFAEATKPEPRPLPDEATRLLGDLVARRRQIVEMIGAERQREQRVTVPRLRRSITRLIKALEKELASLNTDIGDAVRGSPAWREKENLLSSVPGVGPVISSTLIAELPELGQLGRREIAALAGLAPFTRQSGKWRGKSFIGGGRTVVRTALFMGASVAARHNPVLKAFFDRLVAAGKPKMVAIIAVARKLLTILNAIIRDNRPWQTA

SEQ ID NO: 469152 - protein, 346 aa, unidentified
MEKISIIGLDLAKQVFQVHAADGAGRCVLRKQLKRCEVLAFFAKLSPCVVAMEACGTAHYWAREIAKLGHEARLIPPAYVKAYVKRGKNDAIDAEAICEAASRPSMRFVPVKSVEGQALAMLHRSRDLSIKNRTMLVNALRGHLAEFGFIAAKGIGKLPDLIKIVSEAPKEALPDMVRATLSGFLDAIAALNVHLAAIEKQLRAWHKSDAKSQRLASAPGIGLIGATALCALVPDPSLFKNGRHLAAWLGLTPRQDGTGGKTRLKRISKAGDCYLRRLLVLGATSLLRSLANKTTPLALWTQGLLARRPRRLVTVALANKLARIAWALMTKAEAYKPLAAAQMANA

SEQ ID NO: 469153 - protein, 410 aa, unidentified
MEVLHAHCAGLDIHKDSVVACVRHMVEGKVTSQVKTFKTTTQELMALSDWLSAEGVTHIAMEATGVYWKPVWHILSDGEFELVLGNAAHVKNVPGRKTDVNDATWLADLMAHGLIRPSFVPDEPTQQMRDLLRTRKQFVRERTGHTQRIQKTLEDANIKLDSVISDIVGISGRRMIEALIAGRTDPQALAALADGRLKATPAELEASLRGRVTAHHRFMLRLHLDQLDALDAAIGRIDKEVDSNVEPFRVAIEMLKTIPGVSRLSAEVIVSEIGIDMSRFPTEGDLISWAGLCPKNDESAGKRRSTRMKKGAPWLKTTLVQCAWAATRTKETYLHAQYLRIRSRRGAKKAIGAVAASILTAAYHMLKNGTLYQDLGANHFDKRAQGKHVLQLVNRLKNLGFAVQITPVAA

SEQ ID NO: 469154 - protein, 340 aa, unidentified
MFNHYERGSPMSDVTTVGIDLAKNVFSLHGVDAEGAVVLRRSVNRAKLLELIAQLSPCLIGMEACSGAHDWARRFSRFGHRVRLMAPKFVAPYRKSGKNDGNDAEAICEAVTRPSMRFVPVKSLEQQAELCLHRTRQGFIEERTATINRLRGLLAEFGHVLPQRAVEVRRQVPALLEQLPVRAARCVGDLLEHVRELEAKIATFEREIEAHARHSALAQRAQGRRGIGPITASAFVATVGDAREFSSGRQFAAWLGLVPRQYSTGGKSRLGRITRRGDGYLRMLLVMGARSVLQRASRERDPLSRWALAVRERRGYHRACVAIAAKNARVLWAVLAKAPA

SEQ ID NO: 469155 - protein, 396 aa, unidentified
MDVHRSFAQIAVVEDGVCRDEGRIGVRPEELRAWASGLRPDDEVALEATTNSDAIATMLRPLVRRVVVSNPRKTRAIAEAKVKTDKVDARILAQLLAADFLPGTWVADDRTRMLRRLVMRRTHLVKQRTRVKNQVHAIMARNLVPTCPHADLFSGIGQRWLDRQDLPADEWRSVEALLRQLDFHGEELTQVDRDIALEALDDPIVARLMTVPGIDVTVAISILAAVGDFNRFDSPDRLVSYLGLNPRVRQSGNGPATHGRITKAGPAQARGMLVEAAFSASRAPGPLRAFYRRVKERRGFQIATVATARKMTVLCWHLITNGEDYGFARPSLNAHKRRKLELAAGASSRRGPARGASHDYHVKRPRDQERAIAEHAERSYEVMVAHWQPGPPAARA

SEQ ID NO: 469156 - protein, 355 aa, unidentified
MNTQITATPKIFIGLDIHKKSWTVSIQTDLFFHKTYSLPSVSEDLYQYVERTFPNHEVHLVYEAGCCGFSVARYFLNLGWYVLVVNPADVKTGDKERYQKTDALDSKNLSNQLKAGVLKGIYIPTEEHEQFTTLARHRTQVTKKLRQTKSHIKSMLLFHGIKVPDQFDNSNWSKDFIVWLEALKFSTSCGDLALQGKIRIYKFIKSEYLEIANQMRAYCRKNNKKDYYLLKSIPGIGGYLASVIIAECGDLRRFNTEGQFSSYIGLVPGIYNSGASEKCLGITPRSRSQLRSYLIEAAWVAIRKDIEMQQYYRKHQGKNVKSIIVKVAHKMARRILSVIKTETSYQINRNLILTE

SEQ ID NO: 469157 - protein, 366 aa, unidentified
MQKISTVQVFGNEIFKEQKLTIGMDLGDRWSFYCVLDEAGKIILEQKVATTPEAMKQTFGKIPRSLIALETGTHSPWVSRLLTELGHEVIVAHAQKVELITKSNRKDDRHDARTLARLARIDPELLGPVRHRSAKAQIHLTVIRARAELVSARKALVNAARGLVKSFSERLPKCGTYQVNEKLAEGVSAELRDVLAPLLREVESLNERIKEYDERMEKIAKEVYPEVSLLQQVKGVGTQIALTYILTIEDPYRFPKSRQVGCFLGLRPGRRNSGESEPQKKISKEGDRYLRTMMVQGAHYILGPFGEDSDLRRWGLKLAERGGKNAKKRAVVAVARKLAVLLHRLWVSGEVYEPLRNNQKAIRAVA

SEQ ID NO: 469158 - protein, 404 aa, unidentified
MTKYHVGVDIGKQKHKACIRTVSQDSYSGAFSVQVSREGFEKLLTTLEKHSPDKDDFVIGIEATGNYGNTLAYFLLSRGYKVVEINPYRANQFRKAQGKKAKSDRIDARSLAAMISLGNHKPLSIPDPTIDNLKELTRFRADLIKDRSALVNQLHQCLVTLFPEFAAHFGKLDSATSLSLLTSYPGPEQICQAGEDGVMQALTIASHGRAGKALAKDLLEAAHSSVGIIQRQPALAIRVTTMAERILALNAAITRVEKKIEDLFAKLPYNPNDFPVGNICSLATIIAEIEDINRFPTLKQFLSHFGWCPRSFQTGNYRLEHPRMSHAGNRYVRRIIWMLSIGAIRTVPRYHAYFLRRVEAGKPKMHVIVAVGRKLLSVFYAILKTGIPYDPDWEVNRHLALARS

SEQ ID NO: 469159 - protein, 479 aa, unidentified
MKAKPKESAPSVQPHWHQMNRKQRRDMERKIHSADLSLQLVHPDAAGVDIGNECHYVAVPPDRDSQPTRHFGCTTAELKTMADWLKKCGIRTVAMQSTGVYWIAVYDILEQAGLEVYLVNARDTKNLPGRKSDVQESQWLMKLHTYGLLRNSFRPSQEIRTMRTYWRQRKDLVQSAGRHIQRMQKALTQMNMQLANVLSDVSGVTGQAIIKAILAGERDPQKLAAFRDPRVKASEQAIARSLEGNWQEDLLFVLKQEQAGYEFCQKQMAECDRQLEQYLRQMGDRSQGAPLPEEKRRDRLQKKKGNQPYFDLRQQLFRMTGTDLTKIDGIDVMTAATILSEAGWDMTKWQNEDHFVSWLRLSPDNRISGDRIIGKGRLPTTNRITVALKLAANNLRTSQSYLGAQFRRFRSRLDTPVAIKAMAAKLARLVYRILRYGTNYVDRGAQFYEVQQRTRDIRRLKQRAAKLGFQLLQASTSTP

SEQ ID NO: 469160 - protein, 345 aa, unidentified
MSVYVGIDVHRKRSQVAVIDQDGEVLANRNVPNGVKPILGVIGGLPAGTPAAFEAAFGWGWLEALLEDYGFEPHLVHPLQCKAIASARLKNDKVDAAILAQLLRADLLPEAWIAPPAVRELRALVRHRIQLVRLRTLLRNRIHAVLADHGQDRPAGCWSGPGRQWLASLELPAASREVIDDDLALIDALQQPVDRLDWELHQRAKADPRVKVLTRLPGVGPFTALVILAETGDVSRFGSARKLAAWAGLTPTVRGSDRTVRHGHISKQGSVWVRWILCEAAQTAKRSPQFAARYQIIARKRGKKIATTAIARKLLTRAWHLLTDAERAASPPAITTASAPPTGAP

SEQ ID NO: 469161 - protein, 373 aa, unidentified
MTASMDEEAPAMESMRWVGVDVHAKESVAAVLDQATGEVSTHRIAGRPDVVLDWLTTVAQPFRAVYEAGPTGYGLVRRASERGLDVVVCAPGHILKNATDHIKVDKRDAVRLARLLSAGELRLVRIPEPDQEQLRDLVRSREDVRVDLTRIRNRIGKFLLRRELYPPQHAESWGVLHRKWLQQLRFEDRASELVFQDAMQAHDILVARREQLERALAEIAASSPWSRTVARLRCLRGIDTLSALGLVAEVGDFRRFVHPRFLSSYLGLVPSEHWSGDKRRQGGITKAGSKHARRLLVEAAWQYRHVPWTSHHISQRQQGQDPRVIDIAWRAQRRLYKRWQRLHEERRKRSTVVAVAVGRELAAYCWEIATLTG

SEQ ID NO: 469162 - protein, 418 aa, unidentified
MKVVYPICCGVDVHKKFIIATIIKTEGITPKYTRKRFSTFNNDILRFKQWLLENDCRDVCMESTGKYWVPVYNLLEDEINVVVASPKWVRAVKGNKDDKKDSKWIGDLFRLGLVPGSFIPPKSIRVLREYTRYRYKLVSCKSSEKNRYQNSFTVCNIALDSVVSDMFGKSATLITDYLTQTDNFDPDHCKSLLQRSLKKKADAVIDSILGYKIDPAQKARMIMIKSHLRYVEKAIETMDAAIDTLVEPYENHISLLCSIPGVDRRSAITIISEIGTDINQFTHSKRLCCWAGLTPGNNESAGKKKSVRITRAGVYLKPALVQVAHAAVKSIQSPYYKNKYQHISKRRGKKRAIIAIARMILTAIYHMFKTGELWNPTDLFKVDLPLVLVERQKQKAIQNALKLLTSEGITLTANTLPA

SEQ ID NO: 469163 - protein, 362 aa, unidentified
MENIALIGIDLGKNSFHIHCQDRRGKAVYRKKFTRPKLIEFLATCPATTIAMEACGGSHFMARKLEELGHSPKLISPQFVRPFVKSNKNDFVDAEAICEAASRPSMRFVQPRTESQQAMRALHRVRESLVQDKVKTTNQMHAFLLEFGISVPRGAAVISRLSTILEDNSLPLYLSQLLLKLQQHYHYLVEQIKDLESQLKRKLDEDEVGQRLLSIPCVGTLTASTISTEIGDGKQYASSRDFAAATGLVPRQYSTGGRTTLLGISKRGNKKIRTLLVQCARVFIQKLEHQSGEAAIKWSAAPDMTPQTVLYRRPVAQFSNFQPKIVSSWLILALFQANFLISGRSRLCPYQLVNSNQVRQGE

SEQ ID NO: 469164 - protein, 344 aa, unidentified
MILGLPRRTEHYDKIHACRCDKGVGVIGIDVSKDYLITSRGRVRKYKNNKEGYEEILEMKPCTIVLEPTGVYAIRPSQYFKEKGIKVLQVSPNMLSREKEFRGKKTDFYDAEKLENMVDKAKEYEYNPLREMVTLYLFLKDIEVKYKNRLERTLFLVSDNNKISKERLEKLAKGDFTQEELYQLEYTPIVVEEIKVLAKTLLETQEKLKEVRRMIEEQVPDNHVLLTIPGIGRLAAGIIIGIVGDVKRFPKPESFVAYCGLDPVVERSGKAVISKGISKRGNKYLCSLLYFLAGRNYSRNPNLLKFYESHKDRLKGKKFYTALARKLARIIWSVWYNNKPYEPK

SEQ ID NO: 469165 - protein, 370 aa, unidentified
MAKPSMADLERTRVTVGVDTHKDLHVARAKDQLGRPLGENIIPTTPAGYRDLLDWARTYGDVEAFGVEGAGSYGAGLSRFLLSQGQVVIEVNRPSRQARRRNGKSDPADADAAASAVLSGDANATPKAGDAHVEMVRALRIARQTAIKARTQAINATKALLVTAPSELRESLRGKSTTMQVRTCARFRPGELAGPTAAVKIALRSLATRCETLEAEIVCLERHLDGLLAEAAPDLLARFGVGADSAGALLVAVGDNPDRLRSEAAFSMLCGSSPVEASSGQQTRHRLNRGGDRQANAALHRIVMARLRWDERSKDYLERRTKEGMSKREIIRRLKRYVAREIYGVIKVLQANDTTVAAAAVDEMSRSPGR

SEQ ID NO: 469166 - protein, 338 aa, unidentified
MKLYAGIDLHSNNHVVVVSDEDGKQVYRKRLSNDLEKTLSALAPYQPEIEGVAVESTYNWYWLVDGLMDHGYRLHLVNTAAVRQYEGLKYADDNTDAYWLSNLLRLGILPEGYIFPREDRAVRDLSRKRCQLVQMCTANILSIQNIAARNLGYKLSANRIKALLPEDPERIFPQPEVALAVDTNRVVVRSLSEQIARLEKAMLAQARKRPEYRHLLTAPGIGKILALTILLETGDIGRFPGPGHYASYCRCVSSARISNNKSKGKGNTKNGNKHLAWAFVEAANFATRYNDRIKAYYQRKLHNTHPVVARKTVAHKMARACFYMMRDRLDFDIDKAFK

SEQ ID NO: 469167 - protein, 324 aa, unidentified
MTSPQREIYVGIDVSKRSLDVCILREDDRQEGGESFVVSNDQEGVQEMLSRLEGASVELAVMEATGRYERLAATMLAASSISVAIVNPRQARDFAKAIGQLAKTDKIDAFVLARFARAVEPRTSVIPEEKAVALQGILARRRQLIEMLVSENNRLKMASKPLAKRIRAHVQWLEKEIERIDGDLDRAIEENAAFKANEALLRSVPGVGRVLSRTLLAELPELGEITHRRLCALVGVAPFNRDSGQRSGKREAWGGRAPVRAVLYMSALVATRHNPHIKEFYERLLSTGKPKKVALVACMRKLLTILNALMRDRANWRCPHALTP

SEQ ID NO: 469168 - protein, 318 aa, unidentified
MPPAASVFVGIDVAKAELVMAIRPSGGAGPRAMMTQAFSGFSRGLREAAPALVVLEATGGYERAAVAALATAGLALVVVNPRQVRDFARATGQLAKTDRIDADTLALFAERVRPDPRALPTESAQALDALLTRRRQILGMVGAERNRLEHAVPAVRRGIVQHIRWLERQLHDVDDDLDRTIQASPVWRAKENLLRSVPGVGPVVSRTLIGDLPELGTLPRKQIAALVGVAPLARDSGTLRGKRLVWGGRAPVRAALYMAALVATRRNPAIREFYQRLLTAGKPKKVALTACMRKLLTILNAMLRANTVWRHTVQTATT

SEQ ID NO: 469169 - protein, 346 aa, unidentified
MMTSVTRRVTGGVDTHDDVHVAAVCDNDTGRTLDTASFPTTTAGYAGLHEWMRSHGTLDRVGVESTGSWGAGLTRHLIGAGVVVVEVDRPDRKARRQDGKTDTLDAVAAARAVISGRATGVPKTRDGSVEAIRQLEVVYHAASKDRTRAINQFKAIIVSAPSGLRHRLRDGLSLRNQLARARRFPDNPPDLVEQQTRFALREIARRIEFLEQHCTRLETRISDRVVAHCPALIGLSCVGAHSAAQLLAAAGDNPQRIRSEAAFARLCGACPMPASSGKTNRHRLNRGGDRRANNALFTIVLNRMQRDPWPNSSRRPQPTSHDSNEASPTTPGPRKNSRLALTHHLT

SEQ ID NO: 469170 - protein, 403 aa, unidentified
MTKESLIVFGGVDTHRDVHVAAVVDERGRILDTAPFEVNSKGYAALRKWMNGFGPLAKVGVEGTGSYGAGLAHHLQSRGVEVVEVNRPNRQMRRQRGKSDTVDAEAAARAALNGEATVVPKSHDDAVESIRVLRVAYCSARDTHTRLALQIRDLIVTAPASLRENLPARTKDRVARCASFRPGDPRDPLEATRLALKTLSRRYQELSVDMEELTTILDRLTREANPALRAAKGVGVDVAATLLVAAGSNCGRLRSEAAFAAMCGVSPVQASSGLTNRHRLNRSGNRQANNALWRIAVNRMICDDETKAYLARRTAEGKTKRDVTRCLKRHIVREVFWLLKNPAYEEIGPQLRAARKAAHVTLQVVSDDLHVWPTKVSRIERGLDHDSDFIERYQEWLAIRIAI

SEQ ID NO: 469171 - protein, 320 aa, unidentified
MIYIGIDVSKDSFVAAYPAKRGYCTKTFNNDTKGVRQFIKSLPEESHCVMEATGNYSMLLLYLLQHANIPISMENPQKIKHFSRAMMSVTKTDEIDAKLIAMYGEKMNPAPYKIPSESILLLKQKRTVLRQLKKHLAATLNLQQSLAVLPKQDPTSKTAVEQTIKFLRKQISKMEEEITNLSNKEFKRQMDLLTSIKGIGNTLASALIVATGGFTYFTSAKQISRFLGLCPTYQQSGTSVNIKGHINRNGDTHLRGQLYVAAMASLRCNTTCKEMYDRLRANGKSGRVAIVAIANKLIRQAFAVVNNNQPYIDGYVSTFA

SEQ ID NO: 469172 - protein, 425 aa, unidentified
MNSISNKKINQVTDQTLVVGMDIAKKKHYACFVDERGRVLKKPFPVLQSREGLEWLYQCIVEAMKEFGKTEVIVGIEPTGHYWLNLAYFLDEKGIPLVMTNPMHVKRSKELDDNLPTKHDAKDALVIARLVKDGRFSYPRILKGMEADLRVGATFRSKLVEEQGAIRNQMIRWLDRYFPEFSQVFPSFGKMALAVLEYTPFPGDLAGKELEEVLALYRQSEGLQSPQKPKAKKLMELAQHSIGVTEGQQMARIEIATLVRRYRQLEKEIEALTEQLIELVQTSVEYEWLKTVSGLGDATIVELLSEIGSFSHYQDPRQLIKLAGLTLREHSSGQHKGQKRISKRGRRRLRALLFRVMMPMIRHNEAFRQLHDYYTTRPDNPLRKKQSIVVLCGKLLKVLHAVCTKRQAFDVKRMMQDIFGLETAA

SEQ ID NO: 469173 - protein, 321 aa, unidentified
MSEPYNVGIDVSMDRLDVVILPDERRFSVPNNAAGWAGLVERLRPLAIAAIGLEATGGYERGVARAPLAADLSVRRINPTKLRQFARAHGVLAKNDRLDARMIAAYVAIIPTRKMQADPATERLAETVAMRRQLCDEHVAVMNQASHLEDAMLRRITKRRLARLEADIALLDKRLGEIVAAEAGLTGHYRLLISMPGVGPTLAFTLLALLPELGSMSRKQIAALVGVAPYNFDSGKFKGLRRIYGGRMTVRNVLYMAALAAFRFNPALKVFHRRLVAAGKKPKVTIVAIMRKMIVTLNAMLRDGAEWTDGSNTGRHTVPTT

SEQ ID NO: 469174 - protein, 340 aa, unidentified
MNHIAIDLGSRESQICVRDSVGKILHEQKLANRDLLELLDCPNAVVSMETCSEAFAVADWARRKGHQVRVVPSTLVRSLGVGARRVKTDRRDAQALSEASCRIDLPSVHVPSSWSREVKTICSLRDALVSSRSKCVNSVRGWLRAQLFRPRLARTSLPRKLRENFASRGHSLPACVERQLVAIEGLSEQIKAADVEIDAMARASEVCVLLMSAPGVGPQTALRFAAALDGCDRFSDAHRVASYLGLAPGEDSSSMRKRITSITKAGSASVRWLLVEAAWSALRWRPDDPMCRWAKRVGERRGRKIAVTALARKLAGVLYAIWRTRKPYDPAHTTSTEPAV

SEQ ID NO: 469175 - protein, 407 aa, unidentified
MRAIRAKRSASRTVDCTGDRAEPHAEAPRGALSAKRRQTMHEGITAYIGLDVHKDSIAIAAAGNDREVPHFVGTVRPDFKRVRKALSHYGSASSLQVVYEAGPCGYTLARQLLADGFRCQVIAASRITRSPTERIKTDRRDAITLARLARSGDLIAVRIPDERDEAIRDLSRARQDAVTACLKTRQQLKAFLLRHGRPLRGSKPWSPTGELYLSKISFAHPAQNIAFADYRQAVLDTRARVERLTEALRAQCAHWRMQPLVSALACLRGVDFLTAVILVAEIGDFSRFAHPKELMGYLGLVPSEYSTGERHHRGDITKTGNAHARRVLVEAAWNYRFPARLSHTITRRQEGQSKPVRDIAWKAQLRLGHRYRRLQSRKLHQNKIIVAIARELTGFLWDIARHVPLVA

SEQ ID NO: 469176 - protein, 341 aa, unidentified
MHLYFVGLDVHKQVIAYCVKTIAGEIVAEGKIAATRAALDEWVKTLPGPWHGGMEATMFSHWIYHHLAPHAVSLEMGHAAAMKAIRAGKKKSDKIDARTIADLLRCHLFPSCYVISPELGALRQQMRFRRLVVEETVLFKNKTAGLLMGAGVEYERRRLHGKRYFKELVKDNEWIGEEMRPLLAFNREQIETLQGMDERLIRMLERHPRLQARVKALQAIDGVGPVTALTWALETGTPERFRSIKAAMSYCGLTSALRESAGQQKRGPLSKQRNRHLQSVLIEAAKMAPLLNEQLKEVHRKAKEKGGHRNRATLAVARKLVAYLLAADRAFLAKPGEDVVA

SEQ ID NO: 469177 - protein, 414 aa, unidentified
MRIIYDNVAGLDVHKKTVVATTIVKQANGIWQEERRTYGTMTGELLELSDWLMGKEVTHVAMESTGEYWKPIFNILEENFEVILVNAQHLSRVPGRKTDQSDADWICELMQYGLLKASFIPPKGQRELRELVRYRTSFVRERATLVNRVQKVLEGANIKLASVVTDIMGASGRAMLEAIVGARATNEEMAELARGSLRGKREELAQALEGRVKDHHRFVLTELLCQIDSLEESIARFDQEIEAMCRPFEEAVVLLDTIPGVARQTAEIIVGEIGVDMSRFPTADHLASWAGVAPGNNESGGKRRSGKTRKGNQHLRTTLVQAANAAARTRGTYLQAQYHRLAGRRGRKRAIMAVAHSILVIAYHLMVRREPYRELGGDYFDKIRPEKTAKRLIKRLEQLGFQVSIQETPAPAVA

SEQ ID NO: 469178 - protein, 339 aa, unidentified
MVFTIGIDPYKATHTAAVLDGSETVVAELRFAADDGQRDRLLSFAACFAPRTWAVEQATGMGALLAQQLVAVGETVLDVPPTLSARVRLLDSTRTDKTDSHDARAAAIVALRHRRLRSVTLVDHSAVLRLLADRHHDLIALRTQAVCRLHALLCQLTEGGAAGRLSARRAGQLLRGIRALEPVSVERKRIAIDLLGDVRRFDNQLVAVNERVVEAVLTSGTTVTEVHGVGALGAAIIIGHTGDITRFPDAGHYARYNGTAPIEASSALKNRHRLNPRGNRQLNCAMHVAALTQVAHDTDGRVYYQRKLAEHKTRKEALRALKRHISNAVYRRLVADTRR

SEQ ID NO: 469179 - protein, 349 aa, unidentified
MDTAQLVVAGVDTHKDTHVVVALDHLGRQLGASTFPSTAGGCAALVDWLRHHGPLGRVGVEGCGSYGAGLARLLRTEGIEVIEICRPNRQMRRRRGKSDLIDAEAAARTVLAERDGVVPKSADGPVEAMRALRVARSSAVKARDQATNQIHALIVTAPQAMRDHFNEPRIDRLVAQLLDADAGEISDQPGYAAAVVSLARRWQTLDTEAADLAHQLKEIVTDTAPSGLLELQGVGPDVAAALMIAAGDNPNRLRSEASFAALCGVSPLDCSSGKHDRHRLNRGGNRDANMALWRIVMVRLRWDPTTRAYVDKRVSEGKTRRGAMRCLKRYIARDIYRLLTAPDPVPIAT

SEQ ID NO: 469180 - protein, 379 aa, unidentified
MQSIVYVGMDVHKESYTACCYRFEEDKLMYQQKMEPDYRNILKYLEQVRKRYEDEVEYVCGYEAGCLGYTLYHQLMGHGVECIIMAPTTMAITNTNRVKTDRKDAGNIARCLAFHTYSKVNVPTAEDEAVKEYIRMRNDQKKALKILKQQILAIVLRHGYRYEPGGNNWTVRHVAWLNSIDMGGLLQETLNEYLATYEHMTNKIERLDQRIEEIGQGEQYQEKVKKLSCLIGVKTLTALSVVVETGDFSRFATAPQYAAYLGLVPSEDSSGERQSRAGITKAGNSHVRRMLVESAQSYTRGRVGAKSKDLKGRQRGNTPEVIAYADKANERLRRKFYRMTLKNQKKRNVAATAIARELACFIWGLMTGKNNGTTYESIC

SEQ ID NO: 469181 - protein, 394 aa, unidentified
MFFLGIDIGKRSHVASVMNEEGKVILKGFSFPNSTEGGEKLLQKIISLSPIDQYKVGMEATGHYWLSLFSFLDEHDFLIHVINPIQTDGWRKGTEIRKRKNDIIDSVLIADLMRYGTFVETSLSDENIFSLKQLSRYRTYLVGTASDFKRKIIAVLDQVFPEYDTLFSKVGIFGKASKEVLLELSSPDAINHISAGALADLLGEASRNRLGMKKAEELKTAASHSFGVKFAQETFTFQLCSMIEQLKFLEKQITDTEKEIKKIMDDIDSVIETIPGIGPINGATILGEIGDINKFSSPAKLVAYAGIDASVTQSGEFEGTHNVMSKRGSPYLRKALFSAALVASRHDPVLKAFYEKKISEGKHHLTALGAVSRKLCYIIYAILKKNEPYEVRLR

SEQ ID NO: 469182 - protein, 342 aa, unidentified
MEEYVGLDVSKEETSFCVKDVAGHVLARGKALSDPASLFEAMREHTLCPARIVLETGTLSSWLARGLRAQGLPVDVIDARQAHAVMKLQHNKTDANDAVLLAEIARTGFCRPVSVGSEAEQKHRILVKARRHLVRQRCATENAIRGFLSSLGLRFPKGSGKLADRVRTVLETRPDLKAMIEPLLASAAAQREQIKHFDEEISVRARASAAARLLMTVPGVGPIAALAFSATIGDPDRFAKSRAVGAYVGLTSRRNQSGEMDYSGRISKNGDSLLRSLLYETANVLLTVVRKAHPLKDWARRIRKRSSHKKACVALARKLAVIMHRMLVTGEAFRWPQKEAAK

SEQ ID NO: 469183 - protein, 396 aa, unidentified
MRHILSFDIAKGKSVYCFIDELRNVIIDATLIEHKKDEFDLLFNKVKNYSNLIVIMESTSIYHLPVETYFRSKGIDTIVMNPKLVKQFKDTLNKSKTDKLDCFKIARCFLGTIDNFYQKQDEYFMYNPLARQYWSLVEGQTRLKNRYRQLIDIVFPEFALIFNDLYDDLALNFIHDFPHPLLFVNRRIDYLMNYLKEKNGTTHAYRFKNKVLKMKELASNSLCFVAFDSYQVQNLVQIIEMIQYHKSEINKIKNQLINEMKDKKLFKIINSIPGFGEFSTALFLAEVGDITRFDNKYQFISFIGIDSVTSQSGVSAYHGPISKTGCKFGRTILFNIVTTILQISAHTDKTNPIYLFFRKKQSEGKHHYKCIIACETKLCKIIYKLCLLWWRYWKTM

SEQ ID NO: 469184 - protein, 371 aa, unidentified
MDSSCDSVGINVPESLLVKAWEEPIMGNDTLVGVDLAKVVFQIAVSDRPGRVVRRERLPRDKFLEFFAQLPQATVIMEACGSAHYWARCIEELGHVVVLLPPQHVRPYVVRNKTDRTDTDAMLEAFRNEQIRAVPIKSVTQQVVGTLHRLRSGWLGERTRRINALRGLLRELGFFIPVGRKNVLPSAWEIVQDVDSGLPEVLRPSLGALCEEIARLSNRIEELEEQLQALARQIPVVSRLRSVPGIGLLTATALYAFVGEIGRFPSGRHLASYIGLTPREYSSGLRRHLGRISKRGDAYLRMLLIHGARAILWHAKRMKQPDRLRAWALRLEKKIGHNKAAVALANKLARIAFSTWKNDRDFEPVPEAQAA

SEQ ID NO: 469185 - protein, 430 aa, unidentified
MSLRVIYERCAGLDVHKKVVTACRRDGEKQETKNFGTTTPELLELVDWLSAWECTHVAMESTGEYWKPVYNILEGIFQVFLQVFLVNAKHVKQVPGRITDIGSARWLAELMQHGLLKPSFIPPRPQRDLRDLTRYRTKLVQERARIANRVQKVLEDANIKLSSVISDTFGVSGRAMLEAIVGGHADPKTMAELAKGSMRSKLPELEKALTGLVRDHHRFLLTNQLTHMDFLDEQIATMGARIAGRIQEMSKSQGKPFCDPDGTTPLKAQDAVELLDTIPGVDTRIAEVIVAELGVDMSRFPTAKHAASWAGLSPGNHESAGKRYSGRTTKGNRALRSGLNQAAWAASRTKATYLSAQYHRLAGRRGKKRAIVAVAHSILVISYHILKRHQPYHELGGDYFDERKKESVAQRLTKRLEKLGYRVNLEPVVA

SEQ ID NO: 469186 - protein, 341 aa, unidentified
MSIVTVGIDLAKNVFAVHGVDDNGKAVLVKPKVSREQLLPLMAQLPPCVIGMEACSGAHHWARQFRQHGHTIRLMAPKFVTPYRMSGKRGKNDAADAAAICEAVTRPNMRFVPVKEEHQQIILCLHRTRQGFVEERTATYNRLRGLLSEFGIVLPQKVACLRREIGAHLEDLPGYANQCVGDLLAHADQLDARIETYDRIIAKAARDDARSKRLMTLPGIGPNTASAMLASIGGGHDFKNGRQVAAWIGLTPGQYSSGGKARLGRITKAGDNYLRSLLVMGARAVLSGLGEKQDRFSRWARNLLERRGYWRAVVAIAAKNARLAWAVLKYGEDFRLNRSAA

SEQ ID NO: 469187 - protein, 408 aa, unidentified
MNAVGIDVSKGKSMVAALRPMGEVALLPQEFLHTEVGLEQMAYAIIALGENTRVIMEATGRYHEPVAAALHEYGIYVCVLNPLFIKQSGGGSIRKVKTDKADAMKIAKYGLDNWVDLREYTPMDTVRQQLKLCSRQYNLYMKTVVSLQNNLISLTDKTFPSVNELFSSPERADGHQKWVDFVMTFYHCDCICRVSEKAFTERYQKWCKRKGYHFSAEKALDVYAGSCGHITTLPKNDNTKLLIATAAQQLLSGKMTLAALRAEMTRLAKQLPEYDTVRAMYGVGETTATQLMAEIGDVRRFPRRSSIVGFAGVDPAVDQSGKHSAKSVPTTKRGSPHLRKTLYQIICTYLRKTPADEPVYQFLDKKRAEGKPYFVYMTAAQNKFLRIYYARVKECLEAFDAQQDTSQR

SEQ ID NO: 469188 - protein, 345 aa, unidentified
MQTMYYIGLDVHKRTISYCVKDGSGAIHAEGAIPATRFDLDRWMKTLPQPWTAAMEATVFTGWIYDHLQPHAAALKVAHPLMLRAIAAAKKKNDRIDASKICDCLRCDFLPECYMASTAIRERRRTLRYRNLLVRQMVQMKNKISGLLMEAGVSYNKQRLHRAGYFRELLATNPGIDEGLCSLLRLCRETVVRLQKTESALVRSLERDPLLMERVERLMTIPAVGPITALTWALEVGDAQRFSSIKKAISYCGLCGAEKSSANTVQRTPLSKQRNRHLQTTLIEAAKMAPRYSPNLAMLYDKEKQKSNANRATLAVARKLVAYLMAVDRGQRNFQVAETSNCIAA

SEQ ID NO: 469189 - protein, 398 aa, unidentified
MPANFHPHSSVPVASNEQPVLYLAFELGWDSWKLAFATSIGPVPRRREMPARDVPQLMQEIAEAKRRLRLPADCPVVSCYEAGRDSFWLHRCLAAHGVQNLVVDSASIEVNRRRRRAKSDRLDVEKLLSMLLRYAGGETKLWRVVQVPTPEEEDARQLHRELITLKHQATEHTNRIKSLLANCGLAIEINKHFPKKLKELRQWDGTPVPEALRQRLMREFERLQVVHRQARELEQQRAKEDREKDSPAVEQVRKLLGLRAIGIGSSWLYVHEFFGWRKFKNRKQVGSLAGLTPTPYASGQIDHEQGISKAGNPRMRWMAIEIAWAWLRYQPDSELSRWFYVRFGRGSSRQRRIGIVALARKLLVQLWKYLETGVPPAGAELADWRTKARIATENLKAG

SEQ ID NO: 469190 - protein, 325 aa, unidentified
MYVITDQEDKSLLKKRLPNQLPTVLESLEPFRQQLKVVAVESTYNWYWLVDGLMDHEYPVVLAHPSAIDQYDGIKEADDLTDAAFLARLARLNILPTGYIYPREDRPVRDLLRRRTLLVRQRTAIILSLQNLALRQTGQRMGWRAIRDLSAEERTELLGDHDCLAFVTTEQADLIQLLTEKIKRFEKKVLEHARLKPTYKCLLTLPGVGVILALTIMLETGDIGRFATVGDYTSYCRCVRATHTSNGKNKGKNNRKNGNAYLAWAFVEAVHESFQTCPQAKRFYDRKRAQRNGALATKALAAKWSKAVYYMMKRQETFDLTRVFG

SEQ ID NO: 469191 - protein, 391 aa, unidentified
MPEDAPRPAQAAIRTDLGAIFVSMELSRRVWLITSLSPGGGEKMSKHSVPASDVSGLLRRFAELRRKAAARTGRDFPIIVIQEAGLDGFWIHRVLQSEGIESHVVDAASILTSRRRRRVKTDRIDGETLVRTLMAFKRGEPRVCSMARAPTPQEEDRRRVCRERRTLVGERVTHVNRIKGLLFAQGIFGYEPLRKGRRERLEDLRTGDGRPLPVHLKAQIMRELDRLEVLLEQLKTVEAERDALLKPASDEAASPPAMLARLKGIGPQTAAVLWSEGLFRQFDNRRQVAAYAGLAPTPWQSGSIDHEQGVSKAGNPRLRTTMVELAWLWLQNQPTSALSLWFHERVRRLGGRMRKTTIVALARKLLIALWRYTTTGVVIEGAAMKAAPTTI

SEQ ID NO: 469192 - protein, 359 aa, unidentified
MGLASWLVAGLLPGVNREPLKKIAPDPEVLLRLLYRWRDEVIKAGKEITRIAVAYETGRDGFWLARWLRDRGIDAYVIHATSVAISREHRRAKTDRIDTAMLKRGFLGWLRGERGHCSMALIPTIAEEDAKRPHRERESLVKERTRTINRMKAILAQFGVRNFKPALRKAAEKIAEVRTPEKVPLPPNAAAALRRHIEHFRLTNEQIKAIAKIRLQRLRQNPTDKFNAMVFLLVRIIGLGVETAEQLVHEILFRNLRDRKAVARYSGLTGSPDESGARHREKGLSRSGNERVRKILIQLSWRMLRFQPNSGLVRWFKARTASSRRSRKPMIVAFARKLIIALWRYANTGLVPEGFQLAK

SEQ ID NO: 469193 - protein, 460 aa, unidentified
MRTIGIDLAVKAVHKAVVVNANGKFVTPVLSFHTRWEEIAQVVARAREGVASDYPLRAVMEPTGMAWLSVAIALRRLNVIPYLVNGQRSHDLRRFYKRHSSSDRIAARVLAKMPIVDEESLYPLEIPSAMQFACHRGCKELNRLRDQSTAIKNRMRDSDRFAWPGLENVFTDIFSPAARLFRQTWYDPARVVNAGVDELRRTFRPLADQEEDLAWVEHLVRLSTEVLMLYGTDALDYDLLQREVYRDQRLLISLEEEANLVWRETIRPLYRKLHPSRNLETLYGVGEQSAAVYACFIGRAARFPTNRKFRGWHGLVPDSRQSGDAESKGLRVSQAGPDLVKKYAFLGGGVARRFDPQIAVIYHSQMTRKGQHHNQAVCACATHLLDRVRVILLEDRPYELRDVDGTPVSPEQAKAIVAERYTVPEEVRIRNNRRARRERAERRAERKHQRRQQRRSRSRM

SEQ ID NO: 469194 - protein, 435 aa, unidentified
MARPFDSPDEEVRLQAGWFVGVDWGSQKHQVCVTDAAGEVLGERAFEHGGAGLSAMADWLLSFASGAAGDVGVAIETPRGPVVESLMEHGIAVHSINPKQLDRFRDRLSPAGAKDDRRDAQVLASALRTDPHCFRRLEPTDPTIVELREWSRLSEELSRERVRLANRMQQQLWRYYPQFLEAVDGDVAAPWALDLWRSLPTPRAGQRVREVTLTRVLKQHRIRRTDAATLRAKLRAPAVKVAPGAVEAAVTHVELVVERLVLVNRQLDRARRALDELVGRLAETASTDDSDASAEDEPASSKQPPDAAILLSVPGIGTKVAATLLAEGGDAVERRDYAALRCLCGVAPVTKRSGKSLIVTRRLAADGRLRDATYHWARTAAQRDPASHNKYQALRARGHGHARALRSVADRLLSVACAMLRDGVCFDPHRVGTTR

SEQ ID NO: 469195 - protein, 352 aa, unidentified
MITIGVDAHKRIHVALAVDDAGRELGDWRGPNSVDGWASLANWAFGLGSERRWGVEGAWSYGRGLAQYLVRLGQTVYDVNPRWTALRRRSARKPGKTDKLDARAVALFVRQEAPDLPLVHSEDETALLDLLTTERESAVAESTRLRNQIHALLMQIDPEYQLRLPSLTSQAGLNALQRYESPSASALQLERAAAVRRLAQRLRLASLEAEELEERIKRLAEAGFSPLTRLCGVNLITAGTLAAILGPGNRFPSDAQLAAYAGVAPLETSSAGLVRHRLNRGGNRRLNAILYRIVLTQAHHLSEARAYIARRQSQGKTKREAHRALRRFVIRAIWRLWQECQQVQGTNFGQAA

SEQ ID NO: 469196 - protein, 420 aa, unidentified
MGFIGGGLRQEFVTRIKDADPGRLLAVPIDVGKRSAAAMVCDFWGEIIIPPFDFPLNENGFQDFSVAMARAEAQKDATWTRVGIESAGHYHQPLQARLESNGIEVTVFNPAQVKENRNQDLLRSLKSDAIDLAAMAELLIRGKGRISMRAPDAVAIQGALALHRTRKIRSRSSLKNQIHSHLDLVFPGLTDALWNPIESKAGRIMLDEGLTPQRVRRMGPERLLRFCSTRGVRVTRIKAAEIVAAARVAFALPETMSAVRLRILMADMELLAKLDQEVLETEEQLAEILPETPADILTTLPRVSVVRASNYGGAVGDITRFRHAGQVYRLSGLVPRRYESAGKIWTTTKISREGKVELREAILELGKALRQGHPNFARYADSLKSRGKPGGVIQCAIGQRANRLAFAMMRDQTPFDPFRW

SEQ ID NO: 469197 - protein, 319 aa, unidentified
METVTASSLLYVGIDVAKEHLDFAFGATAPPEQSAYTAAALKPLVTRLQALPAVQVIVEATGGLEVLLLTELWAAGIAVARVNPQRVREFAKASGRLAKTDRLDAQLLAQFGAALQPAATPLPSAASQTLAALVDRRRQVVAMRTMESNRRLSAPQTVQARLDQHLAWLDAAIAALEQEISDFIQQNPAWAEKDGILQSVPGVGQVTARTLLAEMPELGAIDRKKIAALVGVAPFNHDSGHLRGKRCIQGGRYAVRSVLYMATLSATRFNPTIRTFYERLLAAGKAKKVAIVACMRKLLTMLNAMLRDKQAWHPASTSC

SEQ ID NO: 469198 - protein, 438 aa, unidentified
MPNTTADLGAPSAPPFSASLPPGEYAALLGLDWGEKSHALALSPRGVYAPPEELVLDHCAETLHGWLDQLGERFGHQPVAVAVEASKGAIVAALLEHPWLVIYPVHPATSRRFSTAFTPSRAKDDGPDARVLLELLQCHRARLRALVPQEPETRRVGLLVEARRKMVDRRTLLTNQLQSLLKNYYPQALLLVGDKLSCPLSLDFLERWPELALLQRARPQTLRAFYYAHQVRSEELILARLALQQSARPLCTDRALIEVSVLQLRALLAEVRSIRTHLAGIDEAIASAFGVHPDASLFRELPGAGKAMAPRLCVLFGVDRHRWASAAQLQEYYGIAPVTEKSGRQHRVHWRWSAPVFARQTLVEWAGLSVKACPWAKAYYLQQKQRQKGHSAILRSLAFKWLRILWRCWMDRKPYDDALYLKQLKERNAPLLAFLPAT

SEQ ID NO: 469199 - protein, 433 aa, unidentified
MLKLNYMSTLFVGIDVSSKTNAVYAMDFEENKYISSSFGNNQPGADQLVNMIAECMQKHKNLDTILIVLESTSVYSVHISNFLSASEVLMPYRPYVFCVNPKAASNYRKSYIGMEKTDPTDAYLIADFGRVGRTKKLEPWRGGQFIALKRLTRHRMHLSECITREKTYMVSNLYLKFSELQLLEGDDKPFGSLYGATSSAVLTEFLSPQEIIDMPEEELLTFLAGKSRNRISDLSKTSELLRKAARDSYRLDKCMYEPLSISLASSFNCIHAYQKEIKLIEQAIEKCINGMNPNALLILQSIPGIGPIWASGILSEIGDITVFHSSDALAKYAGLYWPKGDSGDFTSEDNKMSKAGNPYLRCYLGEAANSVRKHIPEYADFYARKYAEVTKHQHKRALALTSRKLVRLVFGLLVKNQLYTGEKLDTEYNIESN

SEQ ID NO: 469200 - protein, 357 aa, unidentified
MKKRLNADTINVNGKTVNVGIDVHKVSWHVTALVEGVIVESATIKPSYRVLKKLLAQYKGARIRIAYEAGFSGFNLYDDLTADGIDCIVVSPSLIPVESGNRVKTDKRDSRKLAQYLENNLLKRVFVLSKQERAHRQYVRTRRQLSNHRTDVMRQIKSLVLFHGLPSFDGNRGFWTRPVLRALRSSTPDEYVSRSLNKLIDVYEYLTQQVKHMTREVRRLARTEKYARRVELLTSIPGVGVLSAMEILTELQDVSRFATADQIAAFLGLTPSQYSSGQHVRMGKITHAGNHRLRTRMVECSWIAIKKDPGLNKTYQAIKKRRGGKRAIVAVSRKLIIRIRRILLDEVTYRKECAIAA

SEQ ID NO: 469201 - protein, 329 aa, unidentified
MHVIGVDVSKAKLDCAVIVQLEPMKRRQKVVSNDPQGWAKLLEWACQNAGCEPGELKLVLEPTSSYHEGVAHYAHDRGARVWIINPKQMRDFAKGLGVRSKTDALDCSVLAQFGLKAQAMDWMPAPLPLRELQSLLRRLEDLQQTLQAELNRVEAAQARQAPALVMESLQSSVSFLEQQIKRLNAQIDQHIDGHPQLKADYELLRSIPAVGPSSARVMLVKLRGRVFDTAAQASGFLGLRPVHWDSGSSVHKLPRLGPHGDRLARRILYMAALTAKRNNPDARALYERLVAAGKRPMLALCAVMRKLVHICFGVLKHQRPYVPQVAASA

SEQ ID NO: 469202 - protein, 310 aa, unidentified
MDIIAVGIDVSKDRLDVAAHPSGEASAFERNAAGLDRLVDWLRKLSPQIVALEATGGFETIAAATLGAAGLPVVVVNPAQIRAFAKAIGQRAKTDPIDAAVIAHFAQATRPEPRALPDEATRLLADLVARRRQIVEMIGAERQREKRITAPRLRKSIVRVVRTLEKELSSLDGDIDDAVRGSPVWREKEDLLASVPGIGPIIARTLIAELPELGTLSRKQIAALAGLAPFTRQSGQWRGRSFIGGGRAAVRTALFMGALVAMRHNPVLKAFFDRLRAAGKPKMVAIIAVARKLLTILNAILRERRPWQIA

SEQ ID NO: 469203 - protein, 359 aa, unidentified
MDAQEGAVRHIVGGVDTHKDLHVAAVVDEQDRVLGTRSFASTRQGYRQMLAWMRCFGQIQRVGVESTGSYGAGLLRFQQQAGIAVLEVTTPDRQDRRRRGKNDDFDAQNAAHAAFAGIRTVTPKSRDGMIEALRVLSAGRKTAVAARRIALQMIQNTIVCAPESLREGLRRMTRMQLVRTLAAWRPDLTAYRDVEVAYRISLKSLARRYLELHDEIADLDAMIAAIVNELAPNLVARTSIGHVGAAQPLLTAGDNPERLRSEAGFAALCGVSPVPASSGKTARHRLNRGGDRAANSALHIIAIGRLRTDARTQAYVAKRIGEGHSKMEAIRCLKRYIAREVFILIKQRQREINQTRIAA

SEQ ID NO: 469204 - protein, 309 aa, unidentified
MEIEVGCDISMDWIDVCVLEPPRHFRVANKPKPVERLARELPPGSRIGMEATGTMHQLLADTMCAAGHTVYELNPRWVHRYAGGVGVRGKSDRGDAMVIARYVHAEGAHLHPYRSPTPQQREIRTLLHRRAQVMKLKTASRQSLGDQANEVVQTFKQLVKDIDRRIATLLGADPQWKGLAAKLRRIPGVGPLVAAHLVEALARRPFEAVKAFIAYTGMDPRPNDSGRKKGIRRLTHHGDAHLRAALFMGAMAACKVARWRAVYEHNRRKGLPSTAAIIVVARKLARVAFCLFKTGQDYDPERIGGVAPT

SEQ ID NO: 469205 - protein, 395 aa, unidentified
MLYLGIDIAKHKHYASIMDSNGNPLEKPFPVYNHRKGGQALLTKIYQHIDAPTEIKIGMEATGHYWLALYSFLLDHGFSVIVLNPIQTNAWRKGTEIRKRKTDAIDATMIADIIRFGNFLETPLVDEKMFALKQLSRFRNSLVSSMGDLKRKSLVVLDQTFPEYQKMFSDVFGKTSAKLLLEYASPSDYEQVSIDDLTQIIEQASRNRLGKEKAHQIIESASHSFGITFGKEAFSFQLKMLMEQIHFIEIQLKQCEEQMDQLLIELDTPITTVPGIGPILGATILGEIGDIKRFDKPSKLVAYAGIDASVSQSGQYNSTSMSISKRGSSHLRRALFQAAITGYKYDPILKAFYEKKKQQGKHYYVCICALARKLCHIIYAILKNNKPYKVPIHTA

SEQ ID NO: 469206 - protein, 401 aa, unidentified
MNAVGIDVSKGKSMIAVMRPFGEVVLSPFEVSHTDKDLTELAKKLKSLPGETRVVMEYTGYYHAPVAVALHEAGIYVSAVNAMLVHDYGNNSLRRAKTDKKDAIKLANYALDHWLSLPRYLPAGDTRLMLKTCYRQYEQFSKMRTMQKNNLISLLDVTFPDANKLFSSPPRADGSEKWVDFISQYWHCECVCGLSVNAFTRNYEKWCRKHGYYFSEDKALDIYSSACGHICIMPKCDSTQLMIQQAIIQLKASSAALAALKKQMQDLASTLPEYSVVMQMYGVGPSLGPQLMAEIGDVRRFHSKSALVAFAGIDAPPYQSGQMDVHSRSISKRGSAKLRRTLFLVMSSILQNSPLDEPIYQYMYKKRAEGKPYKVYMMASANKFLRRYYAIVKAHLDEMDL

SEQ ID NO: 469207 - protein, 392 aa, unidentified
MYIVGIDIGKNHHEASIVSPEGKQISPSLRFATTHKGADSLMNFIFKNIGNSPCVFGMEATGHYWYPIYSFLKARGYTIYVINPIQSDSLRKMYIRQTKNDSIDSFLIAEVIRFGQFTTTSMADENILAMRQLCRYRDSVISSRTEIKLRISTIMEQIFPEYEKQFSSLWVSTSMGILEKYLTPENIENAPIDELFEIIKDKSHNRLTKAKAISIKEAAADTFGIKIAQDAFSFQLKQLIDRMNFLDKQIEALDIEIMKYYEQFDCYLHTIPGIGIIGAATILAEIGDINRFKSSSALVAFAGIDPTVRQSGEFSSTHNHMSKRGSPYLRHAIFLAATTCSFHNSPLNAYYKKKRDQGKHHLTATGAVARKLTPVIYAVLRDSKPYEPKSFC

SEQ ID NO: 469208 - protein, 476 aa, unidentified
MNCAAQPFRWHQQEELEMNPKRSKSRHGRKMPMVHANAAAIDIGATMHMAAVRADRAQEPVRSFGTFTADLHRLVDWFTQCGVETVVMESTSVYWIPVFDPLDARGFTVFLVNARDAKHVPGRKTDVSDAQWLQRLHSYGLLRASFRPKGQIAELRSYVRQRERLLEYAASHIQHMQKALTEMNLQLHHVVADITGATGLRIIRAILAGERDPEALAALRHYSCHSSAETIAKALTGSYRAEHLFALEQALALYTAYREKASACDVRIEAVLKELSIHRGRDHGAVPPPRRRHRTDQVNALAFDVRAALFALLGKDITAIDGLGAYLSLKLIAECGDDLSSWPSAKHFTSWLGLAPSNKVSGGKMLSSRTRRSGGRAAALLRLAAVAVGRTDTALGAFYRRLSSRIGKAKAVTATARKVAVLFYNAVRHGMEYVDPGASSYETRYRTRVVNNLHRRAKAFGFLLQPLEPKAGAAVS

SEQ ID NO: 469209 - protein, 369 aa, unidentified
MEKHSEAFVAFDVAKKKHAVAVAEGGRTGEVRFLGDVENSPLPIERTIKRLADRYDRLHVCFEAGPTGYGLYRQVKALGHDCMVVAPALIPKRSGERIKTNRRDAVTLARLHRAGELTGVWAPDPAHEAVRDLVRAREAGADDLRRKRQQLLSFLLRHSRVYSGGGHWTLAHRRWLAGQKFEHAAQQIVFQEGIDAIEDALQRVRRLEKQLALIVPEWSMAPVVEAYQAMRGASFLVAVTFAAEIGDVRRFDTPRQLMSFLGLVPAESSTGDTIRRKGLTLAGNRRARRALVEAAWTYRYPARVSETLRTRLEGLPKPVRDIAWKAQVRLCARYRRLSATGKKLPIVVAAIAREMAAFLWAIGREIAPT

SEQ ID NO: 469210 - protein, 367 aa, unidentified
MENHSIVWVGMDTDAKKNQIALYRGWEKEPAAEWEAGMDAKGIKKLIERLEREEQEIRCVYEAGPCGYELYRKLRKAGIHCDVIAPSLTPRKPGDRVKTNRRDAQNLARLYRAGELTVIGVPDEKQESLRDLTRAREDVREDLTRRQHRLNRFLARQGYHYQDGDKWTQKHWAWIRKIHFEDANAETVLEESIRAADQSQEQLKTYDAKIEENASKPEYAKKVQRYETLRGVRTVTAMTILAEVWDMRRYGEAPQFMGSTGLVSSEHSTGDHERRGKITKAGNAHLRRVLVEASWHYRHGTSAGKAIKKRRKGQPAAVVSIAERADQRLNRKFRRMVDRYNKKPVIAAVAVACELAGFIWAIGQIQD

SEQ ID NO: 469211 - protein, 408 aa, unidentified
MKRYYIGVDWGDRLHQVYVGDEEGEKVKEVKVQESPEGLAEIGRWLDERRAEGIELWAAIEKPAGRIVDFLLDHGVEVYPVNPKAVDRVRDRHRMSGSKSDAFDAYVLAEFLRSDHAHLRALRPSSEKAQELKLLSRDQRRVGRHKTRLLNQITTTLKEYYVRPLEVFEDLETEIALDFLQQYPTPAHLSALKRKQFNRFATTQHHLSKQRCEELWEKLQKPQLRVPEHVVRAKAQLLEVLIEQLRASIKAVKIYHHKVESFFASSPAAEFAKTLPGGKSGTLVAAIWAELGDAQGRWESSRHLQAEAGAVPVTKASGKSRVVHFRFACNKHLRYTMYWFSFVSLNQSEWAKLYYRGQRDKGHRHSQALRALGAKWLKIIFVMWRDHTPYDENYHLANIARQKMRQAA

SEQ ID NO: 469212 - protein, 380 aa, unidentified
MKTIYYIGLDVHKETIAIASACGGNREDAVYYGQCGGSVLVAVRTLRKLAKQLGVEFRELKVCYEAGPTGFVLARRLIRYGVDCVLMAPSKTERKPNEKIKTDKRDACKIARLFRNGDITPVRIPPVLDEAVRDVCRARTDASDDLSRSKQRLGAFLLRNGFTYSGKCKWTPAHMRYLRELVMPHDAHKIVLEEYMQAIDTGIDRVARLVDRMKQLLKGWEWEPVVRALMACKGFQEVAAMTVISELGDLRRFSHPRALMSFLGLVPDEDSSGPRHRQGSITKCGNSHCRWMLVECAQHFRRAPKVGSALTTRQQGQSGAVKELSWRMQNRLHQRYVKLKARGKNENKVIVAIARELSAFIWELQVKLNLPLPTAAAPTP

SEQ ID NO: 469213 - protein, 352 aa, unidentified
MKVYNKQHLYYCGIDLHARKMYVCILDDTGKTVYHKNIPCKPERFLKAIAPFREDLIVGVECIFCWYWLADLCMDEGIDFILGHALYMKAIHGVKTKNDRIDSLKIARLIRGGNFPVAYVYPPKMRATRDLMRRRTHLVRKRAELLGHIQNTTTQYNLDPLGSLSRPDRRRGKDIAGHFPDPVVRLIIETNLRMIDHYDPIIKNLDKQILGLAKEHDPISLHLLQSIRGVGDVLSLTILYEIGDINRFGGRGEFCSYARLVKGQKSSNGKIYGTTGGRIGNAHLRWAFSEAALLYVRGNELAGRYYQRLSSRHGKGKALTIIAKRLGTAVYYMLKRKEPFDEYKFLNLKEVP

SEQ ID NO: 469214 - protein, 357 aa, unidentified
MKYIGCDFHPSFQQIAMLDKETGEVVERRLLHTEQARAFYEGLQGPVVVGIEASGNTHWFESLLARCGHPLWIGDAAAIARQNGRKQKHDRRAAELILKLMVEDRFPQIWVPTVTQRDLRQLLIHRQHLVRMRTRIKNQLQHMALNQGWQKKHKLWSEAGLALLRSLPLEPWAQQRRDTLLAMLQELEEKIQPLDQAVEKEARACEAARRMDTHPGVGPVIALATVLTMGDVSRFADSRSWVSYLGLNPSEASSGQRRRLGGISKQGNPFLRYLLVEGAVSATKGDKNLARMYARLKAKKHHGVAKVAVARKLAVRLYWMARTEKSYPEVVRTQGSQSHLVAERMADRLNRPPASRQ

SEQ ID NO: 469215 - protein, 408 aa, unidentified
MKTLHKRCAGIDVHKTEVVACLRVITHRKVEREVRRFPTTTHGLLELAEWLESARCTHVAMEATGVYWKPIWHILDGRFALILANAAHVKTAPGRKSDVNDATWLADLLAHGLIRPSFVPPAAIQELRDLTRSRKQLTREVAQHSQRIQAVLEEANVKLCSVITDILGASGRRMLKAMIAGEADAHKLAAMGSERLGCAPETLVEALTGRMREHHRFLLAQHLQTTEQLEKTIAAFDARIEEKLVPFRDTVERLKEVPGLGSTVTEFVIAEIGLDMSLFPSAGHLLSWAGFVPRLDESAGKSRSTRIRKGAPWLKPVLVQAAWGAARKKNSYFQAQFLRLKARHGAKKAAIAVAASILTTVYHMLRDGTCYQDLGPEYFTRRNPAKAAARLANRIRNLGYYVEIRPAA

SEQ ID NO: 469216 - protein, 318 aa, unidentified
MAQNGLIVAGIDVAKDKVDACIRSPSQRRTFASNHEGRRQLTSWLRRHKVGKAVMEASGGYEGDWARALRKANIAVRIVDPKRVRSFAQSAGRLAKNDQIDAEMIAWFADTFQEAPGQGYDEEREQLRQMVTARQTLLDLQTALQNKGEHSMPGAVQRMQARLLKKMAAEIAALEAAIEAKVRTTRHFAELAEIIESVPGLAGTTSAGLIATMAELGQVNDKIAAALLGAAPYDDDSGKRRGSRHIKGGRRRIRNILYMACLGAATRHNPVLKAFYRRLLAKGKPKKVALVACMRKLIVILNVMIERRQKWNPPPHAV

SEQ ID NO: 469217 - protein, 344 aa, unidentified
MEITTIGLDLAKNVFQVHGVDASGQVVVRKSLRRAQMLPFFARLPSCLVGMEACGTSHHWARELIKLGHDVRLMPPAYVKPYVKRGKTDAADAEAVCEAVRRPTMRFVPVKSPEQQAALSMHRTRDLLVKQRTQLVNMTRGLLAEFGIDIPKGLERALLMARRIVDGEAPDIPIEAAKIVGTLSQQALDIHVRLRQIDRDLLVWQRGNDVARRLMTIPGIGPVGATALAASVTDPHQFRSGRQFAAWLGLTPLQKSSGGKERLGRITKMGDKYLRKLLIVGMTSLAGRAKYHPEAIDPRLANLLARKPMRLATVAMANKTARIIWAIMVRGETYRAGHQPALAA

SEQ ID NO: 469218 - protein, 335 aa, unidentified
MDREYVGIDFHRRRSVIVRKNAAGEKLSSVRVENDPLALAGAMADAGPGPEVVIEATYGWYWIVDWLHEQGATVHLANPSGLNWGTRRVKNDERDAIDLVDMLRLGRLPRAWIAPPETRELRELVRYRAKLVALRSGLKAQVHAVLAKEGVLPATRDQFGRGGNAQLDALELADAYALRVRSLRDLIEVYDEQVGMLERAIHDRLRDDRGYRTIQQINGIGPTMAAILVAEIGDVSRFRNAAALCSWAGLTPKHHESDTTVRRGGVTKQGSRLVRWAVIEGTVRYHGGPKLAADWHQIAERRGKHKATVAVARKVLTLVYYGLRDGEIRCLAKTA

SEQ ID NO: 469219 - protein, 334 aa, unidentified
MNFKNFIGIDVSKGTIDIALVRESTANSIASAQFINDYKGMVHLEEFLKKQGLIMDETLFCMEHTGIYCRLLSHYLVENKYHVWIEMPVQIIRSLGVQRGKNDRIDAVRIAQYACLKKDKAVLWQPPREIVIQINDMLTLRDRLIESRKSLKQPIKEFIDAGFRDTAKLIEKMCINTLKSLDKEIEQLEKELDKLINKDSNLKRLYKLATSVPGVGKITALTLLYFTNEFNLYTNANQLACYCGVAPFEHTSGTSVKGKSRVSSFANKKLKKLLHMVAMSTISCDKQLAQYYQRKVNEGKNRMLVINAIRNKVLHRLCAVIKRGSPYQLEYQIA

SEQ ID NO: 469220 - protein, 317 aa, unidentified
MNKAAEIFIGIDVSKKHLDVGQLPGNKTWTYTNDEKGIKEILGLLKAQKPFLIVLEATGGLELPVAGALAAANLPVAVINPRQGRDFARATGRLAKTDTIDALVLAGFAQGIRPKPRPIKDQQLQELDALVSRRRQIVDMLTAEKNRLSSAPQCTRKSIREHIKWLEKRLKEIEADLAKKVKDSPVWREKDKLLQSTSGVGPILSLSLMSDLPELGTLNRRQIAALVGTAPFNCDSGKFKGKRKIWGGRAQLRSVLYMATLSATRFNPVIAEFYQRLIKAGKLRKVAIIACMRKLITILNAMMRDRANWQDLSAQIS

SEQ ID NO: 469221 - protein, 440 aa, unidentified
MDAYQKGFIKMSNDFYLSVGIDVGADFSFMSIALPNQTFAGKPFKITHANPASLEKAVLTIKEAEESNSLKARIFLESTGIYHYPLFCYLRDKGFIVSIINPIITKSSTNINIRKVHNDKFDSKKLALIALKPDLKVSVIPSDLVLDLRNLSREYYNLMDCRSAYVNKLQGELRMAFPQYIGIFSKLTVETSLALLEKYAIPAAFLAAKKKAVIKLISSTARFGMTYAERQYQAIIAAAEAATGFGHALPSNDKLIKLYVSFIKKYDEEIDGILAAMHELVDTHPDETFVKQIHLIETFKGAGFLSAVTVMCEIGDFSVFKSPKQLFAYFGLDPAVKQSGKFNGTNIKMSKRGSPIARRVIHTMALVSIGRTRKGVANNSVLRDYYLSKCQSKPKMVALGAVMHKVCNIIFAILRDEKAFTVISPIQHKLNYLQSRCPAA

SEQ ID NO: 469222 - protein, 414 aa, unidentified
MEEPLTVKRYYMGVDWGDRLHQVYVGDQEGKKVKEIKVPETVEGLAELGRWLDEKRAEGFELWAAIEKPAGRIVDFLLDHGVEVYPVNPKAVDRVRDRYRMSGSKSDAFDAYVLAEFLRTDQAHLRVLRPSSEKAQELKMLCRDQRRVGRHKTRLLHQLTTTLKEYYVRPLETFEDIETEVALDFLTRYPTPAHLQALKPKEFKRFATKQHHLSQPRYEELWEKLSQPQLKVPDHVVRAKAQLLEVLLDQLRAAIKAVNTYNHKVESFFASSPAAQIAKTLPGGKSGTLVAAIWAELGDAQGRWESFRHLQAEAGAVPVTKASGKSRVVQFRFACNKHLRYAMYWFSFVSLNHSEWAKLYYRQQRAQGHTHPEALRALGAKWLKIIFVMWRDHKPYDENYHLANIARQRMRQAA

SEQ ID NO: 469223 - protein, 422 aa, unidentified
MAGLSTGFGCVNGSVRVALRQRIWVGIDVGKAAHHVCVVDENGKVCWSGKLANDQRAVEAVIDRARKTGVEVRWAIDLVSPLAALLITVLLGAGESVVYVPGRMVATMTGIFRGEGKTDAKDARVIADTARMRADLQPVTAPDDLVAELTQLSSYRADLMNDWVRGVNQLRAMLASIFPALEAAFDYSARSPLILVARLCTPAEIRDAGIDGVAAYLTENGAWRKGVDAMAAQAVAAAGTQDIAVPGEATTAMLIKRLAAKLLDLDREIKDLDKQITARFREHPQAAIIESLPGMGPHLGTEFLVSTGGNALTEFTTPGRLASYAGLVPIPRDSGRISGNLHRPKRYNRRLRRVFFMAALSSIKNEGPSRTFYQRKRTERLIHTQALLAPARRLVDVLWALLRDNRSFEVEPPSVNGVPAVA

SEQ ID NO: 469224 - protein, 428 aa, unidentified
MKYNTQNAKIASITEKTLIVGIDVGSETHFVRAFDWRNYEFTKKPFEFSNSEAGFQTFKAWMEDLLEKNGKSVVIPGMEPTGHYWFALGKFLQDNGMRPVHVNPHHVKKSKELDDNNPNKNDRKDPKTIASLVNEGRFSYPYIPTGVYAEIRSLSNMRFQAQEELTRAKNRIARWFSIYFPEYKDVYRDFKAVSGRIVLQAAPLPEDIRKLGVEGVNRIWRGAKLRGAGMKRAKTLVSAAEHSIGSKEAPEAARIELRNLLNDMDVYASRVEELLGMIEEKLKEIPYIDKLMAIKGVGLLTVSGFIAEAGDIRRFEDPKQLQKLAGYAIVANESGKHKGESRISYRGRKRLRYVLYEAALSLIGKNAEFKEIHEYYRTRKENPLKKMQSVVAVACKVIRIFYVILTKGVDYDPEKMMGDIRRPQIQAA

SEQ ID NO: 469225 - protein, 422 aa, unidentified
MMYYTGIDWADQKYDLVILNDTGKYVNPQFEIEKSEAGFQELLAKLRHLSANPVDFKIGIETPQNLLVDFLLLWGYPVFSIHPSSMKSFRKRYRPTNARDDAHDAYVLADVMRTDQACWKLVHRGSERTHKITMLVQDHYHLMQQHTATHNAFKQTLKNYYPEYLHFFKDVSCPASLAFITSYPNFAAAQALDQQQLLNFFKEHHLFHQKKVIHMYQLLHGNHIHVPPAIINSKTLTALSYGHQLTVVQNGLQEYERQIHEALAQHPDTEIFRSFPAVAELTAARLIALFGDNRQLYDDASLIQAKAGTCPVTEITGHDKKRNRCHRIIYFRQGCHKVYRAFVHNLAFSSLTQCHWCKAYYDYHRQLGQDHHHSLRCLANVQLKILFAMWKNRTRYDENIFLAQRLKNKNPASGKKGGNNFK

SEQ ID NO: 469226 - protein, 412 aa, unidentified
MPSTERPFTATAAGEQDATLFAALELSLSRWVVVASAPGESKVSKHTLPACDGPALLALLDGLRGRAERRSGRAVTVVTIQEAGRDGFWVHRLLEAHGVRSHVVDPSSVAVNRRSRRAKTDRIDAEAMLRTLMAWSRGERQVCSMVHPPTREAEDARRLSREREALLAERIRHANRIKGLLATQGIFGFEPTRHDRRARLADLHTADGQRLPPRLSTELWRQMDRLELTMQQLATVEAERDAALAADGRAGSAADAAAADCQGGNDTRAAASVGREGAGGRLLRLKGIGPETAAVLAGEAFFRDFRNRREVAAYAGLAPSPWQSGGVDNEQGISKAGNARVRKTMGQLAWLWLRNQPDSALSLWYRNKVRDGRGRIKRIAVVALARKLLVALWRFVTQGVVPAGAALKAQAG

SEQ ID NO: 469227 - protein, 352 aa, unidentified
MKKIVAQDQDVAMGIDAAAKHLAVAVMVEGKVVKQATIAHTREAIESFLARFPGCRIRAAYEAGCFGFWLYDTLTELGVAAIVTPPSKLERAPSARVKTDRRDSITLAEQLAACRLKVVAVPPKEERATRQLGRTYEDLKQMRTASMARIRSFLAFNHIGIPAEVGEKWTGKLVQWLETFAFEGMEGAEYLRQCLDTLVRVYRDLTTQQSIIKKQFCKLAKTKRYARAATVLESNTGVGTLSAMVVLTEVWNVKRFRTSQEFTSNLGLVPTEHSTGETRRLGHITKTGNRHIRGVLVECAWSWIGHDKAAYAVYRRLARRRESKRAIVAMARRLAVKMYWQLKHIHFGERAA

SEQ ID NO: 469228 - protein, 400 aa, unidentified
MSHYVGVDISKDNFHFCILTEDSKILSSGEFPMSLQGFSDFFNLLKSLTDTIVVMESSGRFHIPLYCFLTEKNIQTFILNPKIIHRFFEFISANNPSKQDKKDAKILALFALNNPQMLKSYSKAPELRSLARLIQKLKTELAEAKTQIKYCLTVLFPEAERSFNIYSHSFLHILHKYPSVKTLKKAKTEWISEIIKNSITKGKPASFTPQEIIQTAKNSIGVDNPYLSETLIFYIDKLFFLEPRINKLEEMLMDIIDKDQQEQMKLISSIKGISQRLAGLFLAEIKDIRNFPNAKKLIKYAGTDPVVKQSGKYKLRMSISKQGSSFLRNILFQMTVGVVKWNSYFRDYFIRKKRDFGSYKKAMIAVVNKLIRVIHALCRKRTFFDHSFSKSILPPEVSHV

SEQ ID NO: 469229 - protein, 374 aa, unidentified
MTMMQHRQVRYIGLDVHRASVAVAIADDEGAPRSYGNIANDPSAIRTLMTRLGGPEVQLRVAYEAGPTGYALHRQLSSMGIECIVVAPSLIPKRPGDKVKTDRRDALKLARLLRSGDLTAVWVPDEAHEALRNLVRARADAKVDQLRAKHRLSKFLLRQGCHPPVGMKNWSQRYFQWLRQLKFEHVPDRVVFADYLAEVTAAGERIKRLETALHECAQSSSQVAVIRALQAFRGIGFLSAVTIVAETGDLHRFRTAPQLMAYAGVVPSESSSGGKQQRGTITKTGNSLLRHIFGEAAHHARHAPRVAGTLKQRQADLPPEIVELAWRAQLRLHTRYRHLSTRIGARKALTAVARELAGFIWAAGQLIQQVPAAA

SEQ ID NO: 469230 - protein, 391 aa, unidentified
MRKKNKHTNVFTKLMSTSKEKIVSVGIDVSKVEFAVSITLYSLMSQTFRQLTRFTEDNTPAGIGKVIKKIRSKASQNGHCSVRVTMEATGVYYEELALRLFDRHREYHVSVMLPSKAKKLIEGMGNRSKTDRVDADALAQCGAERRLEAWKGIDPYWRELRSLTRTREELQNQKTRLENQIHALTHSGSEAELALESYAVCLEAIKRQVDVLTTQSKAHLRKNKAVWKQVKDLESIPGIGMVTIAAILAETNGFTDFTSIGQLISFSGYDVKLRESGKWKGQSRISKQGNSHIRRAMYMPAMSVSGKVKTGPIREFYDRLAAREGVKGTKMKAQVALQKKLLTYMFILWKKKERFNPDIIDRDRKGRNKKVASPIGETTGDMTTITLPSFA

SEQ ID NO: 469231 - protein, 355 aa, unidentified
MDSRKYIGMDVHQASISIAVRDASGKVVIESLIETKAATILEFLHGLKGTLWVTFEEGTSAAWLYDLIKPYVVKVIVCDPRKNALLKAGNKNDRVDARKLSDLLRAGLLTPVYHGESGVRTLRELGRSYLTLTKDLTRVMNRLKALYRSWAIPCAGEKVYSPRHRCAWLEQLLEAGVRRRAEQLYQQLDTLLQIRREARRELLRESRKHPAHELLRQIPQLGPIRVALLIALVQTPHRFRTKRQLWAYCGLALQTRSSGEYRFTAGELEHSKKLPALRGLNSNHNHDLKNLFKSAAIHVSTSPDAWGDFYRSLLAKGMKPAMARLTLARKMAAIVLAIWKKGERFDSGELKRQAA

SEQ ID NO: 469232 - protein, 317 aa, unidentified
MRNCIGIDISKGTFDVFILEKDKAFLMNNDFEGVNQCVKLCHQIQPELIVMEATGGYEMPLASHLQAEGFGVAIVNPRRIRDFARALGQMAKTDKIDAQVIAKFAATLEPMPHEFISDNSRKLKALISRRKQLLGMHTAEVNRKEHAFDNEVKQSIEAIVKAIEKQLDKVDKEIDDFIRQMPELKQKAEFLQSIPGIGKTTAHMLVAELPELGILNRRQIAALVGVAPINRDSGAFRGKRMTGGGRKQVRTKLYMPTLVATQFNPVIKKYYRNLVDERGKCKMIALTAAMRKLLCIMNTMLKNNQYWQPNFAKTLDF

SEQ ID NO: 469233 - protein, 377 aa, unidentified
MIVIGTDTHKGSHALAAVDEGIGRVRGQREIQADEAGHLAAVKWARELDDERVWAIEDCRAVSRRFEQALLAAGERVVRVAPHRMGASRRGERRPGKSDQIDALAIARAVVKDGVDEFPVAYLDEQAMEVRLLSDHRQDLVAERTRVQSRLRWHLVQLCPELEASLKPSALSHARELDRVDRRLRQVTVSVRARVARELVSQIRKLTREIDALKQELLALIKAQRPWLLEETGCGALVAAIMIGRTAGAKRFKSDASFALQAGIAPIPCSSGQYRQYRLNRGGDRQLNRALHIVAVTRARVDPETRAFLERKVSEGKTKKGALRCLKRHLARRFHQLLSLPAQSIERSQDDTLPEHPGRSRDIDPKIKGTAPMRCLT

SEQ ID NO: 469234 - protein, 435 aa, unidentified
MEKIRANVAGIDIGAKKVFVSVEGQPVVSYFTFTEDFFLLRDYLLKHHVVSVAMEATGVYWVILYEILEEAGIDVWLVDGRQTKQVPGRKTDVKDCQWIQELHSYGLLNRCLVVDADIKELRSYLRLREDHIGSSSMHINHMQKALTLMNIRLKEVLNQIHGASGMAIIEAILGGERDKNVLVSLCHTSVLKTKKELILKSLEGRYTEAGLFALKQAYDGYMFYLRQIEECDKKISTVMNRIGQSGNSWDIKKKRKAIRHHKPVVENLAPNLLNVFDGKDATVISGITDYTWMQLLAETGPDLKKWPNEKHFTSWLGLSPGQHNSGKMRKNVKKKGHPVAGQIFRTIAQSLINSKNIAIGSFGRRLRGRKGPRIAIKAMARKTAILYWRIMVKGVDYAEQGITHYEEQLLANKIKTLNRLAKELNIQLTENVNVA

SEQ ID NO: 469235 - protein, 320 aa, unidentified
MKRGQIAPADRAHLRSWLARFAGRDDVAFALEGCTGWRYVAEELAGAGVAAHVAEPADTAFARGRKRHAKTDRTDSRHLRELLAEGRLPECWIPPSVILECRALLETYHDLRAEHTAWVQRIHAVFFHQGAPALGEAALRTDDDLEALRAAAACHLSPAGQLQVATALGMLAALEARLDVLRHRLLDAARGLTGARVLAARLYGVGPVTALAMTCWLGGAGRFSSSRKAVRFAGLDITVYSSDRKGPPGRLSRQGPEVLRWAVYEAGKTHARASAPDHRYYAQVKDRKGGKRAALSEARKILRQACHILTELGDDALTAA

SEQ ID NO: 469236 - protein, 356 aa, unidentified
MAIAIGIDVHKKTSTFFAYGEDGEPLEEFNKRFKRVASNRDGYTEVLVWLGNSDCDFLMENSTKTHDVYWILQGLGYKNLYVAHSVDLKRITKSSKKTDQFDAEKLATYMRVKQQNIDQFRTCYICTPEDMRIRRLCRIAKQELFDMGRIRRRIRSHLLLTGREWIGGLNTKWECEALMNEDDPGLRHLGRQLNECRLRRDAAEEAVVEAIKGNEKMFPIYEKLKETPNFGDITAAYLAAVIVDIDRFENPKKLAAYLGIVPRMRDSGETENHCGLTRSGDPAARWLLIQATFRLVNSSAPDSQLKAFFAEKNGGSIEERKEADTSGLLKRPALVATANKLIHIIFALFTHPDRHW

SEQ ID NO: 469237 - protein, 399 aa, unidentified
MQVFIGVDPHKLSATIEVVDQYETVLARGRFDTNKTGYAAMKKHVASWPDRIWAIEGSGGAGRPLAQRLLADGERVVDVPPKLSARARLFDTGHNRKTDAHDAHAVAAVAVRTKGLRVLARDDDLEVLGMLSDRRSELVSQRVQTVNRLQRLLSELLPGEVKLNLTAPQAREILSRRRPRDLAGKTCKRLALEQLEDLVVIDRRIKASEKELKALVIASGSRLMDLPGIGPIGAARILADVGDVHRFADRNRFASWSGTAPLDASSGEQIRHRLSRAGNRKINHMLHMAALSQIRLDTEGRAYYRRKRAAGKTHLEALRCLKRRISDAVYRQLLHDATTATAGASPGGHCGASLISSAADSHPLISTSDQPLPDPRPRRYAATPRPRKSQHGKPLQRAD

SEQ ID NO: 469238 - protein, 334 aa, unidentified
MSNVTTVGIDLAKNAFSVHGVDANGRVLLRRSVSRGRLVQLIAQLPPCLVGMEACSGAHEWARQFGIYGHTVRLMAPKFVAPYRKSGKNDGNDAEAICEAVSRPNMRFVPIKSREQQAILCLHRARQGHIEERTGAINRIRGLLSEFGVVLPQKAIEVRRGAAMACEALPDMAASVIRELLDHVRHLEECIKHFETLIDSHANTDERAQRISALSGIGPMTSSAVVATVADAREFRNGRQFAAWLGLVPRQYSTGGKTRLGHITGRGDPYLRTLLVMGARSVLQNASRRKDRLARWALSVRERRGYHRACVAIAAKHARILWALLAKDEPLQLA

SEQ ID NO: 469239 - protein, 360 aa, unidentified
MTATMTWVGLDVHARSTQAAAIDRESGELTRARFGAGVEEVTAWLQGLPQPIHGCYEAGPTGYALYRATEAAGLHVDVVAPSKTPRAAADRVKTDRKDAELLVRLLLAGSLSAVAVPSASCEAARDLARAREQVRADLARLRHRLSKLLLRYGRVYDRGSTWTQAHRRWLAAQQFEHVPTELAYLDALAAIEGLLARRAALDERLSLLATEPEHRPTVARLRCFRGIETLSALVLHLEVGDFGRFQRPGQLAAWLGLVPSLHQSGESETRGSITKTGSGFARRIIVEAAWHYLREPRIGASLRDRHAGQPDHVLQIAWRAQHRLYRLQRRLRARGKPGNIAVVAAARELACFLWAAAIAD

SEQ ID NO: 469240 - protein, 362 aa, unidentified
MDYRIGCDAHKHYSQFAVMDDGGNLLAQRRVDHQPGAIRTFLENLPEGTPVALESVGNWYWIADEIEAAGCLPLLTHAAKAKVMMGNVNKTDKLDAKGLAKLLHLDSLPTVWLPPGEIRDERELHRTRMALSKLRTALKNRIHATLAKYGITSTEHSDIFVGTGRAWLETTLCHLPPQTERCVAQELEALDGLQNQIALLEQYIRERTALTPSIQLLKSLPGVGNILAIVIEREIGSIDRFDASGRLTSYAGLVPTVHASGGKTHFGHMRKPSNQYLKWAFIEAANVVVRHRHHPAWKVTYVCQIYDQVSQRKGHAVAVGAVARHLAEGAFWILKRQQPYRPPASRQASPKQVRGRAQLVST

SEQ ID NO: 469241 - protein, 387 aa, unidentified
MYFVGIDISKFKHDCAIVDELGDVITPSWSFQNDREGFSLLKELLDALNGEKKIGLEATGHYGQNLKLFLENNDFSFMEFNPLLINRFVHSKSLRKTKTDSIDALMIAQYLMTVEYKPYPPSFYTLEKLKSLTRFRDSLIRQRSKQLVELTNILDKVFPEFKPFFKGRFSATALYILSHYASPEKISNMNFKSYEPLRRLSRGRFSMVDLFELKTLARNTVGSTRDYLLQEMEITIDIYNQLQSKVEEIEIQINDCVLGLAPPILTIPGIGVASAAVILSEFGDLSKFNSPSKLLSFAGMEPGYFQSGTSESTGKMVKHGSSHLRYAMMNCAQTVINNEPTFAAYYAKKRAEGKEHRVALTHVAKKLLRVIYTLETKELSYNPDLVR

SEQ ID NO: 469242 - protein, 393 aa, unidentified
MTTTRTVESSSPAIRLHLAFDLGWTEWKLAFTVGHGQSPRLRTTRARDLVALQREIARAKERFGLPVDAPVVSCYEAGRDGFWLHRWLIAQGIDNRVVDSSSIEVNRRSRRAKSDRLDAGKLAAMLLRYHGGETKVWSVCRIPEIADEDRRRLHRELIELKDERTRHINRLKGLLANQGVCLATVDASFSAKLQDIRLWDGSELGDDLKGQLLREHARWQFVDRQIRDLEGERSKRIRRDDTPQVGLVRRLLELTGVGLNGAWLLVYELFGWRTIRNRKELGAMVGLTPTAYQSGSSSREQGISKAGNRRLRRLLVELAWCWLRWQPMSELTRWYQQRFGVGQRARKVGIVALARKLLIALWRWLEQGELPAGARLCPWRPKVNGVPKGTGAT

SEQ ID NO: 469243 - protein, 404 aa, unidentified
MEDATLRFGSVDWASEKHTACVVDGGGKAVEEFEVAHDAPGLSALCRRLLRADAQRVAIERPDGPVVDALMDAGLKVVVVSSRSVKALRTRYGLAGNKDDRSDAFILADCLRTDGHRWPSLQPDAPLTLALRSAVRARKDLVASRVATANQLRAHLDIVFPGAVGLFAEVDSPISLSFLERFPSAAKAAWLSENRLGAWLMANAYCGRTSVIELLRRLRSAPAGRHGAAAEMHAKVTLVLARVLRSLLAEIGQLEAQIAEQLALHPDGFIFQSLPRAGTVRAAALLAEIGDCRARFPTPDALACLAGAVPSTRRSGRYKAVTFRWACDKRLRDALVDFAQDTRRASPWADQLYRRHRAQHKTHPHTARILTRSWIDVIWRCWQDRVAYDPARHRALQRVLARGA

SEQ ID NO: 469244 - protein, 388 aa, unidentified
MKKNSKNETMKSKRETKKVAELEASWMSLNEREANTLVIGIDLGDRTSAYCVRTLGQQIVKEATVATTATAILEAFQGLRRQRVVIETGTHSRWVAQLLELMGDGVIVANARKLKLISENNQKSDKVDARLLSQMGCMNVEWLHAVYQRSQEAHSDLLLARARQALVDARTALINHVRGSVKSYGSRVVKCGAERFVEVARGALPEALKPALSGVLATLEEINEQIYSYDCQIEHLCDTKYKEAAKCLLQVNGVGPVTTLTYVLTIEDKDRFEQSRDVGPYLGLVPKKRQSGQRDPQLGISKAGDEMLRKLLVNCAHHILGAKGQDSDVRRWGLELVRAVERKGKKGARKLAAAAVARKLAVLLHRLWVTGAAYEPLRNRGAQQAPAA

SEQ ID NO: 469245 - protein, 377 aa, unidentified
MHSENIAAYIGLDVHKETLAVAIAAPERLGEVRYYGTINNEAQAVRRLFQKLQGLYGNILSCYEAGPCGFGLYHQLTAMNIKFQVIAPSRIPKSPTDRIKNDHRDAISLARLLRAGELIPVWIPDLTHEAMRDLIRARAAAKRDSRVARQRILSMLLRTDKRYAGKHWTGKHRTWLANQSFSQPSQQIAFQHYCQSLEQIEDRILQLDQEISRLLPEWSLCNLVCQLQALKGVGQLIAITLVAELGDFSRFSNPKQLMAFLGLVPGEYSSGNSIRPRGITKVGNSELRRLLYEAAWSYRTPAKVGAWLIYYRPDSVTQYSKDIAWKAQQRLCSRYRTLTAKGKKSQVAITAVARELTGFMWDIALAAQSSFSQQKQN

SEQ ID NO: 469246 - protein, 342 aa, unidentified
MQITTIGLDIAKNVFQVHGIDAKENVVVRKQLRRGQVIAFFKALPPCLIGMEACATAHYWARELRKLGHEVRLMPARDVKAYLKRNKNDAADAAAICEAVRRPTMRFVQIKSAEQQGQLMQHRTRDVLIRQRTQIINALRAHLAELGIVAAQGDAGVNELRAIVADEQDTRLPIDARASVIVLATQLEALQTMIGSIEKRIKMQHRSNEVSQRVETIPGIGVLGATAIVATVADPTIFRSGRDFAAWIGLVPRQDSTGGKQKLGPISKQGDRYLRRILVVGAIAVLRRAQENPGKYPWLTQLLARRPFKVVAVAFANKMARMAWALMVHGGTYRAPELVEAA

SEQ ID NO: 469247 - protein, 415 aa, unidentified
MEPVLECCAGMDVHEKKVDVCIAHGSLDKSPKFEIRTFSTMTSDLEELSSWLKKYKVTAIGMESTGVYWKPIFNIMEGEFTIVLANAQHLKSIPRKKTDIMDCMRIARLLRYGLLPNSFIPPREIRELRDLNRTRRKLVGMMTSEKNRLTKVLESANIKLSSVVSKISGVSSLAMIRSLLEKDKLSKEEIAQLAKGSLKKKVDQLDKALNGKITDHHRFLLKMHMENIDHLAKQIEKIDEEIKRKMIPFQTEAKLIQTIPGISEVSASAIISEIGVNMSQFPDEGHISSWAGLCPGNNESAGKKKSGKTQKGNSSLKATLVEAAWAASKTKDSSYSAFYHNIVKRRGKKRALVALAHRMLTDIYSVLKTKEPYQDTGAEATNEIARKRKERSMIRSLEKAGYSVVKTSVAEMAVA

SEQ ID NO: 469248 - protein, 415 aa, unidentified
MGISVLYACCAGLDVHKATVVACLMLTTASGKVKREVRTFATTTRGLQDLAQWLVSQGVTHVAMESTGIYWRPVFNVLESHCEVILVNAAHMKAVPGRKTDIKDSEWIADLLRHGLLTASFIPPKPIRDLRDLVRSRKSLVHQRTQAINRVQKVLETANIKLSSLASDVLGKSGRDMLDALLAGISDAEALADLARGRLRAKLPALREALEGHVEATHRVLLRQLLEQTDFLQGQIDTLSADIEQRLAPYHKLLALLMQIPGIGLLAATAILAEIGTDMSRFASAKHLASWAGVAPGNKQSGGKRLKAHTNKGNRHLRAVLAECVWVISHTRDNYLSAQYHRLAHRIGKKRAIVAVSHSLLTIIYHMLLDNQDYHDLGPHFFETLDTTRQRDTAVRRLQALGYKVSLEEITEVSA

SEQ ID NO: 469249 - protein, 347 aa, unidentified
MKVLIGVDPHKASVAVAAVDETLGELVERASFPQDRAGLRALERWAKRFPERRWAVENAGGLGRHLAGRLAASGESVVDVPPKLSARVRVLSTGNARKNDELDALAIALSASRNGRLAAVDSEAASEALRLLSERREDLVAERTRALNRLHGLLRDLLPGGVTGTLSADRAARILRGIRPKGGASVRLRRRLASEILRDVRTLDRKIADLNGRIEAEVEASGTTLTGIFGIGPILAARIIGTVGNIARFPSKSHFASYSGTAPVEVSSGEAVRHRLSLAGNRKLNYALHMVAVCQARSDARGGIYYGKKIAEGKSRKEALRCLKRRVSDAVFRSLLADSQALSRSAA

SEQ ID NO: 469250 - protein, 463 aa, unidentified
MSIVEAVEPETSLVLGRGTSDCRCEHEPQIRLSPRSLLGGSVIVNRRKEAAVQQIYGRVAGLDVHRDNVVACFRRLGPRGGVVFEKERFGATTARLRELEAWLAERQVELVAMEATGVYWKPVYYALEAKFAVWLCNARHVKKVPGRKTDLTDAEWLADVAAHGMIRPSFVPPPPIRELRELTRYRKTQSAARAAEIQRLEKVLQDAGIKLTSVASRVLTQSGRAMIEALIAGERDGARLAELAMGKMRPKVPALTEALTGHFGSHHAVACGRILGHLDFLNASIQALSEQIDARTAAFASVYTSLLPVPGFDRLSIDVIIAETGADMSRFPTPGDLASWVGVCPGSHESAGKRRRVGTTKGNPWLRQALIESARAAARTKGSYFGAQYRQIARRRGPNKAAMAIAHSLIELVWHLLSTGELYKDLGDDYFTSRQDPERRARRLVAQLEELGFKVTLEAAAAA

SEQ ID NO: 469251 - protein, 310 aa, unidentified
MNSAIVHLGADIAQAHIDLFGPIDGLPAQVPNTEAGLRRLLKTLCKGPRVHLVCEATGGCERLLLRLCHAAGLPVSVLNPRQVRDFARAKGKLAKTDRIDARILQDYGRTMQPAPSVAPAPELQKLAIWSARRRQLIDMRNAEKNRLLRADSTLAASYRGIIATLDRQIATIDTVMAQIVSSCARLRAQIEALCAVKGLGVLSSTALLAALPELGSLSKNQAAALAGLAPFNRDSGLYRGQRHISGGRASVRCALYMSALVASRFNPVIKAFYDRLRSMGKPPKLALIAAMRKLLIHLNSLLKPFSTPLP

SEQ ID NO: 469252 - protein, 342 aa, unidentified
MLYVGIDVAKNKHDVTVLNVPGKTVLKPLTFSNNKAGFELLDLSFRQLNQDCLIALEDTGHYAFNLLNFLHEQGYKVYTYTPLLIKEFAKSLSLRKTKTDKKDAHGIALKLLSDPNREQFQHDNRQVELKILARHIHRLKKKQSDWKVQYTRCLDIIFPELDKIVGKHSEYTYQLLTCYPNPQKRLEAGFDKLIEIKRLTASKIQDILSVAPRSIGTTSPAREFEIIEIIKHYKRLIDKAETCVNDLMAEFNSVITTVTGIGGRLGAVILAEIRNIHAFDNPAQLQAFAGLDSSIYQSGQIDLAGRMIKRGSPHLRWALIQAAKACARFSPAFKAYLKTKLE

SEQ ID NO: 469253 - protein, 389 aa, unidentified
MFYLGIDIGKNTHVASLIDSKKKVLFKAFSFSNSIDGAESLICKLEPFKNQLEIGMEATGHYWLSLYSYLSEKNFTIRVINPIQTDGWRQGIEIRKRKTDIIDSLLIADLLRYGDFVETSLSNEDYLSLRNLSRFRSYLISSIGDLKRKTIALLDQVFPEYASSFSNIFAKTSKEILANFSSPSDFEDINSEDLQSFLDNVTMKKFAARKLEELSKKASKSFGVNFCMDSFGLQIKMLIGQISFIQNQVLDVEKEIKSLLEKLNSPITTIPGIGAVNAATILGEIGDIKRFSNPSKLVAYAGLDSTVSQSGEFESTSNHMTKRGSPYLRRALFQSALRAEFCDPVFSDYYQKKITEGKHHLVATNAVARKLVHTIFAVLTKDEPYQVQS

SEQ ID NO: 469254 - protein, 345 aa, unidentified
MKKVMAGIDLHSNNLVIGIMDMDGKRVASQKLSCKLKEVVKFLSPFKTRLEQVAVESTYNWYWLVDGLQRLRYPVVLANPAGMEQYSGIKHADDTNDAFFLAELLRLKILPIGHIYDEQLRPVRDLLRRRLSLVHHRTALMLSFKSLYTRATGKEMTLSQLKELEIKQAQDLYDHPANQLIAGMQIKHIEQLTESIEKIEKAVLDCARELPLYTKLTTLPGVGTILGMTITMEVGDIKRFAEAGHFASYCRTVEAKRTSNSKKKGENNSKCGNKYLAWAFVEAANFARRYDEQCRRWYERKAAKKSKVIATKALACKLAKAAWHLMALGTDYEAKRMFGQPATTQ

SEQ ID NO: 469255 - protein, 316 aa, unidentified
MAEELYVGIDVSKAELVVAVRPSGERMTLANDRAGIKRLVARLSELKPQLVVVEATGGLQRQVVAGLWLAGIAVAAVNPSWVRNFAKGRGVRAKTDRKDAELLALYAERERPEPRPPADAETQALQDLVMRREQLLEMLVAEKQRLHRASGPMRKELRHHIAYLEGRIKELEQDIDKTVRRSDAWRRKREIVRSVPGCGQHFSAMVLAKVPELGTLNRKQIGALIGVAPMPDDSGSRHGRRAIAGGRFEVRNKLYMCAMVAARSNPVLKQFYQQLVARGKPKKLALAAVMRKLIVTLNAMIKTNSLWRPQCPDLSV

SEQ ID NO: 469256 - protein, 331 aa, unidentified
MNYSHFVGLDVGKKTFDASLMSADEKELSHKSFDNTPTGIQSLLDWIAGYHLSLSKLLFCAENMGSYVTELSVSSVSMGFSLALVCPLTIKKSIGLQRGKNDRIDAKRIANYAVLNYRKLELYKLPDKDLVRLRGWIIIRDNLVKQKVSSIKLLETFSQMAKLADVTESISFLEEQLKSIKERILEVEEDMEQLIAASTSLYTNYLLLRSIKGIGIINAIVLLCVTDNFQRFDNPRKFACYCGVAPFEHTSGISIRGKTQTSSLANKEVKVYLTRAAITAISWDPQMKAYYKRKIAEGKHKAVVINAVRAKIIARSFAVIRRQTPFVTLAV

SEQ ID NO: 469257 - protein, 344 aa, unidentified
MGEVITIGLDIAKSVFQAHGVDSAGAVVIRKRVSRAKLLEFFASLQSCLVGIEACPAAHHWSRELQALGHTVKLMPPSYVKAYLKRSKNDANDAAAICEAVTRPSMRFVAIKTKEQQAALMLHRARQLLVRQRTMLSNAIRGHLSELGIVSAKGRKGTGALLEIIGDAKDGRVPPAARGILDVLARQYSAIGAEIGSIDRSIVAWHRSCEASRRLEEIPGIGPIVATALVAEIGDWKAFGSGRNLAAWIGLVPKQQSTGGKDKLGRITKQGNRYLRWLLVAGAMAVIRYAQRHGTLKRPWLGRLMERRPTKLAAVALANKIARIAWAIIVHGDRYRETKPLLAA

SEQ ID NO: 469258 - protein, 413 aa, unidentified
MLKIVYPICCGMDVHKSFVYACIASTNEQGVTTYKSKRFSTFTKDLRFCAEWLAANNCKDVCMESTGKYWIPVYNILEPTCNVVLAHPKYVKAIKGKKTDKKDAKWIADIFKHDLVSGSFIPPADIRQLRDLVRYRWKLTNFVVGEKNRAQNCLTVSNIKLDDVFSDVFGKTSSNIISRMLDNPSEKITDVADFRTKRMKATDEELLAAVDGEFCPEQAEKLRIIRSHLNSLELCKLNVESLILTVAEKYIPQIDLVSTVPGIQTFAAIGIISEIGVDMSVFPSSKHLCSWAGLTPQNNESAGKKKTSRIGRAGDYIKPLLVQCALAAIKSKKNTEIRNRYLSIKKRRGHKKAIIAIARMLLTAIYNILKKNEPYNADLYTRSNNPPAHRTVSVDEAIFILQRQGYLVTPATS

SEQ ID NO: 469259 - protein, 408 aa, unidentified
MNPLFVGIDVSSKNNVAYLMKPDGSKHSSFSVQNNLGGAKLLSERIVSALGSMQLERVVIGLEATSIYGDSLVYALREDGRLGRFQRKIHVLNPKQVRKFKEAYSDLPKNDWVDAFVIADHLRFGRINREVYMDDYRYKALQTLTRARFDVIQNLTREKQRFANYLFLKCSGMAQDKDIQNTSATTIALMEHFETVDDLANADLEELTAFITETGRGKFADPDATAKAVRAAAKGSYRLPKTVNDTVNQAMAVSIASMRALKGQVKVLDKAIEQQFEIIPNTLTSIPGIGKVYSAGIIAEIGDIHRFDSQASVAKYAGLVWNRSQSGDFEAEHSRMIKSGNRYLRYYLLEAANSVRRCDSEFRRYYDLKFKEVNKYQHKRALALTARKLVRLVFRLLKPPRLYIPPEG

SEQ ID NO: 469260 - protein, 317 aa, unidentified
MSNPESFVGIDVAKSWLDIGWLAGPTLRIDYNDEAVSGLVERLRREPPTLVVMEATGGLETEVASALAAAGLPVAVVNPRQVRDYAKACGRLAKTDRIDAMVLAGFACAIRPQVRELPDEDTRALGDLLARRRQLIEMRVQEKLRLQRASSVQRVSLREHITWLDERIARLDIELTHTLRCSPAWRDKDDLLKAIPGVGSLTRATMLGLLPELGTLNRRQIAALVGVAPFNRDSGKHQGQRTIWGGRAQVRRTLYMAVVAAMRCNPVIRSFYLHLRAQGKPAKVALTACMRKLLIIMNAMLKHHSEWSPGLDSQHSC

SEQ ID NO: 469261 - protein, 421 aa, unidentified
MRWSRGALGRVPRFAQRRVILFFWPIRASSANQISIVSMPTAFSRAIASRRAGKLMEWPAPPPGEIVLPETQTEERMMKIAVLGIDLGKNVCSVVGLDPSGAVVLRRRVRRDTLIDLVAKLPSCIVGMEACCGAHHLGRLFAAQGHDVRLMSPEYVRPYVKAQKNDDRDAEGIAEAATRPTMRFVEMKTEDQLDMQTLHRSRERLVGERTALINQLRAILLDRGIVVPQGKRKLEQYLVILMNEHNGEGLSARMRMLVADIRAQWQELDRRIGEFDAEFVRWAKENEDARRLVTIPGVGVTTSTALIAAVGKAETFEHGRDLAAWLGLVPRQSTTGGKPRLMGISKRGNKYLRKLLIHGARAALPYVAEKDTALGRWAKSLLSRVHQNVAVVAFANKLARICWAVLRSGQRFAAQEAPLVV

SEQ ID NO: 469262 - protein, 364 aa, unidentified
MTAAQAGRQAASSTVEVVGGVDTHKDTHTAAAVDTAGRVLGSAQFPTDAAGYRALLRWLRGFGTLLLVGVEGTGVYGAGLARLLAAQGVAMVEVDRPDRKARRWQGKSDPVDAEAAARAALARVRTGVPKQRDGRVEALRTLRVARRSAVGQRADVQRQIKALIVTAPESLRAQLRKLPDRELIEVCADLRPDRADADDPGTATKIALRSLARRHRRLSVEVADLDELLGPLVAQINPGLLALKGVGAEVAGQLLVTAGENADRLTNEAAFAMLCGAAPLPASSGKTTRHRLNRGGDRAANCALWRIVITRMGTDQRTKKYVARRTTEGLAKPEIIRCLKRYVAREVFLALQSASTEKRPANAA

SEQ ID NO: 469263 - protein, 316 aa, unidentified
MNQEVLGKVVGIDVSKSRLDVAFADQAWAENNDLDGIEALIGRLEPLAPTLVVVEATGGLERAVVALLSQVGFRVAVVNPRRVREFARSIGLLAKTDKVDARLLIRFGEAIRPEPTRISSEEEQQLMALMTRRRQVVEMLTMEKNHLGSAHPSTQASIQKVMQALRQQLDELNHLIDDLIGHTPDFHEKNDILRSAPGVGQVTAAILLSDLPELGALDRKKIAGLVGVAPYNNDSGRHRGKRRIKGGRPGVRTVLYMATLSATKCNHIIRSFYHHLLAMGKEKKVALVACMRKFLVILNAMIRDRRPWQSSSPSVT

SEQ ID NO: 469264 - protein, 403 aa, unidentified
MNSVGIDISKGRSTVAVMRPFGEVVISPFEVHHTDSELSALARRLKSLNGETRVVMEATGNYHAPVAKLLHDAGLYVSVVNAKLVHGYGNNELRRVKTDKKDAVKLANYGLDRWLTLPRYVPEEGARLLLKNCYRQYRQYSKVQTVLKNNLISLLDTVFPNVNRLFSSPIRGDGSEKWVDFVAEFWHCRCVSEKSEKAFANKYQRWCKKHGYNFSVAKAHTIHAEASGHIGVMPKSETTKLLVEQAVAQLRATSVALTALKREMLTLAAQLPEYPAVMGMFGVGPTLGPQLIAEIGDVRRFYSKKALVAYAGLDAPPNDSGDVTGKHKSMSKIGASSLRRTLFLVMSVYLRSAPLDEPVYQFMDRKRAEGKPYHVYMMASANKFLRIYYATVKAYLESLEHTT

SEQ ID NO: 469265 - protein, 460 aa, unidentified
MNRNKSKSRAERTMPMVHPNAAAIDIGATMHMAAVRADRAPEPVRSFGTFTADLHRLVDWFTECGVETVVMESTSVYWIPIFELLDARGFAVFLVNARDAKHVPGRKTDVSDAQWLQRLHSFGLLQASFRPKGQIAELRAYVRQRERLLEYAASHIQHMQKALTEMNLQLHHVVADITGVTGLGIIRAILAGERDPEALAGLRHYSCHSSAETITKALTGSYRAEHLFALDQALALYDAYREKASACDVRIEAVLKELSTHRGCDHGSAPPVSRRRNRTDQANALAFDVRAALFVLLGKDITTIDGLGPYLSLKLIAECGDDLTSWPSAKHFTSWLGLAPSNKISGGKVLSSRTRRSGGRAAALLRLAAVTVGRTDTALGAFYRRLSSRIGKAKAVTATARKIAVLFYNAVRHGMAYVDPGASSYETRYRTRVVNNLHRRAKAFGFVLQPLEPKVGAAVS

SEQ ID NO: 469266 - protein, 349 aa, unidentified
MTVTIVEEARPVTGGVDTHADTHVAAALDPVGGLPGVEEFPATAAGYARLPGWLGGFGTVCLAGIEGTGSYGAGLARHITAAGVRVVEVDRSDRQDRRRQGKSDPLDAVSAARAAQSGRARGAPKGRDGAVEAIRTLMVARRSAAGERTRTINQARALVLTGPDDLRTRFARHTPAALITGLASLRPRTGDVAGHATRIALRELGRRAQFPAGQLTRLDELIVPLVTARAPGLLALYGVGPRTAALLLIAAGDHPGRLRSEAAWAHLCGAAPIPASSGKVTRHRLNPGGDRQANHALWRIVFTRLGSHPATRAYAERRTAEGKSKAEIIRCLKRYVAREVYPHLRPAGG

SEQ ID NO: 469267 - protein, 404 aa, unidentified
MKFCGIDWANDHHDALTIDEQGRQLGSIRVAHTPEGLSKLDTYLENLAGEQGHEHVACIIETTHGLLISSLLEHHWPVYPVNPRTVDRHRAPSGAKTDLIDAYLLAKTGRADFADLHRLNPDSELIQELKELTRDQDALVQMQTRLLNQLTACLKAYYPVALTLFSKLNQPATLAFLRAYPTPQQARQTTVEELVVLLKKTRYPGVQAAASRLVQQLQTPALLANQVTTRTKARLLLAILDQLEPLVHQIAGYDEEIEHLFLTSEDHDLFQALPGAGARLAPRLLAEIGDDRSRYHSASSLQALAGTSPVLFQSGTYAKAHRRLGCIKPLRNALHQFAFHSTRSEPWAKAYYQRKRAEGKSHTVAVRALANVWVRIVFAVWTKKEAYQTTTFEAAQFAHARRVA

SEQ ID NO: 469268 - protein, 334 aa, unidentified
MTARFRKVGTERDIMASQSTFIGIDVSKASLDVAIRPTGESLRFDNDTSGIKKLITRLKSLKPALIVMEATGGMELPAAAAIQVAGLPLAVVNPRQARDFAKSTGKLAKTDALDAHALAHFAEAVRPEARPLPDEQTRELAELVSRRAQIVDMITMEKNRLRTSPSKVRRRIKAHIAWLEKELYGTDDDLATAIKESPAWKAKDEILQSVPGVGPVVSSTLIADLPELGTLNKKQIAALVGVAPLNKDSGTYRGRRGIWGGRALVRSRLYMATITSVQHNSAIKAFYDRLMAFGKKRKVAIVACMHKLLIILNSMLKNKTRWNEHLNKAMAKAA

SEQ ID NO: 469269 - protein, 346 aa, unidentified
MKVLLKQTVGIDVAQNELVVSLGRMDQQISIEVYAYKVFPNTQKGFSSLVSWVNKQTLTNAEVRYVMEATGVYHESLAYYLCTNQKQVSIVLPNKISNYVRTLDIKTITDKSASQAIARFGLERQLEVWQPPLKIFNDLRQLCREREQLVQEWTMLKNQLHAERTSATSSEKSIKRTKKRIAMIDKQEKEIMEEIAALIKGDEAIAKKMKVITSIPGIGNLTAVTIIAETNGFELIKNKRQLVSYAGLDVREKTSGTSVKSKPRISKRGNRNLRKVMHFPALAAIRTDENFRYIFLRLASRHGIKMKAIGAIQRKLLELTYILWKSNTSYCPNYHSHSITTETITM

SEQ ID NO: 469270 - protein, 464 aa, unidentified
MRKGRKSGRKPGKKIVDITAGLETLHLHAAGIDVGNAEHYVAVPVGRDPRPVQTFGSFTADLHRLAKWLQACRIETVVMQATGVYWMALYQVLDGYGLQVNVVNAKYTKTLPGRKTDVLECQWLQKLHTFGLLNNSFLPPEEIRVLRTYLRQRESLVADAGRCIQQMQKVLTVLNVQLANVISDLSGMTGMAILAAILDGERDPYKLAALANPRIQASRKELAQSLEGHWRDDLLFVLRQVHELYFTFLQNITACDQRIEAHLKTLDSKVDVEAAPLPEARPQDRLPRRKHIPQTDLRAELYRITGVDLTRIDGIQVQTAQVVISEVGTDMTRWPNEHHFSSWLGLSPNNQITGGKVIRRGTKKVLNRAATALRLAAQTLHRSKSYLGAKYRRLRAKLGAPKAITAMAHHLARLIYRLLRFGTQYHDQGVVYYEQKYRQTEMNWLRKQAAKLNLQLVPTGALGK

SEQ ID NO: 469271 - protein, 420 aa, unidentified
MTPKNNSKIISVVHPICCGLDVHKDMVSACIIITRADGEETFVVKEFSTFTDDLYRLKAWLLRHACKVIAMESTSVYWRPVHNVLEDSLEVILVNAKHVKNVPGRKTDISDSMWLASLLRIGVLKASFIPEKRIRQIRELVTLRKSYTKSLADYKRRVHKLFATANIKIGSVVSDLFGKTGRNLIGTLMDTDTELKIEHVEQCAEGSLKQKVAELLRAIQGFFEAHHRFQLKMMMQTIEHLESEIEAITKRLDRILIPNQALMDQLDEVPGIDKKTAQSIIGHIGDTLTSFRSDKALASWGGLCPGNNESAGKRKSGRSPVRKHPFKELMIEIAWAAVRTKGSYYKDKYYRLKSRRGAKRAIVAVAHRITKAIYYIIKHNRSYIDLGEAYLMSKSKEKRIKKLKMNARHLGFSLVPAGIN

SEQ ID NO: 469272 - protein, 458 aa, unidentified
MEEPQEVLADEEHERVWERVAAVDIAKASGVACTRLPDEDRPGKRKTHLWTVQATAGAIIELGDYLRARQVQVVTLESTSDYWRIWFVILEAAGLRVQLVNARAVKNVPGRAKTDKKDAVWLAKLTEKGLLQPSFVPPYEIRRLRELTRLRADLVHDKSRYWARLEKLLERAHIKISAVLSTLDTDTARAMIEALIAGQRDPRALADLAIGKARAKRAELAAALNGRWEDHHSVQARILLDDIATLNQQAGQLTAQVSELIAQIPAAWGVDAGGTTGPDAGTSPDSPVLSAVAQLDAITGCGIIAAQAIIAELGLDMTVFGTAGRLVSWAKRSPQTRQSGKKTSGGRTGKGNPWLNGILGEIAASASRTDTFLGERYRRIARRRGKRKALAAVARSILVIIFHLLSDRSARFRDLGPDFYDTQISRDRKIRNHLRQLQALGLSPDDITALLGKDKAAA

SEQ ID NO: 469273 - protein, 400 aa, unidentified
MTYDHVIGVDVGKYFHHACVLDPSGTTVQSTRVEQSEAALTEFFTQFTTTGSTLVVVDQPNNIGRLTVTIAKATGADVKYLPGLSMRQLARIHAGNSKTDIRDAFVIAYAGRFLPDALRAVDRTDPIFQQLKALNGIDDDLTRAYTRLINQIRSSLVGTYPEFERVLCGSVIHRRWILELLARYGGPTKLRRLGRSRTITCAKKRKARNPAPIVDALFDAITSQQLTLPGAGEAELGVALAATDALAKLDHRKRIHQQVPEIPDIIDQLPLIPVLLSMPGIGPATAAQPLMTTGDFSDFKTAAQLASYADLCPTTNQSGTSLNSHSVNRAGNKRLNNALWQSSFSAIRHHERSRQFYERKRQEGKRHNAAVVCLARTRLNVLFAMVKNVAFYSEDYANTP

SEQ ID NO: 469274 - protein, 392 aa, unidentified
MIFVGIDVAKDKHDCFITNSDGEVLFHSFSITNNLSGFTELYQNILSVMDGVNKVKVGLEATGHYSYNLLGYLLDKGFPTYIINPLHTNLYRKSLSLRQTKTDKVDARTIASMLMSDVNLKSYSDTSYHNEELKSLTRYRFDKVKERSALKVSISRLVCILFPELEKLVPTLHMTSIYTLLFEFPGASYVASAHLTKLTNLLSKASKGHYGKDTAVLFRETARNSIGSVMPAKSLELKHTIKLIQELTSEIDEIEAAIKLIMDEEIQSPILTIPGISYRMGAMIIAEIGDFSRFDSADKILAYAGMSPSTYQSGQLDNCHSHMEKRGSRYLRYALYNATKYVCHWDKSFGSYLEKKRSEGKHYNVALSHAAKKLVRTIFAMEKSGQPYIAAI

SEQ ID NO: 469275 - protein, 428 aa, unidentified
MSKRDYNRQAARRQRVSKTTLIVGVDVGKAFNALGFMNKDGNVLGNCAKLYNNREGFEQFLEMIEGLKARHRLRDVLVGMEPTGHYWRKLAYFAKEHGYEVRFVRTTALKHHRELDESSSAKSDQRDALTIANITREGKYIDTVIEDGTLRQLRTLSKARERLLRYSVSAKNSLHAALDDYFPELHKIFWAMGSRSLWVILDQCPFPGDVVLMKTSVLQELIARSSRKRAGSAGKAKALYEAAQKSIGVKQIGTADRYRLRVCLEEVKRTVLTLKDMDRQLKIMVKDIPSAPYLMSIPGIGYLSAAVFLGELGNPAHFHNARQIVKYAGYDPQETDSGSWVGRKFISKKGRWLLRKYLFFMSMRVTVLSKYFQEYYRRKLEAKNRVGQQPRRKEIICAVAIKLIKVIFALLRDKRSFEDTAYAAVAIA

SEQ ID NO: 469276 - protein, 330 aa, unidentified
MFYLGIDVAKAKLDCCLLLDPVSAKRKSKTFTNNKAGFVNLLAWLGKFEIAPVNLHAVMEGTGVYHEQVALALTDAGATVSIVNPAHIKDFGRGIAVRTKTDSMDSLVLARYGALLQPAAWTPPPQEARVLKALLARRDAIAQDLRRELNRQEKADATDTPELICQSLDDSIKFLKNQLNRLQRDIDDHVDRHPNLRQDYELLTSIPGVGQRVGNNLLAIMHSQQFSSAEQLAAYLGLVPIERQSGSSILGKARLSKAGPPRIRAVLFMAAVVATKRNPHVKALYERLLARGKAKMAALGAAMRKLVHLCFGVLKNQTPYQANYENTTCA

SEQ ID NO: 469277 - protein, 413 aa, unidentified
MKVIYNNCCGIDVHKTFLIATIIKTTGRKIDYLKKRFSTHNKDILRFKLWLTQHECYDLCMESTGKYWIPVFNLLEDNMNVVIANPKWVRAVKGNKDDKKDSKWIGELFRLGLVPGSFIPPKDIRILRELTRYRFKLVSTRSSEKNRFQNSFTVCNIALDSVVSDMFGVSASAISNYILTSDTFDFEHCVSLLKGRLKKKSDEVIESIDGYHMMQPQKDRALIIRQHIDYLNQMIATIDAYLDELISPYEPLVKLLCSIPGVKRQSAIIIISEIGSNMFVFGDQKKISSWAGLAPSSNESAGKKKSVKISRAGVYLKPALVQVAHAAKKSTTTPYYKIKFDRIAKRRGKKRAIIAISRMILVAIYHMIQTGELWNPIDLTTIDTPEHILQRKKDKAIKEATKLLIKEGILKVS

SEQ ID NO: 469278 - protein, 371 aa, unidentified
MKKTTQAVSKETRDEATQDKALVRALKLGLDVHYRQGTVAMQEDGGRIKAAGKMSHESFLNWVRTKLEEGWRIDSCYEAGASGYWLHRELVELGVKNLVVAPKAMGGPEAKRQKTDKRDSGQLCDALDRYLRGQDKALSVVAVPTLEQEQNRALIRYHRQIMKDRNRAEARGKGLLCAQGIEVGGLWWEGKGWSGLQSDPRLKDWMKEQLEGWRQKILSTEAEQRVLRERIEALAPERLPKGVGAYSAAVLKYEMKGWERFSNRRQVASYTGLCPGIHLSDGRGKEGSINRCGNPTVRWTLVEMVWRLMIWQPHYRPVRQLATGLVKSKRAKKRLVVMAARRLAIDLWRLETGQTTPEKLGLIMRSNSLKK

SEQ ID NO: 469279 - protein, 334 aa, unidentified
MQNVTLIGIDLGKHSFHVHCQDKHGNALLRKKFSRTQLIHFLGSCQAATVVMEACSGAQFMARQIADLGHEPKLIYPQFVRPFVKSNKNDFVDAEAICKAASRPSMRFVKPRTQDPQAMAALHRVRDSLIRQRVKTTNQMHAFLLEFSVSLPRGIAVIRRLSAVLEENDFPPYLARVLSRLHRHYVYLCGEIDEVDKELKTHLAEDENAQRLLTIPGVGPVTASLLATRLGDGKNYASSRDFAASTGLVPRQYSTGGKTTLMGISKRGDKNLRRLLVQCARVFIQRLEHNPGRLAEWVRKQLANHHSNVVACALANKLARIAWAVTAHQAAFSQ

SEQ ID NO: 469280 - protein, 347 aa, unidentified
MNFYNNTHPYYCGIDLHARILYVCIIDNDGNTLVHKEISDCPQKLLTILEPYIGNIVVGVECMHCWYWVSDFCDDIGVDFILGHALYMKAIHGGKAKNDKIDSYKIAKLMRGGNFPLAYTYPKEMRATRDLLRRRMKIVRHGADLKAHITNTASQYNLPPPKVVLKNKDAQHLISQHFKDPVVQRTVDLDMTLIKCYQAELSKVEWFIEQQAKKHNPVHLQLLKGINGIGRILALTIIYEIGDINRFPSVQKFASYARLVKCKAESAGKTYGTSGNKIGNAHLKWAFSEAIILHLRGNKEAQNYLLKLQRRMTKAKALSAFAHKLGRCIFYMLKHEKVFDENKFLKS

SEQ ID NO: 469281 - protein, 340 aa, unidentified
MKTHIGVDLHQRFCYLTAVDASGRKSKQGQVVNQGAALRAWLRQVPGPRQVVVEASGFWPAFARAVGPEAERLVMVHPQRVKAIASARLKNDRVDSETLAHLSRADLLPEAWMADERTQQTRLLTRLRITLGQQRAKAKNQLQAVLHQEGFLKPVTDVFGKRGRAWLAGLELSPAGRVVVQVWLKVVDQMDVAILEQTRELERMAKADARARWLQTVPGIGAYSAMVILAEVGEIERFQSKRALASYAGLTPSVRESAGKQRRGGIGHHGSGTLRWIMLQVAQVAARHSPAARAWIARLKRRKPAQVALIALARKLLTAVWALLRHGVCFDENSFVQPAS

SEQ ID NO: 469282 - protein, 392 aa, unidentified
MTCTDHPLPAPTAARSDDRTLFAALELSRKSWLVATNAPGEEKVSKRTIAAGDGRALLDLLAGLREKAERRIGKPVKVVVIQEAGLDGFWLHRLLEANGLESRVVDPASIAVDRRKRRCKTDALDVDALLRTLMAWARGERRVCSMVRPPSPEDEDHRRLSREREALVKERIQHTNRIKGLLAAQGITDFEPLRPGHRARLDGLTTGDGRPLPPRLTAEIRRQLARLEAVITDLKAVEAGRDALLADDTAAVSTAGGTPPAAAALSRLKGLGPEFVSILCLELLFRSFNNRREVAAYAGLTPSPFKSGGIDREQGISKSGNPRLRKMMIQLAWMWIRYQPGSAISRWFAEFAGTKRGRIRRIGIVAVARKLLVALWRFATQGVVPDGAALKS

SEQ ID NO: 469283 - protein, 485 aa, unidentified
MRIVYARCAGLDVHKKSVNVCIRHGKGNKVEIIRGLFGTCTEELERMRAFLREHKVRRVVMESTGVYWIPVWNVLEQSNWNFSVVVVNPQHVKALPGRKTDEKDCERLAELGQYDMLRGSFIPPAETRRWRDLTRRRTHLQADRNRVVNRIGRLLETANIKLSCVVSDIVGKTGWAILNALAAGDTDPEWLAKLAYGSLKGKRAELTSALRGFVTPHFRWLLRELLDDVARLDRKLTELDALIHEQMKDQQDAIRRLCTIPGVKETTAWTILAELGTDMSQFPDAAHAASWAGLCPGNCESAGKRQSGKTRKGDRYLRRILVQNAWAVSHKSDCFLTALFYRVASRRGLKRACMAVAHKILIIAYHILRDGTVYQELGGDHYDRRSPERTAKRLTRRLENIGYTVVLTRANEDAASAKDSRASKAIGTTRWKAPYDGLRPTAKDDRPPAAPEECRKCANWRIPCLHKSRKLLKRPQDVTPAESST

SEQ ID NO: 469284 - protein, 351 aa, unidentified
MSLAEDAELIIGVDTRMDTHTAAVCDARGRAVSQLQVPATTAGYVQLLTWVRAAAGDRQVIWAVEGTRHYGLGLARHLASHGQQVSETGCSRHIGKRRAGKSDPIDAVRAAREPLARPWPAQMRADGDREALRLLMIDRDNAVQSAKTARTALAAVLVTAPAPLREQLRPLPRERRAKECAALTCPAGADRQTRVLHQALIRLGQRIAALAGEAAGLEAQITQIAGDMAPGLVAAEPGLGALSAAQILLSWSHAGRIHSEAAFGMLSGTAPVPVSSGRTDRHRPSRLGDRQLNRAIHVIAVTRMRCHPATIAYVQRRRAEGKTDKEIRRCIKRYLARHLYRTLSNGIPSNA

SEQ ID NO: 469285 - protein, 348 aa, unidentified
MQIATIGLDIAKNVFQVHGVDASERVVVRKQLRRGQVLGFFKALPPCLVGMEACATAHYWARELTELGHQVRLMPAKDVKAYVKRNKNDAADAEAICEAVRRPTMRFVSVKTAEQQSRLMLHRARDLLMRQRTQLINALRAHLAELGIVAAQGREGVRELLRIIASERDARLPIDAHASLVVLAAGVQAVQTMIGSIEKRIVAQHRSDEASKRLRSVPGIGIVGATAIAATIPDPKIFRSGRDFAAWVGLVPRQDSTGGKQKLGPISKQGDQYLRRILVVGAHAMLKRARHQPEKYPWITRLLGRKPFGVVAVALANKMARVAWALLAKGGTYRAPALAVAAQGSSQN

SEQ ID NO: 469286 - protein, 309 aa, unidentified
MSGMGAGVDVSKAFLDVAVHGHRPVQRFANHAEGLAGLIEWLKGFDIGQVILEATGGYEQAALDALFRADVPVARVNPRQARDFAKAIGQLAKTDRLDARMLAHMATVIPQIRYRPLDEKALHLKQFHLRRAHVVSMISAEKQRRRQIVEPDLRAMLDVHIHHLEADRDRLDTAIAAQIEDTLQARVLGDTKGVGAVLLATAICDMPELGYLNRKSAAKLYGIAPLSRDSGTYRGKRTTWGGRASARSALYMATLSAVRYDPVLKAFYQGLVARGKLKKVALVAAMRKLLTIMNARMRDALATTAEQAR

SEQ ID NO: 469287 - protein, 354 aa, unidentified
MNTIKYIGIDVHQATSVFAIRDSQGNLLGESILKTEPTTIVDFLKGQRGTVRVTFEEGTYASWLYDVIKPHVSKIIVCDPRKNKLDENKTDRIDARKLAELLRLNALSAVYHGEQSNQTLKEYARSYLSLQQDSTRIMNRLKAIYRGRGIGCRGTAIYRPKNRKEWIDKLKDKGTRCRAERLLKQLEFFGKLRLEAQRDLVRESRKQKDYKILKGIPGLGLIRIALIMAFVITPHRFRNKRQFWTYIGFSVVRRGSSEYEIIEGELQRKKRKPLPRGLNHNYNHVLKDVFKGAALTAAYRGQFKKLFEQRVADGAAENLALLTMARKIASITLAIWKKGERFDIKRHQLSEQKT

SEQ ID NO: 469288 - protein, 343 aa, unidentified
MKEITTIGLDTAKSVFQVHGVDREHQTVIRRKLKRRQVLPFFAKLSPCLIGIEACSAGHHWARELGKLGHTVRLIPPRYVKPYVKSQKNDATDAEAICEAVTRPNMRFVAPKTCEQQALLMLHRTRHLLVRQRTAIINAIRAHLTEFGIVAGVGRSGVEALLKIIADDNDDRIPSVARYCLLALGRQLETIKQQIRDFDVKIMTAHRDNELSRRLEAIPGVGPRVATALVASIADPKAFRSGRQMAAWIGLVPKQNSSGGKEKLGGVTKAGDRYLRSMLMIGALSVIKRAKQLGFARRPWLAELMARRPMKVAAIALANKIVRMVWAMMVRGESYREPVVLAA

SEQ ID NO: 469289 - protein, 399 aa, unidentified
MLNPVSLQLRVGVDVGSRCHSVAIGLSDGRLLEEFEIPHTKEGFREFFARVGASARRHGAAVAVAMEGYNGHVRPLDSLVRARGWQLFNVNNLKLARFKEIFPAAAKSDRIDSAKSLELFQLRDHLPMARDVLQEVMATPEENDILKRLSRRRRRLVKERGRVASALQADLQAVAPGLLEMTQDVGNMWFLNFLTCRKDFCKLVGVRHASLLKVPCIGPSTAGRIQAWQSRACFSHDARLVGDMIQQDAARILELKQQIKVLEEQMAEIAERSSMACRLASIPGCGAVCSAELAGEIGTLERFRGEASLALYLGMATLDNSSGKSRRSKPPRHVNTRAKAAMMIVVDHHRKLVPQSQRYYERKRAEGKKHNQAIRALGRHLCRVIFKMLSQERLYRIDH

SEQ ID NO: 469290 - protein, 368 aa, unidentified
MKTKEINPISFLYVGVDVHKDQHTAVATNCFGQALLEKEINNSEEEFAELVSKVKILAQAKSLKPIFGLEDTSAYGQRLALHLCQSFPVKVVSPVLVIRERKKLTHPEKSDSQDALGVAKALISKIGTLPDFSISKTSEISKGLKDLTVDREFLVKEQTRIKNQLHRLLHKAYNSGYREKFKNPFAVRVLQYWSKHPVPTELSGNTLLKNLIRRKIKRLKNIKKEVAEIEEEMKTLLDQIDQKLETLNGCGIVSASSVLAEIKDIDRFSSPNKLARYGGFCPGEKSSGKRIRHIKSKSGNRNLNKAVHRIALSQLGRQGNKYSKEYFQKKIAEGKNKSQAICCLKRKLVNIIYMMLKHKAAYDYAARC

SEQ ID NO: 469291 - protein, 347 aa, unidentified
MKVLIGVDPHKASVAVAAVDEAKGGLLERASFPQDRAGLRSLEHWAKRFPERRWAVENAGGLGRHLAVRLAASGESVVDVPPKLSARVRVLSSGNARKNDGLDALAIALAATRNERLAAVDPEAASEVLRLLSERREDLVAERTRALNRLHALLRDLLPGGVTGTLSAPRVARILRGIRPKGGVSARLRRRLASEVLRDVRALDRKIADLNGRIEAEVEASGTTLTEIFGIGPILAAKIIGTVGNVARFPTKAHFASYAGTAPLEASSGEVVRHRLSLAGNRRLNNALHMVAVCQARSDARGGGYYRKKIGEGKTRKEALRCLKRRVSDAVFKSLVADSLAPSSSAA

SEQ ID NO: 469292 - protein, 332 aa, unidentified
MLHVGLDTHKEFIQACFVNDEGKKIKEERYANTPIGLNKLCAAAQGNKCVLEASTSCITVYDALQTNGIRVRVANPLRIKAIASAKLKTDKVDAHMLAQLERADLIPEAHLPNKFTREMRELVRQHVSITNERTDIKNQIHALLSKNGIRLPFKSTFTQKSQTWLHKNTSGVPKLALGQLFQRIHLLNQQRQTVDAEIERQAQNNPDAVLLKTIPGLGWFSAFLLAVEIDGIERFVDEEHLQSYAGLVPSVRQSGNTTRTGHISKQGNRLIRWVLVQDAWMAIRSSKRYRKKYTRMVRRHKKKTVAILAVARKILRDAFFMLQRRQAFNENA

SEQ ID NO: 469293 - protein, 342 aa, unidentified
MTIIRIGLDTAKHVFQVHGVDEAEQPVLRRQVRRSEMERFFAKLPATRIGLEACGASHHWARVLGALGHEVVLMPPQYIKPYVKRGKNDAIDAAAICEAMSRPGMRFVPVKSAEQQAALMVLRVRDLLVKQRTMLINAMRGHAAEFGVTAAKGPVKVAELAPRAHAEEAGVPAPALEMLSLLAGHLEAIEARLKTLEAQLVSVHKANPVSQCLATIPGVGPAWLMLGGAVSFALRVPDPKAFRSGRHFAAWLGLTPREHSTAGRHRPGRISRAGDGSLRKLLVLGATAVIRFAKPGRASPWLLQLLARRPTKLAAVALANKMARIIWAMMVSGEIYRRPQQA

SEQ ID NO: 469294 - protein, 421 aa, unidentified
MRVLYERCAAVDVGKDVIAVAVRLPGDGPDGRATVKRTFKTFYGVLAEAARWLGSLGVTHVAMEATGIYSMPVYHALIEHGSFEKVLVCNAGHVKNVPGRKTDLADAEWLAHLLECGLLAGSFIPPAEIKAARDVIRYRTKVAQQRVSEIARLGGVLQDAGIKLDSVASSIATKSGRAMIEALIDGERRGTVLADLAKGKMRAKIADLSLALEGRFGEHHALMCRLHLDHTDHLEAMIAKLDTQIEAMMVPFQCWRDLLTTVPGIGQLSAAAVISEIGTDVRAFFPSDAHLASWTGLCPGNHESAGKRRGGKPRKGNPHLQSILVECAWAAVRHDGYLRSLYHRHVMKWGGYRSPAAKNKAIVVVAHAMIVIIWHVLATAKPYHELGPDYFTRRLDPERETRHLIARLEAPGHHVTLDAAA

SEQ ID NO: 469295 - protein, 386 aa, unidentified
MPRNDLSRSLVAFEQDSTLVAVVELSLKSWLVAGLVPGVERQPLKKLEADLEALVALLHRWRAEAVKAGRRIERIAVAMEAGRDGFWLARCLRDRGIEAYVMHATSIAVSREHRRAKTDRLDTQVLMRAFLGWLRGEPKHCSMVAIPSLAEEDAKHPSREHETLVAERSRIVNKMKAAMVRLGIRGFKVRLHKAAERLAQLRTPEGLPIPPHTLAELRRELARLQLVKEQIKEIESERQQALKRAPQEGTHPMLLMLARLKGIGIETADMLVHEILSRELRDRKAVARYGGLTGSPDESGSKRREKGLARAGNSRVRKGMLQLAWRWTMFQKQSQLTRWFQERTKAAKRDVRKTMFIALARKLLIALWRYVTEGELPDGAVLHPAT

SEQ ID NO: 469296 - protein, 343 aa, unidentified
MKQLFIGLDVHKKTWAVTIQEDHLILKRFTIDADADLLIGYVARHFPHHQVQCCYECCCCGYHIYHSLTAAGWQVLVVNPGDIARGNKQVTTKTDKVDSAHLARELEAGRLKSIYIPTHKQEQFRSLFRRRNDLVKSLRRIKCHIKSMLLYYGIVLPEKYDNINWSKDMIQWVYKQRWSYAPATEAMKSRLEEYLFLRKQYLHVGNELRSYARKHFKKDYYLLRSVPGIGPLTAIGMLAEVGDIRRFRNIDHLSSYIGLVPSLHSSGEKTYSRGITYRSKRLLRSYLVEGAWVAAKQDPSLMVYYEERKGCDHKKLIIKLAAKTLSRIYHVIKTGERYELLKP

SEQ ID NO: 469297 - protein, 347 aa, unidentified
MNFYTQQHKQYCGIDLHARAMYVCILDQAGTILVHKNLPTTPEAFLRVIAPYRDDLVVAVECIFTWYWLADLCAKEGSAFVLGHALSMKAIHGGKAKHDKIDAHKIAVLLRGGMLPQAYVYPAEMRATRDLLRRRCHLVHKRAELLAHLHNTTSQYNLPEIGKKLADKANREGVEEHFPDPSVRKTIEVDVSLIDHYDQLLGEVELYITRTAKTHDVQPFARLQSVPGIGQILALVLLYEIQDIARFPRVQDFVSYCRLVKCATESGGKRLGTSGKKIGNVHLRWAFAEAAVLFLRHNQPGKEYFTKLEPKHGKAKALTVLAHKLARAVYDMLARQQAFALNRFVTA

SEQ ID NO: 469298 - protein, 389 aa, unidentified
MNKYIGFDIDSNKTIACVVQKGKKNRYNTLKTDIEQMRKFLREQRRPGEKLHLTFEISGEAGYRHDQLIDFVDDITVSNPTKMTWIYRTAKKNDRIDARKQAVLLSIGEVPKVHIPSKEIRQWRVTIQHRRKIVNRITGVKNRIRALLKANGFTKPAVRGSWWKLSNRAWMRQLTEVIGITSEQLWRMSLTDMLEELELLESQLKRFTRYLDGYLENQAGGKLLMSIPGVGPRTAEAVLAYTDDIKRFGRGKRYCAYFGLTPRLDESGSVRRLGHISKQGPSVVRWLVVEAAWRAIKKSPALRQFHERVMSGQKGRKKIATVAVARKLLSIMRAMQMTGELFNEELVCRQCGFDRPVVRASTEDVRLSSVEALSRMSLSNPLVKVTKSA

SEQ ID NO: 469299 - protein, 419 aa, unidentified
MEAKFSISPKAEMVNEKTLIVAVDLGKNSHMGYCRAPDGREVKPFRFDTNRKGFDFLWKTIQSAMAKYGLERAVLGFESTSCYGEPLRDFFMDKPGVVLVQVNPAHVKKMKEVTDNSPNKTDKKDPRVIAQLISMGNFLTCIIPEGAPAELRVLSQARDSQVTSRVQRSNRLQDLVYKIFPEFSSVIKDPLSRTGRYLLSEYPAPGQIVSLGLERLTQIMREKSRGKLGSNQAQRLWEAAQSSVGVKQGVESVCLEIKLLLEQIEGIEKAIEQIEAQLLPWLEQVPYSQRLLSIPGIGPVTVAGIIGETAGLERYSGQKALLKLAGLNLYEISSGKHQGERHISKRGRSLLRRLLFFAALNTVRKNGIMRRTYQEMVGRGMKKIKALVAISKKLLQIMYALARDNQDYIHNVSELRKVA

SEQ ID NO: 469300 - protein, 331 aa, unidentified
MNHYISVDVSKQTLSVFDGEKDLTFKNKRGLSALKKYLKRKFKTFDDLIVIYEATGVYSNYLRDFCSSERIRVFMVNPKKSSNLAKVLGNRSKTDKIDARMLYAFKNIIDEKDAKIPEIDEAVVKLSKYLSSYELIIKGRVALSNHIKALRYVKDAPKEMLKELKRLRDKEKGLEKKILDEAERYVKSNERLNRGYHNLLSIPGIGRVSGIALLSVFEKYKDANRSQITALLGLDPTRKESGKSVNGKRKISKGGKGIVRTVLFFPTMSAIQHNKILKAFYKGLLERHKLKKVALIAAMKRMVLIAHGVYRSEKPFTYDYEKIGREEKICA

SEQ ID NO: 469301 - protein, 370 aa, unidentified
MKPNFEPGKWFMQCVGIDIAKSTFTACLCMYEFDMGCSTNPVVFNNNKTGFNQFVKWSRKEALKGYPLRYLMEPTGVYYEPLAFHLNKLGLNVCVVLPNKAREFAKYEGILTKTDDMDAYTLGMLGCMDKRLKSWTPPSPVYRELRQMTRFVADINKVRTELQNHLEALAHSEVTEKSIVKHYNKLIDEIDKQLAANQKAIREKIKQEPGLSERIDRIVTIKGVGFMTAVTILAKTNGFALITNRKQLTRYAGLDVPAHQSGPVDPKRHISKQGNVHIRTALYFPAIVSTQCNPQMKDFYGRLCARKPQSKMIGVTAAMRKLLLLIYSLWKSGEEYDPEREKPANSKKKKEAETHEGQPHGIDVGTLAEE

SEQ ID NO: 469302 - protein, 349 aa, unidentified
MIIIGVDFHPEFQQIAMVDTDTGELREQRLTHREEAERFYRSLSSAGQQVRVGMEASGHGRWLERFLAELQIELWMGDAAAIQRKRVRKQKTDRQDAQLILKLMLKDDFPRIWVPSWENRDLRQLLWHRHRMVQARSRVMNQLQAVALNEGLRCKKRLWRTKRPQLESFPLAPWASRRRHDLLELLDRWNPVIAELSQAVEQQVEKCPEAQRLATHPGVGPLTAMAFVLIIGQAERFRCGKQVASYLGLVPLEDSSGNQRRLGHITKQGSSMLRFLLVEAAQVTVRSIPEWRSQYFHLVMRRGRKIAKVAMARRLAVRLYWMMRHGTEYQKSNKFGSYVGQPGHRHGVR

SEQ ID NO: 469303 - protein, 354 aa, unidentified
MNTTQVFEKRKIAVAIGIDLAKDHCDVVAYNADNKICFTKANWAYPHLMEWLANAQPAVVLMESCKGCHVRARDIADLGHDTRLVKGADVKALRNVCQKNDIRDADYIARLLYVPGTKFVFVKNQRQQSLQFLQNEYKSIQELRIQVGNQIHAGLEEFGCPGPKSKKFIQSRMMAHLEKNAELIPDEVMSSFLRRREMWLNLFEQEEEAKKRMEEIAKTDDDAQRIMTVPGVGAQTAVGMLVHIGGDIGRFKNSGQFAASIGLVPKQNSTGGNTTLNGITKCGPKRLRANLVQCGQVILMHADKLKGNFGDWVRKLRDSGKKRGVIICAIAAKIARIVYRLMKDKVDYTPVPSR

SEQ ID NO: 469304 - protein, 345 aa, unidentified
MEVTTIGLDIAKNVFQVHGVDDGGGVVIRRQLRRSRVLAFFEKLPPCLVGIEACATAHHWAREIAALGHEVKLMPAKYVKAYVKRNKNDAADAEAICEAVGRPTMRFVPIKTPEQQALLMLHRTRKLLVRQRIRLVNAMRAHLAEFGIVAGVGRNGVDRLIKLVEAGDARIPAPARDCLLVLRDQLALARQQISAADRRILAHHRESELSRRLEEIPGVGPLIATALVASVPDPHAFKSARDLPAWIGLVPKQSSTGGKERLGHISKAGNRYLRSLLMIGAFSLIKRAKLGKGKHRPWLIDLMARRPIKVAAIALANKIARIAWALMTRGTRYREPQVEPMPHAA

SEQ ID NO: 469305 - protein, 427 aa, unidentified
MAAREKVGEPEFVAFVGIDWADQKHVWCLQPANSTKREGGELEHKPEVVEAWVSELCQRFGHGAIAVAVEQVKGALVYMLGKYECLHLYPVPSTMSASMRQALYPSGAKDDPRDADLLLDLLLQHRDKLRRLTPDNEATRRVQNLVEERRKLVEEKTAQRNRLTGYLKVYFPQMLEWFAKLDTKLACEFLERWPSLEELQAAAPAEVRKFFRQHRGRHPELTEWRLQGIGQAMSAIRDGAVIEAKRMVVQVIARVLRTLLEGIAALDAKITEAAEAHPDFFIFQSFPGAGAALAPRLLAALGSQRDRYGSAEEVQKYSGIAPVTERSGKKKWVHFRWACPKFLRQSFHEWAGHSIAQSVWARAYYQQQRQRGKDHHAAVRSLAFKWIRIMFRCWQDGAAYDENRYLATLAKRGSFLIPVPAAAATSL

SEQ ID NO: 469306 - protein, 404 aa, unidentified
MWYTGIDWADQHHDALVIDEKGHPVGSLRVDHTPQGLTKLNTFLQQIIGSEPKEQMACIIETTHGLLIAHLLETGWPVYPVNPRTVDRRRSASGAKTDTIDAYLLAKTGRADFSDLHRLTPDSELVAELKTLTRDQDALVQMQTRLVNQLTACLKAYYPVALELFSKVQQHTTLIFLQTYPTPHEAMAASAEQIAAVLKQTRHPNPKVAAMKIAEQLHQPHLQAESVTTRTKSRLMLALVGQLLPLIEQIAQYDKEIDTLFLTHADQTMWSSLPRAGQRLAPRLLAEIGDDRQRYKDASSLQALGGTSPVLYQSGMYSKAHRRLGCIKPLRNALHQFAWQSTQSETWAKDYYQRKRTEGKSHTVAVRALANVWVRIIFAMWTHRECYQMATFEQAQQRHARKAA

SEQ ID NO: 469307 - protein, 384 aa, unidentified
MKKNSTAKKGPKALSNGKRNQVREVAAKQRLTIGLDLGDRTSRYCILDEAGEKVSEGQLPTTQAGLSSLFAKMPSSRIALEVGTHSPWVSRHLAGMGHEVIVANSHQVKLITQSVHKNDRIDAEQLARLARVDPKLLSPIRHRGREGQADLAVIRARAELMEARTGLINCARGLVKPMGERLKKCDADQVKESLGEGLSAAAQTVIGPLLKSVEAISQQIGEYDQKIEAIAKRYPEVELLTPIYGVGRLMALTYILTLEDAERFAHSRDVGPYLGLTPKERDSGDSQPQLGITKTGDGLLRSLLVQGAHCRLRKGAPDSDLRAWGLGKMKSGGKNAKKRAIVAVARKLAVLMHALWSRGEVYDPLYNQQAALAAAAKGNRKAAA

SEQ ID NO: 469308 - protein, 348 aa, unidentified
MKKIVKQVLGIDVAQKELVVCLGRMHDDWTPELYSYGTFVNSKKGFDAMIKWVRKLTLETISVRYVMEATGVYHESLAYYLEGNGYEVSVVLPNKISNYFRTLEVKTITDKTASEAIARFGLERKLDRWKRPKQIFKSLKQLTRERDQIVEIRTIAKNQLHAEKAEAFPNPSSLARIKSHITFLDKQVAAILKEITAAIKQDNEVNNSIETICSIPGVGRLTAATVLAETNGFELIRNKRQLTSYAGLDVREKQSGTSVKGKSKISKKGNKHLRKAMHLPALAAIRHEKRFKAVFVRLVSKHGIKMKAAVAVQRKLLEMIYTVYSKNTVYDKNYLGKEAQIEKQNVAA

SEQ ID NO: 469309 - protein, 385 aa, unidentified
MPGNAFIPREYDIFAGLDVDRKSISVTFTSHQGFLRSLRMPYRVDHLVHYVGKHFANQRVVFAYEAGPTGYGVYDGLVAHAYPCLIAAPAMIPRAPGQRVKTNRLDSRALAENLRGGQLRSIHVPSPVYRELRHLTQLRDTVVSQAVATKQRIKSLLLFEGLAFPPAAAGHQWSLQVKAQLRTLPCAPPVRFKLDQLLATLAFAEQQVLQTTREIRRFCRTEPELARCIQYLMTVSGIGWITASQLLARIGDWRELKNIRQLGAFVGVVPTEHSTGEGPQRGAITRTGDARLRAKLIQAAWAAIRHDAELRPCFRAVCQRHPPDRGPRIAIVAVARKLTVRVAVVLREQRPFVVRDQIPSAPVTQEETVPQGTPRRHPEPGEASP

SEQ ID NO: 469310 - protein, 408 aa, unidentified
MRIIGLDIHRVFAEAVAWEDGKLRRIGRVDIRRDLLEKFARSLSPEDIVVVEATGNASAVSAVIAPHVKRVAIANPKQVKIIAHAKIKTDTIDAGVLAQLYASGFLPEVWVPDEATQALRRQVSRRQQIVKQRSRLKNIIQSILHAHLIPPCPATDLCGTKGRPWLSGQRLPEDERLAINRHLREFDRLGDDLKVIERDLAQSALEDGRAKRIMTIPGIDMIVALAIVAAIRDAGRFETAEKLVSYLGLNPSVRQSGSGPAHHGRITKQGRGHARGMLVEAAWAAARAPGPLRAFFLRVRSRRGQHVAAVATARKMAVLIWHLLRKGESYAWARPALYAKKLRDLELRAGCKPNRGQKGAASAYNIKSHRDEERRWAEQVETAYARFVAGWNARGPKVRTAAAKEERR

SEQ ID NO: 469311 - protein, 395 aa, unidentified
MFIVGIDIAKRSHEAIIIAEDGQVVRKAFSFRNNCTGYNLLLEQVRRLTLVKSQIVFAMESTAHYWLALYARLLKDGYTVLVLNPIQSHSLRELYIRKTKTDARDSLIIADLVRFGRCKASNVPQDKILALRELCRSRAYLVDMAADLKRKLIALLDRIFPEYESLFDSVFSKASIAVLSKYSTPQKVKNANLRKLTDLLMESSNGHFGEWKAHQLKEAACSSFGIDDSGGVYSTLLGMFLEQILSLTAQADSLEKQISVFFQEFNNPLTSIPGVGTVLAATILSEIGDITRFSSADKLLAYAGLDPSVKQSGEFKSNQNRMSKRGSPYLRRAIWLASTVAVHRDPMFQTYYEKKISEGLHYMNVIGHVSRKMTAVIFAVLRDGQPYQPVLQSAG

SEQ ID NO: 469312 - protein, 346 aa, unidentified
METIVRIGLDTSKSVFQLHGVDGTEQPVLRRKLRRGQVLEFFRRLPPSLVALEACGASHYWARELQSLGHEVAMIPPQYVKPYVQRGKSDAADAEAICEAASRPKLRKNFVPIKSPEQQGAQMLTRVRNQFIGRRTQLANSIRGYAAEFGFTAPKGLSRLQQLLIDIQTDATVPELTKELVDALAAELARVDDQIAKLDKKLMQLHRSNEMSQRLAAIPGVGPIGATLLSIKVVDARGFKSARNFAAWLGLTPKNHSTAGKNRLGVITRAGDGMLRTVLVAGATAVIADMRRRETRSWPWLKDIVARKPPKLVAIALANKLARIAWKLMVSGERYRPASNVAQMPT

SEQ ID NO: 469313 - protein, 350 aa, unidentified
MKKICIGIDVSKETLDVTVIHIESYELMEKLGYSKFENRPSGFRSMIAWVRKVIKSRGQMDEALFCMETTGSYDLPLCHWLHKNGLNVWRESALQIHCSKGFQRGKSDKEDSEIIAQYAARHQNRYTAFVPDAEAIADLKELICYRDSLVERRKECKVRLANKKETLVNKNSKAWKCIERLSKAEIKRLDKVIGECDEEIRNLMKEDEEMEKNYQHLTSIVGIGLINGAALIAYTGNFKKITTPNKMSCYCGCFTFYEDSGTSVHRKSPYRNACCKMLKGYLRMAAKSAMLANTELRKYSERLREKGKPYAVILNNVANKLLHIMFSLVKHDYDYEYNHEIVRRMERGIA

SEQ ID NO: 469314 - protein, 326 aa, unidentified
MHKIGIDVSKAKLHSSLLTNPDQRKSKDKASDNNLVGFKSLLEWACRHGKCEAAKLHFIMEATGVYHEALAEFLVEAGCKVSVVNPFQVKKFAESHGFRTKNDRHDGLILALLGHERQLPMWTPPPPEVRHLKALLTRLAALETDIRRELNRLEKAQVGRAPAQVMTSLTNSLTFLNEEKARLLKEINTHFDNNPKLREERDLLLSIPGVGDKLAPQLVTLFASKNFSRAPEAAAFLGLIPVEKQSGTSVLGRPRLSKAGDSQLRKALYMPAIVATKYNPDIRALYQRLIKAGKTKMAAIGAAMRKLVHIAFGVYKNLTPYQPQNT

SEQ ID NO: 469315 - protein, 343 aa, unidentified
MDHFAGLDVSVKQTSVCIVDETGRIVREVKVASEPQALLVVLKNGGHHFKRIGLEAGPLSQWLFSALAEAGLPVICVETRHMRAVLQAQINKTDRNDARGIAQMMRAGLYRPVHVKTLRSQKLRMLLTHRKLLQSKAIAVENDLRGTLRNFGLKVGMVRTVKFEARIKELVADIPDLAGLVESLLVVRRVLREQIAVLHRRLLAVVRDDEVCRRLMTIPGVGPVVALTYRATVDVPARFRTSKAVGAVFGLTPSKYQSGEINRTGAISKCGDAMMRVMLYEAAQIMLLRSAKWSWLKAWAMQIARHRGMKKAIVALARRLAVIMHRIWVDGTEFRWTKEVAAA

SEQ ID NO: 469316 - protein, 386 aa, unidentified
MGTQTFIAHDYDVFAGLDVDKKSISVTFIDHHGFLKSLTMPYSVEHLVNHVRKHYGDKKVAFAYEAGPTGYGLYDGLEAHAYKCLIASPSMIPKAPGQRVKTNRLDSQGISENLRGGQLKGIHVPTPLYRELRHLTQLRDTLVSEMVAMKQRLKSLLLMEGLEFPPAPAGSQWSLLVKKKLRALPCSSTVRFKLDRLLDSLEFDEKQILKTTREIRRFCQDDPKLSQCISYLKSLPGFGWIVSSQLMARIGDWRQIKNIRQLPAFLGLVPTERSTGNRIERGPITHSGDGRLRSKLIQASWSAIRQDGELREFFRTVANKHPRHCAPRVAIVAVAHKLSVRASVVLMKQRPYEVREKVKSAPLTQEETVPQGTTRRHAVAGESTIP

SEQ ID NO: 469317 - protein, 382 aa, unidentified
MQASTVVTPTAVHCGTVFVAIELSQKKWLVTLHSPDRDRISRHTLDGGDHAGLLAWIGKASARTAAKLGSTPQVVSCYEAGYDGFWLHRLLTAAGISNFVFDAASIAVEQRSRRVKTDRIDGELLLRTLMAHLRGEPRVVRIVRIPSLEQEDARRASRERDRLVREQTAHTNRIKALLRLQGMAVGNPRRRDWLAWLERQRDWRDQPLPPHVLAEVKREHARLMVVREQLAAIEQAQTAEASAVPAPMREQQALLQRLKALGPAFAGTLVSELFYKDFRNRREVASYCGLTPSPWQSGGIDREQGISKAGNRRVREKVIELAWLWLRHQPESALSQWFRTRTANAGKRARRVAIVALARKLIVALWRYLTTGLIPEQATMKA

SEQ ID NO: 469318 - protein, 354 aa, unidentified
MLYLGIDLHRKQLTVNLRNEAGEVLLRRQVSTRWDRVRAFLADIQTRAEVAGGWMAVLEVCGFHDWLVRLLEEYSCREVVLVQAQGHSRRKTDYRDAHALAELLWINRQRLSGQRPLGPLRRVTLPTREDAENRQLTALRKRLGELRTRTLNKIQRLLLKHNLSQDCPTKKLQTKGARRWLAELKLPEIDRLELDLLLSQWDLWQEQLKEVTEKIERRQQVHSIAPLLATVPGMGAFSSLALASRMDRIERFPCPESLVNYWGLAPSCRNSGEATQRLGSITKQGSHLARFLLGQMVLHVLRRDPTMKQWYQRIRRRRGSKIARVAVMRRLTTILWHMVKHGQPYQLARPSKSC

SEQ ID NO: 469319 - protein, 367 aa, unidentified
MLGLDVGKSSHWACLIDRDGEVLASAPVRNREAELDALFASAPAGTLVVVDQFRNIGSLAVRRARAAGLGVAHLPGLAASRAAGLFAGEAKTDERDAAVIARTALGVPDSLSGVPGRGEALEAARALSSQRDHVVACATRDKNRLRAVLLESCPALEAAVDLSDRRWLERLAGFGGAWGIARSGAGGPRAEAAGEAAAASTAPPPALVEAENRQVRFLAARISEALDEAGALEAETAALLEGDETYACLLTVPGIGPRTAAQLAVSVDIGRFPDHDHLASYCGIAPRVRSSGTSVRSVRASRRGDARLKSLLIFSCNSLVRSSGRYGEYYRACRARGMGHGRALKAVARKRLRAIYAVMRDRVPYRE

SEQ ID NO: 469320 - protein, 370 aa, unidentified
MLDTTTFVGLDVHARSIKAVSLDVMTGEVRCATFGYDAGAVAEWVRSVDPGARCVYESGVTGFDLQKRLSGLGVDCVVGAVSKMIKPSADRRRKNDRNDAEFLARMLSVGNVVEVWVPDDECEAARDLTRALEDARDDLSRSKQRLSKFLLRHGLVFDERTPTGRRKGNWTRAHWSWIESIRFAEGADEEVLAYYVEAVRRAAEEKSRLEGLVGAEARKPRWRKRVDSLRCLKGVDTASAADLVFEAGEFSRFRNARSFAAWVGLTPSEHSSGESDRRGAITKAGNKHLRKTLVEAAWHYLTCSGRPKDLAKGQAPDPAARRHAAKGVRRLVERREALLARGVHGNKANVATARELACWVWAVGLMAEEA

SEQ ID NO: 469321 - protein, 345 aa, unidentified
MNYCGIDVAMKSSYIYITDGDGRIKSRGELPTTAEDFRRVLKRFVPGGLKVAVEAGPQTAWIHDLLVEIGAEVNVVNPNKVRLIAESRRKTDKIDAKVLCELLRLDGLPHPVHVPDKETRSLRGLLVARRQLVSARTKVCNVVRGMLRQEGISLPSRFLTSLAAWQRLLEVEFTHSHLRPIVEAYAETFKTLTRSIQALDRELAQREKCDDRAARLQTMPKVGRIASLTFLAAVDDVNRFSSSRKLVGYSGLAPTVRSSGERTEYGSISREGRRELRAVWVQIAQLAAMDTGRDTAPLRKWFAKVACHRGKKTAIVALARKLLTIAYRLLKQQTVYDAKKLRRAA

SEQ ID NO: 469322 - protein, 483 aa, unidentified
MTMAMANDANTDDSSCRCNKCYCYYIGGDVSKGYCNFVIMDQDRKIIENDFQLDDTPKGHQKLLSILTDIRTKSPDALIFAGFESTGGYENNWYQLLWKLKDTINLQVTRLNPLGVKHHKIANLNRMDNDEISAQQIADYLISHPNVPVYNYEDTFASIRRQWKFIRLLKKQKAQLKQQLESMVYEAHPQMLKYWDEQLSEWFLQVLINYPTAKELAIVTVKKLSAIPYLTEDKARQLIQDARISVASATKPWMGHCIKSLAQQILVQKKTIMQLEKEMLESYSSPEINILTSFKGIGSFSAFGLMIEIGSIERYRSVKNLASHFGVNPVFKASGDKVLIARMSKKGRKEPRWILYNVALSAIVHNEMIRELYEGYLKRGKAKMSAVGIIMHKILRIIYGMLKHRTNYDPEIDKVNRNREVSKKCDIDKDMTKPKTDKSRRYQSYDNDAQISKRQSKKREEAFDLKESIEAPNERTLRSKRRE

SEQ ID NO: 469323 - protein, 477 aa, unidentified
MEQEEQPPSRRLVGIDLGIASRHSVRVLEADGRLVCRTSCVPATESLMLTEQAALAGAPVGTRLAVVFEPTGPAWLPIAVFFARRGHDVYRVSSAKAADLRRFLRRHAKSNGIDAETLARMPLADPGGLQQLELPGADAAALDRRVRACARLTSAASKHKVRIKDLVRQLMPMTPLTGDIGKADLAVLERYADPRILLAAGAAELIRLITSASGYQQGKERALQWRAAASAALDLYGDHPAVPFAELAAEVATEIRLLRALQAELAVHAAAREQHYRQADPSQLARSLPGFAEIGAPVLVAVMGRPGRFRSGARFKSFAGLAPRASETGETDRKGTPMSKAGPSLLRSVLFQAADTARRQDPQLARIYYQQMTERGATHLKACCVVAGHLAERAWTVMHRGMPYAICDNNGNPVTAAEAKRIIADRWTVPEEVRKRRRSRKIAGRAPQAATTGPDRRGDPPRPRSSRPRPKAVNPTT

SEQ ID NO: 469324 - protein, 340 aa, unidentified
MEQVVTIGLDIAKSVFQVHGIDAQGAVVMRQRLSRSRVLPFFAKRVPCLVGIEACGSAHHWARELARLGHEVRLIPPSYVKPYVKRQKNDMADAEAICEAVTRPTMRFVPVKSPEQQAVMVLHRTRLILTRQRTQLSNAIRGHMSEFGLIAPVGRNGLKTLMEIVADREDARVPDDARGCLTMLADQLDLINEQILESDRRILANARSTDVGRRLMEIPGVGPVLASAVVATVADPAVFKSGRNLAAWVGLVPRQNSSGGKERLGGITKQGDRYLRQLLVIGALAVVRFAVRNGTRRPWLVQLLSRRTPKVAAVALANKNARMVWAIMTSGERYREPLAA

SEQ ID NO: 469325 - protein, 358 aa, unidentified
MQKYNISFKGQKIFIGIDVHKKNWDVAVAPEVGFVKRHSQKASAKVLIDFLKKNYPDGDYLAVYETGFSGFSTYYALKEVGIDCIVIHAADVPTTQYEEVMKTDKIDSVKLVRSLKAGLLKGIYVRERENIDDRSVVRVRKAIQKDLCRYKSRVKHILHCNGVEMPECFDNTNTHWSNAFMNWLKDEVTLLSSTRNSLDLLIKQVETIRMNLLAATRMLRNLSQTERYKSNCKRLVTIPGIGVIVAMSILTEIYDVKRFRNEKEFAAYLGLIPTCHSSGEKVVHGEKTFRGNKQLGPMIVEAAWITINRDAGLGSQYLRYRERMKPQEAIIRIARKLSNIILAILKSEKEYIPYHMGS

SEQ ID NO: 469326 - protein, 312 aa, unidentified
MIEQCFVGIDVSQDRLDVLLLPQTTGFSVANNEAGWNALIARLRDLPVAAIGLEPSGGYERGVIRALLTASLAVRRINPNRLRQFARARGALAKNDRLDARLIAEYVATMPTHVVRHDPAAARIAEIVTVRRQLCDEHVAVENQAAQLEDAMLRRLAKRRLARIETDIRLLDKRLAEMIAAEADLARRYARLTSMPGVGPVLAFTLIALLPELGRMSRKQIAALVGLAPYDFDSGKLRGHRSIYGGRMPVRNVLYMAALSACRYNPALKTFHNRLAAAGKKPKVILVAVMRKMITTLNAMLRDSASWQPQAA

SEQ ID NO: 469327 - protein, 318 aa, unidentified
MLIHYIDIAKRNFVIAVSSLSKTKTETNNPKGIAHTIEYLKKHKVALVVTESTGGLEIPAAKAIRRAGIAVIIANPRQTHQFAQSQPLTKTDAKDAKMPAFFAQMKAQKEDSQTMPYQPPTEAEEVLEALVNRRNQSADMRTAEKNRLHQVHETQVGSVKQLIAHFDRLIDELDKQIDNHTHTHFDGKAQVAEQIKGIGSITTATLMAMLPELGRLSHKQIASLAGIAPHPRESGETKFKSRCFGGRSAVRKALYMATVAATRFEPLIRDFYQRLLSKGKPYKVAVTACMRKLLTISNTRMRDYFAENDTAENGIRTA

SEQ ID NO: 469328 - protein, 342 aa, unidentified
MSEVTTIGIDLAKNVFQVHGVDASGQAVIGKQLRRRQVLPFFRKQPPCLIGVEACATSHHWARQLIELGHEVKLMPPHYVKPYVKRGKNDAADAAAICEAVTRPTMRFVSVKSTEQQGVLMLHRTRELLVRQRTMLINAIRAHMAEFGIIAPVGVPQVKKLLSIIADTDDARLPPVGRICLEGLARQLLSLHAEIHAGEKRIHAWHRANEDSLRLETTRGIGPLTASALTASITDPEVFKSGRMMAAWIGLVPRQNSTGGKQRMGRISKQGDQYLRWLLVAGAMSVIQQAKRNGTTDPWLARLIADKPTKVAAVALANKNARIAWALLRHGGTYRKPASVAP

SEQ ID NO: 469329 - protein, 439 aa, unidentified
MISQERWFAGIDWASQKHQVCLLDAAGKILGERQFAHSGAGLAELCDWLVAISHGRPTDIAVAIEVSHGPIVEILLERGFVVNALNPKQLDRFRDRFTVAGAKDDRRDAYVAADALRTDPQCFRTLALAEPLVVELRAWSRLADELQHERTRLTNRMRDELWRYYPQALQLTDDFASDWFLALWQLVPTPDKARRLRESSLAQLLKNHHVRRITAADALRRLRQPSLVVAPGTTEAACAHIRSLIGRLALVNRQLRQAQTKLDTLSSQIADAGDDTPGQSNEPRDAAILLSLPGLGRIVLATLLAEASEPLKFRDYNALRALSGVAPVTRQSGKRTLVVRRLACQRRLRDALYHWARTAAQFDPTMRQRYNALRQRGHSHNRALRTIGDRLLAIACAMLRSATLYDPQRYHQNGEGHKQSSPLRTRAVIGSPACTAASV

SEQ ID NO: 469330 - protein, 413 aa, unidentified
MEGRPVSKRRAYQSSPVKNILLEKVLAEAPDGPVTVGLDVGKGEIFAVLRWKDGTFERPWKVKNPTEILVLSRLLQELADHRPMMVAMESTGTYGDPLRQALTNAGLDVRRVSGKAVSDYAEIFDGVPSQHDGKDAAMVAELTALGKSWAWPYVQKNEQDAKMAYYVDWLDVQQDVQTLWTGRLESRLARHWPELTGLLSLNSVTLLRILIHYGGPTLLAADTEAAKKLAGWGRHVLATKKIEKILRSAKETAGVKQNEQDIARIRQYANEALEAHREIHCAEAYRKAMGLNLKERSSGKHQGKLKITKRGPAIVRRWLYFAALRAVQNPAVKGWFEAKKARDGGRGKGAVIGVARRLALAMYHVGVDEEATFEAWRLFPGKSSARRALQKKQETRSKPRSDAAAFTSLAKNA

SEQ ID NO: 469331 - protein, 364 aa, unidentified
MADCTTWVGIDDSANKINIAILHGQEIEPREELVFVNDSTGLGRLAKKLKTIRGEVRCVYEAGVNGYYLQRFLSNHGIFCDVAAPSLTPRRSGKRVKTDKLDAKALGRLFRAGELTSISIPKKEQESLRDLVRGREDALEDQQRARHRLARFLMRRGLKYPAGKNWSCGHLKWIKGIRFEDERDQMVLDEYRFALEEQTERLNKFQIKIEELGSQAPYQKRVHYLMALKGVQVLTAMTIIAEALDLRRFSDAPAFMAAIGVVPSEDSSGDMQRRGSITKTGNSHLRRVMIESSWHYQHSSLAGKTLKKRREVLPKEVLEIARKCDQRLHKKFRHLVNRGKDRRKAAVAVSRELAGFVWAMGQVA

SEQ ID NO: 469332 - protein, 361 aa, unidentified
MKTVKHRASALPQKVRQAIGLDLGDKYSYWCHIDRDGEVLANGRFRTNADQLTRIFAKLPKTLVAIEAGTHSAWVERELKTLGHEVLVANPRKLRAIHTNDRKNDRADAEILARTARLDRKLLAPIRHRNAEMQADLAIIRARDMLVRSRTQAINTARGLVKASGGRLPSCEAYAFAQKVANHIPAELAAAVTPLLELIAHMTKQIRSYDDRIERLAHEKYPHTHLMDPIHGVAALTSTTYVLTLADPTRFKQSRSVGPYLGVVPRLDDSGDRRSQLRITKAGNSLLRRLLVQSAHQILRRNAPDSDLRRFGLRIAERGGKNAKKRAVIAVARKLAVLMHRLWITGEVYQPLRSTNLNQAA

SEQ ID NO: 469333 - protein, 411 aa, unidentified
MGLLHEALPASTLVIAIDPGKVSNRVWLSSSAAGTVVEPLSLPVLRPGLEALQRLVLEHSDGSDPVFAIEATGGLHQVWVRELDQRFPGSVRLFAPSETTAARAQLGSRRFKTDDRDCAALTYLARQGQGRRVTDRIDDALAAAVRHRRSLVAERKVAQQRLHDQLNALCPGLSAPVGHGRALKLEGVIGQAVLDCAVAFAGRPASVRSLRTRALGRVLASEAQFWVDRWRACLPPPADAPARAARLGRGLVRWRALAADITAVDGEIAVLLAGSDGQVLTTLPGVATSRAAAFAAFSLPIARFPSAEHLYSATGLAPASYQSASLNRRGRISRQGLPEHRDALMSLAWGLSQHCGVFIERHQELRARGMRPIQARVALARHACRLAYTLLTTQHPFDEQRYRRARHQSER

SEQ ID NO: 469334 - protein, 313 aa, unidentified
MTASGAWIGVDICKRHLDVAAMTGTPVRVINDADGRVALARRLRAENVRGVIVEATGGLERLLMQAFDAEGVPAAIVNPARVRKFAEATGQLAKTDKIDALILARFGDYMKPAPTVLADEHRQKLRDLITYRSQITREITARLAQVKQYASSAIVERATSAIAALRTERKLIEREIEALIKSKDATDRLYKRLITVPGVGLVVAATLIAELPELGCLSRRQIAALVGLAPFPNESGDRKGYRCIRGGRDDVRQVLFNCALVAVRHNPIAKPFYEALRARGKPHKVALVATMRKLLTILNAMLKTNTDWTCKPA

SEQ ID NO: 469335 - protein, 313 aa, unidentified
MSQGTYIGIDVAKSSLEVAIHNQAQQFNFLNDEKGIRQAVDHIKKLSPKLVVLEATGGFESVPAAALSLAGLPVVVVNPRQVRDFARATGRLAKTDTIDAGVLAHFAAAIKPELRPFQDEAIQALKDLVARRQQLIEMLTAEKNRLSTAHNRIVRENLQAHIKWLQKELNGTDTGLRGLIEASPAWREKDNLLQTVPGVGNTTSATLLANLPELGNLNRRQIAALVGVAPYNRDSGLFRGRRAVWGGRARVRAALYMAVMAGIRWNPVIRAFYEHLCSAGKAKKVALTACIRKLLTILNAMMKNKTIWRWQPV

SEQ ID NO: 469336 - protein, 409 aa, unidentified
MQVVHEVCCGLDVHKKGVTACVLWASGRRRQTRAFGTFTRELLELGDWLRACGVTHVAMESTGVYWKPVWNLLEGLFEVLLVNAQHIKAVPGRKTDQKDSEWIADLLQHGLLRASFVPPTPIRELRDLTRYRASLAQEINRIANRIQKVLEDANIKLASVATDTLGASGRAMLEAMVKGEQDSQRLAEMAQGKLRNKIPELQEALQGRVSRHHRFLLRELLDHLYFVESKMQRIEQEVAERLGPFQSEVARLCTIPGVDRVTAWGLLAEIGLSMKQFPDAQHLASWAGLCPGSHESAGKRKSGKIRKGSLWLRRCLCQGAWAVSTKKNNYLSALYRRLAARRGSKRATIAVAHKLLVIAYYILRDGTCYSDLGADYFDRLNPEGLRRRLTKRLEGLGFKVTLEPLAQVA

SEQ ID NO: 469337 - protein, 287 aa, unidentified
MNIHTIGIDLGKTVFHLVGLNLCGEVVVRKKFSRKQLLHFTANLRVKLIGMEACGGSHFLGRALREQGHEVRLMPAQYVKPYVKTNKSDYIDAEAIAEAVERPKMRFVPIKSDDQLDLQSLHRVRERWVMRRTAVINQIRGLLLERGITLRQGRRHVDEALPGILEDASAKLSGAVRLLLAQLKLELDHLQMRIDEADAVIQKIAGENEACRRLVAIPGIGPVTATAIIAAIGHGAAFKKGRGFSAWLGIVPGEYTTGGKQKLLGISKRGNSYLRRLLVQGARAVPP

SEQ ID NO: 469338 - protein, 309 aa, unidentified
MKQSVVYIGIDVAKAHLDVAWAGTFRRLPNERSGHAALVRWIKQSTTPVQLICEASGGYEQALLESLEKSEVKVTLVQAVRVRQYARAAGILAKTDKIDAKVLAAFGSAMQPQPTPPLSAEQKRLRQYEAQRRHLSRTLVAEENRLVQLSCTELRTLSRSLISKIKTQIKTIDRGISDLIAQDQTLCVKAQKLTAISGVGVRTAALLLAQMPELGQLNRRQAAALAGLAPFNHDSGSVRGKRAIFGGRPALRSGLYMAALVATRHNPILSNFYQRLRAKGKPHKLALTAVMRKLLLALNQTLKPLPGST

SEQ ID NO: 469339 - protein, 339 aa, unidentified
MVLQCGMDLHGDNVYCALMDAQQRPVFERRLPNDLAVVLKALEPYRERLAAVAVESTYNWYWLVDGLQEHGYEVKLANPARMQENIGLKHADDKTDARFLAKQMVMGVLPQGYIYPKEERPVRDLLRRRMRLVHIRTGEWLSLEGLVARHSGQDLGISELNGLEAGELSALLGNDELVVEAAQICFRHTGFLDREIRQIEKTVEGRVKLTDGYERLLTVPGIGRILGMTIELETGPIGRFPGPGNYASYCRAVKAQHTTNNRKKADGNAKSGNRYLAWAYIEAAVFAVRHSPELRAWYQRKASRTKRVVALKALANKLAKACYFILRDGVEFDVKKLVG

SEQ ID NO: 469340 - protein, 367 aa, unidentified
MECYVGLDVHSKASVFVMQDGHGQVLAQGEMPTTPEGFRRWHEAQRLPAGTPVALETGTVAFFVARELTGLGCEPIVVDAREVRLKAHRPTQKSDRRDAFELCDGLRRGIYRAIVHVPPRPVARLRETLARRRHVVRLETAQVNAVKRLLRGAGLGRLSRSLGTAVGWAKLLATLAGHGELRDYIAPHRALWRCARTQRVALESALTAQLAAPAFAPALRRLQTIPGVGPIVAATVLAVFSDVRRFADAKHAASYAGLVPSTYHSGDREAYGRITKRGSGELRAMLCEAAHHASRPSHPLHPYFAILCAKRGYKMATIAVAHRLARITFAMLRDGTDFDVAKLNIEEGPFERTTIRRYRLKRPAARA

SEQ ID NO: 469341 - protein, 313 aa, unidentified
MDHNSAFVGIDVSKNKLDSFVSTTGQVEQFFNTQEDIHRLAKHLKAQDPVLVVLEATGGYEWLAAAELCAAGLPVVVVNPRQVRDFAKATGRLAKTDALDAQVIAEFAQAVKPEIREIPDEHARELADLLTRRRQLIDMIVAEESRLKQAVFKALRRDIKAHIIWLQKRLKSTDDDLHEAIKASPVWKANYDLLREVAGVGNVLALSLLAMVPELGKVNRKQVAALVGVAPFNCDSGQYKGRRRIWGGRAEVRSVLYMAVLSSKRHNPVIERFYNHLLATGKTKKVALVACMRKLLTILNAMVRDQKHFVEMA

SEQ ID NO: 469342 - protein, 367 aa, unidentified
MKISVGVDLHKTQFTVCFLRKGHKREDIRIYPTTDVGYETFCEVLRKFKNKGYEVRVAVESTGNTRYFCNRVLQEGISVKVINTMKFKVVRESVKKTDKRDAITIAKFLEKDMLPESVLCSQRSEDIRRIIKSRSILVKALVSLKNQVHGLLMGYGIETKRGQLQSKKERQRILRGLEDHKNYGHAAMAIKPLFESIDQLSLEVKRLEKVLEELVAEDEDVKLLRTIPGVGLITAATIRAYTDDIKRYRNYKKYAAYAGLVPWVQNSNETIRHGHITKRGPSELRTAFVQMVMGMIRYSKQTSNYRIIVRYQNMKKQKGSGKSIIATARKLTTIVYAMLKSKEPFNPKKMLTMKEDNSANSQLALAG

SEQ ID NO: 469343 - protein, 343 aa, unidentified
MQYVGLDVHKKFTYASVIDDKGNVVMEDKFQSSIEGLDKFLDKVEKNTEFVMEASSVWQHLYDHLEFNGFAVKLAHPLKTRAIAEARIKTDAIDARTLAQLLRANLISESYVPIMDVRVERSITRHRASLVRIRTQIKNKIHAILRRHGIQYEFSDLFGKSGIEFLRNVDIPAYSRYELDHYLTLLRVLNYKIEDSSKQIEALKKENPQAQLLTTIPGISDYSALLIMAEIGDIRRFKTAEHLCSYAGLVPSTYQSGNTSYHGKITKQGSKWLRWILIQAANKAITRENALQRFYKRLEAKKGRKMLTYIHAMLTLNLKFDELQVNKNNGDRATRFFINRNGC

SEQ ID NO: 469344 - protein, 382 aa, unidentified
MNAPETALQAKHTEDTGSLYMAFELSDKKWQLVLSDGRRRPSCHTVEAGNTNAVLEVIDKAKARCGLTGKVVVHSCYEAGRDGFWLHRWLRAQGIDNIVVDSASIEVNRRARRAKTDRLDAQKLLSMLLRYHAGERRVWAVVRVPTVEQEDARRLTRELGRLEHEHTAHRNRIGSLLVLHNLRAQVRVGGRGWPRWWHGHAAQLPPCVRGEIEREVARLVLVKAQLRELQAAQRQAVASGEQAQVAQLAAVGGVGLGSAWLLSKEMFGWRRFSNRREVGGCLGFAPMPYASGESRLEQGIAKTGIKRGRRLMVELAWSHLRYQPQSALSQWFKQRFAHGGKRLRRVGIVALARRLAIALWRYLEQGVLPAGVRLKSNALANA

SEQ ID NO: 469345 - protein, 367 aa, unidentified
MDHFAGLDVSVKETSVCVVDATGKIVREVRVASEPEALLAVLASPAYHFKRIGLEAGPLSQWLFSALAEENLPVICVETRHMRAVLKAQVNKTDRNDARGIAQMMRVGLYRPVHVKTLRSQKLRMLLTHRKLLQSKAIAVDNDLRGTLRNFGLKVGMVGAARFEARIKELIENFPDLAVLVEPLLVVRRVLREQLGILHGRLLAVVRDDDVCRRLMTVPGVGPVVALTYRATIDVPARFRKSKSVGAVFGLTSAKYQSGEIDRSGAISRCGDELMRTMLYEAAQSMLFRSTRWSWLKAWAMQIARHRGMKKAIVALARRLAVIMHRIYGPAVRCKGIRTEWSFWSALIYPASRGSSCSGPSWLSAHT

SEQ ID NO: 469346 - protein, 339 aa, unidentified
MPIQSKKIVQEPKPLFAGIDVGADELILVIRKNGTPYKPQKFANAPADRARLVKKLVNLPGIIVCLEATGVYHFDLSIALHDAGVAIMVVNPKSSHNFAKALMKNSKTDAVDADTLAQYAERMDFVAWTRPSDEKISLRGFARRIDSLTRQKAAAKNQLHALSASKENPKAVLRDVNLSITQLEKRIDSLSKEALVLIKEYADLERAFKLLTSVKGIAQTSAIALMGELLLLPQGLSNREWVKFAGLDPRAFDSGKSVHKKTRISKSGNRHIRSALYMPALSAKQHDPHVKAYFQHLVDNGKLPLQALCAVMRKLLHAIHGMLKYDKPFDNTRFYAIPA

SEQ ID NO: 469347 - protein, 487 aa, unidentified
MAKRKKSTFERLSRGGLNRKQRRDLGRRLAGNDPGLTIIHPNAGGIDVGNESHFVAVPPDRDANPVQEFGCWTADLKRMAEWLKSCRIDTVAMQATGVYSIPLYDILTGHGIQVVLVNAQHSKNVPGRKSDVQECQWLMKLHTYGLLRDSFRLEESMEGVRTIWRLRDRHVKDASRAVQHMQKALTKMNIQLANVLSDITGVSGQAIIAAILQGERDPWKLADLKHEMVKASREEVARSLEGNWRDDLLFELQQAVDSYHFVHQQMRACDRQIESFLASLPTKILERPPQPDGAPAATAKKAKKPRKPKKARHNQPTVDLTTQLKRICGVDLTSIDGIDVITAQTIVSEIGTDISKFKTEDHFASWLGLTPAKDITGGKIIGPGRRKVQNRIAIALRMAATTLLESKTYLGARYRHLRQRLPSHAAAVKAMARYLAVLVYRMLTHGEAWVDRGAAKFEQGRTEWELKSLTSKALAKGFKLVPITTAS

SEQ ID NO: 469348 - protein, 424 aa, unidentified
MKVTFQTCCGVDVHKSFLVATIIKTSSGIEPSYQKRRFSTFNNSILEFKKWLLENECLYVCMESTGKYWIPVFNLLEDEINVTIANPKWVKAVKGNKDDTKDSKWIGDLFRLGLVRGSYIPCKKIRILREFTRYRYKLVSCRSSEKNRYQNALTVCNVALDSVVSDIFGKSSTSIIDYLLGQSGTSIDHEVIASKLLKRLKAKEDAVIESIEGYQMTDSQKYRMHLVRAHMDYITAAINDVDSEIESLISSDPDYENAVELLCTIPGVKYDSAITIISEIGIDMSQFCSSKRLCCWAGLTPGSNESAGKKKSVRITRAGVYLKPALVQCAHAAVKSDKSPYYKKKYESLVKRRGKKRAIIAIARMILTAIFQMLTTGETWNPCDLYKIDMPEALLEKQKQKAIKQAQKLLIREGLLPPTEPIAS

SEQ ID NO: 469349 - protein, 342 aa, unidentified
MYYIGLDVHKKTISYCVKDGSGHIHAEGAIPATRLDLDIWMKTLPQPWTAAMEATIFTAWIYDHLLPHAVAVKVAHPLMLRAIAAAKKKNDRIDAHKIADYLRCDFLPECYMASTEIRERRRTLRYRNLLVRQAVQMKNKIAVLLMEAGVSYNKQKLHKVGYFRELLATNQDIDDGLRSLLRLCRETVVRLGKTESALVRSLQRDALLVERVERLMTIPAVGPIMALTWALEVGNVQRFSSIKKAISYCGLCGAENSSANIIKRTPLSKQRNKHLQTMLIEAAKMAPRNSPDLAMLYDREKQKGNANRATLAVARKLVAYLVAVDRRQKDFLIVERENRTAA

SEQ ID NO: 469350 - protein, 411 aa, unidentified
MEDWPEALPVFFILPWEVFVMSFFVGIDVSKEKFDACCIGEQGEKIFSLTCSMDRGGFEKFIVQLPEDKTSFLLGMESTASYHIALFSYLTAQGYRVFIINPLLINNFAKRSLRKTKTDRKDALTIAQFLMHEQETLSTQTSSHLTTELKDLARRREKLADHVTSLKGNMKRILSVTFPELEHLTGVFTKTILRLLAEYPSAHALREASCSAVTDIVMTRSRGPKPQASVKALMAAAASSIGVASRAKELVLKQEASLLLHVQEQMKETTKLLMSLLNERMKQDMEILCSMKGIGENTAMNFLIEMGTDVGMYENDKKLIAASGLDPSTYQSGKYEGRSRISKRGNRHLRRVIWLMATKVIINNNLFRTYFFKRRKEGLPYKKAVLATAHKLIRVMFAMLSRKICFVEGGN

SEQ ID NO: 469351 - protein, 423 aa, unidentified
MMKLKYSICCGLDVHKNIIVATIVITNKDGISEYRQKSFLTINSDIQRFHNWLIENNCYHVCMESTGKYWIPIFNYLENDIEVCLTHPKYVKAIKGKKTDKKDSKWIADLYKFDLVRCSFIPPKDFRQLRELARYRFKLVCMKSSEKNRIQNCMTVSNVGIASVLSDPFGRTATEIMSYLLEHTTDSMDEKAVRKLIQKGAKAKSDEIIEAIKGYRIETDQAKKLELARGHLEYLDDMITQTEVELYVRIKPYYEFVKFVSTMPGMTELSSTIVLAETGVDMGIFDDAKHLCSWCGLSPANNESAGKKKSVRISKAGDYLKPMMVQCALAAIKNKKHPYFAIKYGRIKKRRGHKKAIIAIARMMMVCIYHMVSEKKPFSPTDYEELMDPQSHVERVVLNENNVFAYLESLGYDSSKLVKRNDN

SEQ ID NO: 469352 - protein, 337 aa, unidentified
MELYAGIDLHSSNNYIGIIDEQDNRVFGKRVENHLPYVLEAMEPYQKELKAVVVESTYNWYWLVDVRQDHGYRVHLANPSAIQIYEGLKYTDDKWDAFWLAHMKRLNILPEGYIYPRDYRAIRDLLRRRVMFVQQRTSQILSFQSMITRNLGLKITTNKIKQMTEEQIEQMFEPDLAFMAKNYLQTINSLSRSIKDIEGRAVSQTRLRKEFALLQTIPGIGKILALTIMLEVGNINRFAKVGNYSSYCRCVKSERTSNNKKKGENNKKNGNKYLAWAYVEAANFANRFSQEARSFYQSKKAKRNGVVATKALSNKLCRASYYIMRDQIEYNAAKLFI

SEQ ID NO: 469353 - protein, 355 aa, unidentified
MTDKRQKIIIGIDTHKDFHHVAVISALGESLTDRKFDATPDGYANLIEWITEQGDVLRAGVEGTGSYGAGLTDRLRRAGITVVDVLAPDKQERRLRGKTDQIDAYSAARAVLARRATTVPKTRDGDVEAMRVFRTTRRMVVKQRTETMNQLHSLLVSAPEGLRVKLAGLKAKELAKASSRLRDLPGDDVVTAATKDAARSLGRRFIELTVESDRLERRIRTLVTAYAPELMTVYGVGPDVAATLLTVAGENVDRITSEGALAHLAGTAPIPASSGKTNRHRLNRGGNRQGNAAFHRIVLVRMKRHPETRAYVDKTLARGKTKRDTMRLLKRYVAREIFPILIAVQQRHATTQIAA

SEQ ID NO: 469354 - protein, 349 aa, unidentified
MTIKTEPIDVVIGVDTHKQTHTASIVDQLGAELACRTSRATVAGHAELLQFARTYSGGKRLWAIEGTGSYGRGLTTFLLAHDEDVVEIDRPARPARRNGAKSDALDATRAAREALSRQDLAEPRCSGDREALRVLLCTRKVAVSAYKPAINHLKALVVTAPAALHDRLTGLGREALIKQCSRLRVSRTQDAEYGATVLALRSTARRASMLMAEAKSLMSEIEALVTRLAPRLLAEHGVGPITGGDILCAWSHRGRLRSEAAFAMLAGVAPIPASSGQVTRYRLNRGGDRQLNRALHTIVLTRLAHHDETKRYAERRKAEGKTSREIRRCLKRHLARRLFKLLESMPMPT

SEQ ID NO: 469355 - protein, 346 aa, unidentified
MEHYVGLDVSLKLTAICIVDRTGKIVREGVVASDPLLIAAFVKSHAPYVVRVGLETGATSTWLWTELNKMGLPVICIDARHAKAALKMQINKSDRNDAIGIARIMQCGWYKEVRVKDLDSHTIKALLVGRALLVKIKRDIENQIRGLLKNLGLIIGRAKMNVFAVRATELAGHRPDLAAVVEPLLKARDAVGQQIANLDRKVLRLARNNAQVRRFMTVPGVGPITALCFLATIDEPTRFRRSRSVGAYVGLTTRRYASGEIDWTGRISKCGDKMLRSYLYEAANVLLTRVAKWSALKAWGVRLAKRNGLRKAKVAVARKLAVILHRMWIEGSEFRWSSKEAASQPA

SEQ ID NO: 469356 - protein, 366 aa, unidentified
MKKTSTVRVNGNMIFKGHKLTIGVDLGDRWSNYCVLDEAGEILLEQKLATTPEGTKQTFEKMPRSLMALETGTHSPWVSRLLKELGHDVLVAHAQKVNLISKSTRKDDRHDARTLARLARIDPELLGPVRHRSAKAQIHLTVIRARAALVSARTALVNAARGLVKSYGQRLPKCGTQQVSRELGAKLNAELREVLEPLLKEIESLNERIEEYDERMEKIAKESYPHVELLKQVKGVGTQIALTYVLTLDDPHRFPKSREVGCFLGLRPGRRDSGQSQPQMHISKEGDPYLRTMLVQGAHYILGPFGEDSDLRRWGLRLAERGGKNAKKRAVVAVARKLAVLLHRLWVSAEVYEPLRNSQKAMRAVA

SEQ ID NO: 469357 - protein, 369 aa, unidentified
MADRITYVGLDVHKESIVVAVAAGGLRGEVREYGRIANTAAALDRLMRKLSGEGVGLRFCYEAGPCGYGIQRHLSAHGHECMVVAPSLIPKRAGDRVKTDRRDAASLARLHRAGELTAVWVPDAGHEAMRDLVRARLDAVHALRRARQQLSGFLLRQGCHYRRPAWTKLHRRWLAGLKFEQAVHHIVLEDYVQAVEAAAARRDRLTAQIEAMLPDWTLAPVVAALQTMRGMALVNAATLIAELGDLSRFANPRQLMAYLGLVPSEHSSGASIRRGGITKAGNAAARRLLIEAPWSYRFPARLSRELLLRQESQPKLIRDIAWKGQLRLCARYRRLARTGKPANIVTTAIARELSGFVWAIARQVTVTTD

SEQ ID NO: 469358 - protein, 342 aa, unidentified
MKEASIIGLDLSKRSFQAHGALADGSVAFRKKLTREKVLGFLAEQPRCTVAMEACGSAHHWGRAIRDAGHEVRLIPPAYVKPFVKRQKNDAADAEAIAEAASRPTMRFVAVKTEEQQGRAMLFRTRDLLVRQRTQLINALRGQLSEHGVVAPQGPANVVILAQAIDDMTPSLPLLVVELARVYLDQIDGLSEKVAGLEKAIACEAKRGGMTRRLQTMPGVGPITAMAIETFAPPMEVFRRGRDFAAWLGLVPVQHSTGGKQVLGKTSKMGQRDIRRLLITGAMVIVRWACRKGAQEGTWLHRMLGRKPRMLVAIALANKMARSIWAMLTKGEDYRVPAAATL

SEQ ID NO: 469359 - protein, 340 aa, unidentified
MTITTIGLDLAKSVFQAHGVDESGATKLVKRLHRKQMLPFFSKLPPCLIGVEACGTAHYWARTLAAMGHEVRLIPPAYVKAYVKRGKSDALDAEAICEAVQRPTMRFVPVKTVEQQGILMTHRARSLLVRQRTMLANALRAHLAELGFVANPGIANLAKLAEQVMADKGALPSYARAALELLIRQIMGVSDEIALLDRQLIAWHSESEASRRLAAIPGLGIITATAIAATVTDAEQFSSGRQFAAWLGLTPQQHSTGGKTRLGGISKQGDRYLRRLLVVGATAVMRHVKDKPTPMADWIRKLSEKKPFRLVSVALANKLARIAWVVLTRKEAYHPYAHLT

SEQ ID NO: 469360 - protein, 345 aa, unidentified
MKKIAIGIDFAKEKFDVTVKNVLEGTSCYGQYPNTPAGGRAMLRMVKKFAKGTTSEDWLFCGEDTGYYSQTISRYLTEKGYFMWLQNPYSIKHSEGDIRRGKNDKADSASIADYAHRYEDKARKYELPSEASEQLHMLLTRRDALVRAKKVVQTGVGEIPKRERQGETITLIKASNKRVVKVIDDEIALLEKQMEEIVGKEEDMQKNYEILRSFKGIGIVNSMCFIAYTDNFKKFDLNARSIATYWGVAPFGEDSGKTVYKKPHVSHICNHWLKAILSNAANSAIKCNTVIIDYYARLEKAGKHEGIRRNNVKNKIIHIITAMIRKGEKFNPEFKFTIKKDTPKC

SEQ ID NO: 469361 - protein, 348 aa, unidentified
MTIRMIGLDTAKAVFQIHGVDAAGKVELKRKLRRDELLQFFEQQERCTVVLEACGAGHHWARALIGMGHEAKLLAPEAARPFVRAGKKNDAADAAALCAAASQPEVKFVPVKNLEQQGVLALHSARALLVKQQTMLANAMRGLAAEFGLVISKGIHKLDGLEMKLQEDASVPATAKRAFAALHGHSRMAAARALELETKIVAHARQDDMARRLATIPGIGPITASLLVATIGANIGSFENARRFAAWLGLVPREFSTGGKTRLGRITKAGNSEIRKLLVLGATAMVRRAAQWNSAAGAWLRGVLERRPVRLATVALANKMARIAWAVMKRGEVYLPQGRARTAAAAVA

SEQ ID NO: 469362 - protein, 449 aa, unidentified
MEKDERKKRLKLSKALPVTNPYSAGIDIGDTEHYVAWPDGKGGHEVKCYPAFTGDLERMVSDIKEEGITTAAMESTGVYWLPLYLLLEEAGLEPYLVNAKHVKNVTGRKKDDTDSIWIQKLHACGLLQKSFQPESEVRILRTYTRQRKNLLSISSDTVRRMQKALELMNIKIHTVISDLLGKTGMQMVQAIIAGERNPIELAKLTDPRIKAKPEDIIKSLQGFWKEEYLFMLKQAHDEHCFYQQQIKDCESKIKEQVLKQVAIVKEGDISGLGSANFKKKGKKNQYSFAVAPILKGIAGVDLCKIPGISEVTALEFISETGVDMSKWKSSKHFAAWLNLAPNTKITGGKIISSKVPKKKNKAGQCLKMAASTLSKNKTPAGDFYRRMKSKFGGKGAALATAHKLARIIYIMIKEKKEYNPELLQDIQKKYRQQKIKKLEIQLEWLKKAS

SEQ ID NO: 469363 - protein, 425 aa, unidentified
MNSNTNQKINQVSEKTLVIGIDIAKRTHYACAVDERGRVLQKSFSFSQTREGFDTFYERIMALRATHEKSDVLVGFEPTGHYWMNLAAYLCAHGIPFIMVNPHHVNRSKELDDNLQTKNDQKDALVIARLMRDGRFSYPRILEGVEAELRNGATLHAKIQEDLNALQNRIIRWLDRFFPEFTQVFKNFGKMAYAALEKTPLPMDIQGKTPEELLFLYRQVDGMKSPQLPKAKQLVEVAQSSIGLTEGLVMARIEITTLLSQYQLMQAQLDELTAQLIELAKQMTDYAYLASVPGIGDVTIVELLSEVGSLTQYEHPRQLIKLAGLTLRENSSGQHKGQKRISKRGRRRLRALLFRVMMPLIRHNEAFKKLHEYYTTRTVNPLRKKQSMVVLCGKLLKILHALCKKKVQFDEQQMMKDLYCLQEAA

SEQ ID NO: 469364 - protein, 492 aa, unidentified
MNNCAASHNGDGGRPALARSRSWLSNPARVKLRLPAEPVALAPTSNRKVPYEGHYISSLDSRAKRRKTPKQQNNTMNDPQQWQQHRAFGALDWASQTHCVVVVDQTGKVIEDFQIEHSALGWKKFREKLQSYGAIPFAIETSQGAAVEQLLEAGMMVYPLNPKSAQAYRERKAPSGVKDDQLDAWSFADALRVDGHGWKALKPEEPLIKELRLVCRDEVSLIEQRTAFILQLRHALAEYYPATLEAFEDWTSVSAWMFLQRFPTPQALAQTGKRKWQNFVHSRRLWGSDQGPRRMEIFARATEFAGSASTVKAKSLLALSLVQMLFALENQLGLYRRRIEELFASHPDHDLFGSLPGAGSKIAPRLLSEIGDDRERFGGDAQALQCLGGTAPVTKRSGKYRHVYQRWACDKHLRHALHLFAEQSLSRCVWAERYYQLHRQKDRSHANALRRLAHRWLKIIHKMWMDRTPYDAELHHRNQLRHGSWIFQLKTC

SEQ ID NO: 469365 - protein, 399 aa, unidentified
MNYFGIDISKRTSVIAHYQDDIFQKEFTIQNNKNGYNQLLNYLNEMDQFQFVFEATGIYSRGMVKFCRVNQIYFIEMNPLEARFKTSSLRAWKTDESDAHKLALLAPYLKASTSLDSNPDIFFELRERARFHVEIENDQNRLKIMIIELLHQTFPGLEKLFKNRYSKIALNIIEEYAHPDLVSQKDIESLTSSIMEYTNKNLSYQKAQNYAERLNKIAQESYPNVKHSSFLVKKVRLLIQQLKSSIQQLSQLDKEMIELAQQLECFEVMHSIPGIGKLTVAMIIGELGDLTKFKTNKQLNAYVGIDIKRYQSGKTQYRDTINRRGNKKARRLLFLVVMNIIRGQRNYNNHIVDYYYKLRKQPNEKSHKTAVVACINRLLKTLHYLVNESKLYDYQMSPH

SEQ ID NO: 469366 - protein, 352 aa, unidentified
MRRSKHQVTSEEDLFVGIDLHKIRWHVTIRTVDLELFSASIPGNWESLQRVLARYAGHQLQAVYEAGYFGFRLHDRLVEHGIPCIVTPPSLVPKEYGNRVKTDRRDSSKLAHLLAKGLLKRVWVPSEEELYHRQVIRRRRQLVRDRVRTQSRIKAELRFYSIHLEEPRGRWTQIYCETLRGIRFGNRWMQESFNRLLEQYEFLSAQIDKQTQLLRELSETALYRERVEILQSIPGIGVISAMEMLLELQDVSRFRRAEQLAAYVGLTPSQYSSADKVRMGRITGIGKNTLRAILVEASWKLITKDQVMREKYERIKIRSGGKRAIVAIARTLLLRMRRMLLAKQAYALDLAA

SEQ ID NO: 469367 - protein, 345 aa, unidentified
MKITTIGIDLAKNVFQVHGVDERGKTVLRKQLKRKDVTSFFANLPPCLIGMEACGSAHHWARELTKFGHTVRLMAPQFVKPYVKTNKSDRNDAEAICEAVARPNMTFVPVKTAEQQAVLGLHRGRQGFVKGRTAQANQIRGLLGEFGIVIPQGIGHIAKRLPEILEDGENGLPGMMRQLLRGLGENLKYLEQQVKELERQIKLWHAGNEQSRKVEKIGGIGALTATAFVATVGDAKSFKNARQVPAWLGMVPRHGGTGGKVRMGSISKRGDVYLRTLLIHGARTVLRHVERKPEQADEWLKKLIARRNKNIAAVALAAKNARIAWALLAHERSYESNYVATRPAQ

SEQ ID NO: 469368 - protein, 316 aa, unidentified
MSEQAQTSRSVGIDVSRASLDVAVHPTRDQWQVSNDPSGISQLVEQLTQLEPERIVLEATGGYELTALATLAQAGLPVVAVNPRQVRDFARSTGRLAKTDALDAQVLAHFGAVIQPALRPLPDAATRELSALLARRRQLVEMRSAETTRLATAHERVRPSIRELIHFLDTRIKELDRELHDRLRSSPVWREKENLLRSIPGVGPVLSATLLADVPELGKLGHKQLAALIGVAPLNRDSGRWRGQRSVWGGRGHVRAVLYMATARAVRCNPVLAALYERLVRVGKHRKVALVACMRKLLRICNAVIAHQLAWRTQPA

SEQ ID NO: 469369 - protein, 364 aa, unidentified
MRRKVYVGMDVHKETIQIASLTSNTKDLVKEQQIKHEEVQIKKFIQKLKLEKSEIHCCYEAGVTGYPLYRYLKSLGVNCTIVAPGKIPRQSSDKIKTDKRDAIKLARLLRSGELESIHVPSEEDEAVRDYLRSRDSLRLDLGRNRQRLMKFLLRKGIKYSTTKYWTTSHYKWLNNLHFENEILQTTFNDYYSRVRVQEENLKAMDKKIQEIAESEPYREKVGILRCFRGVDYLTAMFLLSEVNDFKRFKTAGSFMSFLGLVPGEYSSGSKRKQTGITKTGSPRLRRILTEAAWQHRFSGTGSKVVVARRVGQSALVVSLAEKASLRLHKKFKNLQLRGKSPQVMITAVSRELSGFLWAAMNLVV

SEQ ID NO: 469370 - protein, 454 aa, unidentified
MPKQKRTRNARTLPVARVLEPNAAGIDIAATEVYVAVPAGRDPQPVRRFSTFTDDLHRLADWLQACRVQSVAMESTGVFWIPLFQILEDHGFRVCLVNARHVKNVPGRKTDVSDCQWLQYLHSVGLLRASHRPTQTICAVRSIWRHRESLVQMAAVHIQHMQKALDQMNLQLHHVISDITGTTGLAIISAVLDGERNPENLATLRDPRIVASRETIARALVGDYRVEHLFTLRQSLQAYRQYQQWIAACDSEIERQLQVLPSNLPDDPKPLSKPRDHHKPRRNEPRFDLRSQLYRVFGVDLTAVPGVSSLTAHTLLTEVGPDLRRFPNAAAFASWLGLCPDNRISGGRVLSVVTRKVKNRLTIALRMAAQSLHRSQSYLGQYFRRMRIRLGTPPAITAAAHKLARVLYHLITTRQPYEESTFAAMEERARQRQLLRLTKQAARFGFQIDHTSML

SEQ ID NO: 469371 - protein, 438 aa, unidentified
MKSATNTRSSEPSTVPSTIPSTMSLPEFPPNDVTAGVDWARDDHALSIVNGRGREVYRCSVEHTATGLRELVKALGKHGVGEVAIERPDGPVVETLLAAGLTVVVVSPNQVKNLRGRYGSAGNKDDRFDAYVLGDTLRTDRARLRPLVPDTQATVALRRACRARKDLVKHRVAAANQLRAHLRNVLPGAVGLFADIDSEITLAFLSRFDTQDRADWLTPKRLGDWLAKQGYSGRVDPAVLHQRLLDAPRGATGEHATSQAHITAAYVAMLRTLLEQIKALTAHIDRQLDDHADAHIFTSLPRSGRVRAARLLGEIGDCRARFPTPESLTCLAGAAPSTRQSGKLRAVGFRWACDKQLRDAVVDFANGSRDANPWAADLYDRARARGHDHAHAVRILARAWLHIIWHCWQDQVPYAPDQHRALQRVIAAQTAAGQTAAG

SEQ ID NO: 469372 - protein, 352 aa, unidentified
MSNQESFPNLTIGLDLGDKISRTCELDAGGKIVKTAAVATTSGAIEHYFGGRPRCRVVLEVSTHSPWVSRQLEELGHEAVVANASEVYGRVRRKRRNDKLDAEFLARQGRADVELLHPIRHRSAEAQQDLALLRARDQLVRVRSGLISHVRGAVKSLGGRIVKCSAEAFAKRAAGQLPETLRPVLTPLLELIADLTKRIDGMDGQVEQIAQAHPEALRLQQIRGVGPLTAVAYVRAVEDPHRFRHSRQAGAFFGLVPKLDESSGSCPQLRITKAGDPLVRRYLVSAARYILGPHAQDSDLRRYGEAIAARGGNNAKKRAAIAVARKLAVLLHRLWVSNAAYEADWSQKQRAA

SEQ ID NO: 469373 - protein, 368 aa, unidentified
MEQLITYVGLDVHKDTIAVAVAEMGNRGEVREYGKIANTPVALKTLVAKLGRGGSELRFCYEAGPCGYGIQRQLTEGGHGCVVVAPSLIPRKPGDRIKTDRRDAINLAKLHRAGELTAVWVPDQTHEAIRDLVRARLAAVRTLRQARQQLSGFLLRQGRCYHRPAWTLTHRRWLAGLTFEQRVHHIVLEDCIAAVEAATARRDCLQAHIEAALPDWSLAPVVRALQSLRGVALVSAATLVAELGDITRFTNPRQLMAYLGLVPSEHSSGRTRRQGGITKAGNGAARRMLIEAAWSYRFPARISREQLLRQEALAKPVRDTAWKAQERLCRRYRKLARAGKLPTVITAAIARELSGFVWAIAKQAQSAT

SEQ ID NO: 469374 - protein, 404 aa, unidentified
MQIVYERCCGLDVHKKSVVACAITPEGKEIKTFGTTTKEILALLDWVTAKGCTHVAMESTGVYWKPIYNLLEQADITAFVVNAAHIKAVPGRKTDVKDAEWIADLLRHGLLQGSYIPDRSQRELRELVRYRRSLLSERSREVQRIQKVLEGANIKLSSVATDILGASGRAMLEAIVNGIDHPETLAKMAKGRLKNKHDQLVDSLQGLLSDHQKMMLDLQLRHIDSLDQAVARLNKEIEERMRPFEREIELLDTIPGVGRQAAEEIIAEIGVDMSRFPSSTHLSSWAGMAPGNNQSAGKRKSGRTRKGNKLLRTTLTEAARAAARTKDTYLSAQYHRIASRRGANRAAVAVGHSILVRVYYILKTAKPYQELGANYLDQHRKNAVINNMIKRLNSLGFKVTIEAA

SEQ ID NO: 469375 - protein, 407 aa, unidentified
MTTPAPAVYIGLDVGKSDHHAVALTSNGETVYDKALPNDETRLRAILDELLKTHGPVLLVVDQPATIGALPVAVAQSCAGVEVAYLPGLAMRRIADLHPGSTKTDARDAAIIAEAARTMPHTLRAIRVDDEQIAELAMLAGADDDLAAQITAASNRLRGLLTQIHPALERVLGPRITHPAVADLLGRYPTPGKLKTAGPGHVRARLRKHAPRLASSLTEEIFEALAQQTVVVAGTEAAVTVVPILAEQLAGLIHQRARLAIQVEAVVEAHPLHPVLISMPGVGVRTAARILTEVVGKDFADAGHLASYAGIAPVTRRSGSSIRGEHAPRGGNKRLKRALFLSAFASLHHPASRAYYDRKRAQGKRHNQALIALARRRTDVLYAMLRDGTLYEDPTTPSVPSSVALAA

SEQ ID NO: 469376 - protein, 393 aa, unidentified
MVYVGIDVAKDKHDCFIVNSDGEALYDVFTIQNNMDGFEDLFFKIKTSSKDLSKVKVGLEATGHYSCNILGFLHNKGLSTIVINPLYTSLSRKSVSLRKTKTDKVDARTIASMIMSDVSLKPYSDTLYHNEDLKSLSRYRFNKVSERAKLKQSVSRLVNILFPELEKLVSTLHTKAVYELLSEFPGAHQVASANLKHLTALLISESKGHFGRDKANEIREAARRSVSSYLPAKSLELRHTIKLIRELNAEIAEIETEIKKIMDSIDSPTLSVPGISYALGAVIVSEVGDFSRFDNPDKLLAFAGCSPSTYQSGQIYSTHAKMEKRGSRYLRWALLNAAKFVCKWEPTFAIYLRKKREEGKHYNVAVSHAAKKLVRLLYHLETTGEKYIPQTLS

SEQ ID NO: 469377 - protein, 391 aa, unidentified
MIYVGIDVAKDKHDCFITNSEGEVLFPVFTIQNNRNGFDDLFSKIQSISSDASNIKVGLEATGHYSYNLLGYLINKGLPTFVINPLHTNLYRKSLSLRKTKTDKVDARTIAMMLMSDVNLKSYSDTSYHNEELKSLTRYRFDKVQERAQLKQSVSRLVTILFPELEKLVSSLHLASVYTLLSELPSAREIGSCHLTHLTKLLENASKGRYSREKAIEIREAARVSIGSNMPAKSLELRHTLRLIGELDSEITEIESEIKRIMDQISSPILTIPGIGYRMGAMILAEIGDFSRFDSPDKILAYAGASPSTYQSGQLESSYSHMEKRGSRYLRYALINAAKYVCHWDETFGAYLQKKLSEGKHYNVAITHATKKLVRLIYAMEKSGKPYIKAA

SEQ ID NO: 469378 - protein, 293 aa, unidentified
MTSSTKFIGMDVHKESTSIAVRNSVGKILMECVIETKASTILEFINGLRGDVRVTFEEGTWAAWLYEVLKPHVTELVVCNPRKTALLKEGSKSDQIDARKLAELLRLNHLQPVYHGENGIRTLKELSRSYLTINKDLTRVMNRLKALYRGWGIACPGNDVYAPRHRAEWLDKIREAGVRRRAEHYYQQLDVLRLLRQEVRRDLLVESKKHKAWKLLRQIPGIGPIRAALLIALMQTPHRFRTKRQLWNYSGLGLETHDSGQYRAVEGQVQRWKKTVTLRGLNKEVSIKTTTTS

SEQ ID NO: 469379 - protein, 339 aa, unidentified
MRLYAGIDLHANSHYLGIIDEQGKVVFKHKMVNELRQTLSVLEPFRSELKGVVVESTFNWYWLVDGLMDHGYQVHLANPSAIQQYEGLKHSDDERDAIWLANLLRLGILPEGYIYPKQERPIRDLLRKRLQLVRHRTSHILSIQNIVSRSLGIRMRGNEVKGLDEEQVAELFKEEHLYLAVRSSVGVMRYLGDKIKEIEGVVKGWVKLRKEFEKLLTLPGVGPILGLTIMLEVGDIGRFPEVGNYASYCRCVRSTRISNGKLKGEGNRKNGNKYLAWAYVEAAHFAIRDYSEVNRYYHRKAAGANKVVAIKAVSHKLARASYYIMRDQVAYDPNKLFHY

SEQ ID NO: 469380 - protein, 311 aa, unidentified
MKEPERFVGIDISKEELVVAVRPTAELQSFPNTEEGLATLVGFLQPLGAHSIVLEATGGFARAAVNAMALAALPVVVVNTRQIRDFARSVGLLAKTDAIDARIIARFAEAVRPELRPLKDLETQKLEDLNNRRRQIVEMITAEKNRLVMAPPWSQKDIRTHIAWLEKRLKRINDDIDDLIKQSPIWRQKEKILTSVLGVGPVVTTTLLCGLPELGSLSARKLSALVGVAPFNRDSGQSRGRRSCWGGRAHVRAALYMAALTASRCNPVIREFYLRLRLAGKPAKVALVACMRKLLVILNAMVKNNTCWQQA

SEQ ID NO: 469381 - protein, 340 aa, unidentified
MRVLYAGFDLHGNSNYLGIMDGEGKRVFRKKLLNDLPWIREVLVPFKEELVGIAVESTYNWYWLVDGLMEEGYRVHLANPSAIQQYSGMKHSDDRHDAFWLAEMLRLGILPEGYIYPKEERPVRDLLRKRGHLVRLRTSLVISLQNILSRNLGRKVNVNDVKALREDRVVPLLEGHEDLALAGRVSKEAIDFLTHQIRRVEGVVLRKITLREAYRYLLTLPGVGKILALTIMLETGSIGRFATVGDYVSYCRKVPSQWTSNGKRKGSGNRKNGNKYLSWAYSEASELARRFDLEPRAYYHRKMQKSNAAVAHSALAHKLARAGYYVMRDQVPFDPGKLFK

SEQ ID NO: 469382 - protein, 360 aa, unidentified
MRKQSNTLNFEGQNIYVGIDVHLKSWTVSILSGHLHHKTFVQPPSPEALSSYLHAHFPNGNYLSAYEAGFSGFWAHYKLVEMGIQNIVVNPADVSTSQKERLQKTDAVDSRKIARSLRNNELTAIHVPCRETLEVRTLLRSRDALVRDLARMKQRVKAFLYYYGIDYPEEFRHSGTHWSRAFMNWLRNGIRMDTEEGGAGLSLLLDSVESQRRLLLEATRKLRALSRSDRYATDYELLRSVPGIGMITALAFLAELEDIRRFANSDRLAGYIGLIPTSHSTGEKDNKGEMTFRGQMQLRSKLIECAWFAARIDPALNMAFSKLTRRMEPNKAIVRIARKLLNRIFYVLKYKRRYKNETVE

SEQ ID NO: 469383 - protein, 336 aa, unidentified
MRYIGVDLHTTQITVCYLKAEAEFEIRKYQLVEMDKFVNTLEAGDEIAVEATCNTRWFAEQVQEKVSRVVLVNPREFEVVKNSVKKTDKNDALNLARFLKADLLPEVRAKREETERVQSLVNTRTKLVRLKTSLINKIHALFVSNGRKLKKASLASDKGLEKVLLSEWSAIERIELEIIIEQIRSLKVSIKKLDTAIEAESGKLKGFESLVSMSGIGSLSAGILLAVIGNIKDFATADKLASYFGIVPRVSNSNEKVNHGRITKRGNKTGRTTLVQCSLAAIKKSEYLKNYYEQVKARRGHGKAKIALARKYLGIIYNTLSNNWVFADFNNFELAE

SEQ ID NO: 469384 - protein, 388 aa, unidentified
MIYVGIDIAKLNHFASAISSDGEELIKPFKFTNDNDGFQLLLSKLDPLDKDSLIIGLESTAHYGDNLVRYLVAKNYKVCVLNPIKTSAMRKSNIHKTKTDKVDTYIICKALMMQESLRFVTFYDLDLMDLKALGRFRQKTIKQRTRLKIQLTSYVDEIFPELQYFFKSGLHQKSVYALLKEAPTPKAIASMHMTHLAHLLKVNSHGRFDKEMAQQLRVLAQKSVGASDSSLSIQVTHTIQQIELLDSQLERVEAEMTEIMKFNDSVIMTIPGIGYINGGMILGEIGDIHRFSSSNKLLAYAGLDPSVYQSGNFQAKKTRMSKRGSKVLRYALVNAAHNVVKNNATFKAYYEAKMAEGRTHYNALGHCAGKLVRIIWKMMTDNVEFNLD

SEQ ID NO: 469385 - protein, 358 aa, unidentified
MGRKSVWVGIDTGDRELRFCAIDARSQIIWEAVGNNHLPDVLDQLAALRSYNIKQFAVEAGATGIALVRGLRAAGLPVDIYETRKASAFLRIRINKTDGNDARGLAELARLAPAGVAKVHLKSTELQRLRTDLLLRHKLTMQRVACESMIRSLFRLYGGRMKRVTSATTLENHVKEELERLSVEHGINLSDQILPLMSLTRSLREFLDQLEENLTRWAADDPICSRLMGIPGVGAICAISFYTAVEDPDRFQRSQDVGPYLGLTPRIHQSGTVSRFGRISKSGNKLTRSHLTLAANVILVRCRDNPLKRWGIALAERAGAGKARVAVARKLAVLMLAIWKSGKGFDDAYNPQKCRLGA

SEQ ID NO: 469386 - protein, 358 aa, unidentified
MSKVKQLNFEGQTIFCGIDVHKKNWRVNVRSVEFELEDYSQDPREELLLNHLRKRYPGATYAIAYEAGFCGFGIQRSMEKSGVNCIVVNPADVKSSDKEKKRKNDKIDARKISRELSKGELEAIYIPAIEMEHARTLVRQRSRLVWDQTRCKNRIWQLLMFSGLKLEAEADKPKQYWSRRFIESLKQLPCGTVPLRQALDIAIEEYLLVRKLLSHATKLIRILAEQAPFAALQKLLRSIPGIGIVNAMVIISELQDIRRFKTLDSLCNYAGIVPDTASTGDNVKVKGITHRTNNYLRPAIVESSWVIIRKDPAMLMLYKKYRSTMIENKAIIKIARHLLSRIKYIWSNQVEYEIGIVG

SEQ ID NO: 469387 - protein, 412 aa, unidentified
MRVVCPRCAGIDIHKDTMTVCLWVDCGDGSAPELRRRTYPTHTEGIGLVAAWLREHRVTDVGMEATGVYWKPVWNALEGEFRLHLCTPHHVRAIPGSKTDLRDGTRIAELLAHGKLPESFIPPPWQREMRDLERLRARCTQEAVRVANRIQKVLEDAQIKLGSVVSDVLGASGRSMLRALTQGETDPAQLAELAQGRLQSKKVELRRALAGRFTEHHRFQIQLLLEDLEQREAQIAKLDERMARYMQPHQEVLKRLDGVPGINTLSAAVILAEIGPEVSPWEDSRRLASWACLCPGNCQSGGKRLSGRTRKGNRWLRRGFCEMAGAASRKKGSYFKAQYRRLAGRRGRKRALLAVAHTLLTIVCHLLRDPSLQYRELGEDYFDKRDVQHTTQQLVKRLNKLGFEVALTRKLA

SEQ ID NO: 469388 - protein, 428 aa, unidentified
MNETESIRLEQFRQLKKQIRGSKDHLIVGIDVAKDKHHAFFATATGKTLLKRLVFENTSEGFERLLIQAEALTLQHGLTKTVFGLEPTANYHKPLGEFLIKGGHMVVLVSGVAVKRNRELLDSRWDKHDTKDSANVADLISQGKCLFFEYPPMALRELRGLLSLKRRLKRQEHGLRARIRNHLLATYFPELDRYYGQSEPDGLSIVRWCVNPSVIAGLDYAHFLQLVAPRTRSLAQQKRLKAIWEKAVDSVGCEAGEALEFEAKVMVETLEQIRDSIGATDHKIEDICLQFPEYHYLLTIPGFGPDVSSKVFAAIGNPFRFTTGKQVVKMAGLDLSADRSGKGSDAAIPVISKKGKADLRYALYQAALIASIRNRHFIAYYTTTLRGREKEKGIKTKMRVKLAAKLLIIAWTLMKKKEPFNPEYLNRE

SEQ ID NO: 469389 - protein, 410 aa, unidentified
MEVLHPHCAGLDIHKDSVVACVRHMVKGKVATEVRVFQTTTRELMDLSDWLAVEGATHIAMEATGVYWKPIWHILADAEFELVLANAAHVKNVPGRKTDVKDAVWLSDLMAHGLIRGSFVPDTPTQQMRDLLRTRKQLVRERTSHVQRIQKTLEDANIKLDSVVSDVVGLSGRRMIEALIAGETDPQALAALAHRHIQASAADLEAALRGRVTAHHRFLLRLHLVHFDALQAAIASIDQQVDSNVEPFRAAIELLITIPGVSRLSAEVIVAEIGLDMSRFATDAQLISWAGLCPRNDESAGKRRSTQMKKGAPWLKTTLIQCAWSATRLKKGYLSAQYVRLRSRRGGKKAIGAVAASILTAVHHMLKNGTKYADLGADHFDRRAKGKHVLRLLSRLQNLGVTVQICPSTA

SEQ ID NO: 469390 - protein, 324 aa, unidentified
MTEPALGIDIAKLKFNVCLIQHSGKLKHKLFANTASGFEQLREWLSKQSVQRVHACLEATGTYGESLALFLHSSGHTVSVVNPAAVKAFAQSRLSRTKTDRVDAELIARFCQAQAPPAWMPLPAEVRELQALVRRLESLIEMRVMEENRLSSGITVKAVRESVQEHLTYLTEQIKRTEELIRQHINNHPTLKRQSELLDSIPGIAQITAAHLLAEITDIKQYRSARQVAAYAGLVPRERQSGSSLRGRARLSKIGNARLRKALYFPAITALRCSPFFRSWAEGLQARGKSKMSVICAVMRKLVHLAYGVLKSEQPFDPEWAKSA

SEQ ID NO: 469391 - protein, 384 aa, unidentified
MRTDQTFTTGGEEVVLAVSLELAAAKWKVALHDGRREQPAVHTVAQPQAAARLQAVLDLIGRYKDKWSLPAGVRVVVSYEAGQDGFWICRALHAHAIECYVVDPASIPVERHKRRAKTDRLDAIKLVINLRAWLRGERDRMHVVHVPSPQDEASRQLMRDRGQLQKEVLQHRDRMRKLLVTLGCWDEVDHKHFADRLARDEVRCHDGTPLPPELRERLLRECERLALVRQQLAALEKTRQASVPAPARQRSDDLARLKGIGEVGASRLALELFWREFDNRRQVGSCTGLVPQPYDSGESHTDQGISKQGNRRVRSLLVEMAWCWLRYQPGSALTQWFNRRTQGTGPNRRARRIAIVAVARRLAIALWRYLKDGMIPEGAQLKSA

SEQ ID NO: 469392 - protein, 339 aa, unidentified
MQVITVGLDIAKNVFQVHGVDDQGRAVLRRKVRRDQLLKLFGSLEPCLVGMEACATAHHWARELGALGHEVRLMPPAYVKAYVKRNKNDAADAEAICEAVTRPTMRFVPIKSTEAQSVLMLHRARHPLVRQRTAQVSAMRGHLAEYGIVAAKGLSRLRDLRPVLDAGAGVLPELARQTLLLISQLIEALTVQIRKIETELLAWHRSNPASQRLETIPGVGVITATALAATVLDAKAFRSGRQFAAWLGLVPRQNSSGGKDRLGGISKMGDRYLRHLLVVGATAVVRYTRRKATAISIWANRLLDRKPARLITVAVANKMARIAWAVMAREENYRATAAA

SEQ ID NO: 469393 - protein, 420 aa, unidentified
MSVLTHPKMKYTYVGVDSHKDTHTAVFLDCFFEKLGELQFDNLPSKFPAFLDNALMLQQDETVLLFGLEDVSAYGRTLTGFLTERGQQVRHVNALLVARERKNRNVTEKTDSVDAECAARVLLSKFGELPDAGLDDKVWVLRTLVNRRDMIIRNNTALKNHLHTLLTGHYPGYQSYFDDISGKTALAFFMRYPSPSALEGVAVDELADFLYEPSQGYFGAAKAREIIDSLQGTTVQFQEVRDGAVQSTVRQIQFNLTELERLEHSLAAFLEQFDSTLTSMAGIDIVTAARILSIIGDIGRFPTAAKLARYAGIAPVTYASGKKDLQFANQRGNRELNSIFYNLAVRLSYPNGSYNRVLNPFFYAYYNKKISDGKTKRQALKCVQRRLVNIIWTMMTGHEDYVNPPAANLPKDLPTKAENT

SEQ ID NO: 469394 - protein, 373 aa, unidentified
MPKYSTAFGMDVHLRSTTVCALDADTGEAVTRRFPGNPWGEIAGWMDGFPGPSLAAYESGYLGFAPQRELAGLGVECVVAAVSKIPRSAADSASKNDRNDAARMAKAILAHDISPVWVPSPEVEGIRDLAGAYDGATARLATAKQRLLAFLARRGFVYGGTTPAGNPRKYWTYDFLRWLDKARPEDDGGVRALAALRNEVEAAAEARADLLSEYRAAVDASPIAAEVAALQSIKGCAFALAAAFSAEVGDFTRFRSGRRVTAYFGLAPSQRSSGDSVRLGGISGAGNALVRKLAVEGSWCYAAARHQPKLMPRDTGVPLEIRMHGRKGSERLLRRREEMLARGMPAAKANAATAAELVRWLWALGMMCREGAE

SEQ ID NO: 469395 - protein, 384 aa, unidentified
MNKDNIVFIGMDTHKDFCENAYCLDSRESVPQPLGRITTSKQAITKLARQFQSKYPKATLHFVYEAGPCGYWIYRLLTKLGHCCYIVAPSLIPKKPGDKVKTDKRDALMLTRLLKNADLSPIYVPEPEDEAVRDVSRLRETAMHDLKKAKQRMKLFLLRNYIQYGGSARWGPKHRRWLTELILPHPAQQIVLQECISTLNERFARLERLDNELKHQVFNWRYYPVVQALQAMRGIKLIVAAGVVAELGDLTRFDHPRKLMSYLGLVPSEHSSGGKRRLGAITKCGNSRARRLLVEGAHAYRYPARMSTEIQKRQEGLPPKVSEIAWEAQLRLCKRYQRLMHRGKHRNVVVTAIAREMSAYIWSISKQVALPPINPKDRLARVPR

SEQ ID NO: 469396 - protein, 357 aa, unidentified
MSSIALHRDDVIVGVDTHKHEHVAVVIDGLGGRLGDRAVPATVAGYEELVGWARSWGRVYGFGLEGTASYGAGLARFLRRGGFRVIEAGRPPRPVERRRHGKSDPLDAEHAARHVLAGHTAVVPKRADGIVEAIRLTRIARSGAVKAHTQAMVTLRAVLVTADDDLRARLEPLTAHQLMTTCAALDTTGDPTDAAVAMTHVLAALAQRWLDLHREIKIHTKRLAYLTATAAPTLVAAYGIGPDIAGELLVTAGDNPERIRSEAAFARLCGVCPLPTGSGQTAGRHRLNRGGNRHANAALYRAVIVRMRHHQPTRAYVARRTAEGLTTKDIIRCLKRYLAREIYQIITAPPEAKPSAP

SEQ ID NO: 469397 - protein, 344 aa, unidentified
MECYVGLDVSLKQTSICVVNEKGLVVREGVVDSVPEAIAGFVRSRAPGAVRVGLETGPTATWLWTELARLDLPVICIDARHAKAVLKMQVNKNDRNDAAGIARIMQTGWFKEVRVKDLDSHAVKALLASRALLVKIKRDLENQVRGLLKNFGLVVGHGTFNVFAVRAKELIADRPELTSAVSPLLTARTAIEQQIGELDRQVLKLSRQDAQARRFMTVPGIGPITALCFKATIDDPARFRRSRSVGAYIGLTTRRHASGELDCSGRISKRGDAMLRMYLFEAAGVLLTRVPKWSALKAWGTRLTKRNGLRKAKVAVARKLAVILHRMWVDGTEFNWSNNKEVAA

SEQ ID NO: 469398 - protein, 320 aa, unidentified
MTTFDSQVVVGVDVAKDEIVVHRRDLDKTQIIANETPALKKWLRSLPSDSAIAIEATNIYHVETVELAYSMGHRVFVVDPGKLSKYRDSLGKRAKTDASDAALLARYLAHEGAALRLWSPPPEVYTELKNLLHRRAKLVSIQVTLKQSWGNHADLPKEFGAVIDSLKALDQAIQDLMKDILNKAGLMPQIKRCEGIEGVGFLTATAFLTAYMRGDFASSDAYIAYLGLDLCVRDSGKKTGRRRLTKKGDPEIRRLGHNASMAACRSETWKPFYQRHLDSGKARTQALVILTRKLARVAFALMKNQTDYRPNSIFGASPQT

SEQ ID NO: 469399 - protein, 421 aa, unidentified
MDFKQNQKINQVTEKTLVVGIDIAKQTHYACFVDDLQKSFSVSQTGDGFELFYQRVLAAMKENEKTEVIIGIEPTGHYWLNLAYFLEERGIPLVMANPMHVKRSKELDDNLPTKHDRKDALVIARLVKDGRFSYPRILKGMEAELRAGSTFRSKLTEELGAVKNMMIRWLDRYFPEFTQVFPSFGKMAMAVLECTPFPSDLHQKQPDEVLSLYREIEGLKSPQRPKAIRLIEVAASSIGVTEGREMARIEIATLVRRYHQLEEDIECITERLVELVKTSVEYQWLSTVPGLGDTTIVDLLAEIGSFSHYEDPRQLIKLAGLTLRENSSGLHKGQKRISKRGRRKLRALLFRVMMPMVRHNEAFKKLHEYYTNRQVNPLRKKQSIVVLCGKLLKVLHGISTKHKAFDAQRMMRDIPSLAEAA

SEQ ID NO: 469400 - protein, 348 aa, unidentified
MGVFIGLDVSLSKTAVCVVDRDGAVLWQGKVTSEPGPLIARLAEWSGKIDLAGIEACPLSEWLHRGLREVGIPVVCVETRHAQRFLSTRPVKTDRNDARGLAEMMRLGHYRPVHVKSPAAQSVRTTLVARMQLVSAQLQIENTIRGLLRLYGLKIGAIHRNRFAARVAELLEMAGMPDLSAAIEPLIRVRESMRIERKAQDRTLAAQSRRDEVTRRFMTVPGVGPVTSLAFKATIDDFGRFDFSKAVGAHLGLTPRVYQSGEVDRSGQISKCGDRMMRHLLYEAASVLMTRTRKWSRLRAWGIAVAKRRGMKRATVAVARKLAVIMHRMWVTGTNFEFGCQPAASNAA

SEQ ID NO: 469401 - protein, 339 aa, unidentified
MNPTPVGVDIAKSVFQVHYVDPDSGEIVNKRIKRARFLEYFANRQPCRIGMEACGGAHHWARQLIGMGHQVKLMPAKFAKAFNIRNKSDAADARALWLAVQQPSKAVAVKTEAQQAVLALHRMRQQLVKFRTMQINNLRGLLTEYGEVMGQGRAALDNAMPGVLERVAERLPAVLIDTLREQWDGLTKLDQQIDEIERRLRRWTQQDNAVKALTDIPGVGALTASAAVATMGDPNAFRSGREFAAWVGLVPKQTGSGGKIILLGISKRGDTYLRTLLIHGARSVLRHAKSPSAWLQDIRKRRPSNVVTVALANKIARTIWAILAHGQPYRSDHVSTKPA

SEQ ID NO: 469402 - protein, 354 aa, unidentified
MKRTTKYVGLDVHQATTSIAVRDENDRVIARSVVATEAEQLVEYFRGMRGTVHVAFEEGTQAQWLHDLLEPLVSRIIVCDRRGESKQGNKGDAVDAAQLSAWLRQGRLRAVYHGSRERAKLQELGRTYRNLVQDATRVKLRLKALFRARGIKTAGRAVYDPARRTEWLEQLAEPGARFRAETLSSELAVLRRLHAKAEVALVTEARRDPAWRVLRTIPFFGPIRVAMCLATLQTPWRFRTKRHLWAYAGLAVVTRTSADYELEAGQPRRRRRAPMTRGLNRNHNPVVKNIFKGAATDAALRRGPLHEWYQNLIAGGMREELARVTLARKLAGITLRLWKTGVPYDPTQLTVQAR

SEQ ID NO: 469403 - protein, 427 aa, unidentified
MKYKQNEKILQVTGDTLIAGVDIAKESHYARAFDYRGVEYGKYLRFENNREGMTKFLNWAKDLMERHKKNKLIVGIEPTGQYWLCFAQYLKDNNIKVVLVNPFHVKMSKELDDNSPTKSDKKDPKTIAMLVKDGRYVEPIIPEGVYAELRVAMDIKERLNKQIGMTKNQITRWLDIYFPEFNTVFSDWEGKAALITLREFPTPEKIAKKSAEEIISIWKKEVQRGVGEKRAIKLIETAKESIGKKQGIKMAEYEIKTLIEQYEFLKKQIEEIEKKMEELIVEIPGVKELLEIKGIGVNTVAGFIAEVGDIEKYEHPKQIQKLGGLNLIENSSGKHKGETTISKRGRKRLRSVLFNAVMALVAKNEEFRELHKYYTTRAQNPLKKKQSLIVLCNKLIRIFYVILKKGVKYDPIKMMKDIKRPGLQEAA

SEQ ID NO: 469404 - protein, 350 aa, unidentified
MIIIGVDFHPEYQEIASVDTDTGEYQEKRLAHPQEAEEFYRCLSCVGQVVRVGMEASGHGRWFERLLEGLGVELWRGDAEVIRAKRGRKQKTDREDARHILKLLLKDDFPRIWVPSWGNRDLRQLLWHRHRMVQARTRVMNQLQAVALNEGLRCKKRLFRADGRQQLESFQLAPWASRRRRELLELLDRLNPTIAELSQAVEREAEKCPEAQRLMTHPGVGALTALAFVLIIGETERFQCGKQIAAYLGLVPLEKSSGNRRRLGHITKQGNSLLRFLLVEAGQVTVRSLPEWRSKYVHLTMRRGRKIAKVAMARKLAVRLYWMMRKEWDYEQLKKFGSHAGQPVHRYGVQ

SEQ ID NO: 469405 - protein, 394 aa, unidentified
MEVYGKFVGMDVHKETIAVSVAEAFGGEVRYLGEFRNTPEGVGKLIRQLRKDGSKLSCCYEAGPCGYALHRELVGLGIANQVVAPSLIPRKAGDRIKTDRRDSQTLARLLRAGELTAVWVPDEAQEALRDLTRGREDLKHLERQAKQRLQAFLLRHGKVYGREKKWCRMHFHWLEEVKFAQPVQQIVFQDYLDTLQMLTRRVEALEGQLEVAGAASGFGPLIEGLMALRGISRIAATTTMAEIGDLHRFRTAPQLMAYLGLVPSEHSSGATRSRGGITKTGNGHVRRVLVEAAWTYHHPARKTTHLQRRAERAPEKVQEIAWKAQVRLCARYQKLESKGKIKVKVCTAVARELVGFIWAIGQTYPGAGAPGDAASSQCISSRTGNGGRTLGAPM

SEQ ID NO: 469406 - protein, 328 aa, unidentified
MTILLERTSFKTFAQDANAAILGDYLRRNFPNANYFSAYEAGFCGFSVHRELEKQGINNIVVNPADIPTTDKERKQKEDKRDSRKIANSLRNGELQGIYIPSIVGMEFRTLVRCRKTLVKEINRNKTRIKSLLYFNGIQVPRELDSASRHWSSRFTNWLNEVKFHSTFGNKSLDVLIDTTLYFRQKLLEITRELRSISKSGPYSTQIQLLCSILGIGLITALTLLSEIENILRFKNLDTLCSFIGIVPSTNSSSDKEIIRGITPRANKPLRSVIIEAAWMAVRNDPSLAIRFNDLCKRMKANKAIVRIAKNLLSRIRYVLKNEIEYAC

SEQ ID NO: 469407 - protein, 352 aa, unidentified
MYTLGIDLHKKSSVWVLIDDKYTELWKESVVCHPKYISIALKKIPVPPNEVKVAIEPVAGWRWVTKQLEEEGFKVHIAHPRKIQLIAQSKKKNDTEDARTLAKLLNSGYFPEAHRSPDSIYDLRLLLRERTYLIKLRTSAKSQLHGIATTQGLHLIKGMNPLHKKGKEGIMGSQNFVLKELHQLIEDLDKRIIPFDQELSKEVKKYPIADILTTVPGLGILTALTIIAEVDDFSRFKTAKNLTSFAGLVPRQRSSGEIVRHGGITREGSKPLRTALVELAMRIRETNAPELFAFVKRLTPICGAKKARVALGRKILAILWKMVTTNTPYKPNIILSSSSATNVSNLDTGTGA

SEQ ID NO: 469408 - protein, 417 aa, unidentified
MRIVRPICCGADIHKDLIVATIATTSQDGITEYTQSSFSSQNFDLNRLKAWLKEHHCFEIAMESTGKYWIPVFNVLEDEIKVFVVHPKYTKAIKGKKTDKKDSKWIADLFKHDLLKFSFIPPKEIRELRELSRYRIKLIAMRSSERNRYQNSMTISNIGLASILSDPFGKSSRAVMKEVIRSSSVTEEKISKLLERNARKKVKEVLQSLEGSHIESDQRLKMSIASQHMDQIDSHVRRLETEMAIRCIPYATLINLLLDIPGISYLSAMTIIAEIGTDMSVFETGKQLSCWAGLAPANNESANKKKSVRISKAGSYLKPLLVQCALAAINSKSNPYYRIKYNRIKKRRGHKKAIIAIARMILVNIYHILSTGEAYNPCDMEQIINPKPVKKVMTIQNAIEFLQSQGFDTSKLISSSS

SEQ ID NO: 469409 - protein, 407 aa, unidentified
MEEKDVIEFEQVVERGCGMDVHKDLIVATILGKGIKMQTKSFNAFTSSLIKLKEWLLKNGITHVVMESTGVYWKPVFNIMGDDFTVLLVNARHVKNVPGHKTDKKDSRWLAKLLLSGLLKGSFIPERPIRELRDLTRYKTKLTNQITAEKNRFQKILEDANIKLSSVLNDIFGATGTKIINHILGHESYRPEDILQYVHGKVKSSREDIKEALTGYITPHHRFMLKTIMRNIARIESTIAEVDTQIEVCIGPYRVERELLESIPGVGKEGSTCIIAEVGIDMGQFPDQNHLASWAGVCPGSNETAGKNKSGRITYGNKYLRSLLVECGWAASRTKNTYMSAKYKSLVGRRGKKKAIIAVGHKILIATYFILRDKIEFKELGPDHLSNFKRDRLIAYYRQQLEKLIAA

SEQ ID NO: 469410 - protein, 428 aa, unidentified
MSYRIAGIDVHKKMLAVVVSDVEIESEYQFERRMFSSNPEQLRSLAAWLVEQKAEEIVMESTAQYWKPVWETLERYWKPLCEKREGTRRRSGTLHLAQALSNRGRRGRKRDFVDAERLVKRLVARELTLSFVPDAEQRLWRTVTRKKYQLRRDVVRLHNQLEALLEEAHIKLSSLVSDLLGVSARRMLKALADGETNPAALAALAHERLRATPEQLCDALGACTELKPVYRRLLKMTLEQLQLLEQQIGQLDQELATLLHPHQDAVERLAEVPGFAVDSAQQIIAEVGPTAATFPSEKCLSSWVGACPGEEESAGVNYSHRSPKGNRHMRRLLNQTANAAVKAKGSIFEIIYRRCVPRLGHNQAIGVIAHRQCRLIWLILHQGTRYEERGPAVTKRSRYQRTWRMIRQLRNLGYRIELPNPQASQAQA

SEQ ID NO: 469411 - protein, 319 aa, unidentified
MTTNAIVVGVDVAKDRLDVAVRPSGETWSAANDEAGIAALVARLRPLDPSLIVCEATGGFERAAIAALAAAGFPVVVANPRQVRDFARATGQLAKTDQLDAGILALFAERVRPTPRPLPDAAAQLLDAVLTRRRQLLEMLVAEKNRLGFAPKPLHRGIQAHIRWLERQLDDVTKELASLIEASPVWRAKDDLLQSVPGVGPIVSSTLLGELPELGTLSHKQIAALVGVAPLARDSGTLRGKRLIWGGRASVRTALFMAAMCGRRWNPALKVFYERLKAAGKPTKVALIACARKLLTILNAMVRDGKRWAIPAPSVQYSC

SEQ ID NO: 469412 - protein, 398 aa, unidentified
MPFYGGLDWGGIAHAVCVVDGAGQVVARIEVRHDDAGLVDMLARLRKIAPPTELPIAIERPSGLVVDALIKAGHQVIPIHPNVVKACRPRYRAAGGKSDPGDAYLLADVLRTDGHRFRPLSPMADEIKALRALVRGRDDLVAQRVALANQLRSLLEGFWPGAGAIFAAIDSPIALAFVARYPTPNSASRLGEKRLASFMAQHAYSGRRSCAELLARLHAAPKGLTGAEADAKGELVRVLAAVLDRLVHEIAKLSSRIEHAVAELPDGQIVMSFPRAGRICAAQILSELGNVRERFQTEDQLAAEAGVAPVTHASGKSRGVVFRWACNKNLRVAITCFADNSRHASGWAAGVYTRARDRGCKHAHAVRILARAWVRVLWRAWQDGEAYDPAKHKAAIHV

SEQ ID NO: 469413 - protein, 381 aa, unidentified
MDTATRDQQCNSEPVLFMAMELSASKWKLGFTVGLGQKPRERTIDGGDLEALSEAVARAKRRFRLAEDARVVSCYEAGRDGFWIDRYLRGQGIENVVIDPASVEGNRRRKKRKTDRLDLGKLLRCLVRWHGGEEKVWAVVRPPSEEAEDARQFHRELEVLKGERTRHVARIKSLLVSQGIQVKRVSTDFVTELEAARTWDGSPVPPQLRDRLVRELARLQVLRQQICELEGQRREAIRKVTDRRMEQIRHLMRLRGIGENGAWLLVMELFGWREFRNRGEVGSIAGLTPTPWASGDEDREQGIDKAGNRRVRAMMIELAWCWLRYQPRSELSMWFEQRFGGGSKRSRRIGIVALARRLLVALWHFLRDGWVPKGAVLTAPG

SEQ ID NO: 469414 - protein, 393 aa, unidentified
MPRDGEEMTPTRPGCEAAGCPPYHGRSPPPTRRPSIWGLAPARAFRDFRDGIDVHKKESQISIVAEGGELVEQRIRTEPERFAAMLGQRPRARILVEASTDSEWVARCLEGLGHEVIVADPNFAPMYATRTRKIKTDRRDARPLADANLLGAYRPAHRLSDVQRQVRGRLGVREALVRTRTRYIALIRALLRQHGYRVPSGSAEGFVARVAALPLPGELRSLIAPLLAVMLPLNRQLAYSDGVIERLAAHDPRLPRLRTVPSIGPVTAAAFVATLDDVHRFRHAHQVEAYLGLVPREFSSGDTQRRGPITKAGPGRARWLLIQAAVSLLRRHPPEAEALCTWALRIAARRGKHVAVVALARRLAGILYALLRDDSVYRSRRQPITPQPTSSAR

SEQ ID NO: 469415 - protein, 350 aa, unidentified
MVILGADTHKRTHTVVAIDELGRPLAEKTAPATPAGHRVLMAWADQFSDRRWALEDVRHLSRRLEADLIRSGQPVVRVPTRLMGQARRSGRDRGKSDPIDALATARAALREPGLPQAFLEGVERELRLLVDHREDYVAERTRIENRLLWDVHELAPGYVVAPRSLGRRSTLDALQALLEGEPGLVAAIARERLGRIRELTTRINELERQIARRTTELSPSLLDLEGCGALTAAKLVGETARASRFRSRAAYARTNGSAPIPVSSGRSDRHRLNRGGNRQLNCALHRIAITQMRRNGKGRAYIEHRLNMGDTKTEAIRALRRRISDEVFRRLLADEMTRSIATPGCTPVAA

SEQ ID NO: 469416 - protein, 340 aa, unidentified
MGEITTIGLDLAKQVFQVHGIDADGTTVLRKQLRRSQVLSFFSRLAPCLVGMEACATAHYWGRELAALGHEVRLMPAQYVKAYIKRNKNDAADAEAICEAVVRPTMRFVPAKTAEQQAALLLHRGRERLVRQRTGLVNALRGHLAEFGVIAPQGLRNVGKLIAVVRDVGDARLPDLARQVLEVLAAQIEQLEGAVAAVEKQLMAWHKSNPVSQRLATIPGIGPIIASAIAASVAEPGGFRSGREFAAWLGLVPRQNSTGGKHRLGGISKRGNQYLRRLLINGASANLLRSKATKADPWVIGLRRRRPSLVVAVALANKTARIAWAVMLRQEGYQRAIAAA

SEQ ID NO: 469417 - protein, 344 aa, unidentified
MEHFAGLDVSVKETSVCIVDDTGRIVREAKVASEPEALLAVLNNPSYRFRRIGLEAGPLSQWLYSALGEANLPVICVETRHMRAVLKAQINKTDRNDARGIAQMMRVGLYRPVHVKTLRSQKLRMLLTHRKLLQSKAIAIENDLRGTLRNFGLKVGVVGAVKFETRIKQLVENLPDLALLVEPLLVVRRVLREQIAVLHRRLLHIVRDDEVCRRLMTIPGVGPVVALTFRATIDVPARFRNSRAVGAVLGLTPCRHQSGESDRTGAISKCGDEMMRVMLYEAAQILLVRSTRWSWLKVWAMQIARRCGLKKAIVALARRLAVIMHRIWVDGTEFRWARQAAAAA

SEQ ID NO: 469418 - protein, 387 aa, unidentified
MPLAADLPAQTQPVPRPAQVLYVSLELSPSKWLVTSLLSGTGRMSKHLVIGGDGNALLRLLAALRTRAEQRAGAPVVIVAIQEAGLDGFSVHRLLEANSVESWVVDPASVAVPRRMRRAKSDAIDGETLLRTLLAFRRGEPRVCSMVHPPSVEEEDRRRITRERRTLLRERIEHTNRIKGLLMSQGVTGYDPLGKDRWARLESLETRDGHALPPRLKAEIGREIERLELLARQIRQVEAERDALAATVPEVAASPAALLLRLKGVGPEAATLLWLEGLFRTFANRRQLAAYAGLAPTPWLSGRIRREQGISKAGNPRLRTAMIELAWLWLRHQPESALSRWFGERVRAGGGRNRRTTIVARARKLLVALWRYLVHGQVPDGAVLKPS

SEQ ID NO: 469419 - protein, 324 aa, unidentified
MTDAVLGIDVSKNTFDTNLGAGTKARSKSFANSPAGWHHLIAWLGEHKIGQVHACLEATGRHGLGIALALHEAGHVVSIVNPTQIRDFARTKLGRNKTDQVDAVHIREYAELFKPRPWTPPSPAMRRLCELQTIRAGTVAGLTEWKNRRGSGIMDDLALSLAKTTIQHFTSQLEAVDQAIAETIDNDVELSAKRDLLVSINGVGEALAGIVLAELPGPDILGSSAAVTAYAGLNPQQHQSGISVNRPVRISKIGNAVLRTALYMPALSAMRYNPAVAALADRLKAQGRLKGKQIVIAAMRKLLVLCFGVLKTGKEFDPAMAIGK

SEQ ID NO: 469420 - protein, 350 aa, unidentified
MNVNHYIGFDVHKKSISYCVKTADGTITEEGKLRATHLAVREWAEKRREAWHGAMEATLFSGWIYDALKPYAAELQMGHPAMMKAIGASKKKNDRLDARKTADLVRCNLLPACYVATPEIRELRRMLRYRNVVVAQAVRMKNKMSGLLMEVGAEYNKQRLHGKEYFTELLDTIEAVPESVKDLLRLSRGALEMFQTTQQQLLAKLEKDPLLAKRVSVLKSIRGVGEVTALTWALEVGDPHRLCSVGNAVSYCGLTSALDASADKQRRGPISKQRNPHLQTVLVEAAKLAPRWNPQLAAVHAREVQRGHRNRATLEVARKLVAYLLAVDKSGKPFQIRTPATAEQEVETAA

SEQ ID NO: 469421 - protein, 365 aa, unidentified
MGDCINWVGIDDHADKWTICQFEGWGEKPAREWELVPSDQGYRKLIGWLKSLDGEVRVVYEAGPCGYEMYRRLLKSGIRCEVAAPSLTPQKPGDRVKTNRRDAAKLARLYRAKELTLIVVPDAKRESARDVVRARHTVSRDLLRGRHQLSKMLLRYGHRYRNGKAWTQRHWTWVKAIQLPEEWSQLVMAETIITVEQKLEQLARYDKAIEELSRTPAYAPYVEALSVLRGISTLTAMTILVELGDLRRFATAPQLMAAIGLVPAEKSTGDKTNRFGITKTGNAHVRHVIVEAAWHYQRRATAGAKIQARRRGKPQVLIDIAMKCDLRLNRRFYRLTSRGKRSTVAAVAVARELAGFIWAIGQEAM

SEQ ID NO: 469422 - protein, 319 aa, unidentified
MNETPVFVGIDVAKATLEVAVRPSGAQWASANEEAGIQTLLGQLRALAPALVVLEATGGYEHAVAATPATAGVPIVIANPRQIRAFARATGQLAKTDAIDAQILALFAERVRPTPRPLPDDATQALEALLTRRRQLLEMLVAEKNRLGVAPAHLRRDIGQHIRWLERRVADLDRELHAGVRASPVWRAQDDLLQSVPGVGPVLSYTLLAALPELGTLGRKQIAALVGVAPLARDSGTHRGRRTSWGGRAPVRTVLYMATLTATQWNPVLRHCYQRLRAAGKPHKVALTACMRRLLLILNAIVRTQTPWRAAPTAARATA

SEQ ID NO: 469423 - protein, 351 aa, unidentified
MEEYIAFDSHKRYTWVDRRDRGTGKSKGHRLEHAPGAVRDYLSGCAEGTAVAVEATGNWYWIIDEIEQAGLLPQLVHPRKAKLMMGLTNKTDKLDAQGLNRLQQNETLPTVWIPPGPLRDLRELTRTRLVLVAQRTRLKNRLSATLAKWGVPASEYSDPYGKKGRQELAGHLQRLPEQTRWVSEQLLAQLDFVSGQVRELEQRLEKLVDVNESMQWLLSLPGVGVILAATIALEIGQVERFPDAMHLASYAGTTPRVHASGGKVRYGPLRVDVNRYLKWAFAEAGNAIAVNHTRHPERHVSQLYLRLRMRKGHHKAVGAVARHLAEASFHVLRKKQVYRDPGLGSGRTSPG

SEQ ID NO: 469424 - protein, 332 aa, unidentified
MNNVSLIGIDLGKNSFHVHCQDATGRALNRKKFTRTKLFEFLANSPSTTVVMEACAGAHYMARKISELGHTPKLISPQFVRPFVKSNKNDFVDAEAICEAASRPSMRFVAPRTESQQEILALHRVRESLVRDKVKTTNQMHAFLLEFGISMPKGLAMLRRLSVVLAENNLPPYLEKLLMKLQSHYLYLVEQIHDIEHELELAAKQDDTTQRLIPSVGPITASILMANLGNGQQYKRSRDFAAATGLVPKQFSTGGRPTLLGISKRGNKNLRRLLVQCARVFILHLEHQSGYLAEWVKNQLSKKHSCVVACALANKLARIAWAITTKQSTYMA

SEQ ID NO: 469425 - protein, 344 aa, unidentified
MDYFAGLDVSVKNTSVCIVDDTGRIVREVKVASEPDALLAVLKNGAYRFKRIGLEAGPLSQWLFSALAETGLPVICVETRHMRAALQSQINKTDRNDARGIARMMRAGLYKPVHVKTLRSQKLRTLLTHRKLLQSKAIAVENDLRGTLRNFGLKVGVVGTVKFEARIRGLVADIPDLAGLVEPMLIVRRVLREQIVVLYRRLLAIVKDDEVCRRLMTIPGVGPVVALTYRATVDVPARFRNSRAVGAAFGLTPSKYQSGEINRSGAISRCGDDMMRMMLYEAAQILLVRSTRWSWLKAWAMQIVRRCGLKKAIVALARRLAVIMHRIWVDGTEFRWSRQEAAAA

SEQ ID NO: 469426 - protein, 435 aa, unidentified
MEEVADEPLYRERVCGIDIGKAQMAVTIRVPSDGNPRRRMQETRVFGTTKRQVLALADLLRAWQVPAVVMEATSDYWKPVFYRLEAAGFECVLADARQVKNLPGRPKRDASDSQWLAQNFERGAVRSCFVATPEFRVIRLHTRYRRDLTEERTREKQRVEKLLESAGIKLSGVLSDLHGVSGRDIMGHLIAGERDPCTLAQLARRRARAKIPRLEEALDGTEFFTARHAALLQAMLRRIDAHSADIDRLGTVIEELLAPWEEQLQQAESMPGWRRQSAQDVLAETGPDMSRFPTPAHLVSWAGRAPLDHQSGQRSGRGKRKKGNRYIGASAGETSVAAGRTDTREGARYRRLSRRIGKTKAQVAVSNTQLKVYHTLLSSPGTRYRDLGADYYDKRASAKRKTRYYLAELHDLGYDVIITPRADADGEAAGTPPAA

SEQ ID NO: 469427 - protein, 327 aa, unidentified
MDAHSSSCTLCVTDVYGREIDNVTLETNGKTLKNYLRSIEGAKKLTFEECELSRWLYGIIRPEVEELVICNPVANKENKKAKTDKLDARNLAKLFRGGFLTPVFHDGSERERFRNLMSSYQDIVDEGIRIKNRYKSLFRKNGQRMRGETLYNDESLLEGLSQSEDRFIGSHLYRLLANLEQSRQAYVKEIDKYNKKFKELKVLKTLPGIGDIQAAKIVSQVVNPHRFATKYKYYSYCGLVRHTRISGDRKYGTKKIWGNRILKCVYKMAGHSALNGTSQLRVYYDALRKCGISHDNAYNAVCRKIAAISLSLWKHNKHYDERMIRAV

SEQ ID NO: 469428 - protein, 350 aa, unidentified
MIMIGVDYHPEFQQLASVDTETGEFREARLQNREQAEQFYRELAGCGAQVRIGMEASGHARWLERLFGELQFELWIGDAAQICSQRVRKQKTDRQDAQLILQLLEEDRFPGIWVPGPENRDLRQLLWHRHRMVQARTRVMNQLQAVALNEGLRSKKRLWRERDRQQLESFQLGQWASRRRQDLLQLLDQLNPTILELTQAVEWEAEKCPEARRLRTHPGVGALTALGFVLIVGEAERFHCGKQVASYLGLVPLEKSSGSRRRLGHITKPASSILRFLLVEAAQATVRSLPEWRSKYFHLMQRHGGNIAKVAMARRLAVRLYWMWRQGWNYQQLQKFGSHAGQLGNPYGVQ

SEQ ID NO: 469429 - protein, 366 aa, unidentified
MANQADRTPTCVLVAIDIAKQWNAALIEYPDGKRQRFQFKHQREDYDRLVRLLHSTGSSCRIAFEPTGVYHRTLAYRLLHEGFHVCQVSSVAGARYRDAMFNSWDKIDPKDAQVILELLKQGVTQQYHDPLVKGTHDLEEISKTYELISRARTRLRHGIITHYLPLHFPEIERFWYSSRNDWFVRFLMQFPTAAAVSALGREEFVAAAWEVVGRKVDKRRQLEEIHELAQRSIAPPLTADSIAVETFRLQLSRYDALNQQRTALEARAHALLKDRHDYQRLCEIPGIGPIIALVILAEGGDLRRFSHHKQFLKYCGLDLAKVQSGVSRGHERLSKRGNARLRCALWQASISAIRMRENAFRDKYTR

SEQ ID NO: 469430 - protein, 430 aa, unidentified
MGLIVPTTIHPEQEDQPLPYAWFVGIDWGSQQHQVSVLDRDRRRVGERVVDHDGASLAQLADWLWTLSAGQPQRVAVAIEVPRGAIVEGLLERGFHLFALNPKQLDRFRDRHSVAGAKDDRRDAFVLADAVRTDQPSFRRLHLEEPQLLVLRELSRAEETLLEEFRRSANRLRDQLHRFYPQMLQLCAAADEPWLWDLIDLVPTPAHAALLSEERVQRVLKAHRIRRVTGKDVLTCLQIQALPVAPGAAEAAQAHCQLLLPCLRVLAEQLQACSQQVSALLRTLAEELGDGEGPSDVALVLSLPGVGRKITAWLFAEAAQPLTERDYQMLRTHSGVAPVTKQSGKRRLVVMRRGCNPRLRQALYHMARVAMQRDAYFNSVYTTLRAKGQRHGQALRNIGDRLLRILMAMLRDRTCYDASRMRRESIVQMG

SEQ ID NO: 469431 - protein, 332 aa, unidentified
MSAILGIDIGKDELVTALLREGQATEHATFDNSPKGYKKLWRFLKKRRVQHDLHVCMEATGLYYEGVADFLHAKGVRVSVVNPARIKAYANSQLARNKTDKLDAAMIADFCRTQQPDAWTPLSPAQRELRALARHLHDLQADQQRQKNRLHARQSASDPVTTVTEQLQAQIALLEAQMAQVKQAMNDHIDRHPDLKHDRDLIATIPGIGELTANKLLAELGTIRDFENVRQLVAFAGLNPRHYESGSSVRRQTKISKMGNASIRAALYLPAVVAKNHNPVMQALAARLEARGLCPMEIVVAVMRKLLHLVYGILKSGQPFDPNYATNSAISS

SEQ ID NO: 469432 - protein, 465 aa, unidentified
MKRHHRPHPQQPASRPALLERINANAAGIDCGAEAHYVAVPPARDPTPVRAFKTFTADLHRLADWLAACGVTSVAMESTGVYWIPLFEILEARGLEVLLVNAHHVKNVPGRKTDVVDCQWLQELHSVGLLRGSFRPAAAIAALRAYLRHRETLVQSAATHVQRMQKALVQMNLQLPVVISDISGVTGLRILRAIVAGQTDPHALAQHRDARCRASEAEITAALTGHYRPEHLFVLQQNLELFDAYHRQLAACDVAIEAHVRTLAAQAPAPPAPLPTPRTSKKPRDNEPRFDIRTPLHHLTGVDLTQLDAIGPYSALRLLAEIGSDMSRWPTEKHFTSWLTLAPHNKISGGRLLSSKTPRSANRAAAILRMAAMSLGRTETALGAFYRRLAYRVGKAKAITATARKLAILVYRTLKEGLLYHDAGAAAYDAQHRTRVLRRLRQRAANLGFALVHRDTGEVLKGAVS

SEQ ID NO: 469433 - protein, 451 aa, unidentified
MKKDVSMEVINPHAAGIDVGSRSHFVAIGQASDEVREFGVYNEDLKAVAEWLLKNEVVTVAMESTGTYWQSLFAALQNAGLQVILCNGKFTKNIKGKKTDVQDCQWIQKLHTIGLLSGSFLPDEATEQLRTYCRHRANLLDGAADTTRKMQKYLRLLNLRLDVVVKDVTGLTGLAIIEAICKGEINAEVLASLRHGNCKKSEEEIAKALQTNGRKDYLFALKHEYKMYQDLQLAIKDCDNEIEKVLSEQINNNDDKRQHFIDKKVHKKINKNTPKNIDINLMSYQYFEGVDLLAIEGVSHSTVLSVMSEVGLEGLKKFGTAKQFASWMRLAPNNKISGGKVLSHKVPKGSSRLKIALRNAANAIGNLKNTPLSNFFNRINYRKGRVSAISATARKLAVIIWNMVVKKQPYRNKQDYEFLDQKRKRKVQEMRKLVHKFDIKTDELGLNLNCL

SEQ ID NO: 469434 - protein, 406 aa, unidentified
MLVYLGIDWSEQKHDLSFQNELGAEILHLRIPHSENGFLTLNQSVANLGASPAECMVGLETAHNLLIDFLWAHGYTQIYVLPPNLVKSNQGRHRQSGAKDDRCDAALIAELVRTDRSHLYPWRPGSLLLQQMRAKVSYLYFLTRDIVQHTNRLRSILLRYYPAATQVFSALDTKICLDFIQAFPTPQQAAQLVFETFSAFARSHHYPQPKRLLLNYARLQQPQPIPAAETVQAFQDEAVQLCQLVKMLVQRKEETLQELDRLYQQHPDHVIFASLPGLGARLAPAILVKFGEDRQRFPQPELVQALAGTCPITVQSGKSKYVRFRQSCDHEFRHYVQQWAWHSLQHSSWAEAYYLRVRPNCRSDSHVLRCLGNRWLAIAWKLWVSETPYDETYHLRQHALRLRPRA

SEQ ID NO: 469435 - protein, 359 aa, unidentified
MSKITTIGLDLAKKVFHVHGVDVAGNVVVARRLKRKEVLAFFAKLPPCLVGVEACGSAHHWGREIAKLGHTVRLMPPRYVKPYVKRGKTDPIDAAAICEAVTRPTMSFVPIKGVEQQGLSMLHSARSLLIGQRTQLINAARGHLSELGIVAARGLLGFAELAAIVRDERDQRLPATARAALMVLVRQIEAISAEIASLDSILMKENKASELGSRLDTIPSVGPVIASAFRARVTDAKLFENGRHLSAWIGLVPENDSTGGKLKQKGLSKKGDRYLRSLLVNGAMAVVRQAQKRPDKHPWVTKLLGRMSAKQAAIAIANKTARIAWVLMVHGGVYEVGHRAPPYRAQACAAARIRGWAMG

SEQ ID NO: 469436 - protein, 338 aa, unidentified
MYYTGIDLHKKTSFITTIDQNGKVIFRRNFPNVEELILDYFRNLDGPTKIVIESMCSWYWLYDLLSANNFTTVISNPLKTKAIASAKIKNDKVDSHMLAQLLRADMIATVHVCNIKTRKLKELIRHRRRLVQDSARMKNRIHMLLMKNNINIPVSDLFGKRGMKLLKEVSLPGYHQQQFNSYLALLRYLTEQIEPLTEQIRDLAKKDPMARLLMSIPGIGFLTAMTIIAEIEDIGRFPSYRNLASYAGLVPSLDASADKSRTGRITKQGSPYLRAALVEAAQAIPRTKQSRLNIFFRKRIVRAGYRKAIVATAHKILQYVYYVLKNQVFYSEEYLARA

SEQ ID NO: 469437 - protein, 347 aa, unidentified
MHFIGIDVHKHICTAVVIDENERIVAEYDDFPTTEKGLGEFISNFDPNDCRIVFENLTRAHFVFHYLYSRGYAVDVAHTGHGELKNISKVNLKSDKVDACKLAYLCKDIWSGRLFIRRTHISSQENMKLKALVRMNNECSKIVEEMKLRVLEYMNLHNIAPHPRYKDVCGIRYRDYLLKMDDPALTVMVNMISAAKEQIDYVSEKLKSFSEVSEDMKLLKTIKGVSDLTAATIVTAIDGIYRFDSPQKLSAFFGLGLKNSSSADSEKTKVITKEGDPLVRKYLANVVMNLSTKCPECDVSKFFNAKRERMPYWKAATAAMRKLTCAIWAILTYREPFRFHPEKRTEA

SEQ ID NO: 469438 - protein, 406 aa, unidentified
MNQNTCITIDVSQNKSHIQGFIGPNKPLSKARTMRNTKQGFQFILILKNLIESKTNETPLIVFEFTGIYHKPLEKFLISQNLKYHIVAPLKAAKARNSEIREQKTDARDCLSLSKLFYSNNLGIFYSENETYSNLRKLNRYYDTCMKHLIKIKVNFRETLAVVYPNYKKLFSSIYSDDSLTFLKEFPHPPLYTSKLEYRIIEILKNKWDHLESWTSSKVKILTPLINEVVSGCNVTEPDIIMLLSYISQIEYYLNQIEITVSQMNELAKKVPLYNLVHSLPGIQDILTCKFIAEVGDISRFSNYKQIVAYAGIDPMIRQSGDKDGLHLKMSKKGNKRLRTILHLMVSSLIKANREPNAIKDKYQKKTHQLNPLKPKVASMACANQLVRIIFYMHKTSSTYTYHECK

SEQ ID NO: 469439 - protein, 367 aa, unidentified
MKKISTGATKQSKNFRGQKLTIGLDLGDRSSWYCVLDEAGNVVLEQKLSTTPKAMKEVLGAMPRSRIALETGTHSPWVSRVLSELGHEVIVAHARNVRLIGESRRKDDRLDARTLARLARIDPQLLAPVQHRSAQAQADLMVIRARAGLVRARTSLINTARGLTKSYGERLRGCSPRNMNAEKARPLSPELQAALEPLLAAIEALSERIYEYNQQIEKIAKESYPQAARLKQVKGVGTLIALTYLLTLEDAQRFRKSRDAGCYVGLQPARRNSGQSEPQLHISKEGDPYLRTLLVQGAHHILGPFGADSDLRRWGLKLAERGGKNGKKRAVIATARKLAVLLHRLWVSGEAYEPLRKSRREMLPAAA

SEQ ID NO: 469440 - protein, 346 aa, unidentified
MNQIIRIGMDTSKHFFQLHGVDAGERPVLRRKLRRNEVFAFFAKLPATVIGMEACGAGHYWARELGKLGHEVRLMAPQHVKAYVKRNKNDGRDAEGLCEAMSRPTMQFVAVKTEEQQAALMLMGVRQQLITRRTQLSNAIRGYATEFGLIAAKGLDKLEPLLVRIAQDESLPELAREMFALQGRAYAQLQVELKAIEARLMAWHRANADSRRLAQIPGIGPIGATALVMKAPDPRLFRSGRHFAAWIGLTPKDHSTAGKTRIGKITRAGDEMLRSVLVAGATAVIQQAKNGHGRPSPWLLALLARKPPKLAAVALANKIARIAWKLLTTGESYDGARMPAASALAA

SEQ ID NO: 469441 - protein, 408 aa, unidentified
MNTLYVGIDVSSKSNVVYLMLPNGDKHSNFSVTNSHEGSTQLVKRILSALTSHSLDTVLIGLEATSVYGDNLVYFLREDATLAPFNRKIHVLNPKQVKKFHDAYNDLPKNDYVDSFVIADCLRFGRINKEVYMGDYRYKALQNLTRARFFAVQNLVKEKQRFMNVLFKKYSMMTQEKVFSDTFSTTALAVYDEFESAEALANMDLHELTDFIIEKGKNRFPDPDAVAKAIQKAARSSYRLPKTVNDSVNQVLSISITSMKALESQIKEFDKAIKAQMELLPNVLISIPGIGPVYSAGIMAEIGDINRFNSQAALAKYAGLAWKQHQSGGFESEVTRLIPSGNRFLKYYLCEAVFSLVRCDKEYSDFYHLKYKEVNRYQHKRALALTARKFVRLVFRLLKDNRLYCPAK

SEQ ID NO: 469442 - protein, 337 aa, unidentified
MIVIGVDVHKHSLTAVAVDEAGRQLDELTVAYPDEVLLVWAARLGERLWAVEDCRHVTRALERRLLAEGEELVRVPPKLTGAARGAGKERGKSDPIDALAVARIALREPDLDRPRPGEERYRELKLLVVHRDDLVDERRRCQQRLRWHLHQLDPSLVVPAGALDRAVWLDKVGRWLSRRTPEVQVRIARDLVGRCRSLTRAIVELERELATMSAQMAPALLELPGCAGITAAKLLAEIGPIERFRSDAQLARHGGVAPLQASSGRTQRHLLDRGGNRQLNCALHRIAITQARVHPAARAYISRKKTEGKSNREAIRCLKRQLARTVFNTLKAGDALT

SEQ ID NO: 469443 - protein, 347 aa, unidentified
MDDYTHYVGIDVSKHTLDVMLWQFDQGTLDKTACQTSNDAPGHQQLTQWLNDHRAPIETTVLCLEHTGRYDDALLEHLTLGGWICALEKTTVLQKVKPEHHRKDDAFDADLLAEYAYRYSDKLLLYQACDPVIEQIRLLYGERRRLVTHRATVKQLQREQGYNRAGRPSQAEAFAHQLWSEQRAFYDGQIKALEQKIDDLVASDQGIRHRYEQVKAIDGFGPKMSLKWLCLFYGQTYLDARRISSRYGFAPHGEGSGTSRRRPGRSTGHGSSEVRKLLTMCARSAGTHHAKYRRYKERKLAEGKVSQLVTNNIINKLIRVACAVWNDDAVFDPNHVSRFAQNEIATP

SEQ ID NO: 469444 - protein, 366 aa, unidentified
MHVQGREPVNSLLSLIPFLQTNMTNIQFKDIDHESKPVFFAGIDVGAEELILVIRKNGKPFDPQKFANTPADRTRLVKKLVKLPGIIVCLEATGVYHFDLSLALHDACVLLMVVNPKAAHNFAKVLMKNSKTDAVDANTLAEYAARMDFVAWTRPSDEQIALRSFARRINALTGQKAAAKNHLHALTATSETPKAVLKDAKLAITQLEKRIDRLTAETLILIDKQPELKRILTLLIGIKGIGNTSAIALMGELLLLPPDLSHREWVKFAGLDPRAFDSGKSVHKKTRISKAGNRHIRAALYFPALSAKQHDKHVKAYFQHLMDNGKTPLQGVCAVMRKLLHAIHGMLKHNEPFDNTRFYAIPISAE

SEQ ID NO: 469445 - protein, 317 aa, unidentified
MNFVGIDVAKDSMEVMVHESSKRWNFMNDESGLHKLIAKMKRLSPCLIVLEATGGYENTVATGLQCKGFSVAVINPRQIRDFARSIGTLAKTDILDARVIAHFAAKIQPPPRILPTEEAKRLGAILMRRRQVVTLLTAEKNRLLQANPAVRERVKNHVTWLKQELSDISKELKQMVQDDPEWKEKDKIIQSVPGIGPILSFTLLADFPELGTLNRKQIAALGGVAPFNRDSGKMRGKRTIWGGRGVVRTATYMAAFAAIRCNPLLASFFNRLVAAGKPRKVALVACMRKLLCILNAMLKNRTRWTCYSSQLVGPCYC

SEQ ID NO: 469446 - protein, 314 aa, unidentified
MSSISPNSCKGVRARLHLFDGLRLSAPSAPEGEAELVAWLRANQVGRAVMEASGGYERSWAEALRAAGLEVLIVDPKGVRHFAKAAGRLAKNDPIDAETIARFAEAFPDDSVQPHDPAREELARLVQAREALKDVQERIKQQREHQPPAIVVEALAAVAKTLRAEMRRLEASIASRIKANPAFARRGELIDSFPGLGAQSVAGFVAWLPELGRISNEATAALLGAAPYDDDSGQRKGVRHIKGGRRKLRNLLYMAVVGAATQHNPVLKAYYQRLLAKGKEPKVAIIACMRKMIIILNTMLARDEPWNPQAHAAA

SEQ ID NO: 469447 - protein, 353 aa, unidentified
MKPKTESDTALPMVIGVDIGKEVFHLVGFGGDGKIVFRRKIKRLGFAAVFEKVPPCIVGMEACLSAHFVSRTLRTLGHEPRIIPAIYVKPFVKGQKNDYNDAEAIAEAALRPNLRFVQEKSQDQLDLQACHRVRARLVSRRTATINQIRAFLIEQGIAVRSGPRALRTSLCAILENRKDEISPRMARLILDLYKDWCHLDERIDTVTGEIEELSRVKAKCQRLMTVPGIGPVISTGLVAAIGSGEAFERGRDFGAWLGLVPRQYSTGGRSVLGRISKRGSKYLRTLLIQAAKVLLMRPHNWPRYSFGAWLKTASERLHRNKLAVALANKLARIAWSVLRHDKAFDTHLETAAI

SEQ ID NO: 469448 - protein, 316 aa, unidentified
MKKVKAEIFVDIDVSKSWLDVAVHEQAEAALRTGNDETGIASLVKRLKKLKPTLIVLEPTGGFEMLVVAELTHAGLPVVAINAKRIRDLARATGRLAKTDKLDAKVLAHFAAALRPPVRSLPSAEEEQLTALLTRRRQVLDMITIEKNRLVTVRAKMRADIEAHLHWLSKSLKELDKEIEEFVKGMPLWKEKDTLLQSVPGVGPVTSATLLGMLPELGQLNRQAIAALVGVAPMNKDSAKKQGKRRIFGGRAEVRSVLYMAALAAKKFNPVLRKFYERLLKHGKEKKVALTACMRKLLVILNAMMHSNQPWRTQAA

SEQ ID NO: 469449 - protein, 335 aa, unidentified
MQIYGIDLSMEKFDVNFIDQNGIEKNKTVKNGINSISNFLKEVPSGSILCAENTGVYGDLLLFLSNLMGVTIAFIPGYNIKHSLGLVKGKTDKVDAMRIREYGERFYDKIVPTQYEDETMRELQELYILRGQLIRSRKALQASETGRKHQPMQSICAHTSAQSVIDNLNNEIQNVENELKKLILADQQVKDNYELATSVKGIGPVIATDLLIKTGNFNTIDTARKAASYAGICPFPNSSGKMVKKARVSPFADKKLKSLLYMGAKSAVKHNKEYRLYYQQKKLEGKPHYLIMNNISNKMLRTVYSVVKNEIPYNENYVCLDPRERKINSSKIKVA

SEQ ID NO: 469450 - protein, 339 aa, unidentified
MNEVSTVGVDIAKRVFQVHGVDSAGAVSVRRTLRRGQMLAWFAKLPRCLVGMEACATAHHWARELAKLGHEVRLIPPAYAKAYVRRNKNDPADAAAICEAVSRPQMRFVAIKSERQQAAAGIHRVRDLLMKQHTMMRNQLRGLLAEFGIVAAKGRRGLGELVAILTDAEDQRVPSPLRDGLVMIVETLRGIDRKLETLDRQLVAAGRADATYRHLITAPGYGPILSSAMAAMVVDPAAFRRGSDFAASLGLVPRQEGTGGKVWLGPISKRGNGYLRRLLVNGATSLINSKRAKQDPWLARLLATKPRKVVAVALANKMARIGWALMMRQEDFRSLPAAA

SEQ ID NO: 469451 - protein, 366 aa, unidentified
MKKISTVHAFGSEIFKGQKLTIGVDLGDRWSFYCVKDEAGQVILEQKLPTTQEAMKQIFGKIPRSLMALETGTHSPWVSRLLTQLGHEVIVAHAQKVQLITKSSRKDDRHDAQTLARLARIDPELLGPVRHRSAQAQIHLTVIRARAELVSARTALVNAARGLVKSYGERLPKCGTQQVSRELAAELSTELRDVLEPLLKEIESLNEGIKEYDERMEKIAKEVFPEVSLLKQVKGVGTQIALTYVLTIEDPHRFAKSREVGCFLGLRPGRRNSGQSEPQNGISKEGDRYLRTMMVQGAHYILGPFGEDSDLRRWGLKLAERGGKNAKKRAIVAVARKLAVLLHRLWVSGEVYEPLRNSQKAMRAVA

SEQ ID NO: 469452 - protein, 387 aa, unidentified
MQRNDLSRSLVAFDQNSTLVSVIELSLKSWLVAGLVPGVERSPLKKQGADPDMLMALLHRWRAEAIKAGRQVERIVVAFEAGRDGFWLARWLRARGIEAYVIHPTSIPVSREHRRAKSDRLDTQLLMRSVLGWLRGEVKHCSMVAIPTLAEEDARRPNREHEMLVKERSRIINRMKATMVRLGIRSFNIKLRKAADKLAGLRTPEGVALPANTLDELRRDLARLHLIREQLGAIEKARLARLKGAPQEGAHPMLLMLAKVLGIGVETADMLVHEVLSRDLRDDRAVGRYGGMTGAPDESGSKRGEKGLAKGGNARVRRGMIQLAWRWLMFQKGSALAQWYRTRTAGARGDVRKTMIVALARKLLIALWRYVRTGEVPAGAKLRPAAI

SEQ ID NO: 469453 - protein, 321 aa, unidentified
MDKSTIFVGIDISKDTIDIYDAFNGHLQIENNSKGFSKFGKILSADHWCVMEATGCYHQRLAIYLYERGIRLSVVNPLVIKRYVQMKLKHVKTDRSDALMICGYASEQPLAQWSPEDPYIVECKRYQSAIRLYFKQRTALKNMLHSLSTSGQGNGKLVRSVKRQIKHLGKEIDLLEQETEQLIRANEQGLYTRLNTIPGIGKKTAMILIVSTNGFRDFESSSQVSSFFGLAPAERSSGTSIRGRTRINKIGDPLLRNHLFLCSFTACVHNPQCRALYERITAKGKSKKLALIAVCNKLIKQAYGISRSGLDYDRNYVGRLS

SEQ ID NO: 469454 - protein, 346 aa, unidentified
MNITTIGIDVAKDVLQIHGVNQHGKAVVRKQLKRAQVTLYFASLPACLIGMEACGSAHFWARKLTALGHTVKLMAPQFVKPYVKTNKNDASDAEAICEAVSRPNMRFVSPKSVEQQALLALHRARSGFVQARTAQGNQIRGLLAEFGFVVPKGRWRIEDAIQSIVEDGENGLPGMSRQLFVRLLEHLRHLDVQAKQIEQQIKDWHQSDADSRRLETIPGIGPITASALVASIGDIHAFKNARQLAAWLGLVPRQHSSGGKQVLLGISKRGDAYLRTLLIHGGRSVLLAQKRKTCTEESWSSALAKRRHPNIAAVALANKNARIVWALLAHGEEYQPRYHGSMSSAA

SEQ ID NO: 469455 - protein, 378 aa, unidentified
MAKIRSWAGLDVHAAKVVACVVDADSGEMTVYRLPGDTCAVVAFCAGLPGPTRVAYEAGPTGYGLARALQAAGIACVIAAPGKIERPAQDRIKTDQRDAERLVRLLMIDGLHAVRVPSPQEEALRDLVRAREDLRGDLMRARHRLSKLLLRHDVRYDDTSSRWGQRHRSWLAKVDLAERGAQLTMSEYVGAIDALQVRRGTLEAAISELIPSSPWAEDVARLRCLRGIDTLSAVGLAVEVGDFRRFEHPRLLASYLGLVPSEYSSGESRRQGHITKSGSRHARRLLVEAAWHYRRPPRLGTILERRQDGQEQAVIAIAWKAQQRLHHVWRQLDLKRGKRRTVVAVAVARQLAGFCWAIACHDNNQHTQLRPELEEAHT

SEQ ID NO: 469456 - protein, 381 aa, unidentified
MSQATRLPECTGKPAILYLAFELGRKEWKLAFTVSRSQKPRMVTLSAGDLPGVEQEIARARERFKLAEDVRVVSCYEAGRDGFWLHRFLTLRGVDNAVVDSSSIEVNRRARQAKTDSLDVQKLLSLLLRYHDGEDRVWSVVRAPSEEQEDARQLHRDWETLVQERTLHRNRIKGLLASQGVFVGIKADFAESLESVTLWNGKPLPEEMKLRLLREWQRLCLVETQMQELKSLREKKVSEGESVAMRMIQQLLLLRSIGQISAWVFVQEFFGWRQFRNRRQIGALAGLVPMPYRSGESLHHDQGISKAGVLRVRTMSIEIAWSWLRYQPQSRLSLWFKERYGPGTRRSRRVGIVALARKLLIALWHYLETGVVPDGAVLKAA

SEQ ID NO: 469457 - protein, 483 aa, unidentified
MLYRNIGVDLGVTAKHKAQVLDEQGKKVVPNFSFSTSKDDLDALCQQALSGTNQGTKLRFICEPTEMSWFPFAIYAKTNNHDIVRVKSHKAHDLRKYFSRHKKNDKLDASVLAVMPMIDEKATEQIYLSDAKTFSLERRNRQKEKITNEIAAIKNSLSSLYHWVMPGLLDCFGDSFDSRAREFYRHFSNPFRAKESGIDGIRQILEPAGRQKMKPDLPEKLYSIACRSCELYAKASCYVDFTEIQDEVHIELQLLEAQEEALAQIKDRVESLYEKVHPSKNIESLKGISENLGPSFIGIIGNPDRFSSQSKLRCFAGMIPKQDDSGETNKKGLPMTQEGPSRFRRDLFLATDVARQWDPQLAKIYYEEMVNKGHCHTQAICATIPNLLNRILCVLKENRTYQLRNIEGNPISATQARQIIKEQFTVPEEIRQRTRSKINKNKKEERIRNLFKRQSSEMTPQNSHNIPPKDMLQKFEKYFNNAS

SEQ ID NO: 469458 - protein, 364 aa, unidentified
MAIVANIYRFVIGVDTHAKEHVFAIMKPSGELVETKAFRTNSLAAALKWVQKVTGGIVNVLWVIEGTATYGAVLCCKAQEAGYRVVEAARMNAKAHKAVGKTDILDAHRIAAAVLPLDESRLRDPRSHTDIQAALQILTTAREQMTDYRTSLINALTALLRQWELGVDARRPLTTTQIVEVSKWRSKTSGDIGFATARAEAIRVAKQILDLTAQIDANYKQITELVETSPAKELLKETGIGPINAAIIYCAWSHPGRVRNADAFKSLAGVNPIPASSGNTTRHRLNRGGDRRLNSALHIAAITKETYDPATKEYIAKRTAEGKSRKEIRRCIKTYLARKVFRILNQAANIEIVGVPIGALAQAA

SEQ ID NO: 469459 - protein, 354 aa, unidentified
MSQHYAAIAGIDLGDRYSHLCLLDTENGEVIEESRITTNREAFERRFSGAEPMCVAIEASTHSPWVSRMLEDHGHEVLVANARKVRLIYGEGRKTDRIDAEKLARLARLDPKLLSPIKHRGESSQSHLALVHSRDALVGTRTKLVNHVRGTVKAFGARLPKCTAQSFHHKVAEHLPRELAPALGPVLETIASLSKRIREYDRRLEEVADELYPETKLLRQIHGVGALTALAFVLTLEDPSRFAKSRQVGPYLGLVPATDQSGKSDPQKRISKHGNELTRKLLVNCAHYVLGPFGEDSDLRRHGEKIAGRGGKNAKKRAVVAVARKLSVLLHRLWVTAEVYEPLYNANRRECQVA

SEQ ID NO: 469460 - protein, 354 aa, unidentified
MALKKQSVGIDISMTTFSACLCQRSENGELTFSKAVNFNNETKGYNQFLRWVKSVITVGSDLVFLMEATGVYYEKLAYHLHKINKTVHVVLPNTSKHYFASLNIKTKTDLVDARVLSQFGVERTHKPWLPPPAALLQLRNLTRYYVQLQEQKTALGNIKHSKDCSQDVQSFIIKSNKGLIAEIDKQITKCLSEIKRLVELDRELQVKIKKLATIKGIGLITIVTILAETMGFDQFHNAKQLVSYAGYDVVQRESGTSVKGKTRISKKGNRYIRNALYFPAMVACRYNTTLKETYLRIIQKKSSKMIGQVAIQRKLLVLMYAIWKNNTQFIENYKLGSPDQMIEATQDSSVAELL

SEQ ID NO: 469461 - protein, 371 aa, unidentified
MHDTIFVGMDVHKATISIAVAGGARGGEVRQLGNFLSGADHVGKLVERLSKTGGQRLRFCYEAGPCGYVLHRQITALGHECVVVAPSLIPMKAGDRIKTDRRDAVMLAKLHRAGELTAVWVPDAAHEAMRDLIRARATAVRVLGKARQHLQGFLLRHGRVYAGKKGWTLPYRRWLTTIRFDHPAQQVVLQDYIHSVHDAEERIARLTKQIEDLVPTWSMAPVVEAFQAMRGVAFVAAVTVVAEVGDFTRFDNPRQVMAYLGLTPSEHSSGTAIRRGGITKAGNALARRVLIEGAWTYRMQARVSRKLHDRLEGLPQIVRDIAWKAQVRLCARYRRLAATGKPKVVVTTAIAREMAGFLWAIARQTQIGSPA

SEQ ID NO: 469462 - protein, 350 aa, unidentified
MDTNTPALASIGIDIGKEVFHIVGFGTNGKIAFRRKIKRLALVDTFKGLPSCVVGMEACLSAHFVSRALRQLGHQPRIIPSIYVKPFVKGQKNDYNDAEAIAEAALRPNLRTVREKTQDQLDLQALHRVRSRLVSRRTATINQIRAFLIEQGIAVRTGARALRNSLMAILENRQDEISPRMRGLIADLYEDWVGLDERIETIAGEIETIGEKEANCRRLMSVPGIGPLISTAVVAAIGTGEAFERGRDFGAWLGLVPRQYSTGGRSILGRISKRGSKYLRTLFIQAANVILMRPHNWERFSFGAWLRNAAPRLHRNKLATALANKLARITWSILRSDNTFDAPRHEVMAI

SEQ ID NO: 469463 - protein, 407 aa, unidentified
MGGRCMNSVGIDVSKGRSTVAAMRPFGEVAISPFEVSHTDSELSELARQLKSLDGETRVVMEATGNYHLPVAQALRDAGLYVSVVNAKLVHGYGNNELRRVKTDRKDAVKLANYGLDRWLSLPRYIPEENTRLLLKNCYRQYQQGCKVQTMQKNNLVSLLDTTFPNANRLFHGPVRADGSEKWVDFVAEFWHCECIRERSEKVFTTKYQRWCKKNGYNFSEEKARNIYNEACGCVGVMPKSSTARLLVEQAVSQLKATSSALAALKQEMQTLAAQLPEYPVVMGMFGVGPTLGPQLMAEIGDVRRFYSKKALVAYAGIDAPPNDSGDVTGRHKAMSKVGASSLRRTLFLVMSVYLQNSPLDEPVYQFMDRKRSEGKPYRVYMMASANKFLRIYYATVKAYLNTLEQV

SEQ ID NO: 469464 - protein, 376 aa, unidentified
MREKLRFLGLDVHAETIAVAVAEPDGEVRSLGTIANREDSIRKFIKKLGPAEQLRACYEAGPTGFVLYWQLTQLGVECAVVAPTLVPKKPGDRVKTDRRDALKLARSHRSGDLTAVWVPDEGSEALRDLVRQREAAKQDQLRARHRLTKFLLRSGRRAPLGVKAWTERYWEWIQQVHYTQPAQEATFLDCLNEVHHMGERVKRLEQAILEVVKVAPAAVQEVIRGLQALRGVAHLSAVTIAVELGNITSRFESARKLMGYCGIFPSEDSSGKRIRKGSITKTGNAHLRRIVVESAWSYRHRPWLGAKLRRRQEGVSAEITEIAWKAQNRLHKRYMKLMAAGKDQRKTMTAIGRELMGFIWAIGIKAESACTQQLAA

SEQ ID NO: 469465 - protein, 419 aa, unidentified
MNKLHVGMDISQKDIKVYILDQDGDEATKRFAVDNNLIGAETIAANIIECGKRLSTDKVFIGLESTSVYGWHIQFFLADHLELKPFDPSIISFNAKLIEAFKKSLGNLPKNDWIDAFSIAERLRFGRLPKSCPVDFRYLALQRLTRHRFHIVDNIVREKNYFLTNLFLKFSGLCQNKVFSTNFGATATQLFDEFLTLDDIAARPLEELVDFIVEHGKDLFADPVATATSLKEAVRKSYRMNASVDNSLNFVIKSCLDNIQALEKQKKAVEKAILKEVSGFKNQYLCLMSVKGIGATIAAGLISEIGGVSRFEDDNALAKYAGIYWSEYQSADFTAEDTFLKRTGNEYLRYYLVQTADQLRKYLPEYLKYYTRKSKEAKTHKHKRALILTARKAVRLIFALLREEKLYKSPAKEGGIDET

SEQ ID NO: 469466 - protein, 387 aa, unidentified
MEARIVNTPSAALDNEPARCFFAIELSKTNWLVAAQGPAGNVSRYQLPGCDANALLELIERIRARVKRETGRPVEMVSCYEAGYDGFWLHRFLVARGVRNCVIDPASLQVDRRARRAKTDRIDAERMLRALIRYLRGEPDACSVVRVPSVEEEDAKRLHRERHRLVAERVQHVNRIKSLCALQGIYDYQPLRPDRMERLDHLRTGNGQALPVRLKAEIERELERLQLVLEMIVSLEAERNAITKDKAPTAHLHADKIRKLVRLKAIGPEFSTALVGEVFYRQFANRREVGSYVGLTPSPFSSGAIARDQGISKAGNPKARTMMIELAWMWRRHQPGSALTVWFNERVGNLKGRPRRIAIVAMARKLLVALWRYLETGLVPTGAVLKA

SEQ ID NO: 469467 - protein, 347 aa, unidentified
MNYYAGIDVSLEWSSVCVVDATGKIVREAKVASEPEALIAWFGALGLALERIGLEAGPLSQWLYAAIRQAGVAVELLETRHVRDAFKAMPVKSDRNDARGIAQLMRLGWFRPVHCKSLAAQEVRALLTARKLVQSKLFDVEMSLRGILRGFGLKVGPTTPLRFAGRVRDLVEGQATLAAVATALLAVHEALRREFDGLDKRARALARVDGRVRLLMSAPGVGAIVALTYVAAIDDPARFRSSKGVGAHFGLTPKRHQSGEKDIAGRISKIGDASVRTVLYEAANVILTRPIKGGGLKSWAMRLAKRVGMRKAKVALARKLAVVLHRMWRDATRFVFDRGTGAAAAAA

SEQ ID NO: 469468 - protein, 384 aa, unidentified
MQTVADRPEAPTAIRTDLGAIFVSLELSRSTWLITSLSPGGGEKMSKHVVRGGDVAGLLERFAQLREKTRARTGKVFSFVVIQEAGLDGFWIDRVLQNEGIESHVVDPASIATSHRRRRAKTDRIDGEALVRALLAYKRGEPRVCAMVKAPTPEEEDRRRLCRERKVLIAERVRHVNRVKGLLFSQGISGYEPLRRDRRERLVTLQTGDGRLLPDHLKAQVCRELDRLELLLEQIKAVEAERDVLLAAQQAPAAMLLDIKGIGPEFAAILWSEGLFRHFDNRRQVASYAGLAPTPWQSGSVDREQGVSKAGNPRLRTTLIQLAWLWLRHQPQSALALWFEERVRRNGDRLKKTTIVALARKLLVALWKYVTAGVVIEGAVMKAA

SEQ ID NO: 469469 - protein, 340 aa, unidentified
MSEAVLHGGLDLHGNNVFCSLLNEARQVVFERRLPNDMATIGEVLEPYRKRIRSLAVESTYNWYWLVDGLKRLNYPIKLANPGKMQENIGLKHANDKTDARFIARQLVNGTLPEGYIYPEETRGVRDMLRRRTRLVHARTGEIISVGSLVARHTGQDLSYKELDLGELKKILAGQPHALIMGEANFRHIEFLDKEIAFLEDAVMKELPDRKDYLRLMTAPGIGPVLARAILLETGPIARFKDAGNYASYCRTVKAEHTSNDKKKGACNSKNGNKYLAWAYVEAANHAARCSPEIRAWFQRKLAKSGKRVIAIKALANKMSKACFFMLRDEKDFDVKRLVG

SEQ ID NO: 469470 - protein, 428 aa, unidentified
MMDTTNPNPSPQPLAPATEPPYLWVGLDWGDKQHSFAWQDRDGNHEEGSLTHSAENLHQWLKSLGERTGARPVRLGLETTHSAVVHALLQYPWLEIYPINPLTSARYRTAFTPSGASDDLPDARILLELVRDHADKLRPLQEQDPQTRKLAALVEARRQIVDRRTTVLNQLTSLLKSYYPQALDLLDNLNTELAIAFLRRWPELTELKAAKPGTLKRFYYQHQVRSESLVQERLDRVAKALALTTDEARLSVAVLRLRQLLDELEVFRKHVSRFDTEIKTTFASHPEAALFRDLPGAGPQLAPRLCAAFGTLRTLYPEPASLQKYVGVAPVRQKSGNQLWTHWRWRAPAFLRQTFVEWAGQTVRYCPWASRYYELMTKKGKTHAVIIRALAFKWIRILWKCWQTRTPYDEPRYLKQLLHRHSPYALKP

SEQ ID NO: 469471 - protein, 348 aa, unidentified
MVVVGADVHKRTHTFVAVDEVGRQLGSLTVSADWKGHAKALRWARQRFPGDRIWGIEDCRHLSARLERDLLAGGESVVRVAPKLMAQTRASARTRGKSDPIDALAVARAVLREPDLPVAAHDEASRELKLLVDRRDDLVGERTRMINRFRWHLHELDPALDPSPRSLDRASIRSHLTEQLARFNGIVAEMARDVLDDIERATAKINSLDKRITASVEEQAAGLIGLQGCGALTAAKIIGETANVARFRSEACYAQYAGVAPIPVWSGNTAGRVRMSRAGNRQLNCALHRIAITQIRLDSPGRRYYRKRLRAGDSPTEALRCLKRRLARIVYQALKDLQRPQAATATAA

SEQ ID NO: 469472 - protein, 415 aa, unidentified
MALKIVYKICCGIDVHKTFVVACIASTNDKGVTSYESHRFSTYTSGLKTLLQWLIDRNCKDVCMESTGKYWIPVYNILEKGCSIVLAHPKYVKAIRGKKTDKKDAKWIADLFKHNLVAGSFMPPSDIRQLRDLMRYRFKLTCFKSSEKNRLQNCLTVSNIQLGNVVSDTFGKSAQAILDKILENPADTSFDLEPLVFKSLKKKPPELRDAIDGYITPEQAGKLKVIKTHYEDLESRKAELEELILALAAPYQQELAILQTAPGISSDFTAIGIISEIGTNMEAFPSAKHLCSWAGLTPTNNESAGKKKSVRVSKAGCYIKPLLVQCANAVIKSTKHPEMRNRYLRLKKRRGHKKAIIAIARMLLTALYHMLKNGENYNPELYRKTDLPPAGREITIEQALMLIRNQGYKIKSATT

SEQ ID NO: 469473 - protein, 421 aa, unidentified
MEEITEEPVALVARVAALDIGKAALTACVRVPHETKPGARLQEVRTCATTTRSLLGLRDWLVCQGVTRVVMEATSAYWKPPFYLLEDDIAECWVVNARDVKNAPGRPKTDKLDAVWLARLAERGMIRPSFIPPRPQRQLRDLTRYRRTLTHERTREMQRAEKLLEDAQVKLSSVISNIFGKSGRDMLAGLIAGQRDPCALAALARGKMRAKTSLLQEALTGHFTEHHAFLLTMMLARIDALTAQIGTLTTRIEQAIAPFAHQVAQLDEIPGIGIIAAQEIIAEIGTQMSRFPTAGHLVSWAKFAPKARQSAGRAKAATTGEGNPWLGGTLGEAAISAARTSTFLASRYRRIVKRRGKKRALVAVGNSILTIAWHLLSDPGTRFTDLGPYWHDHLAPLRRKRQLIAELERLSGMKVTLQQAA

SEQ ID NO: 469474 - protein, 353 aa, unidentified
MHATTVAIDLAKDVFELAFAEAGNRVVERKRLSRRGFAHCLDNRPPLRVVMEACGSAHYWGRRFEALGHQVRLIAPRDVRPYVRRNKTDRTDVAGMLEADRCADIASVPLKTPEQQGVQALHRIREQLKAQRTATINLLRGVLREFGVVIPNGAAKVRPAVLSALEDGDNDLPMGLRDTLAELLEQMLALEARMARIEHHLDEFASRDTTTMRYQTVPGIGLLSATALRASVGALDRFPTGRHLSAWIGIVPREHSSGSQRQLGRISKRGDGYLRTLLIHGARSVLHAAAARRRKDQPLDRLQAWALDVQQRQGHNKAAVALANKLARRLWAMEHHGKRFDANHCSVRAEATH

SEQ ID NO: 469475 - protein, 349 aa, unidentified
MRRVYVGIDIGSKQCSATAINSMGKLISAETFRTSEMNLISFVQEQRGEVKVLIEEGELAGWVMRTLLPHTQSVEVSDPKRNAWIAKGANKSDRVDAAKLAELLRLGSYSVVYHPEEVEMAAFGIVVKQFDEASRRLTKVKCQIKAGLRRQGIMTSGTATYGKMGREKALIQIADPQVAWAIERDYDLLDYLTRDKADARRQVCLMSKRFPVIERLMRMPGVGLVLASRFVAIVGNPNRFNKRTLASFSRLGIVKRSSDGSPLGPEHIDKSGNGRMKDVSRKAFERALGTKRPNGIKDFYLGSLSRTGNKTSARLNTQRKILAVMLAVWRDGTEYSDELVTGRRALGRA

SEQ ID NO: 469476 - protein, 390 aa, unidentified
MLYVGIDIAAKKHDCCIIGDDSTVLTPVFTFENNANGFDVLLKTIRTHARSVADVKIGLEATGHYGTNLVAYLQAEGFALTVFNPLQVNLFRKAQTLRKTKTDKVDARCIAQLLMTSEQPALIPQTTDISELKSLVRHRSRMVAMRTRLKVSVSRLVAIVFPELPGAVSSIHQVTCHALLLELPTAKAIADCHLTKLTNLLFERSKHRYGRDKAIEIKTLASKSIGLHSVATGFELQQTLRVLSSLYVEMDTLDKLIKAQMLQINSPILTIPGISFTLGSVILSEIGNIEKFANPAKLLAFAGLEPAAHQSGNFTASQTSMVKRGSKYLRWAVLQAALLASQYDPTFKSYATKKLSEGKHHFVVQSHVGRKLIRVIFHLLKSNTPFISAV

SEQ ID NO: 469477 - protein, 319 aa, unidentified
MGKEIYIGIDVSKDTLDVAIYGDKQHLSFANDEAGITKIVSKLRQLDPELVVLEATGGFEVALAAELGVAKIPTAVVNPRQIRDFAKSVGMLAKTDILDARIIARFAATIQPTPHPMPDAEAQELGAITSRRRQIVTMITAEKNRLGTASKIVKPRIRAHINWLEKELNDVNRNLRQKVKDSPNWREKDELMQSVPGVGHNLSITILAELPELGTLNRKQIAALVGVAPLNRDSGTLRGKRTIWGGRATVRTALYMAALSAKRYNPVIRRFYERLLTAGKAKKVALTACMHKLLTILNAMLKYHTSWNFDVSQILGPCH

SEQ ID NO: 469478 - protein, 342 aa, unidentified
MREVTIVGVDVAKNVFQLHGAGSDGSVVFRKKLSRLQFARFMAELPRCLVAMEACASAHHWAREMARHGHAVRLIAPRYVKPFVKRQKNDAADAEAIVEAALRPTMRFVEPKSADQQARAVAFRSREQLVKQRTEAVNALRSHLYEFGHIAPEGIGYVARLARIVEDSETDVPDLARDICRMLIEQIAHLTDRINALKVRIAAMSKEAEMPRRLQSMPGVGPITALAVETFAPPMEQFRSGRDFAAWLGLVPRQNSTGGKQRLGKASKMGQRDIRRLLIIGAMAVIRWASRRGSPQGSWLARMLERKPPTVVAVALANKMARGIWAMLTRNENYRGPVLIGA

SEQ ID NO: 469479 - protein, 400 aa, unidentified
MQQDQQHDSVDVFVGVDVGKGQHHAVALDRNGKRLYNKAMPNDEAKLRALISELRAHGRLLFVVDQPATIGALPVAIARDEGVMVAYLPGLAMRRIADLHAGEAKTDARDAAIIAEAARSMPHTLRSLRLADEPLAELTMLCGFDDLAAQITQTSNRIRGLLTQIHPALERVLGPRLDHPAVLDLLERYPSPATLAAASEKTLANRLTKLAPRMGKNLAAEIVQALNEQAVIVPGTQAATIVMPRLAQQLAALRKQRDEVASEVERLVLAHPLWPVLTSMPGVGVRTAARLLTEVAHKAFASAAHLAAYAGLAPVTRRSGSSIRGEHPSRRGNKVLKRALFLSAFAALRDPISRAYYTRKVEQGKRHNQALIALARRRCDVLFAMLRDGTIYQPKAADNA

SEQ ID NO: 469480 - protein, 338 aa, unidentified
MNIVFPGIDLAKNVFQLCGLNQAGKPVYTKRTGRKELLQTLANIPACLIGIEASTGAFYWQREFEKLGHKVKVISPQYVKPFVRGQKNDGNDAQAIAVALMQPTMQFVPPKSPEQQDIQALHRARQRIVNHRTATVCQIRGLLLDRGIPIGSAVSRARRAIPLIPEDAENGPSSRMRRTIAELYDLFNDLGRRIHFFDKEIETVFRQSEACQRIAKVKGIGPETATAVVAAIGKGTEFKNGRHFAAWPGLVPRQHSSGNRQVLMNMTKKGDRHLRTLFIHGARAVVRVATNNNDGHMNQWVNQLKERRGFNKTTVAVANKNARIIWSMLRNETGYQVV

SEQ ID NO: 469481 - protein, 401 aa, unidentified
MKERRVVGLDLGIASAHTAVVLRADGTEVCRRRCSPTVESFAELERAALEGAAEGTGLEIVVEPTGPAWLPVAVFFGRRGHPVYRVPSAKAADLRRFLSRHAKSNSIDAATLARLALVDPGGLRPVELPGADRASLDRRVRAADRLTRAAAKHKGRIKDLVRMLMPACPLTGDISRADLAVLERYADPNVLLRAGKARLTAVIAQASRNLLGAERAEQWLAAARASVELYAGEGAVAFADLAAEVATEVRLLRAVEAELALHAKAREQAYHKVDPEGLARSLPGVAEVGGPVLQAAVGRAHRFGNGSQFKSFTGLTPKASETGETDRKGRPMSKAGSSLLRTQLLRSADTSSLRSTTRRWWSAERTTSKLCAWSLRTWRSGGGRCSLEGPPTSSGTSTVVR

SEQ ID NO: 469482 - protein, 342 aa, unidentified
MKQRVECLGVDVSKYTLDVAVFNGNMDWNSSHIRITNDVKGYKELLNWLKGRGVSKDQLRFCMEYTGLYSQNFRLWLESQKIVYYMVNPLKMHRYEVPTNIKGLGRIKTDKMDAYRIAIYCLQNYQLMEPAKLPSQTYFKLKRLIAERKQYVKQGSLYKQQLHDISAFDTAEAKERKKDALKSLKESIRQTDMEIDSILKEDKAIYNNYNLITSVIGIGRVNAITTIILTENFTSITDPRRYACYIAVAPFKKESGISVQGKTKVSKMGFKQAKADLSIAVASALQGDPNLRMYWDRKKAEGKASGIILNAIKFKLILRIFAVIKRRKPFVKMDAYKFSCKE

SEQ ID NO: 469483 - protein, 347 aa, unidentified
MRFYTKQHQFYCGIDLHARSMYVCILSQDGEVVLHRNMPASPDTLLKAIAPYRDHMVIAVECIFTWYWLADLCAQEGLPFVLGHALSMKAIHGGKAKNDTIDSQKIAVLLRGGMLPQAYVYPAEMRATRDLLRRRLPLTRQRAELLAHIQHTTSQDTLPEIGKTLAYKANRDGVVERFSDPAVQKSVEVDLALIGSYDPWLSDVELTIVQTAKRHDAHTLYRRQSVPGIGKIVRLVLLYAMHAMSRFPRVPDCVSYCRLVTCAKASAGKRYGTSGAKIGHASLTWAFSEAAVLFLRHNPIGQKYLARLEKKHGKGKALTVLAHKLARAVYDIWRRDTVCDMDQFFRG

SEQ ID NO: 469484 - protein, 355 aa, unidentified
MPSKADTAVARTIGIDTGKNTLHIIGLDERGAIVLREKISRARIAARFVNLPPCLVGIEAGMASHYVARELVALGHEVKQVPPAYSKPFRHGHKNDFRDAHAVAEAVERHSTRCVPIKTDGQLDLQALHRVRSRLIGNRTAVINQIRGFLLEHGIPVRQGHHFLRKQLPLILATRTDVLSPRMIRIIGDLMADWKYLDERIERVTDEIEALAHADEGCQQLITVPGIGPIISSAMVAAIGNGAAFCKGRDFAAWLGLVPKQMSTGDRTVLGRITKLGNRYLRMLFIQGARAVLLRPASWVKHSFGSWLTAATRRLHRNVLAVALANKLARIAWTVLAQGRRYEARVEPRVEPAAA

SEQ ID NO: 469485 - protein, 508 aa, unidentified
MKTKPTRANPPGPTSTAAKRKLRLEKVTKAGKGRVVDVTALDHMKQINFHAAGIDLGAAENFVCVPATSTALGESPVRAFGVFTEEMDALVEWLRVCQVTSVAMEATGIYWIVLYDKLEAAGMEVVLVEPGSVKSVDGRKSDVLDCQWLQKLHTYGLLSRSFRPDAPVRRLRTLTRHRAILVACGTDHLRRIEKALVQMNLQLNLVVSDINGETGLRILDAIVNGQRDPKELVKLRDPRCRKSTVAQMEAALTGHYTDDLMFLVEQNLAGWRFFQKQMEECDREIEKALAHIPTAKVENIPPPPPKAVPAASAEEQAAHAKRKKKSAANRGNNALTLDAVSLCQQLQRICGVNLMNVCGLNLLSVLMIIAEVGTDMSRWRSAKAFCSWLGLCPGTKISGGRILSRRSRRVVNRASTILRMAALVVGRTDSWLGRFYRRKKAHLGAPKAITATARKLACVIYHMLKYRDEFVPLDVMVYETKAAEHRLRRLRRDAQAMGLELVKKEHAA

SEQ ID NO: 469486 - protein, 329 aa, unidentified
MGRKSSMQGQVSPERSACDRVYVGVDVCKEWLDVYLHPVGLSLRVANTPTGLKRLKRELARHAIACVAVEATGKFHRLTQRHLHAAGIPVAVVNPLRSRLFCEASGQLAKTDAIDARLLAVMAESLNLRVTPPTPEIVEDLQELVRARAAAVADRTALINQRAAARLGAVKAELGRRIRALEGSIARLEQEIEATIARDLALARRFEILLSIPGVGPVAAAGLLADLAEMGTRSGKEIASLSGLAPVACDSGEAKGQRHIRGGRAHVRTAIYFAALSAARYNPHLARVYRRLLAAGKKPKVALTAVMRKLVVLANALLRDNRIWQANPA

SEQ ID NO: 469487 - protein, 358 aa, unidentified
MVDKVTEAAVVGGVDTHKDLHVAAVVDQNNKVLGTQYFSTTRQGYRQMLAWMTSFGTLKRIGVECTGTYGSGLLRYFQNAGLEVLEVTAPDRMERRKRGKSDTIDAECAAHAAFSGIRTVTPKTLDGMIESLRVLKTCRKTAISARRVALQIIHSNIISAPDELREQLRNMTRMQLIRTLGSWRPDASEYRNVTNVYRISLKSLARRYLELHDEIADLDVMIAAIVDELAPELIKRNAIGYESASQLLITAGDNPQRLRSESGFAALCGVSPIPVSSGKTNRYRLNRGGDRAANSALHIIAIGRLRTDAKTKEYVARRVAEGHTKMEAIRCLKRYISREVYTLLRNQNRRINSIPITA

SEQ ID NO: 469488 - protein, 395 aa, unidentified
MVATRSTDCSTMSACLYLAFELGEKEWKLAFSVGLGRKPRERQIDARDFNAVAEEIRRAKQRFGLAEDAAVVSCYEAGRDGFWLHRYLRSIEVKNVVVDSASIQVDRRKRRAKTDRLDASQLLKMLIRWNLGEDDVWSVARVPSVEEEDARQLHRELETLRQEQTAHINRIKGLLSLHGLTMPAISRRFPRQLAAFRQWDGSPVPPELYKRLLREFERMQHVNRQIRHLEKERAQTICHADEDRQVAQVRRLLRLKGIGPESSWLYVKEVFGWRQIRNRRELASLVGLTPTPYNSGTQQREQGISKAGNRRMRTMAIEIAWGWLRYQPWSELSRWYFKKFAKGGKRRRKIGIVALARKLLVALWKYLETGVPPAGAELGDWRKKIRYTPDLTSQP

SEQ ID NO: 469489 - protein, 378 aa, unidentified
MPSENTVHIAIELSFSSWLVAARLTGAKKSRLHRIEGGDTGALLALIAELRSRALTELGGAAEVACCFEAGRDGFWLHRLLTAHGILVYVLEPTSILVNRRSRRAKTDRLDAEGMLRVLAAWLGGDRQVCSMVRVPTPEEEDGKRPHRERERLVQEKLRIENRIEALLFTQGIRARPSLRSWERELTELRTGDGRTLPPLLRAELDRLRRRLVLILELIRELEAERAAALAAAPDEAMAQKITSLQRVRGIGANFSAVLVREVLYRSFANRRQLASYVGVAPMPYQSGGMDRDRSISRAGNPRARTTLIQLAWLWLRYQPGSALATWFRERVGTLQGRTRRIAIVALARKLLIALWRYVEAGVLQAGVEIRTGTVPAA

SEQ ID NO: 469490 - protein, 343 aa, unidentified
MQIRSVGIDLGKTTFHLVALGDNGKVLLKKKFTQKQLITFCANMQTSLIGMEACGGAHFLGRALRAQGHEVKLIPAQFVKPFVKSNKNDFIDAEAIAEAVDRDNMRFVPIKTDDQLDLQALHRVRDRLITRRTSVINQLRAFLLERGLVFAKSPARLRERMPEILENADEDLTPRMRNLLALLWNEWKELELQIEQMNDEVEQIASSDAACTRLRQIPGIGPLVATAIVAAIGNGAAFHKGREFAAWLGLVPKQYSTGGKAKLAGISKRGNIYLRKIFIHGARAVVLRCKRERIAMGAWLTALEARAPRNVLIVAAANKLARIAWAVLSSGQDYRPVQEAVAA

SEQ ID NO: 469491 - protein, 421 aa, unidentified
MQVLYERCAAVDVGKDVIAVAVRLPGDGPDGRATVKRTFKTFYGVLGDAARWLTRQGVTHVAMEATGIYSMPVYHALVEHGDFERVLVCNAGHVRNVPGRKTDLSDAEWLVQLLECGLLRGSFIPPADVKAARDVIRYRTKLTESRTSELQRLGNVLQDAGIKIDSVASKLATQSARAMVEALIDGERRPAVLADLAKGRMRAKIPDLARALEGRFGDHHALMCRLHLEHLDHLQDMIAKLDAQVEEMMAPFRPQRDLLTSIPGIGPLASAAIVSEIGADLGGWFPTPEQLASWTGLCPGNHESAGKRHRGKRRKGNQHLQPWLVECAWVAVRADGYLRSFYRRQVRKFGGFSSPIAKKKAIIAVAHKMIVIVWHVLTTGRPYQDLGADYFTSRVDPEIETRRLVAKLQAQGYTVTLEPAA

SEQ ID NO: 469492 - protein, 346 aa, unidentified
MTFVEDACAVTGGVDTHADVHVAAALDSIGGLLGVREFSATAAGYSGLRDWLAGFGQVALVGIEGTGSYGAGLARYLAAAGIRVVEVDRPDRQDRHRAGKSDALDAVSAARAAQSGRAAGAPKGRDGAVEAIRALMVAKRSAGHERTQAINQARSLIVTGPEELRARFARHTPARLMAELAALRPRPGDVPGYATRVALRELGRRARFLEAQISQLDELIVPLVTARAPGLLALHGVGPDTAARLLIAAGDHPGRLRSEAAWAHLCGAAPIPASSGKVTRWRLNRGGDRDANHALWRIVICRMKSHPATRAYVARRSKEGLSKKEIIRCLKRYVAREVYPHLRPAR

SEQ ID NO: 469493 - protein, 343 aa, unidentified
MQVSTIGVDLAKNVFQVHGVDSAGKVVITRQLRRKQVIDFFSKIPACLVGMEACGTAHHWAREVSKLGHIVRLMPPSYVKGYVKRSKNDAADAAAICEAVTRPSMRFVPIKSADQQALLMLHRTRDLLIRQRTQLINALRAHLAEFGLVAETGREGLAQLGAIITDESNRGSLPAAMKQALQAIVDQLAALELQVGALDRAIHAHHRANDMSCRLETVPGIGVIGATAIASTVTDPSGFKSGRDFAAWIGLVPRQHSTGGKERLGGISKQGDRYLRRLLVIGATAVVRQARLHPQKHPWIMRLLAKKPAKLVAVAVANKMARIAWAIMAKGGHYRAPELAAAA

SEQ ID NO: 469494 - protein, 428 aa, unidentified
METMDTNRIKEFRQFKNEIRGSEQHLIVGIDIAKDKHHAFLGTANGHTVQKGLIVENNLSGFSYLMGRVQFHMDRDGFEVVVFGLEPTSVYHKPLAEFLIEQGCLVVYATNEAIKKNRSLLDGRWDKNDMKCSANVADLISQGKCQYYDLPDIKLRDLRNLLLLRKRLRKQLHSSKMRIRNNLVAQYFPELDKFWKTREEENLAIVRWCLAPAKIAAMKFEDFCCLVISRNRGDRQKQRLFKIWDSASFSIGCFAGNGLELEAKVLVDTVKLIQAQIVEVDGAIEAICEQFEEYQYLLSIPGFGPYVSAVVLAAIGNAHRFENTHQILRLAGFDLSAIRSGKKSTTAVPVISKKGKADLRYAVYQAALVASSLTTHFAHYYHRLLDGRQREKGIRTKMRVKLAAKLLVIAWTLMKKKESFNPDYIISH

SEQ ID NO: 469495 - protein, 476 aa, unidentified
MPRKPSSRLDLVALPQLSHETLYVGVDVGKRAHVAGFLSSTLLTRHQRFEHCPALAFDNSREGFRALLDRIQTYVPLTQVQALLEVTGHYHRALLQYLQELDIPVYVIHVQKRQEGLLKTDKRDALGLANLLYNQLEKGIQVGDPLQAVRRLVSPTEAAAQLRGMVQHHYELVAESTQRKNKLTALCDELFPEFTRLLRDPNLPTALALRSRFPTPAALAAASFWELREARGRACSVSDAKLVDLQRLAAQSIGTKDPARVRGLVFEQKQLITELKLIAEHLQQLETEMIQVVEHCREGKILTSLPGIGPQAAATLIATIGTIANFERAAQLKSYFGWVPKVAQSGSSLDWTRLSPRGVRQMKQTMYLIVWRAIQWDAEWKQMYERLISSKCRYDERTRRLIGREKVIGRLAGQMTSVIYALLKQDLELLAHLAPGAEPPEPQLYDPEIHRQHRMGQYQPRGAAGKPPQVLQLPSA

SEQ ID NO: 469496 - protein, 416 aa, unidentified
MKVLSMDLGKSKTVGCMFDTSDATHTFSTVAMLPERIKQLIELARTDRVVFEVCTDAGWVADVCRELDVRFEAVNPATLTHVMHRCRTKTDRKDALDLAAASAMNKTRSVHIPLKPVREWRALMEQRAKAVERRTGRRIQTRAVFQLVAIPIPGGQKTWSAKGMATLADLAARKMDPADRDRVLIALDGLRHEDSEIAALQDLLDAIAAKDPGVQLLQTVPGVGPRLAETVVAALDGPRRFRNAKQVGCYSGLTSRQNQSGATDRSSCISPAGRIRQLRRRGPSPRGSAESTGFGLLRSSGKSYRRPTVRTRRRSRGCRARHETRVPPKRSNPRRDPNACTIVLAASAAAKAVPRTTGEGKCEDKQSLGNRLDGTSLIEGAGAEERRTGRLIRLAVKPCALPKSYEILIATSLDRA

SEQ ID NO: 469497 - protein, 427 aa, unidentified
MPYKIAGIDVHKRMLHVVVSDVQVDGEYDFTRRVFGSLPEALRSLAAWLVEQQVEEVVMESTAQYWKPVWGALERYWKPISQTREGALATSGTLHLAQALSNRGRRGRKKDFRDAERLVKRLVAHELVLSFVPDVEQRLWRTVVRTKYQLTRNRVQLHNRLEALLEEAHIKLSSLVSDLLGASARRMLAAVADGETNREILAALADRGLRATQEQLQDALGVCQELNPVYRRLIRMVLDEVASIDKRIEQLNQEAANLLRRHEDQVKRLAEVPGLGVDTAQQIIAEVGATAATFPSEKHLSSWVGACPGDEESAEVNRSRRSPQGNRHMRRILNQAANAAAKLKGSIFEILYRRYVPRLGHNQTIGIIAHKLCRLVWKILHRGIQYEERGPEVKKASKQKRTRKMIQALRRLGYRIEPSPSQSAIPA

SEQ ID NO: 469498 - protein, 408 aa, unidentified
MQVLYPHCAGLDVHKDEVVACFRRVEGRQATHEVQRFATTTRGLLELREWLESHACTHVGMEATGVYWKPVWHVLEDGFELVLANAAHIRNVPGRKSDVNDAVWIADLLAHGLIRASFVPPRPIQELRDLTRTRRQLVREIVQHTQRLQHVLEDANVKLGSVVSDVLGVSGRRIVRALIDGETDAQRLAALGHERLRCSRTELAEALHGTATEHHRFLLRQHLRTIEQLEATVAEFEARIEALLEPFRGDIERLTTIPGISTTAAQSLLAEIGADMTVFPSAGHLLSWAGLCPRLDESAGKHRSTRLRKGAPWLKPVLVQCAWAAARTKNTYLQAQFLRLKARRGPKKAAVAVAASILTAAYHMLRDGLDYQDLGPAHLARRDSARVAARLARRIRELGYEVEIRAAA

SEQ ID NO: 469499 - protein, 455 aa, unidentified
MAQGSGLTRGDRNRNRRIAAVREAVARDRAVLAVDLGEDKQVAVVMDHEGRALARKVVKAKAHQLSGLLGWAEGRAAKDGFAGLTVACEPTGHRWKALMGLADGAGHGFVCVQSLAVHKAREGDDYTRDKTDHRDAYLIGKLVIRLDCYLPERADEAWARLRHLGARRFAQVADVTSCMQQAGDLLGCAWPEPLSAAARPLQSVSWLAGMAVITGRCCGNPARLRKMGYEKFLAAVRRELPRWGGKYVRHSVVRGLWEALAGTGGVAAQRPGALERLHLLLEDWRVLRARLADTGARMTALLGELGLTELVEGIDGMSALSGAVILAETGDLNRFASGRAVVKHAGLNPSERTSATINGQARISRRGRPALRSAAWRAAWAALRHNRVLAAKHAHLTGRDANRLAGEQARTACAATLLRWLWAVITTRQPWDARVAAGEIPVPRRAPAVTCAAAA

SEQ ID NO: 469500 - protein, 315 aa, unidentified
MEQSPIAPSFVGIDVSKDRLDVHVCPTGHAFAVMRDGRGLEQLVNDLRRLAPTLIMLEATGGFEITVAAALANAGLPLAVVNPRQIRDFARATGRLAKTDALDAQIIALFAERIRPEPRPLADADSQSLAELIARRRQVVEMLGMETNRLHQARNPRVQRMLKATLKTLKAQLAELDRDIDDTIKRSPIWRAADDLLTSVPGVGDVTAHTLIADLPELGQLDRRRVAALVGVAPINRDSGQMRGRRTIAGGRIEVRNALYMATLSAIRWNPVISKHYQSLVERGRPKKVALVACMRRLLGILNAIIRTNTPWRCA

SEQ ID NO: 469501 - protein, 389 aa, unidentified
MLLDHPSNGPTAIRTQFGAIFVSLELSRSNWLITSLSPGKGEKMSKHSVTAGDVAGLMRLCEELKRKAEVRTGQSYPIITIQEAGLDGFWLHRVLQQEGIESHVVDPASIATPRRRRRAKTDRLDGETLLRALLAYKRGEPRVCAMVVAPSPEEEDRRRLCRERRTLIEERITHVNRIKGLLFAQGISGYAPMRRDRRARLEALRTGDGRELPSHLRAQIDRELDRIELLLGQIKAVEAAQDALLAAARKPASEEAAPDPVTMLLALKGMGANFAAVLWSEAFYRQFANRRQVAAYAGLAATPWQSGGIRHEQGVSKAGNPRLRTTMIQLAWLWIRHQPQSALTRWFKERSQQGRKRAIVALARKLLVALWKYVTQGVVIEGAVMKPAA

SEQ ID NO: 469502 - protein, 341 aa, unidentified
MKQEMNVLGIDIAKHVFHAVGMDDTGKIVLRKRLSRHDLVPFVAKLPMVLIGIEACSGAHYWARRFRAYGHEVKLMAPQFVKPYVKSNKNDSRDAEAIAEAVTRPTMRFVPTKDVAQQDIQALHRVRERLMGERTALVNEVHGLMHEYGIVMPKGVSKFRQAVVGKLEAEKDKLTPLSQEMFWKLVEEFAALEEQLAYYQEKLEALATTHPECQRLMTIPGIGPLSATALVAAVSDASAFKNGRQFAAWLGLVPRQHSTGGKERLLGISKRGDSYLRKLLIHGARATMRWVGRKTDRRSQWIRQLSERRGKNRTAVALANKNARIVWALLTSHQAYEPAKG

SEQ ID NO: 469503 - protein, 423 aa, unidentified
MAAVMIGAGPHKASHTAVAIDAAEEPLGQLRVRAAAAQAERLLAWAQAWPQRTWAIEGAGGLGHLLAQQLLAAGERVLDVPPKLAARVRLLATGNINKNDPNDARSVAVAALRSAGVREACGDDHAAVLKVWSKRYRDLGRARTQMACRLHQVLCELIPGGVAGEITAGQAERILASITPAEAVQAARWELAAEFTEDLRGIDARIRQTRKTLAAAVAAAGTSLTGLFGVGPVIAAAVIGDVRHVSRFPDRDHFAACNGTAPIEVSSGGRKIWRLSRRGNRRLNHAIHMAAVTQIRHRHSQGHACYQKKLAEGKTGKEALRALKRQISDAIYACLQADAQRAAARMKGPGGQPGNGSGSSAAGSHPGHRLFGQATPGPATHPTTPAADPAAGSLPVSLPSRTSGRPGPGPGKARPPSGASRRP

SEQ ID NO: 469504 - protein, 353 aa, unidentified
MKQVYAEQLYYVGLDIHKRTISYCLKDPRGEIIGEGRIAANRGALEYWRTLLPAQWVGAMEATLFTGWIYDHLSERGAQVKVADPAKLKALLTAKNKNDRSDACKIADLLRCDMLPECYMAPREIRELRRILRYRQLLVRQCVQMKNRIAGFLMETGTEYASRRLHGRKYFQQLLEELEEAVPESVVGMLGLSRSSVEVLQKMERQLLRGLLRQPALEARVRRLLSIPGVGEVTALSWALEVGEPERFASVSQAISYCGLCSAQISSAEKNYRSPISKKRNGHLQHVLVEAAKLAPRWNVQLAAVHAQAVEHGNRNRATLAVARKLVAYLLAVDRSGKAFQMRVPERADSTAA

SEQ ID NO: 469505 - protein, 439 aa, unidentified
MPRYIGLDVHKQFIEACFIDEGGKQLHRCRVAVTRESIQAFVAKCLRSSDHVVMEATTNTWEVAELILPQVARVAIANPLKVKAIAEAKVKTDKVDAGVLAQLLRCDFLPQVWIPDKTTRLLREMCAHRAGLVADQTRIKNRIQSLLAQRLIPVSVPVLFNGCGRNWLSNLELDTQDRALVNSYLRILDQIELEENALQKALTQLSYDNDQIRLLMTLPGVGPAGAQALYAALGDWKRFKDGAHAASYLGLSPSTRQSANHCFHGSITKAGNSLARWLLTQAARQVAHHPGPLGVFFRRIHKRKNFNIAVVATARKLVTIGFLMLKNGEPYRYSLPSPTQRKLSVFRVEATGNRRAKSKLRLPMQRRESGTRVQSIPSLDEVYCSENLPPIAKADALARGERRMLQQMGIADLPERLQVVQTRTYQSRKTAPAPKTNPF

SEQ ID NO: 469506 - protein, 428 aa, unidentified
MAYNDTPQRVTLVAVDIAKNYHDVLIQPPPPGRRRRVCVANNRQDFEHLAGYLQELKSSVLIGFEATGNYHRPLAYFLHEHGFELRLIPTLALARTREAMHNSWDKNDPKDAQVILHLLKTGLAQTWHDPMVNGVNDVQELSKTHFQVTLARVRVWHTLRNHYFALYFPEIDRFIRSDHSVWLVQLLASFPTPASITALSEGEFQTRAWNLVGRKVSKRALLAEIYAAAKRSIGVPVPLDSPAVAMFRLVLGQYLDLHRLREHIAEQAAIVLGDNPDSRRLMTVPGIGPANALTILAEAGDLRRFRHHRQFLNFCGLNLSTLQSGKSRGHSHISKYGNARLRTALWMAAQTAIRMRENSFRRKFDNYVRGNPLDADLRRKAYTAIAAKLARVIFGLIKSGADYRPFFEHKFQVEEPSRASAVGATSTP

SEQ ID NO: 469507 - protein, 332 aa, unidentified
MKNYEEAVGIDISKNTLDVSCHLLQCHRVFTNDFQGYQSMLNWVKKKTKNISVFYCFENTGNYSIKLASYLSQKDLAYVEENPIKIKRSSGLVREKTDKVDSAIIARYAWLYREELTESEVKSIVYQELGRLIGLRDQLVRSRSRTGLKSTLKEIEQLLNSPSTDTSCIVLRRSIENLSKQIKRVESRMDSLLREDESLSKNYNLLQTLRGIGFVVACQLIYHTQNFERFDTWRQFSSYCGLAPYEYSSGTSIHRRKKCHYLGDRKMKSLLSMSSISAIQHDPELRIYYERKVAEGKPKMIALNNVRNKLLARVFSVVKRGTPYVVLQKHAS

SEQ ID NO: 469508 - protein, 461 aa, unidentified
MTTGQTPAGLLKPQTTNAMKALQLLDPKAAAIDVGSEKLHVSIAGDTPKVFGTFTGDLESLCLWFKERGVTSVALEATGVYWLYLYEVLEASGRTVVVVNGRHVQNLPGRKTDMADCQWLATLHAHGLLRGGFVPPADIRQLQDYQRLRGDHLIGAAGQVQKMQQALERMNIKFHDVISDLTGVSGLKVVRAILAGERRPEELLALCDVQIQKKKAGAVKESLRGCWKKEQLFTLRQALELWETYQQKIADCDRELAAQLHQLAGPLPPGDGAGGGELKLAPAKSPGKNAPVIEQLQELLARVCGGRDATQIPGLSPYLVLQLISEVGTDMHRWPTEKHFCSWLGLAGGRKQSGKRKGSVKAHRNRAGRMFCAAARALAQSVDKALGGFYRRIRGRLGGLAANVALARKLALLFYRLLRHGLEYVEKGLKSYEAKVLETETRLLAKLAKKQGFTLVPTHPS

SEQ ID NO: 469509 - protein, 375 aa, unidentified
MKEKVRFLGLDVHAETIAVAVAEPDGEVRSLGTIANRVESIRKLVKKLGPVEQLRACYEAGPTGYVLYWQLTELGVDCAVIAPTLVPVKAGDRVKTDRRDAERLARSYRSGDLTAVWVPDAGCEALRDLVRAREAAKQDQLRARHRLSKFLLRTGQRAATGLKAWTQLYMAWVRQLRFEQAAQESTRMDYLHEVEHMGERVVRLEQAIAEAVKLASPQMQEVIRGLQALRGVAQISAVTIVAELGNISRFESARQLMGYSGTVPSENSSGKRQQRGSITKTGNAHLRRIAIEAAWSYRLRPGVGPALRKRQESVPEEVKEIAWKAQHRLHKRYARLAAAGKDQRKIVTAVGRELLGFIWAIGIKAETAARQRMAA

SEQ ID NO: 469510 - protein, 341 aa, unidentified
MTTIGIDTHKATLAACAVDELGRPLEERTFANDPAGHRALAVWAEAVAPAGRIGLEGSAGFGAATARFLLAAGRVVREVPPQLSHRERRRTRRAGKSDPGDALAIARVTARELDLPPVRGADATREMALLVAAREDLVAEATRVRNRLHADLVVLVPGYGASAANLVAARNRESAGRLLRPLRGLQAELARDRLARLGRLTSEAKALELRLGGLVADHPLRRLPGAGVLVTAKLIGEAGDVRRFRSADAFAMLAGVAPIPASSGQTQRLRLNRGGNRQLNRALYVIALVQAWHHPPAQAFIARKRAEGKTWREALRALKRHLARVVFRLLTTPAAEARLAA

SEQ ID NO: 469511 - protein, 319 aa, unidentified
MAQKDLVVVGIDVAKDKVDACVRAHALRQTFPSTVQGHRKLVGWLRKHQVGKAVMEASGGYERVWAKLLREAGIEVRIVDPKRVRSFALSAGRLAKNDAIDAEMIAWFAETFSDAPAQKHDAAREELQTLVKARLGLIDVRMRLVSQSEHAAPGLVQKARAHILKSLASEIAKLEAAICAKIKSVPDFAERAEIIESVPGFAETSSANLVAGMPELGQVSDEIAAALIGVAPYDDDSGKRHGERHIKGGRRWVRNAIYMPCVGAATRNNPVLKAYYQRLIAKGKEPKVALIACMRKLIVILNTMIARRQKWDPSRYAVS

SEQ ID NO: 469512 - protein, 432 aa, unidentified
MRGCRCSMIMSFTKPIEHANLITKEGNLMNPLYVGIDVSIVHFMLPNGDKHSNFSVANSHDGSTQLVKRICSALTSESLDTVSIGLEATSVYGDNLVYFLREDASLASFNRKIHVLNPKQVKKFHDTYNDLPKNDYVDSFVIADCLRFGRINKEVYMGDYRYKALQNLTRARFFAVQNLVKEKQRFMNVLFKKYSTMTQEKVFSDTFSTTALAVYDEFESAEALANMDLHELTDFIMKKGKNRFPDPDAVAKAIQKAARSSYRLPKTVNDSVNQVLSISITSMKALESQIKEFDKAIKAQMELLPNVLISIPGIGPVYSAGIMAEIGDINRFNSQAALAKYAGLAWKQHQSGGFEAEVTRLIPSGNRFLKYYLCEAAFSLVRCDKEYSDFYHLKYKEVNRCQHKRALALTARKFVRLVFRLLKDNRLYCPAK

SEQ ID NO: 469513 - protein, 350 aa, unidentified
MMIIGCDLHTRYQQVAMLDTETGELGERRLEHENGEARAFYAALQGTVRVGIEATGHTHWFEAMLAELGHELWMGDAAKIRASVIRKQKTDVRDAAHLLDLLRQDRFPQIWRPSPAERDLRQLVWHRQKLVWMRGAVKNQLHALAMGEGVCRKKKLFTAKGRKELEGLALGPWASYRRQELLRMFDELAAATAQLDLAVEQAAKNQRLAARLMTHPGVGPVTSLAFVLIIGPVERFPHSKQVVSYLGLNPQEHSSGGKQRLGAISKQGNPMMRSLLVEAGHTAARFDPALKRTYQRLKFRRGASVAKVAVARKLAVRMYWMLRSTADYAQLVRMQGSPWATLVEDSPSLG

SEQ ID NO: 469514 - protein, 415 aa, unidentified
MKVVYPVCCGVDVHKSFLVGTIIATTDGIQPHYQKKRFSTYNGAIRAFKDWLLAHHCLDVCMESTGKYWVPVFNILEEHGLRVAIANPKWVKAVKSNKDDAKDSKWIGDLFRLGLVPGSFIPPKPIRILRELTRYRSKLVSMKSSEKNRFQNAFTVCNVSLDSVVSDMFGKSASAITDYLMSDEAFQPEHCVSLLQRSLKKKAGAVLESIEGFSIAPEQKSRMRIVRAHLAYIESTIAQVDSLIDSMVSEQQHIISLLCTIPGVDRRSAITILSEIGTDMTQFGSSKRLCCWAGLTPGNNESAGKKKSVRITRAGVYLKPALVQAAHAAVKSNDSPYFRFKFEQIAKRRGKKRAIIAIARMILTAVFAMLSTGEVFNPCDLYKIDMPEALKAKQLDKALRQAIRLIESQGLSLVS

SEQ ID NO: 469515 - protein, 357 aa, unidentified
MGMLEGQVRFVIGVDTHRDTHTAAVCDPTGAVRTHATVATTTVGHRRLLGWARRQAPGRRMWAVEGTGSFGAGLTSLLVDHGELVVEVDRPKRPARRNGAKSDVLDATRAAREVLAREQLAQPRARGDREALRVLLATRRCAVDARTKAINQLKALIVSAPPALRERLRHRCTAQQVRCCARLRVHHSHSIEHRVTVQAMRATARRVLLLEAEAAQHQAELDRLVNHLAPFLLNELGVGALTAAQLLVSWSHPGRVRSEAAFAMLAGVAPLEASSGRVTRHRLNRAGDRQLNPALHVIALTRLRQDPATRLYVARRRAQGKSDKEIRRCLKRTLARQLFRLMQRQLTPHQPRRLNRT

SEQ ID NO: 469516 - protein, 449 aa, unidentified
MRKPQVIEDQQHERVFERVAAVDVAKASGMVCTRTPNPSRPGTRHSTVWQVPAAMNAVLALAGRLVADGIEMVTLESTADYWRIWYYVLEGAGLAVQLVTASQARNLPGRPKTGRLDAMWLARLTEMGMLRPSFVPPAPVRVLRDYARARTHLVQDRTRCWQRLEKLLEGALIKVSAVASKLTTVSAQDMIKAMIGGQRDPHVLAGLARGRMKAKHDALVEALTGMFDDHHGELAQMLLDQIAFCDTRIAVLATRIEQHLAQIPAAWGVDADGSTGPSAGTGADAAVLPAAARLAEIPGVSAELARSIIAETGLDMSRFPTAAHLVSWAGLCPSARQSGPRTGNGKKGQGDGYLRGYLGQAATGAAGTATFLGERHQRIARRRGRAKAQVAIARSILVVIWHLLNDPQARYTDLGPGYHASRTGKDKKIRNHIRQLQAPGLTVTIAPAA

SEQ ID NO: 469517 - protein, 426 aa, unidentified
MSKSDYNRQVARRQRIKKTTLIVGVDIGNAFNAVGFMNKEGNVLGSCAKLYNSREGFEQFVNMIDGLKAKHHLRDVLIGMEPTGHYWRKLAYFAKDHGYEVRFVRTTALKHHRELDESSSAKSDQRDALTIANITREGKYIDTVIEDGVLRQLRTLSKARERLLRYSISAKNSLHAALDDYFPELHELFWSMGSRSLWVILEQCPFPQDVMLMEVSTLQELIARSSRKKAGSALKAEKLTEASQKSIGVKQIGSADRYRVQMCLEEVKRTVLSLKNIDKQLKYLLKETSAASYLMSIPGIGPLSAAVFLGELGDPAHFHNARQIVKYAGYDPQESDSGSRIGRKFISKKGRWLLRKYLFFMSMRVVVLSNYFQEYYLRKLETKNRVGQQPRRKEILCAVAIKLIKVIFALLRDKREFEDLAPAVAA

SEQ ID NO: 469518 - protein, 417 aa, unidentified
MSTINSNTLYVGIDLSLKSNQVVVTDTSGKQLASFAVGNDLPGANKLKERIIQIARQYQAATIKIGMEATSLYWWHLYQFLVQDETLNKEYLLDVFTLNPKLVKRFHKATADLDKTDPIDASVIADTVRFGKVTQSHLIDEVYEPLKRLTRFRCHLVTSLIVEKNYFLTHLFLKYSSWQKIKPFSSAFGTTAQEIISEFDPEEITSLSITELAERMIGLSRNRLADPVKTALLIKEVANSSYQLANKLKEPIDIILTNTYDNIRYFTDKIKTIDLVIEKEFSRYHNPLTSIKGIGLVFAAGITAELGTTSRFRRQSQVGKYAGLAWKKSQSGEFTAEETPRKPGNSYLRYYLVQAASSLRVHNEEYKAYYERKYTEVPKHQHKRALVLTARKLVRLCFAMLRDQRFYQPGYKKEGNP

SEQ ID NO: 469519 - protein, 354 aa, unidentified
MPLTPPYDTIGLDLHKRETQLCLLGADGSVTERRIATTRPQLTAVLGGRPPARVLLEASTESEWVARHLESLGHEVVVADPGYAPMYATRSRRVKTDKRDARTLAEACRLGAYRPAHRLSEAQRHVRAELAVRDALVRTRTRHVAVLKALVRRDGLRLAAGTPERTAAKFAVLDATGAVSDALRTEVAPLLALLAPLNDQIAAADRRIAALAAGDPRVRRLTTAPGVGPVTATAFVATLDDVGRFRDAHQVMSYLGLVPSERSSGERQHRGRITKAGSPRVRWLLVEAAWRTLRAPGPDGATLHAWARRVAARRGTKVAVVALARRLAGVLYVMWRDGADYCASRVRTREAAAA

SEQ ID NO: 469520 - protein, 409 aa, unidentified
MKADSLHYKAVRIGSNGAPRMQKPSTIDIDPVIYLAIELSASTWLVVSKIPTSEKTGLHRMEAGNSQALIALIADLRKKVSAKLGVESAVMSCFEAGRDGFWLHRLLSEHGVINHVVEPTSILVNRRARRAKTDRLDAQGLLRILTAHAKGDHDVCSVVHVPTIEEEDAKRQHREREHLVQERVRIENRIAALLTTQGVRKRPSLRSWQKDMEEMRTGDGHPIPPLLRAEANRLRRRLVMTLEMIREVEAEREQALQKQDDTASRTIQALRQLRGIGDNFAAVLTREVFYRSFENRRQIASYLGLTPTPFQSGGMDRDRRISRAGNARARKTLIQLAWLWLRYQPDSSLACWFRERVGNLQGRTRRIAIVAMARKLLIAIWRYATDGIVPEGAQIGRRLVHEAFWLLGY

SEQ ID NO: 469521 - protein, 380 aa, unidentified
MVNSTATSNEQSICAALELSKNSWLLAIQVPGRDNPSLHPLLGGDAEGLMAKLDAARDRVAKATGQPPAVTLCYEAGYDGFWLARFLEQRGITCQVMEPASLRVNRRARRVKTDRIDVENILHTLIAWCRGERHVCSMLVIPSVEEEDLRRCHRERDRLIRERTAHTNRIKGLLFGQGIRGINVKSRYKTLKPSELVTGDGRPLPDRLGREITREIERLAQVQAQIVAVERERDHPVTSCAATEIKRHDLLRLKGLGPALSSTLTREVYYRRFTNRRQVASYIGIAPSAYDSGDGHRSQGISKAGNRLARVARVEAAWLWLRHQPDSALSQWFHDRTQGQKGRIRRIMIVALARKLAIALWRYLETGLIPEGAILKSRVR

SEQ ID NO: 469522 - protein, 410 aa, unidentified
MTKEDFIYVGIDLHKETHTAVMIDCYNNKLGEITFPNRPADFPKLVTKVKKCNTDAKEVVYGLENAYGYGRALAVWLIDKGYFVKDVNTAISHRQAKHRGAMYRKSDSDDAEAIALATLNMLDKLPDACPNDAYWSLGQLVHRRDNIMKQRTRLVNQLHEQLCIVYPSYKQFFNDISRPTALYFWEHYPSRKYLKGKSVEDLRAELVPVSHNKCSTKTCEKILDAIAGDKVKNNAYQDARDMVTLSIVSDLQHYDKQLAEVDKMLEQMYKMLGCTLTTIPGVNVITAVKILAEIGDIKRFSNANKLAQFAGIAPLHLSSSGKGKDLATKQGNRRLQATIYFLAIQMVQVSSKGTPRNSVVRAYYEKRKAEGKTSQQALICISRRLISIIYGMLKHGTEYRMPVVESAGEK

SEQ ID NO: 469523 - protein, 467 aa, unidentified
MNRQQRKELQRQLNAADPGLQVVHPDAAGIDVGNESHFVAVPAGRDSHPVQEFGSWTADLHRMGEWLKSCGIQTVAMQSTGVYWIALQEILEQYGIEVFLVNARGTKNLPGRKSDVQECQWLMKLHTYGLLRNSFRPPEEIRSIRTIWRLRDRFVKDAGRAIQQIQKALTTMNIRLANAISDVSGVTGMAIIHAILRGERDPRVLAKLRDGRIQASEAEVVRSLEGNWRDDVLFELQQVVDCYEFYQQKMADCDQQLKGYMAELPDRKVENETAAIAPEAAQGNKKAKKRRSKTRRKNQPNFDIEAELRRSFGVDLTRIDGIKIMTAQVILSELGPDLSAFPNEDHFASWLELTPRRDITGGKVIKQKARESKNRVANALRMAAESLGRSDSYLGARYRQLRGRMEGEKAVKAMAHYLARLVYRLLTRGQEYVDRGAAYYEGKRATRDMNYLKRKATELGFKLVPAA

SEQ ID NO: 469524 - protein, 409 aa, unidentified
MRLFVGLDVSSFDMKVCILNGEGEKLNAFTVTNDLPGATLLKERLLDCIGDQEVDVLKIGLESTSVYSFHPSMFLHHDEDLKVFGAKVFVMNPKQIANFKKSYSDMNKTDEIDAFIITDYLRFGRNQMSVVKESQYVALQQLTRSRYRLIRMMTKEKQHFLQHLSYKCNTFSQEVDSSVFGSAMMELFLEKYSLEELAHLPLEELAAFLQEKGKNRFGDPKCVATSIQKAVRSSYRLDKVVEDSMDVILGTSIEVIRTFQKQIKEIDKAIKKLMAGLTNTLESIPGIGPVFAAGIIAEIGQIDRFDDETKVAKYAGLYWRKHQSGRFTAEDTSLSRNGNHYLRYYLVEAANSVRKQVPDYRDYYVKKYSEVPKHQHKRALVLTARKLVRLVDALLRSHQLFTPERGVKI

SEQ ID NO: 469525 - protein, 354 aa, unidentified
MFYSGVDLHRRSLTVCTVDESGKVIGRTMMKTDPALVLAYFRRWPGEHRTVVECTTGWYWFSELLRTNGISVVLAHAKYLKAISYANVKTDAVDAETLAQLLRMGYIPEAHQLSPHYRALRDLLRQRLVMQHRRTNLIQRIASILAQFNITAFPVAPSHSGFADFLQECEIPPEYRMTLLMHHQECLQVTEHRKQLEKYFKERLQPTASFQSLITIPGIGDITGSIIAMETGDIHRFPDDKHYCSYCRLVPGAKDSGGKHSHRSGSKDGNQYLKYAFTEAAIKAMMFYPEIKAFATRLEKRAGKTIARTVVAKELAKIVYYVLARQQEFKSFKGIEINKLRDWPRARKPVRLTG

SEQ ID NO: 469526 - protein, 474 aa, unidentified
MTIRSVGIDFHQGQHRARCLDERAQSCDSFGFQTTPEGLATLEEHIFRDGSNPIVVFEPAGLPWLTVAAYLRSRYPDCRLVKAKTQKVAALRRYLRGPVKSDRIDALTLAKMPFIDPEQMEEIYLPSAEIHALQRLTRQRKRLEGDIAGRKVRIEAIIDGYLPGVHRAFSSPWATQVRAFLRSRLNPFAVVRNGEKALVTFLSKAASREKGSRAESHQVFQACQAVANICELSQSARTINEEFFVELQDEIARELRLMEIEEAESKSLENRISEIYQKLHPSNNLCTIPGVGEHTAPVFLAAIGDPSRFRNQSAFANWTGAVPGSRQSSNVEAKGLRMTKAGPSIMRMALFQSGDIGRRWDPQVAAVYYREMVHHGKNHKQDMGAVMSHLGARVLKVLLEDRPYELRDIQGKSITREDARRLILTEYHVPEDIRRERRRRNSVKAYKTEREMPVSRTNEAAKAPQPVKIMAISR

SEQ ID NO: 469527 - protein, 356 aa, unidentified
MSIVAERYKFVIGVDTHAATHSLALVTAATGAHLDEAVFPNTVSGWDRAWNWIARRIDGQSALVVIEGIGSYGAGLAERVSSAGLPVAEPPAIPAAQRRGVGKTDALDAVRIARSVLAVDTARLRQPRATGRRAALRILVVAREQMVAERTRVINALTALLRTVNLGLDTRKALSQSQFKVIAQWRERKEDAVLSTCRHEAIRLAKRIVALDAELADNRKGLDVLVEDLAPQLCELPGIGSVVAASVLTAWSHPGRVRSESAFAALAGTCPIPASSGNTLRHRLNRGGDRRLNRALTTVVIVRMRTHAPTRAYVARRRAEGRTTKEIMRSLKRYVTRQLYRTLAAAHPVPTPLDTI

SEQ ID NO: 469528 - protein, 416 aa, unidentified
MKKGQDTRGYERYLALDIHREYILVGGWNEKKEWILTPRRVSIEKFPEWAKKNIREGDIVVLETTTNVWTVYDIVAALASRVLVANAAEVWELAGARVKTDKEDIKRLLKLLVGGIVPEVWVPPMEVRELRAFVSYRSRLVTTSTMIRNRLQSLLHKHNLLLSEAGLLDQTWWDAQKNMSPLEKMQIRQELVLLQEVEKLKDAVDEELQRQSTSTTWGKQALQIMQLPGIGFVVAMTVLSAIGDISRFESAKQLVGYAGIGAGVHDSGKTHKEKKITKKGRRELRWAMVEAAWRSVRMSPFWKEEYEKHLKRMRKPNQAIVVIARKLLIAIWHVLSKEETDIHASEEDLAYKMLLLSWSLKEDTRRGLTYKQFAKYALMKLGVETDITRFVRRNVPRRLAAKDEVLARMTELGLST

SEQ ID NO: 469529 - protein, 342 aa, unidentified
MLYVGIDVAKNKHDVTALNVPGKTVLKPLTFSNNKAGFELLDLSLRQLNQDCLIALENTGHYAFNLLNFLHEQGYKVYTYNPLLIKKFAKSLSLRKTKTDKKDAHGIALKLLSDPNREQFQHDNRQVELKILARHIHRLKKKQSDWKVQYTRCLDIIFPELDKIVGKHSEYTYQLLTCYPNPQKRLEAGFDKLIEIKRLTASKIQDILSVAPRSIGTTSPAREFEIIENIKHYKRLIDKAETCVNDLMAEFNSVITTVTGIGNRLGAVILAEIQNIHAFDNPAQLQAFAGLDSSIYQSGQIDLAGRMVKRGSPHLRWALIQAAKACARFSPAFKAYLKTKLE

SEQ ID NO: 469530 - protein, 417 aa, unidentified
MTNEARWFAGIDWASQTHQVCLIDVGGKIIGERAFGHGGAGLTELCAWLLARTGAAPAAIAVAIEVPHGPIVEALLEHGFQVYAINPKQLDRFRDRFTVAGAKDDRRDALVLSDSLRTDRHCLRRLAAEDAVVIELREWSRMTEDLQQERNRLANRMREQLWRYYPQALAIGDDLAADWFLELWAAVPTPAKAARIRESTLERILKRHRIRRVTAAEVLRTLRQPALRVAPGTAEAASAHIRAVGERLRLVNRQIREAHQRLDALCAELAGDGGERPPGQEPEQRDATILRSLPGVGRIVLATLLAEAAEPLRRRDYHALRALSGVAPVTRRSGKRCIVVRRQACQTRLRDAVYHWARVAIQHDELSRRRYAELRKRGHSHGRALRSVADRLLAVACAMLARQTPFDPEYAAKRAVA

SEQ ID NO: 469531 - protein, 392 aa, unidentified
MVISVGIDVSKDKHDCFIVSSEGEVLADVFTIPNNLDGFTCLLQRIRECTTPQDKIKVGLEATGHYSYNLLGFLLDNGLTTYVLNPLRTNLYRKSLSLRKAKTDRVDARTIASMLLSDAGLKPYTDTAYHNEELKSLTRYRFDKVKERSKLKSSIARLICILFPELEKLVPSLHMASVYALLEEFPGAKQIAAAHLTRLKTLLETASKGRYKRNMALEIRDAARNSIGAWMPAKSLELQHTIRLIRELDNEITEIEEQIQAIMDELNSPITTIPGLGFRMAAMIFAEVGDFTRFDSPDKLLAYAGLSPSTYQSGQLKNCYPHMEKRGSRYLRYALYNATKYVCHWDPTFAAYLAKKRAEGKHYNVALSHATKKLVRLIFAIEKSRQPYCSAT

SEQ ID NO: 469532 - protein, 381 aa, unidentified
MFNLPVFVGVDYHQKTLQICVMDQQRKILTNQSVANDPEAVFRVVAPFGANIHVAIEASTGVADFAEKLIAQYQWHVELAHPGYVARMKQTPDKSDWTDAKLLADLTRAGYIPRVWLAPKYIRDLRELVRHRHALVEQRKQVKLRLRALLRNHRIDGSYNPWTINGKKWLLDKENISSAHLLFLLRDHYDTIEYFDKKIASATEQMQLHVVDDAVVKQLLHQPGIGVITAITMRALIGHFDRFRTGKQLAHFCAVCPRNNSSGGKVTTGGLIKAGDEVLRQVLIEAAHRLIRFNPQWKAMAERLRANGKKTCVIVTAVANRWVRWLFRQMVETTLVEKSDVGFLRHEQESTPAASNKAKSPSDVGPMGLATPEGFVHNVLP

SEQ ID NO: 469533 - protein, 393 aa, unidentified
MVCVGIDVAKDKHDCFIVSSEGEILADVFTIPNNAEGFDTLLQAIRRSTRPEDKIKVGLEATGHYSYNILGFLLDKGLPTYVINPLHTNLYRKSLSLRKTKTDRVDARTIAAMLMSDVDLKSYTDTAYHNEELKSLTRYRFDKVRERAKLKQSVSRLVTILFPELEKLVPSLHMASVYALLSEFPGAKQVAGAHLTHLKAVLYDASKGRYGRDMATTLREAARCSVGSVMPTKSLELQHTIRLIRELDAEIEDIEAAIQSMMDEMQSPIMTIPGIGVRMGAMILAEIGDFSRFDSPDKILAYAGMSPSTYQSGQLSLSGAYSHMEKRGSRYLRYALYNATKYVCLWDPVFAAYLAKKRTEGKHYNVALSHAAKKLVRLIYAMEKSRQSYRNAA

SEQ ID NO: 469534 - protein, 317 aa, unidentified
MSMTEHFIGIDVSKTQWDLAIHMTGKPWQVAYDTAGVKQVVKYLRTLAPTLIVLEATGGLETCVVSALAAAQLPVAVVNPRQVRAFAHATGTLAKTDRLDAHVLAHFAAAVQPTPRPLPDAATQQLSAVLTRRKQLVDMMTAESNRLGAQPNPAVRKRGRAHLAWLTKEGGRTEKELTQLIQQSPLWRVQDDLLQSAQGVGTVLSQTLLADVPALGHLTHKKMAALIGVAPFNRESGGYRGNRRIWGGRARVRAVLYMGTLVATRHNPVMKAFYERLLAAGKEKKVALMACMRKLLTILNAMIREQVKWQDRRSITH

SEQ ID NO: 469535 - protein, 369 aa, unidentified
MRTALHEGRWPPALVRGVRRPSHLRQQPWVSLGTACRSVTHDRTVARLSIAWTRQVTVTQLICGVDVSAARLDARLGAQGVTRRFERSAAGIAALAAWCREAGVGLVAMEATGGYERLPFGLLWSDGIPVAIVNPRAVRRFAEAMGILEKTDRIDAGVIAWFAQVKRIVPQPPASDAQHRLAALVTRLRQLTELRVAQSNQRRLVDDETASRSFDELLALIARQIRGFETQIAALIQADPIWKELDRAFREIKGVADRTVARIMAEMPEIGTLSTKAVGKLGGVAPLAHDSGKSTGKRAVRGGRAGIRSILFVVADIVRRCDSDFAAFHRRLAQAGKPKKVIRIALAHKLLVRLNAKARDVRRKLAIAA

SEQ ID NO: 469536 - protein, 350 aa, unidentified
MTTVAAPAPLVAGGVDTHLDVHVAAALDPLGALLGTAQFHASAAGYRQLLEWLRSFGDIGRVGVEGTGSYGAALARHLTSSGVDVIEVSRPNRQVRRRHGKTDTVDAIAAARAVMSGEASATPKTHNGSVESLRVLKVLQRSANKSRTQAINQLKSLLVTAPPELRAKLQRLPMRDLLATCAAFRVAADDDTLPGLTRFALRDLAQRIQFLDERLDQIERRLRRITIAVAPELVALHGVGPDTASTLLITAGDNPERLASERSFAALTGCSPIPASSGKSHRHRLNRGGDRQANSALWRIAIVRMASDERSKKYIAKRVSEGKSKIEAIRCLKRYIAREVFAALPQPAAA

SEQ ID NO: 469537 - protein, 441 aa, unidentified
MLPQTRSPECMETALSSGNTAEVRPFHLGLDMSLHTGTACLLDHLGREIVPRWTFRNNRPGAEELAQKVAELLKRHRATILLVGMEATGLYGWHLACFLSDTSLLHPWEARVYVFNPHRTLNFKRAMGEPGKTDRVDALVVAQWLRVGHLPVPFAIDTVYGPLQRLTRFRYHLTRTITREKLYTLGLLFLAFSEFGAAAPFKDPFGATSQAVLEELSLDELATKPLEELTTYVARNGRGGFADPDRVAQTLQQAARDSYRLNKVHAGATRLVLSVSLTNIRTLTRHLKEVDAAIASELKAIPLAACLLSVPGLGPVYTAGLLAEIQNIHRFQDHAALAKFAGLTWRSHQSGDFTAEETPLTKTGNTYLRYYLVEGANSVRVREPEFRAYYQVKYHEATKHHHKRAVTLTARKLVRLVDALLRGAQLYVPPGQRHGGRAAGA

SEQ ID NO: 469538 - protein, 362 aa, unidentified
MEFFSGLDVSMERTAICVVDDKGQVHAQSEVVTDPATIAAALKLFLPRLRRVGHEAGSLSPWLHPELLKCGLPAVCLETQHVRAAMSAQRNKTDAADALGLAHIVRTGWFRRAHIKTESCYRLRLLLTQRRNLKRKVLDLENTIRHSLKAFGIRIKGTGRTGFDAAVREAVAGDALTSELMDAMLAARAMLWKQYCRLHDLVVKVVARHELCRRFMAIPGVGPVTALSFVTAIDDPSRFRRSRDVAAYFGLTSRRWQSGTSIDVQGRISKAGDPDVRRALYEAASALMTRFKGRDKVRTWGLALARRSCHRKATVAVARKLAVIMHAMWTDGTCYVGDAAASASDRAARAAVKDSKLLGAQA

SEQ ID NO: 469539 - protein, 365 aa, unidentified
MTETVYCGVDFHARMQTIAYCDSANGEIQLAQLDHRKDDVREFYSKLTGQVIVGLETGGYSSWFEAMLEELGHTVWIGHATEIRRRANWRQKNDRRDAELILEIMLRGDFPRIHRHSRESVEVLRMLRYRARLVKMRTMISNNLQAIAISSGLTERSRMLSRAGQQRLKNARMTPVTKHQSEDLISLLDPLNERIAKAERWLKEQASTDERVKLLMTHPGVGVLTALGLVHTLEPFNRFTRQRAVVAYVGLEPMERSSAERKRYIGISKAGSRLLRFLLGEAAHVAVRFDPELKQFHERVGKRRGKAKATVAVARKLLIRCWIMLRENIDYAEFRSRGVEARLARLGHRPTMPEVVIERPASSDR

SEQ ID NO: 469540 - protein, 413 aa, unidentified
MADVHFKQVVSRGCGMDIHKKVVVATVQGEAIPKETRKFETFTSSLTQLREWLVSLGITHVAMESTGVYWKPIYNVFEDYIRNIWIVNARHIKNVPGHKTDKNDSEWICQLLMAGLLKPSFIPPRQQRELRDLTRYRRKLIEMESANKNRIIRTLEDGNVKLSSVLSDTSGSTATKLIDMLCDGRTLTLADIEAVRNKRCHHSAEEMLEACTGYMNSHKIYMLQKIRSCNMRLTEEITEMDRHIKEILLPYREIIARLSEIPGVQNRTCEELIAEIGLDMGNFPTAAHLCSWAGMCPGNNESAGKKKSGRTSHGDKHVRATLVEAAWAASRTKGTFFMERFNRLASRKGSKKALIAIGHSLLKCIHYVLSTGGRYKELGDYYVPEKKEKQRKEYLKGELRKLGYDVALTKKKD

SEQ ID NO: 469541 - protein, 331 aa, unidentified
MNVKETVGIDVGKITNEVFIHIAKKSKSFNNTEKGITSMVKWVLASTEYSKEEILFVFEHTGLYSYILAAHLTEQGYLYTMLPGLEIKRSMGIVRGKDDKIDAKKIALYAYRRKDEIKTYRLPSDNIKEIRSLISLRERLVKQRSGYKASLGESKIFLKRKGNSTLFSVQERMIKELTKQIDKVEKKITDIVNKDENLKRLYKLITSIKGVGEQTALLMIGLTDGFTRFKTWRQFATYCGIAPFPNTSGISIRGKTKVSNLANKRMKTLLDLCAKCSIQHNNEMKLYYERRLSERKSKMSTINIIRNKLLARIFAVVNRGTPYVDTLAYCS

SEQ ID NO: 469542 - protein, 378 aa, unidentified
MSASIIYLGLDVHKDSITIAVLPADAPTPTQVDRLPHDSRKLRSYLARLAGHGALRCCYEASGAGYVLHRQLTQWGYPCAVVAPSLIPQRPGHQRKHDRYDARQLARLYRAGELTVIRIPTAAEEAVRDLVRCRAAFQRDLLRSRQRVLKFLRRRGLPYTRGKSHWTQAHRRWLAALLAQPASAGLGAEDAMVLGEQLALVGYLEQRRVELDRQIQALALTPTLQATVGRLSCFRGLDTHAAVVLATELGDWQRFTTAGQLMAYVGLVPREDSSGPRERRGSITKAGNAYCRHVLVQAAWAYRHPPAVGAALRARQAGQPAAVVLHSGKAQQRLHRLYRRVAARRGAAVAVVAVARELVGFLWAVEQAPSGGPQLAAA

SEQ ID NO: 469543 - protein, 338 aa, unidentified
MEAYAGIDLHSSNSYIGIIDEQDRRHFSKRLPNSLTQILVALEPFKKDLKAVVVESTYNWYWLVDGLQEEGYKVHLANPSAIKQYEGLKHTDDKWDSFWLAHMKRLNILPEGYIYPKEERPIRDILRRRLLFVRHRTAQILSLQSAISRNLALKMSGRAIKKLKEEDAKDLFDSPFLALTVKGNIEVIQFLTKTIKAIENAVKSQAKLRKEFQLLKTIPGIGDILSLTIMLEVGDINRFPKVGNYSSYCRCVKSEKLSNKKKKGENNRKNGNKYLSWAYVEAANFAIRFSKEAQKFYQRKTAKTNKIVAIKALGNKLARASYYIMRDRVAYDPDKLFG

SEQ ID NO: 469544 - protein, 392 aa, unidentified
MSHQDYHFDASRSLTALEQGSTIVAVIEMSQSKWLVAALVPGVERHPLKKFDAQEEGLLKLLHRWRNEAGQAGREIKRIVVAYEAGRDGFWLARWLRARDVEAYVIHPTSIAVSREHRRAKTDRLDTELLMRAFLGWLRGEKRHCSMVAIPTIEEEDARRPNRERQNLVTEQTRIVNQMKAIFVRFGIRAFRPTLRKVEGKLKDLRTAEGSPLPENTRAELCRHLARLRVVRDQIRAVEQERLRKLAAAPAVEKGSHVMVRLIARVLGVGIETADMLVNEVLSRRWRDHKAIARYAGLTGSPDESGKRRRERGLARAGSARVRCGMIQFAWRFVRFQKGSALAQWFAARTADRRASTRKTMIVALARKLLIALWRLATRGEVPPGIILRPAS

SEQ ID NO: 469545 - protein, 413 aa, unidentified
MQVEYERCCGIDVHKETVVACVIGPGAEGKPVKVTRTFSTLTGELKALAQWLTEQAVTHVAMESTGVYWKPVYNVLEGQFELLVVNAEHLKKLRGRKTDVADAEWIADLLRHGLLKGSFIPSAQQRAWRDLTRYRTTLTDERSREVNRVQKVLEDANIKLASVASNVVGVSGRAMLEQLIQGTTDPATLAELAKGRLREKRDLLEQALTGTFQAHHRFMLIQHLSHIDFLDEQIAKLDAELEEQMRPFQAALTRWDQIPGINLRIAQVILAEVGTDLKQFEDAAHLASWAGMCPGNHESGGKRHSGRTRQGSRWLRRALVEAAHGAARTKDKYFKNLYHRLAGRRGKKRAIVAVGHSLLVTGYYLITRGQDYEDLGANYFDERNQEMVKRQAVKRLEKLGFQVELKLAVPAPA

SEQ ID NO: 469546 - protein, 338 aa, unidentified
MEHHKIIGIDLAKNVFFLFEINHKGKNIGRKKIYRIKLLNHIANLEPSTIAMEACSSAHYWARAFSNFGHRVLLYPPQHVKSQRRKQKNDYNDAEAIAELALYQRDHPVPHKSIEQQDVQSLIKMRRLLVTERTRLINQVRGLLAEYGVIIARGKASFRRAIPEALENPDNQLSPILRELVQQQYDRYLSIERQVDWFENKLAQTLKQFDNAKRLTSIPGFGPLTSQAVAVWLGSGQQFKSGRDTSAAMGLVPTQDTTGDKVVLLGITKQGNTYIRSLLVHGARAALRRAKYKSDKLSLWALELEKRRGPNRAAVALANKLMRIAWAVIRRNEEYQPA

SEQ ID NO: 469547 - protein, 334 aa, unidentified
MNTPVVGIDVSKRKLDVALLVDGKVKAKAVPNSQEGFAELEVWLNKQKISLLETHICLESTGVYSEPIALYWFDKGIKVSLVNPNCIKSFGSSENIRNKNNQVDAGLIARYCAAMAPPSWDAPSREQRQLRAWGNRLTALQDMRQQELNRLEVHETAKQQDVIPHVQAHIKWLDAQIAQIARDIDDHIDRHPGLKQDAELIESIPGLGRTTAVKVLGHVGDVRRFGNAKALAAFIGVTPRQRQSGTSIRGRTMMTRMGNKHLRAALFLPSLVAKRHNPILKQFGQRLEANGLSKMAVAGAIMRKLVHLIYGVIKSGKPFDPKYMEKGLAIQDGI

SEQ ID NO: 469548 - protein, 342 aa, unidentified
MPLYGGIDLHANNSVVVLLNEQDQVVYQKRLPNDLPTILEVLAPHHAEIKGLVVESTYNWYWLVDGLMEAGYRVHLANPAAMQQYSGLKYSDDHSDARWLAHMLRLGVLPEGYIYPKAARAVRDLLRKRAHWVRQHTANVLSVQNIMVRNTGARLSVKRIRELPKKELEGLLPEADQVLAITSSLAILDCLSQQIKALEKIVHQRLHHTPSYEQLLTVNGIGTILAQTITLETGDINRFPTVGNYASYCRCVDSNKISNGKRKGQGNVKNGNPYLGWAYMEAAQFALRFNPSAQRFYQRKLAKSNNNTTLARKAVAHKLSRACYYLNVGVCPTFYTRSGPVI

SEQ ID NO: 469549 - protein, 385 aa, unidentified
MIYVGIDIAKLNHFASAISSDGEELIKPFKFTNDNDGFQLLISKLDSLDKDSLIIGLESTTHYDDNLVRYLVAKNYKVCVLNPIKTSTMRKNNIRKTKTDKVDTYIICKTLMMQESLRFVTFYDLDLMDLRALGRFRQKTINQRTLLKIQLTSYVDEIFPELQYFFKSGLHQKSVYALLKEAPTPEAIASMHMTHLLKVNSHGRFDKKMAQQLRVLAQKSIGASDSSLSIQVTHTIQQIELLDSQLERVEAEMTEIMKFNDSVIMTIPGIGYINGGMILGEIGDIHRFSSPNKLLAYAGLDPSVYQSGNFQAKKTRMSKRGSKVLRYALVNAAHNVVKSNATFKTYYDAKMAEGRTHYNALGHCAGKLVRIIWKMMTDNLEFNLE

SEQ ID NO: 469550 - protein, 347 aa, unidentified
MRFYTTQHPFYCGIDLHARTMYMCILDQAGEIRLHRNMPATPEALLKAIAPYREQIVLAAECMFTWYWLADLCAEHGIPFVLGHALYMKAIHGGKAKNDKIDAHKIAVLLRGGMLPQAYVYPAEMRATRDLLRRRMHLARKRGELLAHVQNTNSQYNLPAIGKKIAYKANRAGVAERFADPAVQKSIEVDLALITYYDALLRDVELTIVKTAKHHDAQTLYLLQTVPGIGKILSLVLLYEIHDIARFPRVQDFASYCRLVKCAKESAGKRFGTSGSKIGNAHLKWAFSEAAVLFLRDNPAAQKLLARLEKKHSKGKALTILAHKLARAVYYMLKRQTAFALETFLHA

SEQ ID NO: 469551 - protein, 359 aa, unidentified
MTSMIPVPAHRRVIVGVDTHKHVHVAVAVNDLGAVLDSRSFAADSSGYAQLIDWSLTLGGHLTFGIEGTGSYGAGLTSAVRRRDIGVIEVVRTDRRDRRLRGKSDTLDAENAAKTVLAGTATALPKSADGVVEMIRTIKVAKDVAVKARTSAMITLKQVLVNAPPALREELQPLSRMALIRRCAALRPGRVDDVTAAAKHTLRAIARRWLALDTEITAHEKLLAELTAAAAPDLAAAFAVGPDTAAEMLIVAGDNPDRIRSEAAFARLCGVAPIPASSGMTTRHRLNRGGHRQANAALYRVVIVRMQHHEPTKAYLARRTAEGKSKPEIIRCLKRLLARELWAAMRPLRTPASSPAHAA

SEQ ID NO: 469552 - protein, 340 aa, unidentified
MTITTVGIDLAKNVFAVHCVDQHGKTVLVKPKVSRAALPELIASLPPCVIGMEACSGAHYWARLFRQYGHEPRLMAAKFVSPYRMAGKSGKNDAADAQAICEAVCRPHMRFVPVKDESQQAMQCLHRTRQGFIEEKTATYNRLRGLISEFGVIAPQSTDSLRHMVSAQKDSLPLQVQQCVDDLLEHVARIEANIAEYDRILSRMAKTDHRSQRLMELKGVGPTTACALVASIGNAHDFKNGRQLAAWLGLTPSQYSSGGKSNLGRITKAGDSYLRTLLVQGARSVLIGAEKRTDSFSRWVCSLIERRGYWRAVVAIAAKNARLCWASLHYGDDFRLYSAS

SEQ ID NO: 469553 - protein, 363 aa, unidentified
MKIMTGIDLHSNNALCGLMDESGQRLVHKQLPCELSAILQLLDPYKDRIDTVAIESTYNWYWLADGLQDHGYHVVLANPARMKPYDGLKHTDDVSDAFFLTELLRLKILPTGHLYDRQTRPVRDLLRRRLMLVHQRTTLILSFKSLNERTLGRRIALSRVKTMPVAEARALFADPADQLLSGTEIELVGRFTQAIEQLAAHVLGVAGKWDTYQRLQTLPGIGKILGLTIALETGDPKRFAMAGNFASYCRCVKSRRASNGKKKGENNRKCGNTYLAWAFVEAAHFARRYNEAGRRFYDRKKQQTQPVIATKALACKLAKAAWHVMAEDAPYDAERVFGPGQKTDFGETGREPAKGSGHPSQSN

SEQ ID NO: 469554 - protein, 457 aa, unidentified
MAKQRSKEKKTAVKADATQGLPPLNLHAAGIDVGSAEHYVAVPPDRDADPVQRFGSFTADLHRMARWLKDCRIQTVVMQSTGVYWTALYDVLESYGLEVNVANARHTKTLPGRKTDVQECQWLQKLHTFGLLNDSFRPAEEIRVLRGYLRQRENLVAAAATCIQHMQKALTEMNIQLANVISDISGTTGMAILRDIVRGERDPERLAMHKHSRIRASRQEIAQSLEGTWRQELLFVLEQSLDLYQTYQNKIQTCDRRIDEQLGRMEARVDPLSDPIPEPRRGKDARRHPSGFDLRGQLYRVTGVDLTQIDGIEVQNAQTIVSEVGVDMSRWKTEKHFASWLGLCPDNRISGGKVLKRGTRQVVNRASTALRLAASALLRSQSALGAKFRRLRSRLGAPKAITAMAHVLARLVYRMLKFGHEYVDRGIQFYETKYRHQQLQWVAKQAAALNMQLVPST

SEQ ID NO: 469555 - protein, 353 aa, unidentified
MSKDITLTVDYHDRACVVRWFDHSTRCDRVLSEVLTTKHALDEIVEQARRAAGRKGGVTWIQESTTGWARIQALVGDRARFLLANVLQMPLPPKGRRRKTDKIDTARIQREYLNGSLPLAYQPPAQWRELRRLVAYREGLVKRQTAVRNWINRYLAHETWFDRTGLWSPKGQTRLRAALQKLPRTDALIIGQKLDELMRLEEQLRIAVSELVSVYSVCPEAKRIDAIAGIDVVSAVSIVARIGPVERFPNADSLIAFAGLAPGIQESDQTRRNGRIGGGGTDSHLRHYLIEATMWARKLPRYKRVYDRIAKRRGKKVGRLVVARMLVRSIYKMLKTGVNFDAGALAPAEAIAS

SEQ ID NO: 469556 - protein, 435 aa, unidentified
MNCIDDSRLEQFIQLKKEIRGSEQYLIVGIDAAKDKHNAFFGTARGKTLVKSLVFDNTLEGFQKLLAYAERIQVQYSLTAVVFGIEPTGNYHKPLAEHLTKCGHMVVLVGGMAVKNNRQLLDGRWDKNDGKDAANVADLIAQGKCLFYEYPLMTLRNVRILITLKRRLKKREHGLSVCIRNHIIAQYFPELDRHYGSLETLTVVRECLDPSEIAGMEYDSFYRTVARGRTTLAKDRRVGAIWRAAVGSIGCTMGEAASFEARVMVDTLKQIRQTIKSVEDKLEDACMVFPEYTYLLSIPGFGPDISAKVLGAIGNPHRFRSTKQVLKMAGLDLCANRSGKTSNSATPVISKQGKSDLRYALYQAALTASVRNKDFMAYFTNKLKGRAKEKGIVTKMRVKLAAKLLIIAWTLMKKKECFDRNYLKQEDQDAQKKAA

SEQ ID NO: 469557 - protein, 408 aa, unidentified
MNAVGIDVSKGKSMVAALRPMGEVALLPQEFLHTEVGLEQMAYAIIALGEDTRVIMEATGRYHEPVAAALHEYGIYVCVLNPLFIKQSGGGSIRKVKTDKADAMKIAKYGLDNWVDLREYTPMDTVRQQLKLCSRQYNLYMKTVVSLQNNLISLTDKTFPGVNELFSSPERADGHQKWVDFVMTFWHCDCICRASEKAFTERYQKWCKRKGYHFSAEKALDVYAGSCGHFTTLPKNDNTKLLITTAAQQLLAGKITLAALRAEMARLARQLPEYDTVHAMYGVGEITAAQLMAEIGDVRRFPRRSSIVGFTGVDPAVDQSGKHEAKSTPTTKRGSPHLRKTLYQIVCTYLKRSPVDEPVYQFLDKKRSEGKPYFVYMTAAQNKFLRIYYARVKECLETFDSQQNSTQN

SEQ ID NO: 469558 - protein, 361 aa, unidentified
MHATTVAVDLAKSVFQLAVADEAWKVVETHRLTRTQFERWFANREVSLVVMEACGSAHHWARWLDRMGISVKLLPAAHIRAYVKRNKTDAADACALLEAARASDIVPVKVKSVEQQALQGLHRTRSLWMSTRTSRINALRGFCREFGLVVPQGARTGVEAISRVLADPNSAVPGLIRGSMKLLIEEIRLLEARIAQLERELHEVVKHSPACTTLLSIPGVGLLTATAMVAATGGQVSHFKDARHFASWFGLTPREFSSGNSRVLGRISKRGDRYLRMLLTHGARSVLRAAATARTVGRSLDGLRTWATAVQARTNHNKAACALANKMARICYATLRDATPYGQPAPRQQRKMERLSFAVAA

SEQ ID NO: 469559 - protein, 474 aa, unidentified
MNSPQPKHPRRKRRGKNRPSKTQQSINTTAQPDAAGLDIGADEIVVAVPPDRDAQSVRTFSSFTAGVHQLRDWLLVCGVKTAAMESTGNYWVTVYDVLEQAGIEVCLVNARHVKGVPGKKTDVCDAQWLQQLHSAGLLKKSFRPEQDILPLRYLMRHRAGLVEETARYVLLMQKVLTEMNLKIHHVFSDLDGVSAQAIIDAILAGERNPEVLAALRDRRCRSSEETIKAALQGDYREEYLFVLRQSQSQWKQHLQALAELDAEIEAIIKRIAPPTDGDDTASGVPKSGNRKGEAKEKALGKNTLRMDVRKAAVRFYGVDLGAIDGVGSGLLSVLMSEIGTGEQLKEGFATSARFCSWLGLNPANDISGGKVLKAKTRSVKSRVAAAFRLGALGLTNAKGLMGQYSRRIKGRLGKAEGITATAHKLARIVYTMIVTGRPYDENEAFKITPQNTKKQINKLQKQAEALGFQIVAIP

SEQ ID NO: 469560 - protein, 462 aa, unidentified
MKRTAKSQATHSGLAVVNPNAAAIDIGATMHMAAVGADRASDPVRSFGTFTADLRRLADWFAECRVKTVVMESTSVYWIPIFELLEERGFEVILVNARDAKHVPGRKTDVSDAQWLQRLHSYGLLRASFRPKGEIIELRAYLRQRERLLDTAASLIQHMQKAMTEMNLQLHHVVSDITGATGMRIIRAITAGERDPAVLASMRDMRCHSSIEVIEKALTGHYRAEHLFVLEQALALYDVYQQKVAACDIRIESVLNELISVRGSKEDANAKGSGSPRRRSRQSNGPDFDVGKALNALLGKDLTRIHGIGPYLALKLVSECGDDLSAWPTAKHFTSWLCLAPSNKISGGKVLSSRTRRSGSRAASLLRLAAVTIGRTDTALGAFYRRLSARAGKSKAVTATARKIAVLFYNAIRHGMDYVDPGASYYETRYRERVVKNLHRRAKAFGFILQAAEIPVAEQAVS

SEQ ID NO: 469561 - protein, 462 aa, unidentified
MAKRMRGDPSKPNKPKVDWKALDIVHPDAAGIDIGGSEHWVAIGPDRDEEPVRRFDCFTEDLQQMADWLTGRGVRSVAMQSTGVYWIPVFEILQQRGLEVYLVNARHTKNLPGRKSDIAECQWLLKLHTFGLLNNSFQPSDEMRRVRTLWRHRGGLVAQASSAIQRMQKTLTEMNIQLSNVLSDLSGVSGMAIVQAILDGKRDPRALAELADPQVKAPKEVIAKSLEGNWRQELLFVLQQEVEMYRTCQEKIGACDRELQQHLRTMEPKVDLQAQPLGPRPKGKRARGNAPKFDLRTELYRITGVDWTQVDGIDVQVAQSVIAEVGVDLNEFATEKHFASWLGLCPTNETSGGQVLNRRTPKVVNRAKTAFRQAATALLRSQSYLGAQYRRLRTRLGAPKAITAMARKLACLFYRLLKHGQQYVDKGTEYYELRHREQQIRLLLKRAKQLGVQLVTPVPAIP

SEQ ID NO: 469562 - protein, 398 aa, unidentified
MQSLTSILEATMHAAAPGPEQAAIDVNLGAIFVSLERSRSTWLITSLSPAGGERMSKHTVRGGDVAGLLDHLARLREKAQARTGKIFPVIVVQEAGLDGFWLHRVLEREGIESHVVDAASILTSCRRRRAKTDRIDGEALLRTLLAYKRGEPRVCSMVKAPSPDEEDRRRLCRERKTLVVERVEHVNRVKGLLFAQGISGYEPLHRDRRRRLEELTTGDGRPLPDHLKAQIDRELDRLELLLAQLRAVEAERDALIAPVADAAPAPVAALARLRGIGPEFAAVLWLECFVRPFSNRRQVAAYAGLAPTPWQSGSVRHEQGVSKSGNPRLRTTMIQLAWLWLRSQPMSALSFWFKDRVKRDGGHGKKTTIVALARKLLVALWQFVSSGVVIEGAVMKTA

SEQ ID NO: 469563 - protein, 339 aa, unidentified
MELYAGLDLHSRNTYIGIMDNAFNRVFKKRVPNHLEQILQTLDPFRDQIKGFVVESTYNWYWLVDGLMDAGYSSAHLANPSAIKQYEGLKHSDDQHDAFFLAQLLILGILPQGYIYPKKGRPVRDLARKRMFLVQHKTAHILSLQSLIARCCAMKVRANDMRHLTVKELEEWLKEEYLVLSAQANLDSINFLKQKVKQLEKAIIQKVKLNKEFKYLLTVPGIGNILAMTIMLEVGDIKRFPKVGNFTSYCRCVPSRRLSDGKSKGHGNRKNGNRYLSWAFTEAVHLGRRYNERFRRYYNRKVAQANTSLATKALGNKLARICYYIMRDQVPFREELFCH

SEQ ID NO: 469564 - protein, 373 aa, unidentified
MFGAHLTGEAFDLPAQATLERVRRRVLGTPMRVIGIDAHKRTHTPVTADRTGRQLSTKTVGTTSKDHLVLLQWATGQADERRWAIEDCRHLSRRLERDLIASGERVVRVPPKLMAHARDAARTYGKSDPIDALAVARAALREPNLPVARLDGIEREIRLLVDHREDPVAERTRIISRLRWHLHELDPEWAPPTKMDRASAFDKIDAHAATLTGLVADLAARLVAHLRRLTVEIDELATAFTSRTTPLAPSLLAIPGCAALTAAKIIGETAGIDRSRSKDAFARHNGTAPLPVWLSNRARHRLSRTGNRQLNAALHRIALTQDRCHADARELLARRKADGDGGMEALRILKRRLSDVVFRAMVADQSSLMHRAA

SEQ ID NO: 469565 - protein, 351 aa, unidentified
MSQTPRTSITAVGIDIGKNSFHIVGQDDRGAIVLRQKWSRSQVEARFANMPPCLIGMEACVGAHHLSRKLKALGHDARLMPAKYVRPYSKGQKNDFRDAEAIAEAVQRPTMKFVATKTADQLDLQALHRVRERLVSQRTGTINQIRAFLLERGIAVRQGQRSLRAELPRILATPPDVLSPGMVRVIEGLAADWRWLDERIEGLSREIEELAKRDAGCERLMSIPGIGPIISSAMVAAIGTGDGFAKGRDFAAWLGLVPRQISTGDRTILGKISKRGNRYLRVLFVQAAWVVLVKVKPTRWEGHGLKHWIEAASKRLHHNVLAVALANKLARIAWSVLSRGRAFEASKLQAA

SEQ ID NO: 469566 - protein, 404 aa, unidentified
MNAVGIDVSKGYSTVAILRPFGEIVASPFEVNHTNSELSELAGKLKSLNGETKVIMECTGIYHLPIACALQEAGLMVCTIHAQLIHDFGNNTIRKGKTDKIDSLKIANYGLTHWLDLPEYIPEDEIRHMLKAFNRQYNKYIKIKITLKNNLISILDQTFPGANELFTSPPRKSDGHEKWIDFAARFWHCKCISSLSQKAFTDQYRKWCQRSGYNFSESKAEDIYIESLGHFNVMPKNDTTKLLITQAIMQISTIAESLAIVAREMQQLASLLPEYPVVMDFRGVGDILCPQLMAEIGDIYRFKRKESLVCYAGLDVPPNQSGTFESRNMGISKKGSPHLRKALFQVMDCLLKHSPSDDHVYQFLDRKRAEGKHYYCYMTAGSAKFLRVYYARVKQYLDKLCSEA

SEQ ID NO: 469567 - protein, 413 aa, unidentified
MDGVVYVGIDLGKRFHQVAVVDEKQREVLPSFRIGRGQAALAELLSALTAQGATVAETVFTIEATTEWWNALAWPLCEQGYRVYLVPPTKAHALRRFYVQHTKTDITDSAALARLPLVDPDLKPLWRPSPACRSLLRLCRLRWKGRCRIADLKRRISHLAETVQPGIDTVLPVRYSQSGRLYLRRYLAPERAKRLGKKRLGDLMRKASWGKLGAERLDALWACVQDAPALGLQAEELQLEINVQLDELEAVEAQVQRLDARIAELYGQVDPQQRLLQVAGLGEFLAAALTAHVGDVARFPSAKALIAYAGLAPRVKASAGHTSPGQPISKKGSPYLRAWVFLGASCCRQFDPELRAYHQRLRKRGKHYLLATCATAARLLERVYDLLQEGVSEDSESLGQRGNRDNVPTRRTA

SEQ ID NO: 469568 - protein, 343 aa, unidentified
MNVEQHVTVGVDTHKDVHVAAVLDQAGRLLATRSFPTTTRGYAQLATWAESFGTVIKVGMEGTGSHGAGLLRFLTEYGLPVVEVDRPDRSTRRRIGKTDTIDAESAARAVLSGRATGTPKTRDAQVEMIRALRVARRGAMKARIQAGGQLEALIMSAPDAVRQLLRGLSGKRRVRACAALRPGLVTDPVTATKAALRSLARRWLALQAEIGDLDSHLTSLVTAVAPDLVALPGVGVDTAGQLLVTAGDNPHRLRSEAAFARLCGVAPIPASSGRTDRHRLHRGGDRDANSALWRITLVRMRCHQPTKDYVARRISEGKNKTEIMRCLKRYIARDAYRLLTNSA

SEQ ID NO: 469569 - protein, 322 aa, unidentified
MEAVYVGIDVSKQWLDVGMWPGSESVRVANDAAGIAQLVGRLRALSPRAIALESSGGLEVLAASELHAAGLTVAVVNPRQVREFARSLGTLGKTDRLDAVVLAQFAHSHHSHGRLAPMRLAEEAEVELRALVVRRRQLLGMLVAETNRRERAPKVVRKSVVQTIKGRKRALADIEQQLKQVLANSPTQQAKAILLSAVPGVGPQLSYTLIAELPELGQLGRRQIASLVGIAPHPHESGKFKGRRLIWGGRARVRTMLYMAALSAVRYNPRLRAHYRALLERGKAKKLALVACMRKLLVTLNAILRDSSPWQPNYIVDFQHSR

SEQ ID NO: 469570 - protein, 426 aa, unidentified
MAVVMIGVDPHKASHTAVAISPAEEPLGQLRVRASAVQAERLLGWAQAWPERAWAVEGAGGLGHLLAQQLLSAGERVLDVPPKLAARVRLLATGNVNKNDPGDARSVAVAALRSAQVREALRDDHTAVLKVWSKRYRDLGRARTQVACRLHQVLCELVPGGVSGEITAGQAGQVLASITPAGAVQAARWELAAELTEDLRGLDIRIRETRKKLTEAVRAAGTCLTGLFGVGPVIAAAVIGDVRAVSRFASRDHFASYNGTAPIEVSSAGRKVYRLSRRGNRRLNHAIHMAAVTQIRYRHTKGRAYYDKKLAEGKTGKEALRALKRQISDAIFACLQADARRAAAAAGKSPGGQPGNHSASRAAGSHPDHRLFGQATPGPATHPTTTAPFPAPLPSRASEGPGPGPGAARPRSGARRASSRRPPASR

SEQ ID NO: 469571 - protein, 468 aa, unidentified
MTADKKLWRNRKERKQWARRLQSEDPGLEVIHPQAAGIDVGNSAHYVAVRPERDPQPVRRFECFTVDLRRLADWLQSCGVKTVAMQSTGVYWIPLYEILEERGFEVYLVNARHTKNLPGRKSDVQESQWLLKLHTYGLLNNSFQPPAEIRALRTYWRQRGEHVASAATCIQRIQKALTQMNLQLANVISDISGLTGQAIVRAIVAGERDPRKLAQFRDPRIQASEEEIAKSLEGNWRPELLFVLQQELEMYDTYQRRMAECDLQLQKHLASLTDSVPPRPPEVEPEPKKGKRAKPAKNAPRFDLSRELQRITGVDLTRIDGIDVMIAQTLLSEVGVDMSRWKTEAHFASWLGLCPDNRVSGDKVLRRGTRHVVNRAANALRQAANALIRSRSYLGAQYRRLRTKLGAPKAITAMAHRLSRLVYRMLKYGQRYVDKGTEYYEQRYRNQQVQLLRKNATKLGFQITEARA

SEQ ID NO: 469572 - protein, 337 aa, unidentified
MKYCGIDLHSNNSVVVITDEADHVLYSKRHANDLSQILAALAIHRAELSGVVVESTFNWYWLVDGLQDAGYRVHLANTTAIKQYDGLKHRGDESDARQLAHLLRLGLLPQGHIMPKAARAVRDLARKRMQLVQQRTAQILSIENSLSRHTGGRISSNSIKCLQETDLKQMQLGDMQTLGLKANVAVMQALQVQIDSLEKVLAKHCRAEPGYRLLKTVDGIGDVLATVILLETGSIERFADVGNYASYCRCVGSAHVSNGKKKGEGNTKNGNRYLAWAFVEAANFAVRYCEAARRFYQKKKAKRNSTVAIKAVAHKLARACYHMFKTNKAFSVERCFA

SEQ ID NO: 469573 - protein, 396 aa, unidentified
MLTSVMVNNSLIGKAGTGEASEASQAGTSRRREFGRVRVFKAVTEQEPRRHRGTSPNSRLNRRRPTRTASSYLQVREKTMSETVYVGIDVAKETFHVATCPNILKTQLPNTRKGHRQLSQSLKNHTIALIVLEATGGYERPLTAELLSDSLPVVVVNPRQVRDFAKGMGQWAKTDPIDAQVLARFAQIVKPAPKTHSTPQTAELSELVRRRRQLNGLRTQESNRLLMIHHPKVKKSIQKMIKTLNFQIDEIDRLIREYIDADDNFKNKDRILRSTPGVGPQTSAMLIANLPELGSLNRQEIAALAGLAPWDRSSGKSDGKAHIWGGRKDVRSVLYMAAFTACRFNPVIRALAERLKQKGKAYKVVITACMRKLLIILNTMVRNQTLWTPQKSVKNT

SEQ ID NO: 469574 - protein, 326 aa, unidentified
MKLPALGIDIAKLKFDVCLMNTEGKLRHKVFPNTLPGFAQLTMWLTKQGATPPEVHACMEATGTYGEALAYHLHAAGHIVSVINPAAVKAFAGSRLSRTKTDRVDAELIARFCAAQQPLAWTPPAPEVRALQALVRRLAALIEMRVAEENRLEAGTSVEAVQFSVEEHVAYLAAEIKRTEELIRAHVDTHPTLKQPSQLLDSIPGIGETTAALLLAEIVDVTQYRSARQVAAYAGLVPRERRSGSSVRGRTRLSKIGNARLRKALYFPAITALRCSPFFKEWATGLRERGKCKMSVIGAAMRKLIHLAYGVLKTGKPFDPQWGKTA

SEQ ID NO: 469575 - protein, 323 aa, unidentified
MQGKVSFQEDAMPVVYAGVDVSKEWLDIHLHPLGESRRFCNDKTGIRQLKRLLARHRLASIVMEATGKFHRPAHRSLWLDGFAVAVIDPLRARMFARACGYLAKTDRLDARFLALLAESLRPPADTPPSPHVEALQELVNARSAAKCDITALQNRSKTATTALLRGELNRLVRRLEQHVERLDKEIERRVGEDPQLYRKAEILTSIPGIGRVTALALMAGMDELGSCSGKQAAMLAGLAPIANDSGARTGRRSIRAGRPAPRRALYMAALSACRYNPALARFADTLKAAKKTAKVILVAVMRKLLVLANCLLSHDRLWTPNPP

SEQ ID NO: 469576 - protein, 392 aa, unidentified
MYIVGIDIGKNHHEASIVSPEGKQIGRSLRFATTHKGADSLMSFIFKNIGNSPCVFGMEATGHYWYPIYSFLKAKGYTIYVINPIQSDSLRKMYIRQTKNDSIDSFLIAEVIRFGQFGTTSMADENILAMRQLCRYRDSVISSRTEIKLRIGTIMEQIFPEYEKQFSSLWVSTSMGILEKYLTPENIENTPIDELFEIIKDKSHNRLTKAKAISIKEAAADTFGIKIAQDAFSFQLKQLIDRMNFLDKQIEALDIEIMKYYEQFDCYLHTIPGIGMIATATILAEIGDIHRFKSSSALVAFAGIDPTVRQSGEFNSTHNHMSKRGSPYLRHAIFLAATTCSFHNSPLNAYYKKKRDQGKHHLTATGAVARKLTTVIYAVLRDSKPYEPKKFC

SEQ ID NO: 469577 - protein, 406 aa, unidentified
MFYLGIDVALNTHRLVMLDDNGERVSSGISFQNNTADFEKVLNKLKELSINPDNSIAGLEATGNNWENLYCFLTSNKFKTIVLNPHQTNKFREALRKKAKTDDIDAFVIAGLLRSNEFASSYVPKDKIQALRELVKLRYEFIKDHKNYQRQVLALLNIIFPEYKQTALKNPFAISSTAIFKSFATAKHLSIVKPKHIEKIVRSIKGNNFNIKEIENLISIAKTSVYSGRCQESRALTLNILLTQIENFSKAIQQLDEQTNQILSPESNDDINSFPGSNLLTIPGVGPKTLAAILSCVGESGQAFSTGVKLIGHIGFFPQIYESGETRRANKISNKGPAYLRQALYISSVACIKHNLQLHNLYHTKISQGKKPKQALICVAKKLAHLCLSMLHSGQDYNPARVFSYV

SEQ ID NO: 469578 - protein, 342 aa, unidentified
MYYIALDVHKKTISYCVKDASGQVHGEGKIGATRNDLDWWMKTLPQPWTVAMEATIFTGWIYDHLHPHASQVKVAHPVMLRAIALAKKKNDRIDAGKIADCLRCDFLPECDMASTAIRDRRRSLRYRHLLVRQMVQMKNRISGLLLETGVSHNKQRLHKVGYFRELISNNEEVPESIRPLLRLSRETIVRCQKTEYALVSSLQWDPLLADRVQRLKTIPGVGPITALTWALEIGDVSRFRSIKQAISYCGLCGDEKSSADKVLRTPLSKQRNKHIQHVLVEAAKLAPRQSHELALIHEREQQKGNPNRATLAVARKMVAYLPAVDRRGQDFVPAEARNTAAA

SEQ ID NO: 469579 - protein, 359 aa, unidentified
MRYVGIDYHKRYSVLCATDERGQELKRRRISGNSATGFAQFFSELGEETKVVMEACWNWGWLYDLLAKIEGIDEVVLAHPYKTRLIAEAQIKTDRLDAQMLAKLLRGDLIAQSHAPSAATRARKHLLRQRLFWVRLRTMLRNRMHAILDRQHGLERPQLKNFFSRRGQTWLEEVQLPCAEDQPLLTQDLEVAELLEEKIKQLDRSIGQSQSEEEKLLESIPGIGPLFSSVIATEIDGVGRFNSATKLAAYAGVVPTTHASGGRVFNGRLLWQCNKWLRWALIEASWSAIQFSGYFGSIYRCARARGKNKNIAITMVAHRMIKIIWLLLTEKRPYTETLPDRSEDGMTVVVRRKVLGLAS

SEQ ID NO: 469580 - protein, 408 aa, unidentified
MNPLYVGIDVSSKSNVVYFMLPDGSKHCNFSVANSHTGSSQLVKRILSAMTSCSLDTVLIGLEATSVYGDNLVYFLREDAALARFNSKIHVLNPKQVSKFKEAYNDLPKNDLIDSFVIADCLRFGRINKEVYIGDYRYKALQNLTRARYFAVSNLIKEKQRFMNILFKKYSTMTQEKVFSDTFSTTALAVYDEFESAEALADMDLHELTAFIMEKGKNRFPNPNAVAKAIQKAARSSYRLPKTVNDSVNQVLSISITSIKALEAQIKEFDKAIATQMELLPNVLISIPGIGPVFSAGIMAEIGDINRFHNQAQLAKYAGVAWKQHQSGDFEAQTTRLINSGNRFLKYYLCEAAFSLVRCDKEYSDFYHLKYKEVNRYQHKRALALTARKFVRLVFRLLKDNRLYTSAE

SEQ ID NO: 469581 - protein, 315 aa, unidentified
MTASPMVGVDVAKDRLDVAVRPSGEAWSEANDDAGVRALVARLRPLGPALIVCEATGGFERAAIAALAAAGFPVVVANPRQVRDFARATGQLAKTDQLDAAILALFAERVRPTPRPLPDAAAQLLDAVLTRRRQLLEMLVAEKNRLGFAPKPLHRGIQAHIRWLERQLDDVTKELAGLIEASPVWRAKDDLLQSVPGVGPIVSSTLLGELPELGTLSHKQIAALVGVAPLARDSGTLRGKRLVWGGRASVRTALFMAAMCGRRWNPTLKAFYERLKAAGKPTKVALIACARKLLTILNAMMRDQSRWTSHVQYSC

SEQ ID NO: 469582 - protein, 341 aa, unidentified
MQITTIGLDIAKNVFQVHGIDAAEKVVIRKQLRRGQVMKFFAALPPCLVGMEACATAHYWARELTKLGHEVRLMPAKDVKAYVKRNKNDAADAGATCEAVRRPTMRFVPVKSAEQQAQLMQHRARDLLIRQRTQVINALRAHLAELGITAAQGREGIRDLLAIIADEADARLPIDARASVMVLAAQLQALQTLIGSIEKRIVARHRSSEASKRLQTIPGIGILGASAITTIVTEPKAFRSGRDFAAWVGLVPRQDSTGGKRKLGPISKQGDRYLRRILVVGAHAVLKRARLHPQKYPWLTQLLVRRPFKVVAIALANKMARVAWALLAKGETYRMPRLAAA

SEQ ID NO: 469583 - protein, 340 aa, unidentified
MIGMDIAKRIFQVEGRDASGAVVLRRQLRRSGVLRFFRKLPRCVVAMEACATAHYWGREIAALGHAVRLLPPTSVKRFVKRGKKNDKVDAGACCQALLSKDIQFVPIKSLEQQAVLMMHAVRQHLVAEQTALSNAIRGHLAEIGIIARKGAAGFKALVELLAKPAGTPELALIRPIIAPLVMQWRTTGEQIKTIERQIARWHKANSDSLRLDTIPQYGPVISSAFVAKVSDPTRFARGRQCAAWLGNVPSQHSTGGRTCLGPITKAGDRYLRTLLVIAGSGLVRRVKADPSLSPWIAGLLRRMPAKKVNVAVANKLARIGWAVLVSGKPYDAAIGTLTAA

SEQ ID NO: 469584 - protein, 400 aa, unidentified
MRAVFGIDVSKASSEVAILVNGEKVHGYTISNDALGFARLLGDLKTVHKPEIIFEATGVYSRRLQAFLEDNGYAYTRLNPLEAKKQLDSLRVRKTDQIDAEKLAQSQFVLNRKPTYVQEEVYQELRDLSRFYQNLTEDIVRAKNRLHKVLQVTFPELETILSTPTGEQYGNLVVAFPCKDFVLDLSKDELSESIRQSTSKRISDKRVAYLVEKLTALANQSYCAVKKTSPIMEEVRYYAKELLRLSEQRQTVLDQMVELAQPLPEYDILLSIPGIAETTATSIIGELGDIRRFQSANQINAFIGIDLRHYESGNFLAKEHITKRGNPYARKILFKCIHNIASASHTNPCHIADFYEKRKRQSQTTSTKPHTIASIHRLIRTMYYLITHNKLYDYRSTRNQ

SEQ ID NO: 469585 - protein, 360 aa, unidentified
MSKISKPAGRKKTTTDKPEMTMGIDVGDRYSHLCLLDEEGEVVERDRVRSTEAAFRRHFEGTPRLRIALECGTHSPWMSRLFKQLGHQVVVANARKIPTITESESKNDGRDAEQLALMAAFNPKLLSPLEHRSLARQQDLNLVQARAIPVKARTMIVNALRGLVKSAGGRLPACSSESFPDRAAGAVPPALADVAAPLVEQIARLNMQIGVMDQQIEKLANKYPEIGLLRSVPGIGPVVASAYVLTLDRPDAVPKSRSAGAFLGLRPGQSQSGDSDPQRRITRTGNTYLRCLLVQSAQYILGRFGPDSALRRWGLKLAAIGGKRAKKRAIVAVARKLAVILHSMWRSGQRFQPFPQPVQA

SEQ ID NO: 469586 - protein, 463 aa, unidentified
MARNDKGKKHKKPVRSLKTIQPDAAGIDLGSREHWVAGPPLKDNTPNVERFGTTTPELLRLADWLKEQKVNTVAMESTGVYWIPLFEILDSLGFEVILANARQVSHVPGRKTDMLDCQWLQLLHACGLLRGSFRPSDDICRLRTLLRERNTMIDQRSDWVRRIQKSLDQMNVCVHHAVSDITGVTGMAMIRAIVNGERDPRTLAQMRDRRCQKSEEQIANELTGNWRAQHLFNLRQALKMYDQFCEVVAEYDAEILAYIKSLQPGVDDDGSLPPPASKSKARNIAKKAQEPMRQALYQLTGFDLTTIDGIGVDTAAEVISELGADFSSFPDEAHFVSYLRLAPNLSISAGKKVPSKLKGTTTSRVAAALRMSALAVRNSKTALGAFYRRISRRKGASVAVFATARKLAQIIYRLVCHGQAYINIGAKAYEAQFNNRRIKYYTKALKDLGYKVKPLAVAESLTA

SEQ ID NO: 469587 - protein, 347 aa, unidentified
MNFYTQQHKYYCGIDLHAKSMYLCILNQEGNLMLQRNIRTGPEVFLKTIAQYREDIVVAVECIFTWYWIADLCQREHIPFVLGHALYMKAIHGGKAKNDKIDAHKIAVLLRGGMIPMAYVYPQQMRSTRDLLRRRMHLTRKRAELLAHIQNTHYQYNLPAIEKKISYKANREGVSERFQDESVRKSIELDLKLLDYYDQLLPSLEHQISLIAKAHDADSYFRLRSIPGIGRILGLVILHEIHDIRRFPTVQDFVSYCRLVKSAKESAGKRLGTSGKKIGNVHLKWAFSEAAVLFLRRNLQARKYREKLQKKHGKAKSMTILAHKLARAVYYILKRKEVFHMNTFFER

SEQ ID NO: 469588 - protein, 388 aa, unidentified
MPDVSSCAPAEVRLWVALDVHKLSIVAATLPPAGGRPEIIRIENTPKAIRRLIAQLGGAAGLAVAYEAGPTGWALKRLLDGLGVACDVIAPSLVPVRPGDRVKTDRRDAKKLVRLLRAGELTLVAPPTPEQEGLRDLIRCREDLRDARDRARQRVIKALLRHGHVFSDGKHWTLRHRNWVASRRLADPVAQLALETMRAHLEMIETQLRQLDAQLERIAGEDRWKPGVRVLTSFRGIATLTALSLLAEIGDFRRFGSARELMSYLGLTPSEYSSGQSVHRGHITKAGPVHARRLLIEAAWHYRHPPRLTERQREAENAARSGGEPELAPAVSARAWQAQVRLNHRHRVLTRERNKRATVTNVAVARELVGFLWAAMTEQPLREELAAA

SEQ ID NO: 469589 - protein, 385 aa, unidentified
MMLIGIDPHKSTHTATAIAPDTNQEAASIRIDATLREYRRMLTWARQWPQRRWAVENAEGLGRHLTSWLLARGEDVVDVPTTATARVRQLSRGGGRKNDRIDAGAAACVAALQGDARPLEAEGYVDAMAVLDERRVNLAQSRVRAVNQLHALLRALIAGGAPRDLSATTAAALLRTVRPNGAVEQARKAVAKDLVTEIRTLDTQLKANAQAIARLVAATGSTLTEVVGVGPIMAGRLISRTGRASRFLTASAFANYAGAAPVEIASAEKSRHRLPRHGDRQLNSALHTIAITQIRIPSSRGHRYYNSKIAEGKTPREAARCLKRRLADHLWRTMINDERRAVSPGGQLGTTLQSSVAGPTPTTNSSDKSLPGPATHDSTTAKPAA

SEQ ID NO: 469590 - protein, 436 aa, unidentified
MAGGNQEKLMSQNQPEIQYAAFLAIDWADQKHVWSLQDADSSTCERGEVDQMPEAVETWVAQMSQRFAGRPIAVAVEQTRGTLVFLLSKYEQLHIFPVPPAMTANLRKAFYSSGAKNDPTDADLLLDLLQRHREKLRRLSPDTEATRFIQNLVEERRKLVDEKTAQSNRLEAHLKIYFPQIPRWFDDVDSALVCALLERWPTLEALQKARPDTLRSFFRQHHCRKEELIESRIKAIGEAMPALKDRAVVGTKVPVVKVVVQLIQVLHEGIEGLNRQIQEAAEAHPDFFIFDSLPGAGAVMAPRLLAAFGSQRERYQNAAEVQTWSGIAPVTESSGKSSWVHFRFACSKFLRQSFHEWAALSIPQSQWARAYYELQCRRGKKHHAAVRALAFKWIRIIFRCWKKRVAYDENVYLAALAKHNSPLLAATKIGVVRSAV

SEQ ID NO: 469591 - protein, 417 aa, unidentified
MFKVAIRSPGEKPWTRKTEILEFRTFYGVLQAMARLLRRRGVTHVVMEASGIYTDPVYYALCEQDFEQVAVINPAHAKALRGHKTDARDCARLAELFECGLLHGSYIPAPELREVRDLTRYRMKTVQARTSEIQRLGKALESAGIKLGSVASSITGTSATAMIEALIDGERRGAVLADLAIGRMRTAGKLTDLSMALAGRFTEHHALLCRLHQDRIAIFDAAVAGLDQRIAGKAARWQRETGLLTSVPGFGDVVAQAWLGEIGPAPHRHFATCEKLACWVTLCPGNNISARKRKHGRTGDAGTYIKPMLIQAAWNAIRVRGRLQARYNRLVRRFGGDKNPGAKKKAIIAIAHTLLKIAYQVLKTGTPYTDLGADFYTRRESPEHKQAWLERQLQKLHPDCTITITISPPETALTSGA

SEQ ID NO: 469592 - protein, 458 aa, unidentified
MVQIKRPRSRRDIPAVHPDAAAIDVGATMHVVAVPPDRDPEPVRTFGTFTADLHRLADWLRACRIKTVVMESTGVYWITIFEILEQKGFDVQLVNARDAKHVPGRKTDVSDAEWLQRLHEHGLLRGSFQPKGEVKALRSYLRQRERLLDSAATYIQHMQKALMQMNVQLHHVVSNITGVTGMRIVRAIVAGERDAATLAAFRDSRCKEPVETIRKALIGNYREEHVFALTQALELYDIHQKKVAECDKRIETVLKQLKATRPTPAKPLPAPRHKTKQSNAPNFAARDALYAVLGIDLTQIDGLGPYLALKLVGECGTDLSAWPSSKHFTSWLSLAPRNKISGGKILSSATRRSNNRAASLLRLAAVAVGRTETALGAFFRRLSARIGKAKAITATARKIAVLFYNALRHGMKYTDPGAAYYEERYRQRVLSNLQRRAKAFGYVLQAAAPQAPQAVGVS

SEQ ID NO: 469593 - protein, 412 aa, unidentified
MQVIIERCCGLDVHQETVVACLLIGSPGVQPVKEVRTFRTVTRDLEALRDWLWAAGVTHVGMESTGVYWRPVYAVLEGHFELIVGNARHIRNVPGRKTDVKDSEWIADLVRHGLIAKSFVPPQPLREMRELLRYRRKLVESQAAERNRLLKLLETANIKLASVMSDVFGVSGRAMLRALIEGKASAEAMAALAKGQLRRKCADLILALDGRIEEHHRFLLAMQLRRLEAIEADIAALDLRIGQRLEPYRTQHALLVQIPGVDWLVAAVLIAEVGVDMSVFLSVYHLAAWAGVCPGNHESAGRQKSGRARKGNIHLRTILVGAAISAARTKGSYLKDKFHRLKARRGALRAALAIAHKILVSAYHMLAKNLAYRDLGEAYLDQIGQTRTVANLKRRLERLGYHVTLQPTPHTA

SEQ ID NO: 469594 - protein, 381 aa, unidentified
MTQTASPEKSIAGGDGMFVAFELGFKDWKLAFGSVMGEKLWLVTIRPRDLIGLSEAFGKARRRLGLAAGCGVVSCYEAGREGFWLHRQLAEMEIVNLVVDSSSIEVNRRARRAKTDRLDARKLLSMLLRYGAGERDLWSVVKVPTPEQEDGRHLQREIRTLKKEQTRLTNRIKGLLASQGVAVRMGRRGLGEGLDAIRIWDGSPLPSGLRRRLEVEIARHDVVHRQLLDLECERDARIRQGQDRAAEIARRLKTLRGIAEVGAETYARELSWREFKNRRQVGCLVGLTSTPYQSGDLFRERGISRAGNRHVRGVVVDLAWLWLRSQPQSELTQWFNQRFARGGPRLRKIGIVALARKLVIALWRYADFGEIPKGALLKSQA

SEQ ID NO: 469595 - protein, 354 aa, unidentified
MKLYVGLDVGLEETSLCVVDSEGQTVRELKVSTEPEAIRAALEGCADRLDRVGVEASSLGIWLYRELQPAGVPIIVAEARHMRVSLSTMRNKTDRNDARGIAQMMRLGWYRAVHVKTIDMQKMRTLLSNRKLLKRKLIDIENHIRGALRAYGLLVGAVARGAYEARIHELLERSDPIFAMTIEAMLDARRAIFEGYERLHRVLLQVVQHDPVCRRLMTVPGVGPVAALSFKVGVDHPRRFARSRTVGAHFGLTPRRHQSGTSIDYEGRISKQGDVAVREALCEAAASLLLRVRKWSALRAWGLRIAKRSSMLCAITAVARKLASILHRMWVSETDFHVGFGAKVTQRLRLKPAQ

SEQ ID NO: 469596 - protein, 375 aa, unidentified
MNYNTVYVGMDVHKESFTLCCMTLEMEKAKYTMKTGADYKKILVYLDTMRGKFYGEDTHFICGYEAGCLGYTLYHQLTAANVECIILAPSTMSVEGGKGKKRIKTDKRDAENIAKCLAHRLYSPVHIPTDEELQIKEYVRMRDDHKHQLKSIKQQILSFCLRHNLKCDTSKSNWTIAHLKWLRSLQIEPLYKEILSEYLTTYDQLTDKIGRFDKRIEQLAQGDNYRENVEHLRCFIGIETHTALSIVAEVGDFKRFTDAGKFASYLGLTPGEDSSGDTRNRLGITKAGNRHLRRLLTEAAQCYARGSAGHKSKTLKARQSGNPTEVIAYADKANERLRRKYYKMVLNGKNRNTAKTAIARELACFVWGMMTNNIA

SEQ ID NO: 469597 - protein, 331 aa, unidentified
MNRQNFCYFIGIDISKKFFDVAIIENGRTASYVFENTKKGTNAFIRILKNQKISLDNTLICMEHTGVYGKLIITKLVEKQAHFCVEMPIKITKSIGLHRGKNDRVDAKRIAFYASKNYRELELYKPIAEVLEKMKILLKIRKKLVNTRADINKYPNELERFSPEIGKLARKNLKRINKNLEDEIKRIEAEIKKLILSDDKLNKTVGLVTSVTGIGQITALHLTVFTNFFTRYDNPKQLACYSGVVPFEYTSGSSIHRKSRIHPMANRTLKKHLHMSALAAINHDPDIRAYFLRKVEEGKNKMLIVNNLRNKLVHRVCAVIKRQQPYVKNID

SEQ ID NO: 469598 - protein, 430 aa, unidentified
MKSNTQNAKIEAITEKTLVLGIDVGSETHYARAFDFRGMEYSKKPFKFSNNEAGFMTFKAWILNIKEKHGKDKVVPGMEPTGHYWFNLGKFLQDNEMKPVLVNPHHVKKSKELDDNNPTKNDRKDPKVIAGLVREGRYMIPYLPDGVYADLRTASNMRFQLQAELTRIQNRISRWFNIYFPEYKTVYGQPDAKSGMMILKIAPLPEDILTLGIDGVNQIWRNAKLRAVGKARAKTLIEAAEHSVGSKEGALSARMEIRMLLEDYESRNARLQEVMALIEELVKQIPMAEKLLEIKGVGIKTVSGFLAEVGDISRFDNPKELQKLAGLALVENSSGKHKGKTTISRRGRKRLRYLLFEVAMSLVAKNPEFRELHVYYTTRKRNPLKKMQSLMAVATKLIRVFYAMLTKGVDYDPKKMISDIKRPAVYLQAA

SEQ ID NO: 469599 - protein, 356 aa, unidentified
MQTQVTKKIDFNGKNLFVGLDVHKKSWSVTILVEGMEHRTFTQPPDPRTLYNYLQKMFPGGTYYSAYEAGFCGYGIHRALNDIGIKNIVINAADIPASQKDQLHKRDPVDSRKIARALEKGLLRAIHIFDRDMEELRSLNRTRFYLMRDFRRSKNRIKSFLQYYSIYIPPEFDNNQWTLKFIAWLKQIQMKTSSGQDAFYNLIRSFEYHREQILILSRQIRIRVREYDSELYNLLKTISGIGPLTSSALITELGDINRFPHINHLSSFVGLIPRVKQSGETSYNGGMTFRCNEYLRTLLIESSWQAIRQDPALMQYYQQHVINNKGQKVIVKIARKLLNRVRYVMKNRQPYVTGVA

SEQ ID NO: 469600 - protein, 343 aa, unidentified
MKLMRVGVDLAKNVFQVHGVDRNEKPVWRRRLTRSNWLRVMLETVEPGCEIGMEACGGAHYWARKLQERGYTVKLIAPQFVKPYVQSNKNDANDAEAICEAMSRPKMRFVAVKTVEQQDIQAVHRIRRGLIEQRTAKGNQIRGLVCEYGLVAPRELSQLRRAIPLWLEDGQNGLSARFRRLLAALWGDLRSLDERVAELDREIELIAQSDPAAQRLQQLRGVGPIIATALVAAVGDGAQFANGRQMAAALGLTPKQHSSGEKERQLGISKRGDAYLRTTLIHGARSTIRTAKGKNDRLSLWVRALLARRHPNVVAAALANKTARIAWAMLRHGNEYRPELAAH

SEQ ID NO: 469601 - protein, 344 aa, unidentified
MEITTIGLDLAKSVFQVHAVDAAGKPVVRKALRRAQVLPFFAKLPRCLIGLEACGTSHHWARELIKLGHDVRLMPPAYVKPYVKRGKTDANDAEAICEAVTRPTMRFVPVKSPEQQAALSMHRTRDLLVKQRTQLVNMMRGLLAEFGIGVPCGLERALIMAREITEGLPPDVPAEAGKILAALSQQALDLHLRVRDIDRDLLVWQRGNDVAKRLMTIPGIGPVGAAALAASVTDPHQFRSGREFAAWLGLTPRQNSSGGKERLGRITKMGDKYLRKLLVIGMTALVKQVRYKPDAADRRLVDLLARKPTRVATVAMANKTARIVWAIMVREETYRAGHVPALTA

SEQ ID NO: 469602 - protein, 308 aa, unidentified
MLDQNYIGCDVSKATLDFFDGERGKHCRIANDETVVATFAAQLRPGVDFVVMEATGSYDRLLRLALGRTGVSFSRHNPQHTHHFSRSTGRRAKTDRLDAVMLAEYGRLHRPSAEAMPDADTERLQALARRRDQLVDIRARQKKLLAEAFDPDVRDDIAALVAILDTRIASLETTIRSQIASTQQAAQNYAILTSAPGVSTITALTLLAHMPELGHRSPKAIAALAGLAPIASESGTKTRRSVIAGGRSRVRRALYMAALACIKARSKFKPAYEEIAARSGSKKLAIIAVARKMIVSLNAMIRDQKQFA

SEQ ID NO: 469603 - protein, 408 aa, unidentified
MKYYNSTTQFNCGIDLHARQMYVCVMDRQGKKLVHTNVKDNDFDYFLKLVTPYKHDLTVCCECMFGWYWLADACQAAGLTFVLAHALYVKAIHGGKNKNDRIDSEKLTHLLRSNLIPPAYVYPAEKRPLRALLRQRIFYVWRRSELLARIHSHQLAHNRVPPKRTCSTRDPWEEALLAAEPNPLRRLAIQNDMALIRHYDHQLMQLEEELKRQTKKVACREYTLLQTVPGIGENLGLTILHEIGDIHRFPTVKDFLSYCRLVKGTVASAGKIKGLRGAKLGNPYLRWAFGEAAVIAKRDHYLIGPLSQRLEAQMNGNKFKANTVVAIKLARAVYFMLKNKTVFDPERLVASMQKCFSPGRIQPGGLTGCAKKATPPSVADHSSCASGTSVCVGQDSNPAIRLGPVASG

SEQ ID NO: 469604 - protein, 385 aa, unidentified
MAAVMIGVDPHKASHTAVAIGAAGEPLGQLRVRASAAQAEGLVAWAAPWPERTRAVEGAAGLGYLLARQLVAAGGHVLDVQPKLGARVRLLATGATSKNDPSDARSVAVAALRSPARRVVRAEDHAAVLKVWSRRHHDLGRARNQVACRLHAVLCELIPGGFAKEITAGQAAHALESIEPSGAVETARCELAAEFPGDLRRIDAQMRDTRKRLAAAVTASGTTVTGVFGVGPVIAATMIGYVADVARFPGRDRFAACNGTAPIEVSSGNRKIYRLSRRGNRRLSYVIHIWPRSPRSATGTATAGPTTTRSSPKAKLPGKPSAASNGKSATPSTAACGPTPAGPQPQPQPRAREGNRGPPLSPARPAHTPKTGSSAQPLPSPTPPL

SEQ ID NO: 469605 - protein, 313 aa, unidentified
MKEEKTFIGIDVSKEKLDVGVRPQADFMTFANTEEGISLMTDFVKSKRPELIVLEATGGLEMAALRSLAVAGLPAVCVNPRQVRDFAKAMGVLAKTDKIDAHVIARFADSVRPEIRPLKTEETEMLDAFNTRRSQLIIMLTAEKNRLTTASKWTKKDIEKSIKGLEKALAKINREVENLIKKSPHWRHMDKILQSVPGVGPVMSLTILADLPEIGTMNRRQIAALVGVAPLNRDSGKYKGRRAIWGGRARIRSVLYMCVISGICHNPKIRVFYNRLISSGKKHKVAITACMRKLMIILNTMIKNGACWNESGC

SEQ ID NO: 469606 - protein, 348 aa, unidentified
MAHFVGLDVSVRETSVCVVDDVGKVILEQKVLTEPDAIIALLASLGATYGRIGIEAGPLSQWLFNAVTAAELPVICVETRHMKALLTAQQINKTDRNDARGIAQMMRVGLFKPVHVKTLVAQEQRMLLTSRKLLQRKLLDLESDLRGTLRNFGLKVGVVSGSRYEARVRELVAGFPRLAAIAEPLLNVRRVMRQQLAVLHKMLLDTVRGDPVCRRLMTAPGVGAVVALTYRATVDQPQRFVHSRAVGAHIGLTPKRYQSGEIDYDGRVSKCGDALLRTMLYEAAQVLLTQSRKWSWLKAWGVRVAQRRGMRRAIVAVARRLAVVLHRMWVDGSEFRWNKASAAVPTAA

SEQ ID NO: 469607 - protein, 316 aa, unidentified
MAMRVSKSIVGVDVAKVELVTYQADPDLLTSITNEKSAIKRWLKTLPRTTAIAVEATNVYHVDLVELAYESGFDVYIIDGFQLSNYRKGVGGRSKTDASDARLLARFLKNEGENLRPWTPPPAVYGKLQSLLRRRASLIQAKTSLTQSWANDTSLKASFAAFLKSIARLDLLVKAKLKDALREAGLLEQVARCQAVEGIGFLTATALVMAYNRGDFKSGDSYIAFLGMDLRVTDSGQKNGRRFLTKRGCSEIRRLLHNAAMSASRSSAWKEFYDHHRSRGKATTQVLVMLARKLARVAFALMKNQSEYQPKGWVMA

SEQ ID NO: 469608 - protein, 371 aa, unidentified
MKKDSTTKFIGLDVHSKTISVAIADEGREGEVRHYGTIENTFEAIDKVIKKLTATGVELKFIYEAGPCGFALYRYLTGNGFKCIVTSPAMIPRRSSVRIKNDRRDALNLARLYRAGELTGIYVPEPEDEAVRDLTRARDDARVAERKAKQRLNSFLLRNNLIYPGKTKWNRTYFNWLGSVGMKYPAQKVALQEYIEAANECTGRVARLTEQIRLAVEEWRMAPIVKALQALRGVSLICATVTVAELGDLTRFQNPKELMAYLGLVPSEHSSGETIRRGGITKTGNGHARRVLVEGAWTYKHHARITPPLIKRQRDLPKSICQISWKAQLRLCARYRKMVARKKPNNVVVIAIARELAAFMWAIAQEVKAAA

SEQ ID NO: 469609 - protein, 461 aa, unidentified
MREARAEFVAPSSYRFVTDDHPALEQQLFDVANAQLKPEGSMTLREARAGPPWEIERGLALLSEPHGRGLGHAPAISSTEASMRNDSTVYVGLDLHKDSITVAYAIDAGEIELLGKTGTTGADIDRLCTRLQSKAPHVRVVYEAGPCGYGLYRQLVQKGFDCMVCAPSLIPRKPGERVKTDRRDAIKLARSLRADDLSAVYVPGIEDEAFRDLARAWAAAREDLRRARHRLKSFLLAHGVRYTGSANWGEAHRRWLGRCSFPSAWQHLAFDEHRRTIEDRLAQCARLETALREAVISWRFYPVVLALQAMRGVQFVTAVGMVSEVGDLSRFEHPRQLMAWLGVTPSEHSSGGKRRQGSITKTGNSYARRLLVEAAWSYRHPARVSPEIQARLEGLPKAIIDRAWDAQVRLCRRFRRLTARGKPINITVVAIARELAAFIWDISRLAMALAIPRSKPPAACV

SEQ ID NO: 469610 - protein, 320 aa, unidentified
MDINTIGIDIAKRTFQIHGVDRNGKTVLKKKVSRDQVLSFMVKLPKCLIGIEACGGANYWARELIKLGHEVRLIAPQFVKPYVKTNKNDQADAEAICEAVTRPNMRFVPIKSIEQQDILSIHRVRERLVRNRTALANEIRGLLLEFGFIIPQGINKVIVKLTEILDEGKLSELSYQTFNKLKEEFVENDKKVKELEKRLKVIAMDSRQCQQLITIPGIGLITATALVASIGNAANFENGRQLSAWLGLVPRQHSSGGKERLLGISKRGDIYLRTLLIQGGRAVLNAKLRFISEEQKSKKDYSKFTGWIFNLIERRGHLKR

SEQ ID NO: 469611 - protein, 442 aa, unidentified
MHYVGLDWASETHDLTIIDDTATIIDRWAFTHDEAGITTTLARLAGHDTPGELPVAIETSNGLLVERLLSAGHPVVPIHPNAFNATRPRWGASRAKTDPGDSYKLADYLRTEGHRVRRLTLPDQATRDLQQLVRLRDDHVAAKLACTNQLAALLARHWPGAGTLFAHLDSPIALAFLADYPTWTSAQRLGEARMAQFCRRHHYSGRRTPAELLARLRDAPQPAQPAISDTVAAQLVTAQATLLRSLLGTIASLDKATTETTATHPKVTLFAQLPRVGRIHLAQLLAEIGPILDRAVTLEQACAEAGVTPVTKASGKSLNVGFRYATNTRARQALTLWADNSRHAAPWAADAYRAARRRGKRHPHAVRILARSWMRVLWACWEQNAAYDLDRHATARAHHGAPAAARPTTERQPMTTNREIRRKGLTQETHSLASEQAKHADG

SEQ ID NO: 469612 - protein, 399 aa, unidentified
MSRRCIGLDVHRDFCEVAIWDQGEVRSAGRIDSRPKTLAEFAATLGPGDEVALEATSGARQVAEILRPCVARVVIANTHRLAAISEAKCKTDRNDARTLAQLLAAGMLEGSWLPDEQTRALRRRVSRRHNLVVARTRAKNEAMSVLHRNLSQRPPMSDPFGVKGRKWLGALELPDDEVETLSASLRLIDFHGAEIETIERELARFAASSAEARRLITVPGVAMVTAVTFLAHVGEIGRFAAPKQLVGYLGLDPRVRQSGNGTAFTGRISKEGSVLVRHVMVEASHSAIRTPGPLLAFYQRVRSRRGHAVAIVATARKMVVLFWHLLTHGEDYRHSIELVTNKKLRKVELLAGAPRRRGGGRCEGPNRDQRREIDRDRAQRAADDYRRVAERQTDRAPTR

SEQ ID NO: 469613 - protein, 407 aa, unidentified
MRLFVGDDWAEDHHDVELMDAAGRVLARNRLPEGVAGMARLHELIGQQLGEDGEDTEVLIGIETDRGPWVAALVAAGYTVYAVNPLQASRYRERHGVSGAKSDRGDAHMLTDMVRTDSHQLRAVAGDSADAGAIKVVARTHKTLIWERTRNGQRLRHQLREYFPAALEAFDDLDAPDARELLAKAPDPARAAKLTRAQISAALKRARRRDITGKATAIITALRSGQLGQPPAVTAAYAVTVRSLIAVISTLTEQVKALEGQVEAYFGRHPDAEIYLSQPGLGYVLGARVLGEFGDDPDRYVSGKTRKNYAATSPITRASGKKKVVAARFIHNDRLIDALMAQAFAAMNASPGARALYDAERASGTDHNPALRKLANRLVGILHGCLKTRTLYDEATAWSHHENKLAA

SEQ ID NO: 469614 - protein, 349 aa, unidentified
MVTAIGIDPHKATHVATAIDGNGAHLADLRVKARDSGHVELIGWARREFPGERLWAVEDERNMAGRLLRDLLAAGERVVTVPAHLAVEYRKRGRKRGKSDKIDALAVARTALREQLHQFHLDQASRDIKSLSDYRTALTEERTRAQNRLRDLLHQLDPDLAASIPSSGLTRYVWLDMITNQYTGQSGVPVSIVLDLTQTCRDLTIKINKLAKQLSGLLATVAQPLIGLPGCGEITAAVIVGEVAGVQRFRSSEALASYAGIAPLDASSGQDNSHHRLNRGGNRRLNWAIHMIAITQLRLHQPARDYYDRRIRQGSTRKVAIRALKRLIIRRIFDLLRRATATTLTTATT

SEQ ID NO: 469615 - protein, 345 aa, unidentified
MQIKSIGIDLGKTTFHLVALGAHSQVVIRKKFSRQQLLNDTANLPSCLMGMEAGVGSHFLGRALREQGHEVRLIPAQFVRPFVKSNKNDYCDAEAIAEAVERENMRFVPIKTEDQLDLQALHRVRERLVSRRTSVINQIRAFLLERGISFRKGPASLRRQMPEILENADERLTARMRRLLDFLWQEWKHLQQQIESLSEDLEKIANSDAACVRLQQIPGVGPLVATAVVSAIGNGSAFHKGRQFAAWLGLVPRQWSTGGKPKLLGISKRGNPYLRKMFIHGARAAVLRVKREGSCLGKWMSGLETRAARNVVIVATANKLARISWAVLSSGNDYRPMHPAVRCSS

SEQ ID NO: 469616 - protein, 388 aa, unidentified
MQDVADQSVTPTTMGADLCAIFVSLELSRSTWLATSLSPGRGEKMSKHSVSAGDIAALLARFSELRRKACARTGKSFPIVVIQEAGLDGFWIHRVLLSEGIESHVVDAASIATSRRRRRAKTDRIDGETLLRALLAHKRGEPRVCSMVRAPTPEDEDRRRVCRERKVLIMERVQHVNRIKGLLFSQGASGYEPLRRDRRVRLDALQTGDGRRLPPHLKAQVCRELDRLELLLEQIKAVEAERDALLDAEQTEASAPPPMLLGVHGVGPEFASVLWSEGLSRHFDNRRQVAAYAGLAPTPWQSGSVNREQGISQSGNRRLRTMMIQLAWLWLRHQPRSALTLWFKDRTERNGGRRRKTTIVALARKLLVALWKYVSAGVVIEGAMIRAA

SEQ ID NO: 469617 - protein, 381 aa, unidentified
MTTTAPHKAHDTTPGRALFVAFELSEKTWKLGFTTGHGQKPRERSIAARNQTRVLQEVAQAKRRFGRPETAPVFSCYEAGREGFWLHRFLEAQGIPNHGVDSSSIEVNRRKRRAKSDALDVRKLLSMLMRYAHGARDVWRVVRVPSVEAEDQRHLHRDLETLKQERASTTTRIKGLLSSQGVRLTSVNKLPEQLEALRLWDGSPLPSGLRRRVLRVYAHHQFLSEQIAALEAERRARLQSAHDASIEKVHQLMHLRGIGINGAWLLVMEFFGWRALKPRREVGGLAGLTPTPYQSGESAREQGITKSGNRHVRWMTTELAWSWLRYQPESALSCWFRERFGGGGKRMRRIGIVAVARKLLIALWRFLETGVIPQGAELKAA

SEQ ID NO: 469618 - protein, 384 aa, unidentified
MTTMTLPQSTASTTTPMTLLLAFELGERTWKLGFTIGLGQRPRIRQVPAGAADRVLEEIARAKRRFKLPDETPVISCYEAGRDGFWLHRYLLAHDVVNHVVDSSSIEVNRRARRAKTDKLDLAGLLNLLARYRLGDPRVWRVVRVPSVADEDARQLHRSWETLQQDRTRLRCRLQGLLTTQGVRLRIGEDFLSQLAAARVWDGTPVPAGLQARLTRVWAQLELLNEQLAALETARAALTVDAATATGPYVQQLPTLRGIGPVGAWVLATEIFGWRQIRNARQLGGLVGLVPAPFQSGETDHDQGITRAGNKHVRRLMVQLAWSWRRYQPTSALTRWYEEKFGRGSRRLRRIGIVALARKLLIALWRYVEHGVIPEGAIVKGPVA

SEQ ID NO: 469619 - protein, 418 aa, unidentified
MTATHSTASTVLVAIDISKHRHEVLIGIPGKKRRRRITITNTLEDFQRLAIALASYELPVRIGFEATGNYHRALAHHLGQAGFDLKLVSSVGLARTREALHNSWDKNDPKDAQVILHMMEIGAVQFFHDPLVTGTADIQELSKTHEIVSRSKTELWHRILTHYLPLYFPEAERFHRSSRTDWFLAFLEKYPSPHMITVMSQEAFIADAWEVIGRKVSKERLLSDIYATAVSSVGLPVHSDSDAIRMFRLVLAEGRSLIRQRDVIEARAVELLSNLPDYQLLTTIPGIGPINAMTILAEAGDLRRFRHHRQFLKFCGMDLATMQSGMFRGQSRISKYGNARLRRTLWMAGQTAVLKRTNSFRDKFERYISKDRHNVHLRRKAYTAIAAKMARTVHAVVKHGAPYRPFFEGVSPGGRTSL

SEQ ID NO: 469620 - protein, 334 aa, unidentified
MNSTLSHVGVDVSAETLDVSVRMPAGELHAAQFDNTADGHAKLIGWITKKGRSARVVLEATGNYSLDLAFALHEAKRVEVMVVNPRVARRFAEACLQRSSTDTTMALTLCEFARRMEFVHWTPPAPEIRELRAITRRLAALIVERTRELNRAHAARASAEASKVVANDIEVNVRHLQRRIEELERHALELVAKHPALQRACQHITSVRGFADRSAVQLLGELLVLPEDMVVRQWVAHSGLDVRHFDSGTSVHKQPRISKRGNAHIRRILYMPALVAIQHEPNVRVFYEQLLAAGKQKLQAIVAVMRKLLHAIYGMLKTDTNFAGEKFRKLPQAA

SEQ ID NO: 469621 - protein, 369 aa, unidentified
MLNARSSGSSRRGRPYRNRVESPFLSLGRHDVLRSTRTVARDLPGIPHHPQVREKGDPMSEQALFVGIDVAKDRLDVAVSPSGETKPFTHNHQGLSALTAYIRALSPALIVLEATGGYHKTVLSTLAAEGLPAVAINPRQIRDFAKATGTLAKTDRIDALVIARFAEAVRPEVRPLRDEEAERLQALITRRRQLIEMLTAEKNRLAMAAQWTRKDIRAHIHMLERQLKRIDDQLKDLIDQSPLWRQKDQILQSMPGVGPVLARTLLAELPELGTLNRRQIASLVGLAPFNRDSGRFRGRRMIWGGRAHIRTVLYMSAVVAARFNPVIRAFYQRLKEAGKGFKVAITACMRKILIILNTMIKNNTYWKYA

SEQ ID NO: 469622 - protein, 328 aa, unidentified
MSKDVFYVGVDVGSREVCGSVAGLKARCFAHSGKGIVSLRAWADKTAAGREQHFCLEGTGVYGVSVATLLLREPDTRVSIVNPAQIKAFAKAQLRRCKTDQVDAEVIRQFAEATQPPLWQPPSKEQRQLSELVLLRDQLLAELQQWRNRRHSREYLNDLPTIVKQTYQGLLRSLRRQLQKVESAITAFVAENAQIAQQVQLLSSIPGIADRSAVQLLAYGQNWLTDVSAKALVAHCGLAPHPKQSGSSLNRGGALDKRGNWRIRKALYMPTITAIRHNPIIKNFYVRLCARGKAKMVAIIAAMKKLLLIARAILKHKKTFNCNLKLLT

SEQ ID NO: 469623 - protein, 341 aa, unidentified
MGEVSMIGVDLAKSVFQVHGADASGSVVFRKKLRRNQVLSFLAAQPPCTVAMEACSSSHHWAREISTLGHAVRLIPPAYVKPFVKRQKNDAADAEAICEAAQRPTMRFVAPKSEQAQAAALVFRARDLLVRQRTQTINALRGHLTEFGIVVAKGPAHVSQLVQAVENPDDPLPEIARPILQILIDTLHRLDEQIAVLDCEVARRAKADETARRLMTIPGVGPVTAVALTALAPPAPTFRRGRDFAAWVGLTPLQHSTGGKQKLGATSKMGERTLRRLLIIGASAVVRWAARHGAPAGSWIARMLARKPPMLVRVALANKMARIVWALMAKGGTYQAPAMSP

SEQ ID NO: 469624 - protein, 404 aa, unidentified
MWYVGLDWADTHHDVEVQDEAGKRIGARRFAHSHAGLHELKAFLLGIAASPEELACIVETNHGLLITFLLEAGIPVYPVNPKSANRLRKAAGAKTDRIDAHLLAKLGRFDLAELRRLEPDSPSVAELKTLTRDQDALIQTQTRLVNQLTACLKEYYPAALHLFTKVQQRSTLVFLQVYPTPQAAQAASIEEITATLRTSKHTNPRCAAAKIVEELHRPQLVASPVIVRAKSRLMLSLVKQLLVVIEEIASYDKAIRPLFLSHPDQELWSSLPRAGKRLAPRLLAEWGDDRSRYADATSVQALAGTAPVPFQSGNYAKAHKRFACLKPLRNALHQFAWQSTLQEGWARDYYQRKRAEGKTHSMAVRALANVWVRIIYRMWMSATCYQTATFEAAQLAHAPRQHVA

SEQ ID NO: 469625 - protein, 456 aa, unidentified
MPRDRTRSKPAGLPIIHPFAAGIDIGSRFHVVAVSPDLSDEPVQTFQAFTGDLQRMADWLVATGTKTVVMESTGVYWVAAYEVLESRGLEVVLANAREARAVPGRKSDVNDAQWLQRLHACGLLRASFRPGRDIAELRSYLRARERHTDYAAAHIQHMQKALTFMNLQLHHVISTVTGITGLRIIRAIVAGERDPDKLAAMRDVRCKESVETIRNALIGNYQPEHVFALKQSLALYDFYQRCIDECDAEIERAVALLNTERPMPETPLPKAKHRTKQPGEPNFDVRSAMFQLAGTDLTQIHGIGPFLALRLIAECGTDLSRWPTAKHFTSWLTLSPGCKISGGKVLSAHTRKTSSRVTVALRLAAVTVGRSNTALGAFYRRLAARIGNAKAVTATARKIAVLFYNAMRFGMNYRDPGADHYEQQYRDRVIKQLHRRAAQFGFTLQSQDLPDLGCVS

SEQ ID NO: 469626 - protein, 468 aa, unidentified
MKPFYLGIDVSKGYADFVIVDAQKKPVIKNFQLDDTFDGHNQLYAILSQFFVDNPNSTLYAAMESTGGYENNWFNALTHFQGTLNLQTARLNPLGVMHNSKADLKRNTTDKISAQNVAEYMISHPEKVTYQKHDQLAGLRKQWTFIQMLTKQRTQLFNQLQSLLYSANPELLKYCKDGMPAWVIKLLQKYPTAEKLKNARVKTVAKIPYVSLDRAQSLIANAKRSVASMTDPVIAQLITATAGQILHLKKTIDSQTDLMTAQCKTPEVELLKTFPGIGSSSAIGLMLEIQTITRFKTVKKLASFWGLHPAYKISGDGSGAFKMSKTGRKQPRRILYLVALSAIENNPLIKALYQSQTLKGKHKMDAIGVCMHKTLRIIYGMLKNNTAFNPNIDRANKKNMKSGTNNLKIGKERRFQSYDTNAPVSRRQKSKRLEREKSHSVNNTKSEIDTLVPIKDVIEEILKKISNY

SEQ ID NO: 469627 - protein, 349 aa, unidentified
MLYTGLDLHKSFTYITTMDERGEILGQKKLPSNGQVIDFLKEFDDRMEVAIEATPSWYWLYDHLEEEGFQVKLSHPLKTKAIAYAKVKTDKVDSETLAHLLRSNLLPLSYVPEKSIRLNRELLRYRASLVKVQTGVKNKIHTILAKNNISHDYTDLFGKHGMIFLHGLTLAENYKIALEGYLTLLDAVRAEIRIASNRVQQLAEADKETQLLMTIPGMGYYSALLTRSEIGDVNRFHSAKQLCAYAGLVPSTHASGNACFHGHITKQGSRWLRWILIESAIHAVKREGPFRRFYFRIERKKGGQIAKVATARKLLEWIFHILRDARTFPEMERIAETTGRGELAKSPGL

SEQ ID NO: 469628 - protein, 338 aa, unidentified
MKLYTGIDLHSSNSYLGIVDRKDRVVFEGKQKNDLEGILGVLEPYRKDIEGVVVESTFNWYWLVDGLMDEGYRVHLANPAAVKQYEGLKFIDDKRDALWLARMLRLGVLPEGYIYPKEERPIRDLLRKRLHLVKHRTSHILSIKNSIARNRGEKVSGNQVKQMEEEDAWEIFTEEHLSLAVESSIAVMRFLGRRIRKIEKVIKEKIRVRKPFKSLLTIPGVGDILGLTIMLEVGDIRRFPKVGNFSSYCRGVRSSWESNGKQKGQGNRKNGNRYLAWAFVEAANLSIRHCPYAKAYYQRKSAKTKGVVAIKALSHKLARAAYYIMRDQVPYDPLRLFG

SEQ ID NO: 469629 - protein, 312 aa, unidentified
MWVGIDVAKDSLDVAWSSGDQSQHFSTANTRSGLSSLVRQLPAPSEARIVVEATGGYERALVTALVEAGYRVAVVNPRHVRDFAKALGILAKTDRIDALVLARFGQQVQPRLLEEDPAQRAELMQLVTRRRQVIDLRTMESNRLQQTTVRAAQKSIQHVLKLLEKEVDQLEAEIARLLQSDDDWRAKVELLSTTPGVAQVTSATLVAEVPELGRLNRQAIAALVGLAPFNNDSGRHRGQRRIAGGRASVRRVLYMATLSARRCNPVIRAFAQRLAAQGKKPKVIITACMRKLLVILNTMLKNKTPWKDVHAY

SEQ ID NO: 469630 - protein, 522 aa, unidentified
MKREKSNTKIAGIDVGKRQLDVAVHGVAGGQIFANDVQGVSALVAWLKGQEVGRVGLEASGGYERAVREALSAAGFEVVVHQPAEVRMFARLKRLKAKTDRLDAVLIAAATAQVDAVKAANDPRLVELGERMTAYEQVSEELAKVKTQMEHVTLKDLVEELRVHMLRLKALKAKLLAKVLAVIKAHADLATRYKLLLSLPGVGRVVAVSAVVRMPELGAMDRGQAAALLGAAPFARDSGQYKGMRFIIGGRGRPRRMFYIAALSARHHDPALKVFGDRLKAKGKPPKVVLVAVARKLVEAANLVLARGEPWVSQPQGAHPMHEAAFLENKEKCPSRCGSCCGVVGEASRRSPSPNPLASSINPQGNQNAQKSTVTWLLPRKRAGEESGAPYVPGSASRRAASCSTIRSWARRLVVRPEASRYRWDMSQVLTAREANQQFSKVLAKVEQGETVRITKHGRTVAELRPASDDKRDDPEWRAKVEDMMAFMRAAPRTGRRVGKITEDDKYGEVYESLAAQTALDS

SEQ ID NO: 469631 - protein, 536 aa, unidentified
MVDTRQEAKERRKERKANEKEEKAFKKYIKSAKVEGLPKLNPNAAGIDIASEVHYVAVPPGRDPEGCIREFGPTTPELRDLADWVKECGVQSVAMESTGNYWVPLFELLEERGLDVIVVHAQYVKQIPGKKTDVLDCQWIQTLHAHGLLKKCFRPSKMVGPLRSLMRNRETWIQDASSYIQHMQKSLDLMNVLVHRAVSDITGETGMKIIKAILDGERNPKVLAGYRNYRCRKSVEEISKALDGHFQDHYLFCLRQALAGYEMCQKMLRECDIVLERSLIQYESALYPESESVSESESESESKSESKSEPKPKPESKPKPESVRESEAVSESKPEALKQPLLRKPKGNEPHFNVEGYLRKICGVNLLAVGGIGAVNGLTIISEHGADLSAWDSYKKYTSWLGLCCGNNVSGKKSKSGKTRVVKSRVANAYRMAASTVRNSRCPLGKYYRRMKAKLGPAEAVTATAHKIARIVYTMLTTRTEYSEGMVEFANDDQTKKRRKRLVKLANDEGMFLLDAEQYAKVVEMLLDPNDLAAVS

SEQ ID NO: 469632 - protein, 356 aa, unidentified
MGEGSWVGLDVHARSVVAGVIDQGSGEVRSLRVPAGCEAAVAWLQTLPAPVRVVYEAGPTGYRLARACAEVGIGCVVAAPSRVRPAADRVKTDRRDAERLARLLRLGEITSVRIPSLEEEAARDLVRAREDARGDLMRARHRLSKLLLRHGLVYEATAWTRTHDQWLRRQRFDGGPLAVVFDECYGRMLDAKSRRDALDKAISELAATPPYVDVVERLVCLRGVSTLTAFALTVELGDWHRFRPASLGPFLGLTPSEYSSGQRRRQGAITKAGNSHVRRLLIEAAWHQRAPSRRSITLERRRVGKPLAVQAQAERSARRLHQRWHALETRGKPRTIVVVAVARELAGHCWALATME

SEQ ID NO: 469633 - protein, 349 aa, unidentified
MRYFQPAAETRFYAGVDLHARSLFLVILDHTGQLRYARNLPANPQAFRKAIAPFRDGLVVGCECMHCWYWLADTCRDDHIPFLLGHAWGMKAVHGSKTKCDRKDAEAIARLLKGGNFPLAYAYPKERRGLRDLLRARLRLVRQRAELYGHIHTARRQLNLPPVSNDVKYKSKRAAITADIDDACVRRRVEADLSLLEPLDSTIRRLEKDIEVAARQHYATEMAVLQSTPGVGLVIALTILLEIDTLERFDTRQQFCSYARLCGARQESAGKTVGQGNAKQGNAWLKWAFSEAAVLSAQKNERIGKYLDKLSSRLGKAKALSALAHKLGRAFYHMLQKKEVFNIDKFLRH

SEQ ID NO: 469634 - protein, 345 aa, unidentified
MPVAEVDTFAGIDVSAHELSVALHRGQGHDKPAMAKFPNHPSGHKALVAYLLRGGGRVRVCLEASGNYSLDLALTLQAHRQVEISVINPRRARRFAESLGERSKTDPVDARVLCEYAARMPWVRWQPPSPVALHLRALTRAIADLGVIHTQQNNRAYAAAASQALPVLVVKEMQRHKKYLEQRMTRLRREAVRLIACDPELDRRFRLMLTTIGIAETSALQILGELAVLPDMLDARQWVAFSGLDPRLFKSGKSVEKRPRISRSGSRHLRRALYMPALVALRRDPYLRVFYQNLLARGKARLQAVVAVMRKLLHALFAMFRSNQPYDGSKLCAVDLAVHAIAACA

SEQ ID NO: 469635 - protein, 428 aa, unidentified
MMNKRGRVIGLDVHPDSFAGAVVEGSDPLSAKVLSTSTRVELKQLEQWALRHTRAEDTLVLEASGNAFAVAGRLRAIGRRVEILDSHRAGKVGKVYCANDRVDAVKIARIYLSALSPIVWQPDEKTLERREVFSAYQGVVKESTRAKQQLRSMLNEHCVRLEKGFRLCHPNAITRLLKLCEWTPARKMLLQQLHGSLVAARARRTLLRRHMAQEIVAEEALLRLPRLCGINLITLYGVVAAVGDVRRFTHSKTLVAYIGLNPSVSQSGNFEGSGALKRHGRGALRALLIQSGKKLLEVNNPLQKWGLAVAARRGRNKAAVAVARKLCVAVWHVLMGHVIGALERLDTLETKLSKFATEMGPAALSALGYNTKQTSWRKNFMSYEAILDLTTCLHRLVRCVYAEHNLGMIKPVGPTSCASARITGSMSI

SEQ ID NO: 469636 - protein, 322 aa, unidentified
MLSIGIDISKASFDVAFLDTGKYQNKQFINDLKGFKALIKWLKLHSKNKVFCMEATGIYGVMLAKYLHQLGEQVIVANPIKTNAFAKMEMSRNKTDKADAQSIARYCAHIIEKGDLNKNLFTPKGEAFECLQYLITRLDQLSKMRSGENSRLQASLNKTASKSIRSILRTIDKQTLVVEAEIESLVSNNKQLKAQVDLLNSINGIGNKTAWAIIAYMGDIALFDNAKQVTAFAGLNPKITQSGTSVNKTSLSKVGHKKLRKSLYMPALVAVRYNPLMLDLYERLQQKGKPKKVALCAVMRKLLVISYGVLKSGRPFDVNYAK

SEQ ID NO: 469637 - protein, 379 aa, unidentified
MDFSSVALPSVGDKPATLFVALELSKATWLVALHSPAADKVSLHRLAGGDVQELLTLIARKRDQAQAALARPVHVMSCYEAGYDGFWLHRLLCASGIDNRVLDAASLLVDRRSRRAKTDRLDAAALLRTLMALDRGEPRVCRVVRVPSPEHEDERRRSRERARLVNERGQHASRIKGLLMTQGIRDFAPTRRDWRERLAELRTADGRALASCLTAEIERECRRLWQVIGMIAEVEAEQHRAAEQASTGAIQLSRLRGIGLTSASVLANEVFFRSFQNRREIAGSLGLASSPWNSGSVSHDQGLQRSGNPRARRTAIELAWLWLRHQPESDLARWFQERVGAGKGRIRRTMIVALARKLMVALWRYVTQGLVPEGAVIKG

SEQ ID NO: 469638 - protein, 460 aa, unidentified
MRKPVSTKKRGPGKVKKDWESLPPLNRNAAGIDVGSAEHHVAVPTGRDAEPVQKFGSFTADLHRMARWLKACGVDSVVMQATGVYWVALHQILEDYGLQVNVVNAQHTKTLPGRKTDVLECQWLQKLHTFGLLNNSFRPTDEIRVLRSYMRQRERLVTAAGTAIQQIQQALTEMNVQLANVISDISGKTGLAILRALGNGERDPQVLSQFRHESIHASREEIARSLEGNWRNELLFALEQNLALYDMYQLKIAECDERIARQLKTMEPKNQPEQPQGDASRPSRRKHAPEFYLREQLCRIAGVDLTQIDGIQARTAQTVISEVGVDMNRWRTEKQFASWLGLCPDNRISGGKVLKRGTRQVTNRAATALRLAAWSLLRSQSALGANFRRLRRKLGAPKAITAMAHKLARLVYRMLKFGKEYVDKGAEHYESKFRQQQMKWLMKQAAALNLQVTPLSEVAD

SEQ ID NO: 469639 - protein, 347 aa, unidentified
MRFYTNQHKFYCGIDLHARSMYVCILSQDGEILLHRNMKAAPEPFLKAVAPYRDGLVVAVECIFTWYWLADLCADEGIPFVLGHALYMKAIHGGKAKNDKIDSQKIAALLRGGMLPQAYVYPAAMRATRDLLRRRTHLMRKRAELLAHVQNTNSQYNLPEIGKKIAYKANRDGVAERFAEAAVQKTIEVDLALITYYDELLKDLELSLLKTAKHHDANTLYLLQTVPGIGKILSLVLLYEIHRIDRFPSVQAFASYARLVKCSKESGGKRLGTSGKKIGNAHLKWAFSEAATLFLRNNPQGQKLLARLEKKHDKGKALSILAHKLGRAVYFMLKRKVAFDMEMFLQT

SEQ ID NO: 469640 - protein, 338 aa, unidentified
MPTDQTGQTYALFVGVDIAAQSAMVASQRPGAKASRSFTIEQTPEGYTSLLRQLQATGFVPGQVLVVMEATGSYWISLATRLVHEGFAVSVINPAQAHHFAKALLKRAKTDAIDAQTLAQLAMILQPEPWTPPPQIYYALQQRLAQRDDLLNLRQQVRNQLHALVQHPEVIAEVHARMERLLATLEAQLTEVDSEIAAALSQDSTWAAAATRLQSIKGVGWVTAAWTLVTTLNFTSCDTVDALTAYAGLAPMPRQSGSSVWHRPSIGHTGNGRLRTAFYMATLSAAQHNPVIKTFYTRLREAGKPEKVARCAAARKLLHIAWAVVKKDQPFDPNYALG

SEQ ID NO: 469641 - protein, 398 aa, unidentified
MKTSGLDVHKDTIFCAIYDGISYSAVKEFSTTTVSIRALGAYLQSEKVKKVAMESTASYWVSVWDVLYETGFELKLVNPLHIKQLPGRKSDAKDAQWIAELLHKNMLRGSLVPSPLIQELRSYTREYRTLVNQRTKVLTQMDRILVMCGIRLSSCISNIDSKSFMLIVEALMRGETAPDTLVKLVYGNRKNKESGKLKECLTGNMKAHHRLKLTTCKQQFDLLENQIQIYLNEMQKLCSEHFSEAINNLTTLPGVSHISAMIIVAETGGDMSVFENSGKFTGWTGLRPRNDESAGKFKSTATTKGNKHLRAIIVQVAWAASRTKGSFFMDKFTKLAIRKSRKKALVAIGRKMLVIIWHILSEKTQYNPNLVHIYDPVKVEHKIKYHEREIERAKKLIA

SEQ ID NO: 469642 - protein, 402 aa, unidentified
MRDAWVTLLLGRNYNAEPQAERNRSMKKVRFLGLDVHAETIAVAVAEANGEVRSLGIIPNREEAIRKMIKKLGPAEQLRACYEAGPTGYVLYWQLTALGVNCEVVAPSLVPVKAGDRVKTDRRDASKLARSYRSGDLTPVWVPDQEHEALRDLVRAREAAKQDQLRARHRLGKLLLRHGRRAPAGIKAWTHKHLEWIKEHVHFEQAALEYTLWDYWHEVEHVSERIRRLEQAITEAVKLVPAQMQEVIRALQALRGIAQLSAVTIVAELGKISRFQAAGQLMAYSGAVASEHSSGKHIQRGRITKTGNAHLRRIVIEAAWSYRHRPSCGWALRQRQQGLSEEVKEIAWKAQHRLHQRYRHLLGRGKDKPKVVTAIGRELLGFIWAIAVHVERKGSQPTVAVA

SEQ ID NO: 469643 - protein, 345 aa, unidentified
MQVTTIGLDLAKNMFQVHGVDVNGLVVVRKALRRAQLLLFFKELAPCLVGIEACSSAHYWARELSALGHTVKLMPPSYVKPYVKRGKNDAADAAAICEAVTRPTMRFVAMKRPEQQAVLMLHRTRALLMRQRTMTANALRGHLAEFGFIAAQGAKGLATLIERVFGSHGSGVPLIPPLARRALAPLVGEERELRAQIKAIDAELLAWHRANAASKRLETIPGVGFITATAIAATVTDPSHFKSGRQFAAWLGLVPRQNSSGGKERLGSISKMGDRYLRTLLVVGATSVIRYARGKNAAGAQWVNALLARRPARLVSVALANKTARIIWAVLVRGESYRAAVPATA

SEQ ID NO: 469644 - protein, 454 aa, unidentified
MSVMGVPEQVEDEEHEQRLERVAAIDVAKASGKVCTRLPHEVKAGKRVTLVWDVAATTNAICELAAHLVEQRIERVILESTSDYWRPFFYVLEAAGLCVWLVNANDVKQVSGRPKTDKLDAVWLAKLNERGMLRPSFVPPADIRRLRDYTRLRLDLTRDRTRQKQRMEKLLEDALIKLSTVATDIFGKSGRDMIEALIAGKNDPKQLAELARGRMRVKHAALVQALDGRFDDHHADLARILLEQVDGLDAQIQQLTATIDELIAAMPAAAARDQAPTDTNTGGGGSEQQHTTLSVIARLDEVPGIAEHTAQVIIAELGLDMSIFPTPGHLVSWAKLSPRTISSGATHRSGTTGKGNPYLKGVLGEAAAAAAKTTTFLGERYRRIVKRRGKLKALVAVARSILVIVWHLLADPLTRYQDLGPDWHTTRINTKHKTQNLVRQLQALGHTVTLTPAA

SEQ ID NO: 469645 - protein, 337 aa, unidentified
MMIVGCDFHPSFQQVAVLDTESGELQEHKLMHATGEAEQFYRRLVAPSLVGMESVGNSQWFVLLIERLGHEIWIGDAAQIRASYMRKQKTDKRDAAHILKLLAEGRFPRIRVPDAEMRDQRQLLIHRHKLVQIRTRVKNELQHLMMNRGVQKKYKLWSVRGRAELEQLPLQQWAGRRREDLLSLLKMLDQQIEHMDQAVAVAAQQNDRARLLMTQPGVGPVTALAFVLTIGDVKRFARSKQVASYLGLIPRESSSGGKQRMGAISKQGNRLLRVLLVEAANSAVRFDPEFRKEYAHRCHQKHRAVAKVAAARKLAVRLYWMLRTQTPYPKVVTSRAA

SEQ ID NO: 469646 - protein, 370 aa, unidentified
MSNATTFVGLDVHARSVKACAFVPETGETIRKSFGYEPGEIASWVSSLPQPARCVYESGVTGFHLCRELNAMGAACVIGAVSKMHKPAADRGRKTDRRDAQFLAVQLALGVVTEVHVPDAECEGARDLARALADARDDAVRAKQRLSKFLLRHGLVYDERNAAGQRRNRWTGDFWAWVGRIDLGDAAAMATLDHYCERVREADAAKAALEAKVKSLAQQPRWKPTCDALKCLKGIDAVTAASIACEADGFARFATASGFAAWVGLVPSEHSSGESRFRGGITKAGNKHLRKLLVEAAWHYKGASRSPKDLAKGQAVDAATRRHANAGVRRLVNRRRSMDDAGKQSSVANVAVARELACWCWAVGRMAEGA

SEQ ID NO: 469647 - protein, 404 aa, unidentified
MFYAGIDWADQKHDALVLDEAGRKLGSIRVPHTPQGLDKLDAWLSKTLGGQDKQQMACIIETNHGLLITFLLDHGWPVYPINPRTVDRKRSASGAKTDAIDAYLLAKTGRADFADLHRLTPDSEKVAELKGLTRDQDSLIHMQTRLVNQLTACFKAYYPIALDLFAKVQQHSALVFLQTYPTVEAAQTASVEQIRQVLKAAGHTTAEQVALQIFEQLHQPSLRANAVTTRTKSRLAVALIVQLLPLLEQIAAYDKEIEQLFLSHEDNEVFSSLPRAGKRLAPRLLAEIGDDPSRYETAASLQALGGTSPVLFQSGNYSKPHRRLGCIKPLRNALHQFAWQSTLQEGWAKAYYERKRAEGKSHSVAVRALSNIWARILLAMLKSHKPYVTATFEAAQGAHAPTAA

SEQ ID NO: 469648 - protein, 339 aa, unidentified
MKFAGCDLHKQTITICVVDQSRRVLERRTVRCGEERSILAFFERLGDFEAVVEATASYEWFVRLIEPVAHRVLLAHPKKLRVIAESTRKSDRLDAQILAEFLALEMIPTSYRATPRQHEHRRLVRQRGGVQRRLTSVKNRLRRILCDYNADRPSLFTVDGLAYLAQVPLLGADRFAVDQMVEELHFGRRQLLAVNARLKEFAEAAPLCEQEARTLLRTIPGVGFVTTEVVLAELADIDRFGSQKRVVAYAGLSPGQRESAGKSRELHLEKNGSTLLRSTLVEAAWRLVQHSLRWRRIYERLKLRVRAKKAIVAVARRLLCLMTAILKTGQPYSLSQQPT

SEQ ID NO: 469649 - protein, 386 aa, unidentified
MPQLNDLSRSLAILEQDATLIAVIEMGQSSWLVAGIVPGVERSPLKKLAVDESALLKLLNRWREEAEKAGHRIERIAIAFEAGRDGFWLARWLRARGIEAHVIHASSVAVSREHRRAKTDRLDTELLKRAFLGWLRGERDHCKMVAIPTLAQEDAKRPNRERESLVGEQSRIVNRMKAALARLGIRGFNPKLKKAVERLDGLRTPEGEPIPPNTLAELKHDMERRRLVRSQIRDIEGTRLERLKQAPGDGPHVMVRLLARVIGVGVETADMLVQEVLSRNLRDRRAVARYGGLTGSPDESGKKRREKGLARSGNARVRRGMIQLAWRFLMFQKGSALAHWFYARTKNAPQTRKTMIVALARKLLIALWRLAREGAIPEGIVLRPAL

SEQ ID NO: 469650 - protein, 334 aa, unidentified
MSLELLAIDLGKRSFHLYGIDADGVIVSRKVSRAKLVEAVQNLAPATVAMEACASAHHWGRLFIAAGCKVRLINPRFVKPFVKGSKNDAADAEAIFEAAIRPNMRFVPVKSTGQQDIQLLHRARERLVRQRTALINHTRGLLAEYGVVLPQGSWRFEAQAPAAVSQAELSELAREIFADLLNQLDDVNGRLKKLDTRIVSICRSNAACRRLAVLPGIGPVIATALVAAVDDGRHFRSGRELAAWIGLVPRQYTTGGKPRLGGIGRRANHYLRRQMIHGARAVVSRLANHDDRRSQWLKALIARRGINRTIVALANKTARIAWVILARQEKYAAA

SEQ ID NO: 469651 - protein, 355 aa, unidentified
MPSKADTAVARTIGIDTGKNTLHMIGLDEKGAIVVREKVSRTRIAARFVNLPPCLVGIEAGMASHHVARELVALGHEVKQVPPAYSKPFRQGHKNDFRDAHAVAEAVERPSTRCVPIKTDGQLDLQALHRVRSRLIGNRTAVINQIRGFLLEHGIPVRQGYRFLRQQLPRILATRTDVLSPRMIRIVGDLMADWKYLDERIEGVTDEIEALAHADEGCQQLITVPGIGPIISSAMVAAIGNGAAFCKGRDFAAWLGLVPKQMSTGDRTILGRITKRGNRYLRMLFIQGARAVLLRPASWAKHSFGSWLTAATRRLHRNVLAVALANKLARIAWTVLAQGRRYEARVEPRVEPAAA

SEQ ID NO: 469652 - protein, 408 aa, unidentified
MERTVARGAGIDVHQGTMVVTVRVPGEDGGRQVTTHTFGTMTTDLLGIRDWLQACGVTHVAMESTGIYWRPLYYVLEGQFTVLLVNMQHLKHVPGRKSDVRDSEWLAQLLEWGLLRSSLVPPQPIRDLRDLTRYRKRQIEDRAQEVNRLVRLLEDAGLKLASVATDVMGVSGRAMMAALLQGQTDPVALAELARGRLRRKLPALRQALQGRFRAHHAFLLTQILAKVDFLEEAIDQLTAQIDEHLRPFEADIARLMTIPGLARRNATTVFAETGGDMTRFPTAAHLCSWAAICPGQNESGGKRRSGKLRDGNRHLRGALIEAALAATRARGTALHARYYRIKRHRGHKKAAVATAHQILEISYHLLRDHVTYRELGADYFDRRDRDRTLRRNVKQLEALGFKVTLEAA

SEQ ID NO: 469653 - protein, 449 aa, unidentified
MSRPQVIDDEEHERIHDKVAAIDVAKDAGVVCTRTPHPSRPGARRSRIWTVKARMNTIRALGRQLHKDGIEIVTLESTSDYWRIWFFVLEAAGLAVQLDGAAQAKNLPGRPKTDKLDAQWLARLTEMGLLRASFVPPKAIRDLRDYTRARTRLVQERTRCWQRLEKLLEGAQVKLSSVASKLTTVSAQDMIRAMIAGQRDPRVLAALARTGMKAKHDELVQALDGMSGDHHGELAQLLLDQIAGLDGKITQLGTRIEQAVTALPDAWGINADGTTGPQAGTGPDAAVIPAVTRLAEIPGISENLARAVIAETGLDMRRFPTAGHLVSWAGLCPTARQSGPRTRAGKKGQGNTWLRGHLGQAAAGAARTATFLGERYHRIARRRGKAKAQVAVARSILVIIWHLLADPSARYTDLGYGYYQDRTDKDRKLRNHMRQIEALGFTVTLNKTA

SEQ ID NO: 469654 - protein, 404 aa, unidentified
METHDIIGIDVSMGKSNCAIYHSNQCLFDFTFTHTISGFKTLLSRINLTVNPVVYFESTGIYSRPVRTFCARNQLDYVEVNPLTLHFQMSTLRRLKTDRNDAHKIAQYGIQYPQVLSQPFTPEYRKLRELTRFYAQIETDMKDKRMSLHNALQQTFPELEHLFTSRVSKLALNVIELFPHPELVSRLSQTKLKNILMKSTDKKISKVKALRRAQELLHFASVSYPATSADSVQVDEVRYYARTLINLTLKKEHLIKRLVELAKTLSEFRIMTSFPGIGDQTAAELIGELGDIRRFSSNRKLNAYIGIDLNRYQSGTYTRQDHINKRGNAHARSILFFAIRNMVRQQAAAPNHIVDYYYRLKKGPYPKRDKVAVVACMNKTVKCLLAMVKANQLYDYSYHGLKVQ

SEQ ID NO: 469655 - protein, 404 aa, unidentified
MDKVIMIGCDLHDASLVLKVADGLGPSLRKGFATARRTELIEWIRDYAAKRKATRIVFAYEASGQGFGLYDDLTEAGIECSVLAPTHLPHTAHGRKNKTDDKDAEMLLDEVRAHVLAGRKLPVVWVPNLETRDDREIVRQRLELAAQRTRIKNQIRNLFKRWKMIFPEWFTASGEWSRKSVQWLRDVAAGTTASLGEGSRVRLSSLVDLYQTLSTQLKTLDKAITRLSRSPRYAQAFRKLKLMKGVGTLCAMVFLTEMGDLERFGNRRQLGAYLGLAPSAHESGQQSDRKGHITRQGPARVRHMLCQSAWAAMRCSPEWRAKYDQIRRGSKQRSKVAIVAIMRQLGVAMWHTARSAELDEVLEEADQAKTSARARQKGAAPPALPSPRPNLSEAKATATRKGLA

SEQ ID NO: 469656 - protein, 355 aa, unidentified
MDNMKYIGMDVHKEAISVAVLNSSGKLVMECTIETKASTILDFLKGLRGSLHVTFEEGTWAAWLYDLIKPHVTELVVCNPRRNALLKEGSKSDRIDARKLAELLRSNMVRSVYHGEHGVRTLRELARSYLTISTDLIRVMTRVKAIYRSWGIACRGKQVYAERYRAEWLGKIQEAGVRRRAGFYYQQFAALRALRQEVRRELLAEAQKHDAWKLLREIPFIGPIRAALLIALMQTPHRFRTKRQLWSYSGFGIETHSSAEQRFVQGELQRAKKPASIRGLNRNHNHELKNVFKSAATVAAAKAGPFKEFYDALLAKGIRPEMARLTLARKMAAITLIIWKKAVRFDAQHLKPQTA

SEQ ID NO: 469657 - protein, 348 aa, unidentified
MIGRHRVLLSDFKKLFGMAKIGKIIGTDISKSTFSVAYRKGTSVETRTWDYTQEQMAAFAETLDEGSTVVMEATGVYHTRIAYYLYHKGIGVSVVNPLAAKNFARTLMRRTKTDKADSKLLMEYGETMDLEPWTPRETWCVEVQQTYALLESKGKELTAARNRMEALSHSVIASGVCMKMVKADIKRLERDIACLEKEIERLVKDKAGDDMKRIEEIPGIGRRTACVLIALTGSMKSFDNHRQVASYLGLCPRVYESGTSIRGKAKICKMGLESVRRMLYLCALSAMKYNKACRELYERLLEKGKAKKLALVAVANKLIKQAFAILRSGMNYDENHISEKKVQKMLAN

SEQ ID NO: 469658 - protein, 324 aa, unidentified
MTDAVLGIDVSKNTFDTNLGAGTKARSKSFANSPDGWHHLIAWLGEHKIGQVHACLEATGRYGLGIALALHEAGHVVSIVNPAQIRDFARTKLGRNKTDQVDAVHIREYAELFKPRPWTPPSPAMRRLCELQTIRAGTVAGLTEWKNRRGSGITDDLTRSLAETTIRHFTSQLEAVDQAIAETIDNDVELSAKRDLLVSINGVGKALAGIVLAELPGPDILGSSAAAAAYAGLNPQQHQSGISVNRPVRISKIGNAVLRTALYMPALSAMRYNPAVAALVDRLKAQGRLKGKQMVIAAMRKLLVLCFGVLKTGKKFDPAMAMGK

SEQ ID NO: 469659 - protein, 409 aa, unidentified
MRYYLGVDWADQTHAVWVVDERGTKLAMRMVPHTAEGLSEWGRELDEWRAQGTELWAAIERPEGRVVDFLLDHGVVVYPVNPKALDRARDRFRQSAAKSDPFDARVLADFLRTDHAQLHALEPSSAAAQELKLLTDDYQRQVRQQTRLVNQLTTALKAYYPRGLEVAELTTALAREFLRAYPTPEALTALTERQWQRWARAHRLTEARTLELWAVLQRPQLPVPAHVVRAKARLMQSLVAQLTLVVEVVGAYREAIEDFFAHIPAAQWIRTLPIGDHGITAPTLWARLGDAPGRWESFRHLQAQAGTVPVTIRSGKQQVVRFRFACDKSLRYVIDHVAFLSLRWSEWARAYYAEQRARGHSYRRALRALSAKWLKIIFVMWERQVPYDEQYHLATMTRQQLRLRQKQIA

SEQ ID NO: 469660 - protein, 361 aa, unidentified
MNATTVAVDLAKSVFQLVVAHDDWKPVESHRLNRRQFEAFFNNRAVSLVIMEACGSAHHWARWLGARGIEVRLLPAAYVRAYVRRNKTDAADALALLEAARNADITPVRVKSVEQQALQGLHRIRSLWMSTRTSRINALRGFCREFGLIVPVGARTGLETMGRLLADPDSALPALIRESMKLLLDEIRLLEARIARLEQELSQLARQSAACTRLLTIPGIGLLTATAMVAATGGSVSHFRDARHFASWFGLTPREHSSGLTRKLGRISKQGDKYLRMLLTHGARACLRAATLAARADRHLDALRQWAVNIQARTHHNKAACALANKLARICYSVLRDATAYGEPQPRLARKADRASFAVAP

SEQ ID NO: 469661 - protein, 346 aa, unidentified
MEQYVGLDVSLKMTAICIVDRTGKIEREGMVASDPAAIAAFVRLHAPHVARIGLETGATSTWMWTELNKMGLPVICIDARHAKAALKMQINKSDRNDAVGIARIMQCGWYKEVRVKGLDSHAIKAVLVSRALLVKIKRDLENQIRGLLKNLGLVIGRAKMNMFVVRAAELIEDRPELAAAVEPLLKAREAVEKQIADLDRKVMRLARNDVQVRRFMTAPGIGPITALCYLATIDDPTRFKRSRSVGAYVGLTSRRYASGEVDWTGRISKCGDPMLRSYLYEAAGVLLTRVAKWSVLKAWGMRVAKRSGLRKAKVAVARKLAVILHRMWIDGTEFKWSSKEDATQPA

SEQ ID NO: 469662 - protein, 330 aa, unidentified
MGTYNVILGVDVSKLTLDISCAERRLHLKIENEAKGFIELKKWCKTNKINLSETLIIMEFTGGYEYRFIQFCESISVAYCRISGLEIKRSMGMTRGKSDKVDSFRIGQYGEERIKRLKASKPLDKDILTLKQLLSFRKRLVRENAGLASTIKERKHMYKVNKKDVVVQIASQKIKDNELHIVKIEEEIQELIKGNTAMLRNYKILRSIKGIGPINAWMTITYTENFNSFTDPRKYAVYVGVIPFDNSSGTSIKGRKKVSHLANKEVKQELNQAAKAAISHDSEIKKYAERKLLNKCYSLVLNNVKFKLILRMFSLIKRGEMYVEDYKKAA

SEQ ID NO: 469663 - protein, 410 aa, unidentified
MTKEDFIYVGIDLHKETHTAVMIDCYNNKLGEITFPNRPADFPKLVTKVKKCNTDAKEVVYGLENAYGYGRALAVWLIDKGYFVKDVNTAISHRQAKHRGAMYRKSDSDDAEAIALATLNMLDKLPDACPNDAYWSLGQLVHRRDNIMKQRTRLVNQLHEQLCIAYPSYKSFFNDISRPTALYFWEHYPSKKYLKGKSVEDLRAELVPVSHNKCSTKTCEKILDAVASDKVKNNAYQDARDMVTLSIVSDLQHYDSQLTEVDKMLEQMYKMLGCTLTTIPGVNVITAVKILAEIGDIKRFANANKLAQFAGIAPLHLSSSGKGKDLATKQGNRRLQATIYFLAIQMVQVSSKGTPRNSVVRAYYEKRKAEGKTSQQALICISRRLISIIYGMLKHGTEYRMPVVESAGEK

SEQ ID NO: 469664 - protein, 427 aa, unidentified
MRVLHDRVAAIDVHKDMVKVAVRVPGARRGARKTDVAEYRTFYGVLQEMGRELRRRGVTHVVMEASGIYTEPVYYALAELDFTQVLVVNPAHVKALKGHKTDAKDAVRLLDLYECGAVVRGSYIPSPELKEVRDLTRYRVKTVQARTSEIQRLQKTLESAGIKLSSVVSDVTGASATAMIEALIDGERRGRVMADLAQTRLRTAGKMADLSMALSGRFTEHHALMCRLHLDQIDGLGQQIDGLDERIAVRTARYSRETGLLATIPGFGDVVIAGWLGAIGPAPHQHFATAQRLASWATLCPGNYMSAKKSKGGRTGDGGAYIKPLLVQAAWAAIRVPGRLQARFHRLVRRFGGPRNKGAQKRAIVAIAHTLLKIAYQILKTGRPYTDLGDGFYDTRDTTQAKQDYLIRQLRKLNPGCHITITPAEAA

SEQ ID NO: 469665 - protein, 352 aa, unidentified
MIIIGVDFHPEFQQIASVDTATGEFQEKRLAHGEEAENFYRALAGKKVRVGMEASGHARWFERLLAELQLELWIGDAAEIRTKRVRKQKTDRQDARLILQLLLEERFPQIWVPSWENRDLRQLLWHRHRMVQSRTRIMNQLQAVALNEGLRCQKRLWRERGRQQLESFRLAPWASRRRRDLLELLDRLNPTIAELTQAIEQEAEKCPPAQRLRTHPGVGALTALAFVLIIGEADRFHCGKQVASYLGLVPLEDSSGNRRRLGHITKQGSSILRFLLVEAAQVTVRSIPEWRSKYFHLAMRRGRKIAKVAMARKLAVCLYWMWRKGWNYEQLTKFGSHAGQPGNRHGVQSNTE

SEQ ID NO: 469666 - protein, 372 aa, unidentified
MEEVSKVHVGLDVHKDSITVGAAEAGRTPGRVIGKTTHDVNKLLKMVGKLGQPGQVHIVYEAGPTGYGLQRALQARGYVCEVIAPSQMPRRPGDRVKTDGRDCVQLAECSRAGQLRAVWVPDPADEAIRDLARAREDAVNSRTQARHQLKGFLLRHGVRYAGKSSWSKAYCRLLAALNFDPQAAQTAFTEYWLAVQAGDERVQRLTQALQASVSGWRFEPVVAALQALRGIDVISAIGLVAEIGDLSRFDHPRKLMGYLGLVPSEHSSGERLSRGSITKTGNAHARRLLTEAAWNYRFRARIGRQAQRRQEGLSEQVRAMGWKAQLRLTKRFATLLGRGVQANKACVAVARELAGFVWAIGTAASREPPIQH

SEQ ID NO: 469667 - protein, 370 aa, unidentified
MLDTTTFVGLDVHARSIKAVSLDVMTGEVRCATFGYDAGAVAEWVRSVDPKARCVYESGVTGFDLQKRLSGLGVDCVVGAVSKMIKPSADRRRKNDRNDAEFLARMLSVGNVVEVWVPDDECEAARDLTRALEDARDDLSRAKQRLSKFLLRHGLAFDERTPTGRRKGNWTRAHWSWIESIRFAEGADNDVLAYYVDAVRRAAEEKARLEGLVEAETRKPRWRRRVDSLRCLKGVDTATAADLVFEAGEFSRFRNARSFAAWVGLTPSEHSSGESDRRGAITKAGNKHLRKALVEAAWHYLTCSGRPKDLAKGQAPDRVARRHAAKGVRRLVERREALLARGVHNNKANVATARELACWVWAVGLMAEEA

SEQ ID NO: 469668 - protein, 445 aa, unidentified
MTNEIEEIPDADHEQLIDRVAAIDVAKEFGKVCVRIPDPARPGRRISRVWDTPATTNAVLTLACRLLEFGVQKVTVESTSDYWRIWFYLLESQGLDVQLVNARDVKNVPGRPKTDKLDAVWLAKLTEKGLLRPSFVPPAPVRALRDYTRMRIDFTRETTRHWQRLEKLLEDALIKISSVASKLDTLSTRDMIEALIRGEDDPQVLAGMARGRMRGKHPALVEALTGRFDDHHAELARMLLDQIDTLGRQVDQLTTRIEAVIAAIPAADAPTHDGNAHHLDATTLTAIERLDEIPGISHLSAQVILAEIGLDMTRFPTAGHLASWAKLTPRTIQSGTRQRAGRTGKGNPYLKGILGEAATAAAKTNTFLGERYRRIVKRRGKLKALVAVARSILTTVWHLLADPTRRFHDLGPDHHTTRIDKGRRIRHLVQQLEALGQTVTLAPLG

SEQ ID NO: 469669 - protein, 476 aa, unidentified
MTPQRKARSALVPIPMLSQETLYIGVDIGKFRHVAGFLSRTLLARHGRFEGCPTFAFEQSREGFRSLVDRLRELVPLEQVMVLFEHTGHYHRLLEQYLLELDITVYRVHVQERPKGMLKTDKRDALRLANMLYTQLELGAQVEDKMQLVRRAVAPTGAAAQLRGLIRHRYELSHHGTQLKNKLTAICDEIFPEFTQVFHDPNRPTALSFREQFPTPTALATASLSALQALRVRNFPSDAQLLKLQQLARETIGTKEVDRQKGLLLEQTLLLKELRLVQEHLALLQTEICAIVTNCREGQILLSIPPMGHVQAATIIATIGTIANFEKASELKSYFGWAPRRHQTGVTFDRTKLTRTGVRPVKQMLFLMAACATTMDCEWARLYHRLLPRLASYDERIKDYRGKLKVIGRIAGQMAAMIFALLKTDQELLSQVPAGQEPPPPMLYDPAIHRRHQEGHYRSLKPGTQPRKIIQLPKHT

SEQ ID NO: 469670 - protein, 370 aa, unidentified
MKYVGIDLHTNRFTCCYLDDDSMEKQTETFNLDKEGLYRFYSTIDRDTYVLVEATINTFAFVALFKDLVRETIVANTYQLKSVGIPGKKTDKLDAAKLAEKLKAQVVSGVQQIVPVTVPPKEVRDLRALFASYRTLRKEIGRTKNRIHSILKENLYPFTKEYIFGKKTRKEIRTISDDYLLSFQINLLMDILERLEETFDNLVVEIKKAGSMFMSQIEILTSMSGISVITALAVIADVIDVSRFRNSKHFASYLRSAPRVESSNDKTIIKSTTKAGRKLAITLLSQSLNHFRDENKKLNRWAEKVSVYKKKGIVRMALCRRVISEIYQMLKKGEYHYFRNPLLHEKKLAGYKKFLEHEKVLFPEKLQISA

SEQ ID NO: 469671 - protein, 274 aa, unidentified
MTAFIGIDVSKHKLDSAWLRDVETGKVKTKVLPNTANGHAELMRWLEKHTGQALAACHVVLEATGIYHEAIAHALHDAGATVSVVNPARIRDFAKALGVRGKTDAKDSVVLARYGATQHPPAWVPEPAAVRELKARLARLEALDGDIQRESNRREKSEVTGNAEILESIDTVLGTLRAERARLARDIDDHIDGHPELAQDPDLLESIPGIGAKVSQRLMATLHSRVFDSARQAAAFAGLVPVPYESGTSVRARPRLSKAGAPTLRRQALHGGGG

SEQ ID NO: 469672 - protein, 358 aa, unidentified
MEIAILGIDLGKNSCSLVGLDLVGKVSVRRRMRREMVIAFCAKRPACVVAMEACCGAHYIGRTLAAQGHTVRLMSPEYVRPYVKAQKNDNRDAEAIAEAATRPTMRFVALKSEEQLDMQTLHRVRDQLVGERTSLMNQIRSLLLERGHIVPQGRAKLVSRLAELLDDQTPVLSPRIHALLLDMRDRWMALDQRIGKLDKEFAEHACSDVHARRLLTIPGIGPLNASALIAAIGDARTFARGRDLAAWLGLVPRQATTGGKPHLLGITKRGSKYLRKMLIQGARAAMPALRKSDRRLGAWLRGLLARAHDNIAVVALAAKMARTVWALLRHERTYEVATMRACNKSTAALVRRSPMSAW

SEQ ID NO: 469673 - protein, 420 aa, unidentified
MARTVEIVYPVCCGMDLHKSFVVACIAVTDEHSHTAHHIKRFSTFTGDLRRLADWLASYNCVDVCMESAGKYWIPVFNTLEKTCNVCLTHPKYVKAIKGKKTDKKDAKWISELFKCDLVRSSFIPPPDIRQLRDLCRYYVKLTSFVSSEKNRAQNCLTMCNFKLDDVFTDVFGKRATRVLDALLEHGNSDFELDGLLNGNCKSSPEKIHAALDGDLDPMQAEKLSLIRRHMDDLGGLKTALENLIYKLAAKYQPQIDLFMTGPGVGTPLTAIRILAEIGADMSVFETSKQLVSWAGLTPQNQESAGKKKTTRIGRAGAYLKPLLVQIALAASKSDKHPELKNKYLALKKRLGGKKAVIAIARKLLTAIWHILSKNQAYNAELYRKADKPPVTREFTTAQAVAFLRSKGFVILDKETGEIA

SEQ ID NO: 469674 - protein, 379 aa, unidentified
MEIITQNEKILYIGIDVHKDTYSLCCFDFFRNELSDEMTIKATTKAVIKYLEAIKKKHREEILFACGYEAGPTGYGLCRGLQKAGYGCVVMAPTTMSNPDGKRRVKTDRIDARAIARILAYKSYSQVHLPSEEMEALKEYTRARDAKKRMFKKAKQELLSFLLRNGKTYSESGNYWTEKFFKWVKTVQFSEKWMQEAFNEYLAEVYSLKAKIELMDMKIREIAELEIIKDKVDKLVCFSGIDVTTAVETVVEIHDFTRFATAAQFVSYLGLCPGEDSSGKTKNMLPLTKAGNKRVRALFCESAKAIKRTNPYGQKSKRILERQKNASPEIVAYADKATKRIRTKMKHLEERGKNYNVSSVAGARELACFVWGMMNGKIA

SEQ ID NO: 469675 - protein, 379 aa, unidentified
MEIITRNEKILYVGIDVHKDTYSLCCFDFFRNELSDEMTIKATTKAVIKYLEAIKKKHKEEILFACGYEAGPTGYGLCRGLQKAGYGCVVMAPTTMSNPDGKKRVKTDRIDARAIARILAYKSYSQVHLPSEGMEALKEYTRARDAKKRMFKKAKQELLSFLLRNGKSYPESGNYWTEKFFKWIKTVQFSEKWMQEAFSEYLSEVYSLKAKIELMDTKIREIAELEIVKDKVDRLICFSGIDVITAVETVAEINDFSRFATAAQFVSYLGLCPGEDSSGKTKNMLPLTKAGNKRVRALFCESAKAIKRTNPYGEKSKRILERQKNASPEIVAYADKATKRIRTKMKHLEERGKNYNVSSAAGARELACFVWGMMNSKIA

SEQ ID NO: 469676 - protein, 342 aa, unidentified
MEFFAGIDLGKRRSQIKVLNQDRKVVEELKVDNDPKEFFRIFKKYKGKIDVACEAWSNAFWVWDTLAPIVRRFSIGHTSKIRWIAEARIKTDKIDAGILAELLRADLFPAIAIPPKRIRELRELIRGVIRLRRQALRYRNQVHGLLGRHGIPYKRSEVQDTKLGELVRSVELPRPARLAADALLRLEAATREEIRQLQVELQKELKGEEEINKQISLLESIPGIGFFSAALLVLELWDVTRFSDAKHLASYIGFVPGTHQTGETLWHGSRTRQGNVLVRWILVQDTWIAIHNHWFFGRMYDRYKKRKGNTRAVVPVARALLKTIHPIKRKLWSGELVSGLSH

SEQ ID NO: 469677 - protein, 297 aa, unidentified
MSQPNPLCVGIDVSKATLDIAASSDVAQFTVSNDSDGFNAIITGLRRHSVALVLMEATGGLEVAVACSLQAEGFEVAVVNPRQARDFARAMGYLAKTDRIDARVLTQMAEVINRHPERKRFIRALPDAERQALAAMVVRRRQLIAMLVAERNRLHPSHPQNKKSINTIIKALEDELVRLEKEMDSHIRNHFKEIAERLSSIKGVGTMTVSAMLAEIPELGTLSRREISALIGVAPVNRDSGTMRGRRTIFGGRAGVRSALYMAALVATRFNPVIKNVLCAPACSRKGQKSGAGSLYA

SEQ ID NO: 469678 - protein, 349 aa, unidentified
MNILAMDLGKCKTVVCLYNDKNSKHRFGKVVTRPKQIHDLLVEENPDRIVFEICSSAGWIYDIAKTLNFEVQVANPSTEGWRWKNVKRKNDREDALKLAKLSAMNQLPTVHMPKREVRQKRSFIQYRQRLVRRVVQIKNSIRSILDKEGYSMSRGKSGWSKQSLEQLAEMALPLEECDFNNLWRGQLYVELEMLKAAGKCLAKVTSKLDELAKSDKQIRRLQTAAGVGPRLAEAIVAFVDEPGRFASGKQVGCYAGLTPKQYQSGSMDRQGRISGQGNKLLRALLVEVSWLGLRHNSWIRETYNRLLRGSPSRKKIAITAVARKLLVRCWAMLRDEQPWRDEISDKEAA

SEQ ID NO: 469679 - protein, 312 aa, unidentified
MKRFVGVDYHKRFSYGTIMDEQGAILKEGRFSNDPESVASFMDHHGGADCAAVLEATRNWTVMHDWLEAHCGSVTLARALKVCAIAGAKVKTDKIDAATLAHLLRCDLIPKAHVASPSARVLKNLLRHRMFLVKLQTMAKNRIHVLIDRHPQIPALRPANELFNRAGIQWLKSVPLPETDRAILDYELSLLEALRQRIKQAVAVVWQHAHDDPRIHRMMRIPGIGRFFAMLIVSEIDDIRRFPKAKKLHAYAGLVPSTYASGGRQYHGRIIKAGNPYLRWATIEAVWPALRKDHALNEYYQRLARNKGANKA

SEQ ID NO: 469680 - protein, 347 aa, unidentified
MAMTIVEAARAVTGGVETHLDVHVAAALDPVGGLLGTEGFTADPAGYKAMLSWLEGFGEVAKVGMEGAGSYGAGLARFLRRQGIEVVEVDRQSRQARVRHGRSDPIDAVEAARATLAGRASQPKSMDGAVEAIRVLVVAKRSARQARSKALTQMRHLSYTAPDQLRCRLKGLTIPVLVAEAASLRPTRSPDPVTAGTKASISSLAHRVRFLDAEIAGLDELIQPLLFATAPELLALKGVGPDTAASLLITAGDNPERLRSEAAWAHLCGVSPIQASSGKVTRHRLNRGGDRQANSALWRIVMVRIAHDPDTKAYIERRVKEGRSKRDVIRILKRYVAREVYRHLPRG

SEQ ID NO: 469681 - protein, 338 aa, unidentified
MQFKHFFGIDVSKNTLDLTVLDIQGNQIAYEHLANDLKSIKKCFLGVLKRHQILMEDCLFCLEYTGIYNLPLVQWLTSLEAHIWLESGSQILKSQGIVRGKSDKVDSLRIAKYAFLNRNEVRLWKAPREIIQHLALLMSLRSRFIKNKKQLEVPVKELNGFLNKQTIRSINKHNKAPLDALKLQIDKIEKEILEVIKSDERIHQLYKIITSVDGVGLVTATQVIITTNEFINITEGRKYACYSGVVPFEHRSGTSIRGKNRVSHMANKKIKTLLHLAAISAIRVKGDIQDYYLRKVAEGKHKMSVLNAVRNKIILRIFACVTQERMFEKKINFCLEKP

SEQ ID NO: 469682 - protein, 337 aa, unidentified
MRFCGIDLHSNNSVVVVTDETDKVLVSRRCPNDLQGILALLAPHRDELAGVVVESTYNWYWLVDGLMAEGYDVRLANTVAMKRYDGLKHSDDETDAAHLAHRLRLGILPTGYIHPPAERALRDLARKRIQLVRSRTQHVLAVENILARSTGSRPSAAAIKRLAPTDIGTLGLATDVALAVQANLAVIATLNLEIERIEARLLEGVKLRPDYVRLKTIPGIGEVLAIVIMLETGDVSRFAQVGNFASYARCVDSARYSNGKKKGEGNTKNGNAYLVWAFVEAANFARRYSEEARRFFERKKARTNSIVATKALAHKLARASYHILKEKQPFDVKRCFA

SEQ ID NO: 469683 - protein, 349 aa, unidentified
MRFYNNQHRFYCGVDLHARTLSLCILDSAGAIVLHQTLPAGPDAFLRAVAPFRDGLAVACECMFAWYWLAALCLEEKIPFVLGHALYMKAIHGGKAKTDKIDAHKIAVLLRGGMLPQAYVYPKGMRETRDLLRRRTFLVRRRAEALVHLTNTNSQYNLPPFPKKLAYAQNRADLDLPQRFADPSVRKNVEVDLALIDAYDAQLGDLELYLARTAKVDDPQTFHRLRSVPGIGKILALILLYEIHDIGRFPEVGQFLSYARLVRCAHESAGKKQGTGGNKIGNAHLKWAFAEAACLFLRESEPAKKWLARREKKHGKARALGALAARLGRTVYHLLRKREVFDAKRFFAS

SEQ ID NO: 469684 - protein, 343 aa, unidentified
MQAITTIGLDIAKSVFQVHCVDAQGNVVLRRQLKRRHVLLFFQKLSPCLVGIEACATSHYWSRELQALGHKVRLMPPAYVKPYVKRQKNDATDAEAICEAVGRPNMRFVETKTPEQQGCLTLHRTRHLFIRQQTSVINAIRAHLAEFGIVAPVGRRGVDQLLTVVADKSDKRLPEVTRSCVAALGAQLQMLKAQILEFDRMIRAWHRSSETSKRLDAIPGVGPALATALVASVADPKAFRSGRDFSAWIGLVPKQNSSGGKDKLGSISKQGDRYLRSLFTAGALAVIRYAKIHGTRHRPWLAALLMRRPTKVAAIALANKLARMAWAMMARGERYREPVALAA

SEQ ID NO: 469685 - protein, 430 aa, unidentified
MEVIYPKACGVDVHKSFIVAVICDSTSVKPQYLRKRFSTFNNSLINFRNWLLANDCHNVCMESTGKYYVPVYNALEGHISNVVVANPKWVACIKGEKDDNKDAKWIADLFKLGIVRSSFIPEKDIRILRELTRYLYKLTNMRTSEKNRFTNALTVGNCKLDMVFSDIFGKTSSAIINTILSQNEYNDKDILKNIDKHCKSSNEDILNSISGISWEDTQKQRMKVIQEHIDYLDKAIKAVREIIDSIIAPYESAITLLCSIPGIDRKSAITIISEIGTDMSQFSSHYRLASWAGLAPGCNESAGKKKSVKISRAGVYLKPALVEIAHCAVKDKNNPYYANKFNVLSKRRGKKRAYIAIARKILVAIYHMLSTGEFFNPSDASKVETSDKDKIKFTKNNFMQSTKQLLSLGLTVDELQTFVTSKISDLTPVV

SEQ ID NO: 469686 - protein, 343 aa, unidentified
MGEVSTIGLDIAKSIFQIHGVDVDGAVVIRKRISRAKLLEFFATLPACLIGIEACPSAHYWSRRLEALGHAVRLMPPSYVKAYLKRSKNDANDAAAICEAVTRPSMRFVATKSEQQQGGLMLHRSRQLLVCQRTMLSNAIRGHMAELGIISAKGRNGTAELLEIIADEHDDRIPAAARLSLDVLARQYRGVRAEIVAIEKRIHAWHRSSEESRRLEEIPGVGPIVATALVAEVGDWKTFSSGRSLAAWIGLVPRQHSTGGKQRLGGISKQGNRHLRWLLVAGAMAVIRYARQRGTKRPWLARLMDRRPIKVAAVALANKIARMAWAMMVRGERFKEPKLLPAV

SEQ ID NO: 469687 - protein, 320 aa, unidentified
MQMPTEALNIGADVAKDEIVMACARGSFPARKLANRRSALLAFLKGLPAGSRIGMESTGSYHELFAEAAHELGFTVFVLNPKDARHYAKAVGLRGKTDRVDAELIARMVAHEHAKLHSWVPPTPEQREMARLISRRAKLSSLRQALAMSLKGLEGFGGELKALRRRFDQLLARIDERLQALLEASPDRKLRARHLRTIDGVGSVVGAALLNTLERVPLKSADAFVAFTGLDPRPDDSGQHRGKRRLSKRGPAELRRLLSVAAMSAKKKPAWKPLFDHYRAKGLSSTEALVILARRIARAAWSIYTYKTDFDPARLTKCLT

SEQ ID NO: 469688 - protein, 416 aa, unidentified
MKGGDNMKNKILSTLFVGIDVSSKTNVLCALDFQGNKLLNLKASNNNPGAESMSKSIVECLISNKLNYAVIALESTSIYSVHVANFLSSHEELASFEPKVYCLNPKTIVNYRKSFVDMDKTDPLDAYVIADFARCGRITSSPWRGSQFLALQRLTRHRLHLVECITREKTYMVSNIYLKFSQLAVLDKDDKPFSNTYGATSAAVLTEFLSLDDITYSSIDDLVDFVKEKGKNRFINPDETAKLLQKAARDSYRLDKVLYEPLNVSIASSFNLIKAFETEVKTIDKAIEKNIKGINTTEYQSLKSIPGIGPVLASGILAEIGSISVFDSHNALAKYAGLTWRVNQSGGDHTSDNTSMTKTGNKYLRYYLIEAANSVKNNSPEYKEYYNKKFGEVTTHQHKRALALTSRKLVRLILDC

SEQ ID NO: 469689 - protein, 483 aa, unidentified
MKSKPQEKNKNATNNLSQRHWHEMNRKQRRETMRKIQSEDLSLEVIHPDAAGIDIGNESHYAAVPPSRDGQPVRRFGCTTAELKAMADWLKQCGMRTVAMQSTGVYWVAVYDILEQAGLEVYLVNARDTKNLPGRKSDVQESQWLMKLHTYGLLRNSFRPSQEIRTMRTYWRQRNDLVRSAGRHIQRMQKALTQMNIQLANVLSDLSGVTGQAIIKAILTGERNAHKLAEFRDPRVKASKEQIALSLEGNWQPDLLFVLKQEQDGYEFCQKQMAECDRQLHQYLEQREDRSHGAGLPKEKRKGRLTKKKGNKPQFDLRQGLFRLTGTDLTRIDCIDVMTATTVISEAGWDMSKWQTENHFVSWLRLCPDNRISGDKVIGKGRLPTNNPVSIALKMAASTLRLSKTYLGAQFRRFRTRLGAPIAIKAMAAKLARLVYRMLRYGIKYVDQGAAAYEAQHRQFQIKQLKYKAASLGYQVTPIPAAA

SEQ ID NO: 469690 - protein, 374 aa, unidentified
MKTKTNKQTKTTPSVVLTSTAPVPAGGFTIGLDLGDQSHYVCVLDATGQMIHEGPLPNDRVALALLLTKYPAATVALEAGTHSPWISRYLTGLGATVIVANPRKLHAITRHERKCDRRDAVMLARLVRADVALLHPIAHGSAQAQHDLLGLKLRDSLVRTRVNLINTVRFTLKSLGHAVSNPSSESFHKNILTAVPADCLPVVRPVLAVLARLTEQIKTLERGLIARGKKAYPVTQRLQQIAGVGPLTALCFVLKIGEPARFGRSRDVGAYLGLCPRRDQSGGTDKQLRISKCGDGLLRKLLVSAAHYILGPFGPACALRAYGQHLVGTSIREKKRAIVAVARKLAVLLLSLWKHGTDYEPRVPAAPVLVMTPA

SEQ ID NO: 469691 - protein, 387 aa, unidentified
MTEFFDAHRPATAFDHDSTLVVAMELSGKSWQLGAVIPGVSRRPKTGVKARDMNEVMRVVDRWKAEAVRAGKTIARIVVAYEAGRDGFWIARELSSRGIEAHVMQPASIPVERKGRRAKTDRIDLDMLLRTLLAWLRGEPRVCTMVRVPSVEEEDARRPGRERDKLVRERVGLENQIQSLLCLHGIGDFRPRLKKAAEKLEKLRARSGAALPAQTMAQLRRLMKRHSVASEQIAEIDAARVAEVDAPDPDRGMAMIRLLVAICGMGLETATRLVREVFSRPFRDRRGIAAFVGLTGTPFQSGGMEREQGISKNGNTRVRCLLLQLTWRWLRFQPDSALSRWFFGRVGEGKGRIRKVMAVALARKLLVALWRYLETGVIPEGVRLADA

SEQ ID NO: 469692 - protein, 334 aa, unidentified
MENIALIGIDLGKNSFHIHCQDRRGKAVYRKKFTRPKLIEFLATCPATTIAMEACGGSHFMARKLEELGHSPKLISPQFVRPFVKSNKNDFVDAEAICEAASRPSMRFVQPRTESQQAMRALHRVREFLVQDKVKTTNQMHAFLLEFGISVPRGAAVISRLSTILEDNSLPLYLSQLLLKLQQHYHYLVEQIKDLESQLKRKLDEDEVGQRLLSIPCVGTLTASTISTEIGDGKQYASSRDFAAATGLVPRQYSTGGRTTLLGISKRGNKKIRTLLVQCARVFIQKLEHQSGKLADWVRDLLCRKSNFVVTCALANKLARIAWALTARQQTYVA

SEQ ID NO: 469693 - protein, 367 aa, unidentified
MDTIYIGVDFHSRQQTVCYLKTETGELVTCELKHQDKEKVRAFYQQFPGPVIVGLEASGYSPWFENMLERLGCEVWLGDATEIRRRARWRQKSDRRDAELIWDLMAHHEFPRLHRPAEQSREVLRMLRYRQKLIKIRTMSKNSVQSLALQAGLAKGNRLFTKGGQQELSLAEMSPAMDWQREHWLDLLEPLNKQLVETMIWFKAQSKDDACVTRLRTHPGIGLLTSLCLAHTLQPVSRFRNQRKVVAYAGFDPMIRSSADRAVHLGISKAGSRMLRYLLVEATHTAVRYDEDLKRFYKRVAERRGRPKAKVATARKLLIRTYIMMRDEIDYAEFRRRAVAARLARRSQGPTSVVPEVLIGQPASPGV

SEQ ID NO: 469694 - protein, 312 aa, unidentified
MAELSFGGIDVSKDRLDVLLLPEGLCFSVCNNAPGWAELIVRLRPLAVSAIGLEPSGGYERGIIRALLAAGLSVRRINPNKLRQFARARGVLAKNDRLDARLIAEYVAIMPTRVLQRDDAIERLAEIVTMRRQLCDEHVAAMNQATHLEDAMLRRISKRRLLRIEADILLLDKRLAELVAADPCLSHRYQLLISMPGVGPTLAYTLLATLPELGQIDRKQIAALVGLAPYDFDSGKLKGHRSTYGGRMPVRNVLHMAALSASRYNPALKTFSNRLAAVGKKSKVIIVAVMRKMIVTLNAMLRDNTEWHPAAA

SEQ ID NO: 469695 - protein, 388 aa, unidentified
MQTVADRSEAPNAIRTDLGAIFVSLELSRSRWLITSLSPDGGEKMSKHAVRGGDVARLLERFAQLRKKALARTGKVFPFVVIQEAGLDGFWIDRVLRKEGIESHVVDPASITTSRRRRRAKTDGIDGEALVRALLAHKRGEPRVCAMVKAPTPEEEDRRRLCRERKVLIGERVRHVNRVKGLLFSQGISGYQPLRHDRRERLDTLQTGDGRLLPDHLKAQVRRELDRLELLLEQIKAVEAERDVLLAVQQGAAPAPAAMLLNIKGIGPEFAAILWSEGLFRHFDNRRQVASYAGLAPTPWQSGSVDREQGVSKAGNPRLRTTLIQLAWLWLRNQPQSALALWFKERVNRNGGRLKKTTIVALARKLLVALWKYVTAGVVIEGAIVKSA

SEQ ID NO: 469696 - protein, 343 aa, unidentified
MWYIGVDLHRKSLTLAAVHDSGQVRPPVRFDCQDTEQILAAFSDLSPFRAVIEATSTYRWLHDLIHGHGTVVLAHPQRLRAMTLRRSKTDRLDSQLLAQLLRLDQIPLAYIPEPRYQRLRELTRYRGRLTQALAQVKVGLRLILARQNRLAPYKVPFGPRGRYWFSRQDFGPVDNLIRDELLERFTHFEKQITALNEQFEKLRPEYPEIEALLVLPGIGLYSALMVVGEFGDVTRFRKAKQAAAYTGLTTRVFQSGDTCRHGHISRQGSAWLRWILLEAAMKFVRKDVPLANFYERIRKRASAKIARVAAARKLAEICWKRLVRWHRELGRQKPTKEIEHVAA

SEQ ID NO: 469697 - protein, 349 aa, unidentified
MTIVEDRPVITGGVDTHADLHVAAALDPLGGLLGVQEFPATATGYAQLLDWLGGFGTIAVVGVEGTGSYGAALTRHLAAAGIGVVEVDRADRQDRHRQGKSDPLDAVSAARAAQSGRACGAPKGRDGAVEAIRALMVAKRSARHERTQAINQARALIVTGPDELRARFAGHTPAALVEAIAALRPRPGNVPGYATRVALRELGRRAQFLDTQLDRLDELIGPLVTARAPGLLSLYGVGPDTAALLLIAAGDHPGRLRSESSWAHLCGVAPIPASSGKVSRHRLNRGGDRQANHALWRIVITRLSSRPGHPATRAYVTRRTKEGLSKKEIIRCLKRYVAREVYHQLRAGA

SEQ ID NO: 469698 - protein, 425 aa, unidentified
MNYKQNEKINQVKESTLVVGIDIGSTTQYARAFDWRGIELGKVFTFSNSREGFEAFKAWMQHLQDKYRKSDVIVGIEPTGHYWFDLGAYLEDEGILLVMVNPYAVKQTKELDDNSQSKNDRKDPKVIAKLVTEGRYSAPYTPDGVYADLRIMVANRKRLIREMTQIKNRFARWFAIYFPEYTDVFGDYEAQSSMLLLKKVCTPEAIVELGAEKINQIWRDAKLRAVGMKRATTLCETAKRSIGLKKGSSAAQYEMKLLLEDYEYKKAQLDAVMEEIEKLCRKIPESEQMLAIKGIGVITVAGFLAEVGDVRRFESPRQIQKLAGLSLRENSSGKHKGQTTISKRGRSKLRAVLFNAAIPLIAKNPEFKSLHEYYTTRANNPLKKKQSVIAISCKLIRVFYAILANGVTYDSQKLLSDIHRQPQVA

SEQ ID NO: 469699 - protein, 323 aa, unidentified
MTVYIGIDIARKKFDAAELCDGAYRCKTFENTPAGFTALYNWLKADSIPDIHVCLEATGNYGTALATFLYEKNLKVSVVNPARIKGFAASELTRTKTDKADSRLIARFCKAAQPDPWRPVPAPVRKLQALVRRIGALNGMLRMECNRRENADIDAQESVERMINHLKMELESVRRAIKEHISNVPELKKQNDLLLSIPGIGTVSASLILSFMASKEFTKAKEVTAFLRLNPRHHQSGTSVRGKTRMSKMGDAKLRCALYMPALVALKHNPDIRAFGLRLLTAGKPRMLVVGAVMRKLIHIIFGVLKSGTGFSSRVAVNAGMNQ

SEQ ID NO: 469700 - protein, 396 aa, unidentified
MDSAGRRLSAAKLPEGIAGMARLHAMIAAQLDPDADLDAQAGQVLIGIETDRGPWVQALIAAGYQVYAVNPLQASRFRERHSVSGAKSDPADAHLLADMVRTDHHQLRVVAGDSELAEAVKVVTRAHKTLIWERTRHTLRLRSTLREYFPAALVAFEDLTAPDTLELLGKAPDPASAARLTTTQITAALKRARRHHRDRRAVEIQAALRTPQLGQPAVVAAAYAITVRAQVAILAVLNEQITLVQGQVEAHFGQHPDAEIYTSQPGLGQILGARVLAEFGDDPTRYGDAKARKNYAGTSPITRQSGKKKVVLARYVHNDRLLDALGGQAFAAISRSPGARAYYDKQRDRGLGHRAALRQVANRLVGILHGCLKTGTSYDEATAWSHHTQQDQLAAA

SEQ ID NO: 469701 - protein, 424 aa, unidentified
MENTAVRKRKQVPEGYLVIGVDPHKKRHAAVVITQDFTIQAKFKFDNTREGLEMMLDRARVEMLKSSCRGVMFAIETGGHYWRNIAYYLDERCIPFRFINQYTLKRRREGKDINRRKNDYRDSEVAAQLLCTGEFVESVIPQGVYAELRTSNNAYQRLVKERTRITNLVKGLLDALFPEFTQVFKDPGGLTALSVLSTCPIPRVIARMTENEFVATIEAWRKGRRLMRKKLKTLHCSAKTSIGIDAGARSLSYEIAFLVDKLELIRRQIRIMEGTLVKLVDETEEGKYLLSIRGLNYIAVAGLLAELGSFKLYRSAKQMIKMAGSNPTESESAGKKRAKTPMSKQGRPLLRYCAWTSVIPMLRFNPDFRAWAKQRRERPAHANPLSGREVVGAALNRLLRLAFALVKNRTYYQVSKPELTLVAV

SEQ ID NO: 469702 - protein, 322 aa, unidentified
MAMLSFCGIDVSKDRLDVMVLPEQQCSSVGNNVAGWSELIERLRGFSIAVIGLEASGGYERGVMRALLAAGMSVRQINPFKLRQFAKASGVLAKNDRLDARMIASFVAIMPTHPAQRRAPAVERLAEMVTVRRQLSNEKIAAENASRMLENAMLQRLSRRRIARLATDIAVIDQHLVEIVASDAALAHRYRLLTSMPGVGAVLACSLIAFLPELGQLSRTKIAALVGVAPYDFDSGKLRGMRCIWGGRAPVRNVLYMAAMSASNWNPRLKAFHDRLAATGKKPKVVIVAVMRKMITMLNAMVRDDILWADRYCGRHSVPTAR

SEQ ID NO: 469703 - protein, 345 aa, unidentified
MKEVTTIGLDLAKRVFQVHGVDADGAPLFNRKLRRAEVLRFFERLPPCLVGIEACASAHYWAREISVFRHDVKLLPPQYVKPFVKRGKTDAADAEAISEAVTRKTMRFVPVKTAEQQAAVMVLKTRALHVRQRTQAINALRAHMGELGIIAPTGIANVKALAAIIRDEDDARLPPAARFALTEIVDQIEMLAARIDKLEREIVVQARRDDDMRRLTTIPGVGAIIATAVKAFVPDPAGFKSARHFAAWIGLTPKAHSSGGKERLCRISKMGNRDLRSLLTTGAASVLRHVRYHDRVWPWLKGMLGRRPFKVVAVALANKIARMIWALLNKGGVYRNPITADSAPS

SEQ ID NO: 469704 - protein, 415 aa, unidentified
MPKNRARSCESTSQRLALKKESRSREGLFTLVERLKQRTGCKPVEVAVAVEVAWGALIETLVENGFSLFSINPKQVDRFRDRLTVAGAKDDSRDALVLATSLRTDRKSYKRVEVESPDILWLRELSRFEEELKAELRRATNRLWQQLHRYHPQMLSLSPAADDRFIWKLLSEIPTPAQGANISRLDIERILATHRIRKFTADEVLSNLKATPLVLAPGAGEAAAEHVLLLLPQIRLLDQQLRDVSRRIGQILSTLAKSDAEDAALPSDASLILSIPGIGPAVASTLLTEASRPIRERNYQALRCYAGTAPITKQSGKKKTIMMRNACSGRLRKAVYHWASTSINCDSRSRQQYDALRASGHHHARALRGLADRLLGILVSMLKHQTTFSHLRRQSSSAASASGAGVTQLIRSPRR

SEQ ID NO: 469705 - protein, 392 aa, unidentified
MTAAYSVNGSTQGGVLYLAFEVGWTDWKMAFTIGHGQKPRQRRIAARDLVALEQEIARAKKRFQLADGVPVVSCYEAGRDGFWLHRYLRARGIANVIVDSASIEVNRRKRRVKSDKLDATKLVNMLIRYHAGERKVWSVVWVPSVTDEDQRQLNRELQELKDDRTRHNNRIKALLASQGLAVEVDGLLPSWLERARLWDGSTLGADLQRRLVREYERWQFVHRQILDVSRERRRRILCDDTAHVDLVRRLLGLAGIVNGAWLLVYEFFGWRKLQNRKQAGALVGLTGTPYQSGGSEREQGISKAGSKRMRKMLVELAWCWLRWQPESALSQWYARRFASGRGPARKIGVVAVARKLCIALWKLLERGEIPAGAKLIDWRCKLIKHKAKKSAA

SEQ ID NO: 469706 - protein, 366 aa, unidentified
MKKISTMQAFSNEILKEQKLTIGLDLGDRWSFYCVLDEAGKIILEQKVATTPEAIKQTFGKIPRSLIALETGTHSPWVSRLLTELGHEVIVAHAQKVQLITKSNRKDDRHDARTLARLARIDPELLGPVQHRSAKAQIHLTVIRARAELVSARTALVNAARGLVKSYGERLPKCGTQQVSRELGAGLSAELRDVLEPLLKEIESLNERIKEYDERMEKIAKEVYPEVSLLQQVKGVGTQIALTYVLTIEDPYRFLKSREVGCFLGLKPGRRDSGESKPQKGISKAGDRYLRTMMVQGAHYILGPFGEDSDLRRWGLKLAERGGKNAKKRAVVAVARKLAVLLHRLWVSGEVYEPLRNSQKAMRAVA

SEQ ID NO: 469707 - protein, 360 aa, unidentified
MLSVGIDAHHRFYAACVLDEHGKMVKEKSIRGGVEDVAAWVGSLAGPSRVCYEASLGYGELHDALRGVRVRGMETQVQVAHPGHLRAIFRSKRKNDRIDAKKLATALFLDQVPRIHVPEREGREWRQLIEHRRRQVDKRVRSMNSLRAVLRGQGLAAPRRGGLWSAAGLAWVKALEFQSPMTAFRRDQLILEVEHFTSAVKAATRTLDGIAKGKPAVALLMTIPGVGPRTAEAIAAYVDDPHRFSSTRRASAYFGLVPSLDESAGSKRYGRITKQGPGTARKLLVEASWQGIRRSPTLKAIYERVKSGKKEKRGRALVATAHYLLKVMVAMLKSGEEWRERETDKPQKQRGPRDSDRVTK

SEQ ID NO: 469708 - protein, 359 aa, unidentified
MPRSIPTTTAEMITVGVDTHKDIHVAVALDGLGRHLGTLNVPTSLAGYKELVAWANGFGPLERAGVEGTGSFGCGLARFLRAKGIEVFEVIRPKRRDQYRSGKSDPIDAEAAARAVLAGTATGRPKGTDGEVEMIRALRAARRSAVKARAQAANQLKAMLITAPEGLKSELRALSTAKLVTKVSRFRPGTSPSDVETATKFALRSVARRYQRLSEEISELDEQLDRLVAEAAPELLVVEGVGTDTAASLLIAAGDNPERLKNEAAFAHLCGVAPIPASSGKTVRHRLNRHGDRDANRALYVIALCRMSHDERTRTYVARRTEEGKTKKEIIRCLKRYIAREVYRILASLCLNKPPISVP

SEQ ID NO: 469709 - protein, 399 aa, unidentified
MFIVGIDIAKKSHQAVIIDEEGNQRSKNFRFANSLEGFNLLLNNMEEIDPDHSNFEIGMEATGHYWINLYTRLIDKGFKIHVINPLQSDALRNLYLRKTKTDSVDSKLIANVIRFGQYTETRLTDDKLLTVRELSRQRFYLVDMNSDLKRKVVVIMDKIFPEFQGIFSDMFGKTSCAILKKCPSSKEVLEIDFDEFAAIIKKSSRSKFNVAKAKEIKLAARDSFSALIDPAPLSFLVKQMVEQIELLENQIQNLEHEISEIFMQLDSKITQIPGIGPVLGAVILSEIGDINRFSSSKKLVAFAGIDPSIKQSGEFVSSENHMSKRGSPYLRRALWIASFVNLNHNKEIIKLYGKKTSNGKGHYKTMGFLCHKLLNVVYAVLKNNADYIPYAWTESKACS

SEQ ID NO: 469710 - protein, 351 aa, unidentified
MPKRTNAVAVSTIGIDTGKNTLHMIGLDEKGEIVLREKVSRSRIAARLVNVPPCLVGIEAGMATHYMARELVALGHVVKQVPPAFAKPFRQGHKNDFRDAHAVAEAVQRPSTRCVPIKTDDQLDLQALHRVRSRLVGDRTAVINQLRGFLLEHGIAVRQGHRFLRQQLAQILATRTDALSPRMIRIIGDLVEDWAHLDERIERVTDEIESLARTDSSCGRLMTVPGIGPIIASAMVAAIGNGAAFAKGRDFAAWLGLVPKQLSTGDRTILGRITKRGNRYLRMLFIQGARAIQLHPASWAKHSFGPWLTAAARRLHCNVLTVALANKLARIALTVLVQARNYETRIAPAAA

SEQ ID NO: 469711 - protein, 442 aa, unidentified
MATLTILERRERFYLGVDVGRRTHTVCALPRSTFETGGARWQHAPTLAVPVSRAGFEKIAALLGRLADDPARDVVAGLEPTGGYYARTVHAYLTSLGLQVHWVKNNAVHDARDAVYGKKTKTDPADARLIARLLYLREAVGQEYAFTAGHDQVGVYATLRLLVNNRWKLRQAQARAGNQLTQILDVVFPELAAVFTKSLTAPAALALLTRYPTPAAVAAAGQDEIYRTVVFEGKAPRKAAQVPRLLELAAGSVGIAAGIDDLIAAETYLVGQLRRLAEEVASIEERIVATVALAPEARVICSFPAAREIRAATILGAMGAPVGAFHSGKALRRHLGWSVEEEKSGTSVHRERLAVSGNRHSRREMRLWTLGLISPRTPWTPFRAYYERLLAPPSGKRPNVALGHLASKMISVLYTCMSRDQAYDEERLAKDMKISLPAARQA

SEQ ID NO: 469712 - protein, 372 aa, unidentified
MNYNTVYVGMDVHKESFTLCSCKYEDEKASHYQRTPASYKNLLKYLAFLRTIYGEDTRFVCGYEAGCLGYSLYHQLENFNVECVILAPTTMLEQRSKRRIKTDKRDAEIIARSLAQHNYSPVHIPTETDNQTKEFIRMRDDHKAELKKIKQQILSFCLRQGYQYDGSGNWTAKHVKWLRSLKPAGLYKEILDEYLLTYTILTDKLNRLDQRIEELASKEEYKESVSKLTCFLGIKTHTALSVIVEVGDFQRFVSARKFAGYLGLVPGQHSSGDDRNGLGITKAGNTHVRRLLVESAQSYTRGKIGYKSRVLRSRQAGNSPQVINYADRANERLRRRYYKMVLKDGKKYNIAKTAIARELACFIWGMMTDNIY

SEQ ID NO: 469713 - protein, 354 aa, unidentified
MDTVPHDERLVTLGVDTHADIHVVVALDHLGAMLGATEIPTTRTGFQQLLDWASQLGVIDRVGIEGTGSYGAGLFRWLRARGITVIEVDRPDRKLRRQRGKDDITDAEGAARSVISGQATGIPKSADGNVEMIRVLRVARRSALRARTAAVNQLHALVVSAPDELREAFAGLSTIAKVRKAAALRPGPQLDTVEAATKLALKKLARRYLELVDEIDELDAHLAPLVTKTAPKLVAQLGIGVQSAAQLLVTAGDNPERLRTEGSFAHLCGTAPLPATSGKRVDRHRLNIGGDRDANCALHMIAVNRLSHCERTRAYVTKRSPDGKADLDILRRLKRYIAREVYTILTEDEPTIEP

SEQ ID NO: 469714 - protein, 435 aa, unidentified
MPSLSKINSHCAGIDVGSESIFIGLEDRDVASFGTFTDDYLKAIAYLKEHHITAVAMEATGVYWITLFDMLEAAHITVTLVNGKQVKYLPGRKSDVADCQWLQQLHSFGLLRPCFIPDDLTRQLRTYTRLRADHLSMASSHIQHMHKALTLMNIKLQNVISQLHGASGMRIMTAIVQGERDPERLADLCETSILKTKRDRVVASLKGNFKSEHIFALKQALGAYNFYQSQIGECDKQIEALLSAHTDDKPTPSKITLPKNIRHNAPKIDDLHTKLMKMTDGNDPSQITGLTDKTLLELIAETGVQLQDHWTTEKQFASWAALAPSMHQSGKSNKRKKFKKNSRAGQIFREAALSISASKHSALSAFFRRMKAKKGFLHAMKATARKIAVIYYRIMTKGIAFVERGIELYQQRFKEQQLRLLQKKAQSLGLQLVPG

SEQ ID NO: 469715 - protein, 361 aa, unidentified
MSESMALVGLDVHKSQTVAAVLDPVTGELRVERLRGEPERVVPAFLEELDRAVAAVYEAGPTGFVLARAAEQRGLDIHVVAPGSIPRAPGDRVKTDRRDAKRLVRLFAAGELRFAFVPSEADERFRDLVRCIDDVRRDLMRARHRLSKFLLRRGVRFAGKTWTQQHERWLCTLHFEDPLSQAVFVDYLAAVQGLAQRRKTLGGVLERAVPDSSHAETVSRLRCFRSVDTLTAAGLCAEVGDFTRFPKPGLLSGFLGIVPSEYTSDEKRTQGQITKAGPSNARRLLVEAAHNYRHRPAVGENLKARQSGQDPRVVEIAWRCQQRLHQRWMHLAGKRGKPAGTVAVACARELAAFCWEAATLD

SEQ ID NO: 469716 - protein, 343 aa, unidentified
MEYFAGLDVSVKDTSVCIVDDAGKIVREVKVASEPEALLAVLTNPAYPFKRIGLEAGPLSQWLFSVLAEVGLPAICVETRHMRAALKAQINKTDRNDARGIAQMMRAGLYRPVHVKTLRSQKLRMLLTHRKLLQSKAIAIENDLRATLRNFGLKVGVVGTVKFEARIKELVENLSDLVVLVEPLLIVRRAIREQIGILHRRLLAIVRDDDVCRRLMTIPGVGPVVALTYRATVDVPSRFKNSKAVGAVFGLTPSKYQSGEIDRTGGISRCGDEMMRAMLYEAAHILLVRTTKWSWLRAWAMTIARRRGLKKAVVALARRLAVIMHRIWTDGTEFRWTRETVVA

SEQ ID NO: 469717 - protein, 334 aa, unidentified
MKSEIVHIGVDVSKEKLDVFVPAHKEGMRPTTKEVDNSVAGFREIRDFARKAKATVCVEPTGGYELELIAFLHKFEVPVAYADALRVRQFARAEGCLSKNDAIDAALISRFADRIGVRVLEPQEVEAVELKRKAKFRQTMMDSRTAMTNRLETEIDSEMKALLKEQIKHMDKVIEKAERLCLETVERDERMNALRERFTKVGGVGDLTAISILAGLPEIGTLSDGKLNRLVGIAPEEKQSGTKEWQRRIWGGRKDVRNALYMAAVASIKWNAILGGYYHKKRAEGHPHKWAIVPTMRKLLSLLNRIAKDPGFTPMPEPESTKKNAGAGRKKKVA

SEQ ID NO: 469718 - protein, 337 aa, unidentified
MKTTETLFETFVGIDVSKLTLDVTILKPQVQKLSHRVFDNSDEGYLKLKNWLSVHHGVIFARTLFCLEHTGLYTRSIDRFLRERKAYVWMESSLHIKKSLGLTRGKNDKIDSQRIAEYAYRFSDKASIRDHSTPGIQILRDLLTTRDRLNKSLKSIVVSINELKRVDLKQSINLETFQLAAIRGLKTSIKEVEEAMFETVENDKQLKTHCDLATSIPGVGKILAIKLIIYTQVFTRFESVRQLACYCGVAPFEHRSGTSINGKTGVSKFANMDLKSTLHLASLSAIQYNPEMKAYYQRKVTEGKSKMSVINAVRNKMLSRIIAVINRQTPYVKLSQV

SEQ ID NO: 469719 - protein, 410 aa, unidentified
MQTLVECGCGLDVHQATVVACLLTLRKDGKIHKQMRTFGTATRELLSLRTWLLAEGCTHAAMESTGVYWKPIYALLEGVVEVVVANAHHVKKVPGRKTDVKDAEWLADLLCHGLLRSSFVPPKPIRELRDLVRYRRKLVQSQAAERNRLLKVLEDSNIKLASVATDVFGLSGRLMLRALIEGRTTPQEMAALAKGRLRNKIPQLELALEGNIEEHHRFLLELQLQRLEAAENDLATLEQRIQERLEPYASQLQLLDEIPGVDWTVAAVIIAELGVDMTVFQTVSQLVSWAGICPGNNESAGKRKSGRISRGDVYLKSALVEAANAAARAKGTYLRDKFYRLKARRGYKRALVAVAHKILVAVYHILSQNVSYKELGDLYLDKLNKHHLTRNLVHRLERLGFQVTLQLKAT

SEQ ID NO: 469720 - protein, 409 aa, unidentified
MDAILERCAGLDVHQETIVACVMYGPLDKRAKKEIRTFGTTTKELLQLQDWLTEYNCSDVAMESTGVYWKPIWNILEGSFHLWLANPQRIKNVPGRKTDMKDAVWIAQLLRCGLIEASFVPPEDIRDLRDLTRYRRKLLGDATAEKNRVHRILQDANIKLTTYVSDVFGVSGRALLDSLVNGEVLDPQQVEQMVKTSLKKKVPQLIEALNGRIRLHHRKMIQKHLNHLAYLEKEIEVLESDITQLLFPYQEAVDLLVTIPGIQKDAAAGILAEIGCDMSIFPSEGHLASWAGVSPGNNESAGKKKSTRTRSGNKGLKSILCQAAWAASKAKGSRLSSFYHRLVKRRGPKKANMAVSHLLLRIIYQMLLRNEPYSELGWDYLPQKEKSVDYWVQRIKNLGYSVNLQIETA

SEQ ID NO: 469721 - protein, 476 aa, unidentified
MGKGSGMTRGDLRRNARRERLRGMLPRDGAVIGIDLGDEKQAIAVVDHDVRVLARKTVRVKAFRLGEALDWAVAQARAKGFAAVAVACEPTGARWLQVQRLCAERGLPLVCIQPLVSHIARQQQDFTTHKSDEADCVMIARLAIELHCYIPEELDEAWAQLRHLGRRRAQLITSATASVQRVRDFLSVAWPVAPEACAHPFESVTWLAAMQVVTSRCGGQPEKLAAIGLAEFTALVRQAVAGWGGQRPASLVCRAAFAALASTEGVVVSHRRALLRRCADELGDLQRTRAQLRAVEADMAAVLGELGLSRLADIPGLTAVGAAAILAETGDPRRYDSSSSLVKHAGLSPSGNASGAFEGQAHISRRGRPGLRLTVWRAIWPLLIHNSVMAAKYAAMIAAADAAAPQAAHPQAGTGSRQASAAAAAGARRAKARVACAAALLRWIYSMAGCDTGWDPDVASGAASCQHAPRRQAEAA

SEQ ID NO: 469722 - protein, 313 aa, unidentified
MIHSDDKYYVGLDISKDFIDVCILPALEQFRISNDSAGFKCLIKRLPEQVERIVMEPTAKYSRQVLKALQDKHYSTCTVNPRQIRRFAQALGLLAKTDKLDAFICAKFASLVEPRNDKPVDMQRQKLSDLETTRQQFVSDIVRYKNRMSGADKTLKSLYQTVIRQLEKQLKKVNEIIKQLVAQQAAWQQLVDFLMSVKGIGQVTAYMLLAKLPELGHVSEGAIAALVGVAPFNHDSGYYRGQRKICGGRKEVRDVLHMATLVATRHNPAIKPFYSRLLSKGKLKKVALIACQRKLLVILNAKVRDFIAGKIEA

SEQ ID NO: 469723 - protein, 376 aa, unidentified
MAAHGKWVGIDAGADEVAICILSGTGEIVREMRADASASAVRAKLPKPRDGLVIGIEAGATAIHLTRGLRAAGYNVRVLETRRVHGFLGLRQNKSDRNDARGIADVIRLSRAAGPDVLVKSERCQKLRSELVLRHRLMQQRMATEAAMRGILRVNGGKISRAWSGAHLEKSVVTEIERLRGEGVDLSEVLLPTLTSAVMVRRTLEVITRRLARIARADEVCSRLMTVPGVGCISALSFYTAIEEPERFICNEDVGPYLGLAPKLTQSGQACHMGRISKRGNRMTRSHLVSAAKVLMQQSRLECDLRRWALSIRERSGPAKARVALARKLAVVMLAIWKSGGQFKPNKGIAPDPPPMITPAAAESFPHLKAAIDRAP

SEQ ID NO: 469724 - protein, 370 aa, unidentified
MGNASTLHVGLDVHKESIAVAYATEDGATAPVPLGAIGTRQCDIDALVRKLQSKSARLVFVYEAGPCGYWLYRYLTRKGLTCFVVAPSLIPRKAGDRVKTDTRDAVTLARLARSGDLTPVYVPAVPDEALRDLARAREDALHDLNAARFRLKALLLRNDVRYAGRANWGAEHLRWLARLVFPTPAQQIVFQEYVRTVTERTELLQRLEAELLEQAKTWRLSPVVEALQALRGVQFTVAITTIAELGDLTRFDTPRQLMSYLGLTPSEYSSGERRRLGGITKAGNRHARRVLIEAAKAYRHRAKVSEQIHARQEHLPTVIRDIAWRAQVRLCGRYRKLLARGKHPNTVAAAIARELAAFMWAIAKARPVPA

SEQ ID NO: 469725 - protein, 411 aa, unidentified
MDVYCGIDWAEDHHDIAVVDRDGKLLARRRISDDAGGLATLLALRAEHGDTAGDPVPVAIETPRGLLVACLRATGRAVYPVNPMAVARYRDRHSVSGKKSDHGDAVVLANVLRTDMGMHRPLPADSELAQAIAVLARAQQDAVWDRTAAHNKLRSCLREYFPGFLAAFADARGGITRPEARAILAAAPTPAAAAVLTVAQLRSLLAKAGRSRGIDTEAARLRDAFRIQQMRQLPLVEQAMGQQALALLRQLDAACASADDLEQAAVASFNQHPDAGIITSFPGLGPLTGARVLAEIGDDRSRFQDAKGLKAYAGAAPITRASGKTKSVTRRKVKNNRLSAVGYTWAFSALTASPGARAHYDRRRDAGDKHAGGLRNLFSRLLGCLHHCLTTGQHYDEATAFPAPAKQPAAA

SEQ ID NO: 469726 - protein, 424 aa, unidentified
MKVTFQTCCGVDVHKSFLVATIIKTSSGIEPSYQKRRFSTFNNSILEFKKWLLENECLYVCMESTGKYWIPVFNILEDEINVTIANPKWVKAVKGNKDDTKDSKWIGDLFRLGLVRGSYIPCKKIRILREFTRYRYKLVSCRSSEKNRYQNALTVCNVALDSVVSDIFGKSSTSIIDYLLEQSGTSIDHEVIASKLLKRLKAKEDAVIESIEGYQMTDSQKYRMHLVRAHMDYITAAINDVDSEIESLIASDPDYENAVELLCTIPGVKYDSAITIISEIGIDMSQFCSSKRLCCWAGLTPGSNESAGKKKSVRITRAGVYLKPALVQCAHAAVKSDKSPYYKKKYESLVKRRGKKRAIIAIARMILTAIYQMLSTGEQWNPSDLYKIDMPVALVEKQKAKAIRQAKKLLQREGTLPPDKPLAS

SEQ ID NO: 469727 - protein, 344 aa, unidentified
MTYYTALDVSLRSVSICIIDDTGAIQFEDKVVSEVDEIASCLKRFSPKVKSIGFEAGTLTQYLSYGLQAEGFEVICMEARQVSAALSAMRNKTDKNDARGIAQILRSGWYSRVHVKSLDSHLTRALLTSRKTVLKKCVDIENEIRGLIRLVGIKLPGTVKHGPFDELVRPMIQPHSTLADALIPLLDARQALYQSYLKLDSQVLSMARKDTVCQRLMTVPGVGAITALTFKAGVDDPTRFKHSRTVAAHFGLTPRRFQSGELDNPGHISRAGDADVRSALYVAAHSLVCRSEHWTYLKAWGLRLSKTKGHRRAVIAVARKLAVILHRMWIDEVDFRYSSNEVKP

SEQ ID NO: 469728 - protein, 347 aa, unidentified
MIFYTKQHKFYCGIDLHTTKMYLCILDKDGVIRLHRNIKTKPDLFLKAIEPFREDVVVCVECMFSWYWLADLCARQNIPFVLGHALYMGAIHGGKSKNDKIDSRKIAGLLRGGMLPMAFVYPEKMRAARDLLRRRNHLMRKRAELLAHIQNTAKQYNLPDDLGSISKARQRINLLERFHDPVVRTSIKANLDIINAHDSVLAELEREIIKNAKHHDPTSYALLQTIPGVGKIIALDLLYEICNISRFPTVQKFASYCRLVKCVKESNGKKYGSSGKKIGNAHLRWAFGQAAQLFYMRNKRGKKLMNKLTAKYGKGKALSVLAHKLGRAVYYILTNRKGFDMDKFLTA

SEQ ID NO: 469729 - protein, 328 aa, unidentified
MKYIGIDISKATFTVAYSSDKSAKVSEFKNTPADIRKFVRTLPTKEECHLVMEATGPYSVTALYLLTKEGYTVSMENPLKVKNFAKAMLTVTKTDRADARLIALYGERMQPEPYKVPAESLMLLKQKRTVIRQLRKQHTANRNLIQSLEVLPIVDKGAKRAVETIVAQLEKQLNNLEKDLCEVTEKEFSKQLKLLTSIKGIGVALATSLIIATSGFTNFDNSKQLCRYLGLSPTYEQSGTSVNRHGHINRNGDSHLRGMLFIAAMPASRYNTACKETYTRLRANGKSGKVALIAVANKLVRQAFAVVKSGNAYEDGFVSTRPKEYAKD

SEQ ID NO: 469730 - protein, 418 aa, unidentified
MKKHNNSGKKSEPTSKPTKSRGPVQRDTKEVLAELVGKLKEKLDPKKVAATSAGEKLQSGELRPNLDRLTVGVDLGDQWSHYCILGLEGETLAEGQLRTTQQHITEFFQALNAARVVFEVGTHSPWVQEVICGCGHEVLVANPRLMEGSKRRKRKNDRIDANKLARLGRVDPQSLHPMQHRSREVRQDLVVLRARDALVAARTELINATPGLVKSMGSRLPQCSSPSFAQKAEETVPLEIREALLPLVRMAATLSDCIQGYDEKIEKLGREKYGHTALLRQVKGVGPITALAYVLTLENPDRFVKSRDVGPYLGLVPKQEDSGESQPQLGISKAGDTMMRRLLVGSAHYILGPFGPDTDLRRYGLRLCERGGKNAKKRAAVAVARKLAVLLHCLWVSGEVYEPLRQGMSATIAPAVAA

SEQ ID NO: 469731 - protein, 351 aa, unidentified
MEKPIKQCVGIDVSKDELVVSYGMMDGNFDSRMLSNTCFANQPAGFKKLLKWSNKLHSDQGEVVYVLEATGVYHQQLALYLHDKGCKVVVMLPNRAKAFMKTLSVKTINDKVSAQMLSQLGLEKKLDRWEPPAAIYRELKQLTRERDQLIGEQTQIKNQLHAEQSGAWPSSSSIKRMKSRLQLLAKQIEQIKDEIAQAVEEQPWLKQKIDTICTIPGVGLITAVTVIGETDGFHLIRNKKQLVSYAGLDVITKDSGISVKSKARISHKGNKYLRKCMHFPALTAIRSTPLMKALFVRLVSKHGIKMKAAVAVQRKLLILIYILWKNNQPFDENYPLKLKEPRMIGALHELA

SEQ ID NO: 469732 - protein, 411 aa, unidentified
MDIVVARCAGLDVHKDTVVACVRTPGPDGRRAEQVRTFGTTTVELLALRDWLVAEEVTLVGMESTGVYWRCVYYVLEDALACWLANARHLRNVPGRKTDVQDAQWICQLVEHGLVRPSFVPPKPIRELRNLTRYRKAQIEERTREAQRLDKVLQDAGVKLSSVAGDILGRSGRDMLAALVRGTRDPEVLAELARGKLRAKLPALRQALRGRFGAHHGLLVGQILAKLDFLDEAIAQLSAEIDRVIAPFAVQVALLSTIPGVDRRTAEALIAEVGVDMARFGSAARLASWAGMCPGQHASAGKQRSGKTRKGPKWLGAHLTEAAKAAGRTTDTYLSAQYQRLRGRRGTAKATKAVGHQVLVAVYHILDRGVPYHDLGADWFVRRRPATQVRKLISQLNTLGYQVTLNPIQAA

SEQ ID NO: 469733 - protein, 351 aa, unidentified
MIIIGVDYHPSFQTIAFLDQETGECGERELNHRDGEAEKFYRELQQRGVSVRVGMEATGHSRWFERLLAELGIEVWIGDAAKIKTMRVRKQKTDREDARLMLKLLLENRFPRIWVASPENRDLRQLLWHRHRLVQMRTRIMNQLQAVAMNEGYRWKKKLFSAQGRALLEKLSLAPWASRRRKELLELLDQLDPKIAELTAAVEREANQRPEVVRLMTHPGVGPITGLVFVLVIGTPGRFPCGKQIGSYTGLIPCEDSSAGKQRLGHISKQGNTLLRFLLVEAAQAAARCNPDWRRRYLHLMMRREKRIAKVAMARKLAVRLYWMWRNSWQYSQLVEFGSNAGKLGTGHGVK

SEQ ID NO: 469734 - protein, 467 aa, unidentified
MRKAKRKGKSAAAVGKKRLTLLEQINLNAAGIDVGSREHWVAVPADRDPQPVRRFGTFTSDLHALADWLLQCEVKSVAMESTGVYWIPVFQILESRGLEVLLVNARQVKNVSGRKSDVSDCQWLQQLHSYGLLAGSFRPEAQVCVLRSYLRHREHLVQQASTQIQLMQKALTQMNVQLHHVLSDVTGVTGMAILDAIVDGERDPLKLAQLKDPRVRNSVETIAKALTGDYRPEQLFVLKQARESYRFLQTQIADCDVEVNQVLSGWEAKVDLGQQPLPPTRKKNRSQSNHKPLAFNLREQLYRVTGVDLTAVDGLNVLSAQALLSEIGLNMHRWPSEKHFASWLGLCPDHRISGGQVLHNRTRPVLNRAADVLRMAAQSLKDSRSALGAFFRRLRARLGPAKAITATAHKLARMVYLLLKYGKHYVDPGAQYYEQRYRENILRGLKKRAASLGYTLIENAALNLQVS

SEQ ID NO: 469735 - protein, 343 aa, unidentified
MSIVILGVDLGKNACSVVGVDAAGAVVVRRSMRRQTLIDYVAKLPACVVAMEACCGAHHLGRLFAAHGHEIRLMSPEYVRPYVKAQKNDDRDAEGIAEAASRPTMRFVELKSQEQLDIQTLHRVRSRLVAERRSLINQLRAILLERGTIFPVGRRKLELGIDALLADKDTTLSPRLRQLVGELRDEWRDLDARIEALNGEFIELARNDPAARRLTSIPGVGVLNATALIAAVGNASSFAKARDLGAWLGLVPRQHTTGGKPRLLGISKRGNTYLRTLLIHGARAALPSLARSETPMGRWLTGMIERGVHRNAVVVALANKLARIAWAALRKDATFERGYPVAA

SEQ ID NO: 469736 - protein, 436 aa, unidentified
MNQTKLNRKTIVSDGGDFAALIGLDWASQEHALALYDCATGKRENSTLEHAPEAIAQWAHGLEQRFAGRKIALCLEQAKGALINALLEYPFFVLYPINPATAARYRQAFKTSRAKDDPADAQVCLELLLHHREKLTPRLANDGATRELSRLLEARRSLIDLRTLLTNMLRDALKSYYPQALELAGQDLFAPLGCQFLLKWPSLEQLQKARTESVRKFYYAHNCRRMDVIEKRLQAIASMIPLCRDPALIEPAIVQVKMLARQLLQLGIALKEYDSRIEHLFAQHQDASIWQSFPGAGPTLAPRLCCAFGNERSRYQSALAIQQYSGIAPVIERSGKNQHWVHRRWGRPHFVHQSFFEYASQSVLHCSWAKVFIQDQIARGKAYPTAVRALAFKWQRIMFVCWRDRLPYNETTYLNSLKRRGSHLTSKLNHELPKAA

SEQ ID NO: 469737 - protein, 336 aa, unidentified
MEAAQSFVGIDVSKLKVDVALLINGKVKSKVLDNSAAGHASLLEWLAKSKADMATMHICMEATGVYYEALAQALHEACLKVSVVNPSCIKGFGRSENIRNKNDAIDAGLIARYCAAMNPTPWEPLPLEQRQLRAWSMRVQSLKDIRQQEENRHEAHVVSGMTDVAAHVAEHVKWIDGEIAKLEKEIEDHIDRHPGLKRDADLLTSIPGIGSTTVARILGHLGDIRRFKNAKALAAFLGVTPKHNTSGTSVKGRSMICRTGSTSLRAALYMPSMVARRHNPILNQFAERLLSTGLPKKAVICAVMHKLTHLIYGVIRSGKPFDANYLSKKLVIQDGI

SEQ ID NO: 469738 - protein, 460 aa, unidentified
MTLLARLGTQLPRRYYLGVDVGYREHVAAVITLQTFARGDDRWKRARCLHFSSTRGGLGKLQRYLDSFCSVPTAFLGLCEPTGGFYGVTVFQYLLDGAYPMLLVENTTTRYMRKKIFPNMPKTDEMDARVMARIGYLHEAVGEEFTLRPLELPDPDDADLLALCRDSWKVNTMICRARNQFSQLMAVVFPELKSFFTSSVSTMGPVSLMAAYSTPAALAAAPAEEVYAVLWKARAYEHARRVEELQSLARDSSGLLPDPSRAWRLKWLTDFLLTNFNYQAALERRVKELVTQRAGYPLIAGVPYSGPAALGAILAVTGDIGRFRNYRNYVAYTGYFAGLETSQTIDRTRISKRGNRDLKRALFQIAAPLVWFDRGENPYKSLYERKVAQGRAWYKAMPFVCAALARHIYHSLKFKDPYDVERAFRSSVPVPALEQELVDLRADLDERFEVMDAFLSPIER

SEQ ID NO: 469739 - protein, 377 aa, unidentified
MKKNIRFIGLDVHAETIAVAVAEANGEARSLGVIPNRPEAVRRLVKKIGPAESLQVCYEAGPCGYVLYWQLSELGAHCDVVAPTLVPVKSGDRIKTDRRDALKLARSYRSGDLTPVWVPDAEHEALRDLVRAREAAKKDQLRARHRLQKLLLRRGLRSPEGTRAWTVRYLTWVKTLQLEPAALAATLLDYIAEVDHAHERIERLERAIDQAIEAAPEAIRAVIEGLQSLRGVARISAATIVAELGQLSRFGRAKQLMGYAGVVSSEHSSGERIRRGAITKTGNAHLRRILVEAAWAYRHRPYLGGELRRRQKNASEKVKEISWKAQHRLHSRYARLMGRGKTKQQAMTAVARELAGFVWAVGVEVERLRASRPARAA

SEQ ID NO: 469740 - protein, 446 aa, unidentified
MDEYFLAADVSKGYADFIILDNKKNVIEDNFRLDDTYQGHIALHKVLTEFLTNHRDSIIYFAAESTGGLENNWLNFITGLSNTMNIKAARINPLVISASYKASLTRVVTDPVSARTIAEYMIAYPEKIRYNVDDPYAEVRRLWKFTEMLKKQRTQLKNQLHILLYTSLPFLVTYLKNGIPNWMLELLLQYPSAEAIAEADITSLAQIRYISKKKAQSLKEQANMNVGSTKHQSTSFLIVSTARQIIELSKAIKEQKSYLAEQYGNLQMVKLLRSFKGIGIDSAIGLIMNIVSTDLFPDVKKAASFFGVHPVYKQSGDGVWGFHMSKQGRASMRSILFMIAFSAIRSNPLIKEFYVEQLKKGKSRMSALGICMHKIFRIVYGMLKNNKPFDQKIDKQNRKRNRKEKPATGNNIRVRRFHKEDELAPISRRQNQKRKKSKQSQSDKIT

SEQ ID NO: 469741 - protein, 429 aa, unidentified
MNYPPVAGIDVGKNFSEMCILSPSNEICHRIKIYHDSSDSIKKTVDLLLKVEKDFAIRPVVVLESTGHYHKILFHYLSDSGFEVSIINPIQSDSIKNIGIRKVKNDKIDAHRIALLYRFSFINTTVVPDEDIDCLRSLCRQYYKLSDELTTYKNRLVGIVDQVMLNFTDVFQNVYSKTALAVLDKYPSPDHILKANKKTLISLIEKSSKKGLEWSTKKYNLLIVKAKEFKSLSISTPGNLAILKVNISMVRTLQESRKSILDAVKEIILIDSLSDIPVLSPIIDLLCSIPGIGVLTAATILAEVGDFSAFSKPNKLVAFFGIDPSVNQSGEFTGTRNKMSKRGSRLLRRVIFTTALANIRSKRNGEKTNAVMHEFYHQKCVNKPKKVALGAVMRKLVNIIFAVLRDKKPFELRTPEEHEELLFAKLLVA

SEQ ID NO: 469742 - protein, 332 aa, unidentified
MENFYFIGVDVLKKKLNFCVMFEGKVVHEEETSNHQGAIISLLHHLEEDYGIASGQMLVCAEHTGQYTFPLACACKAVECRLWLENAAEIKYSSGVQRGKSDKVDAKRIAIYASRFQDKVRYYERPTEDIERLKQLESERTLYVTDFAKYKGQMKDQKEYMPKSLYERKMKRLQALMDDLEEAIQSITDEMDEVIASCPVLFRQRELLMSIDGVGRVVATNMIIATEAFTRFDDPRKFNCYAGVAPFSYSSGSSQHSKARVSHRADKVMKRLLHLAAVAVTHRIGGELKKYYERKVAEGKNKMSVINALRAKIVARMFAVIKRNERYKPILS

SEQ ID NO: 469743 - protein, 411 aa, unidentified
MLKIVYPICCGLDVHKSFVYACIASTNERGVTTYKSDRFSTYTKGLKKLSAWLSVNNCIDVCMESTGKYWIPVYNVLEITCKCVLAHPKYVKSIRGKKTDKKDAKWIADIFKHDLVNGSFIPPPPIRQLRDLIRYRFKLTNYTTGEKNRAQNCLTASNLKLDDAFTDVFGKSASAIIERILENPNEPFDVSPFIHKGCKTPIEEIQEAVDGAICPEQAEKLRIIRAHMDDLDKAKANLESAILTVAEQFIPQVSLVSTVPGIKSFSAVAIVGEIGVDMSVFPTAKHLCSWAGLTPQNNESAGKKKTTRIGRAGAYIKPLLVQCANAAIKSDKHPEIKNRYLKLKKRRGHKKAIIAIARMLLTAIYNILKKNEPYNPELYAKSDEPPKNFTVSVDYAIRVLQSKGYAVSPPG

SEQ ID NO: 469744 - protein, 355 aa, unidentified
MKYHTSTTQFNCGIDLHARQMYVCLMDRDGKKLVHTNVRNNDFAFFLKLVAPYRHDLTVCAECMFGWYWLADACQDAGIHFVLAHALYLKAIHGGKNKNDRIDSEKIAHLLRTNLIPPAYVYPAQKRPLRALLRQRLLYVWNRSELLARLQSHQLAYNRPTFRQTPCNRESWGQQLLSAEPDAVCQIALQNDLALIGHYDTQLATLEKELLQLTKQTASRDFTLLQTTPGIGDYLGLTILHEIGDIARFPTVKDFLSYCRLVKGTVASAGQIKGLRGAKLGNPYLRWAFGEAAVIAKRDPLVIGPLAQRLEARLGGNKFKANTVLAIKLARAVYFMLKTKTVFDPERLVAALSKN

SEQ ID NO: 469745 - protein, 342 aa, unidentified
MYYIGLDVHKKTISYCVKDASGQVHQEGKVGATRWELDAWIRTLPRPWTVAMEATIFTGWIYDHLLPHATQVKVAHPLMLRAIAAAKKKNDRIDAGKIADCLRCDFLPECHMASTQIRDRRRTLRYRHLLVRQMVQMKNRISGLLMETGVSHNKKRLHKVGYFRELLSANEEVQESIRPLLRLSRDTIVRMQKAEYALVSSLQRDPLLAERIKRLRTVPGVGPITALTWALEMGDVSRFRSSRQAISYCGLCGDEKSSAEKVTRTPLSKQRNKHIQRVLVEAAKLAPRQDHTLALVYEREKQKGNANRATLAVARKMVAYLLAVDREQRDFVPFADPRSVAA

SEQ ID NO: 469746 - protein, 361 aa, unidentified
MRIIGCDLHARQQALAMLDTTTGEVVAMILKHEGNNVREFYSKLPRPVRVGIEATGSMLWFVNLMEELGIECQVGHPANIRAAEPRKQKHDRRDADLILKLLVENRYPKIWLPSKEQQDLRALLRHRHQWVRIRTRIQNALQAIALANGLRRGPALWSQDGQRTIASLPLAPHAAYRRSELQAMYAKFAKEIEKLNQRVEEQACERPGARLLMTHPGVGPITALATEVFLGDAARFADSKALASYVGIIPSEYSSGERQRFGGLSKQGNPLLRFLWGEAAMHAVRRDPELQRFYRRKLVQKGLGKSRVAVARKLGIRLWIMLRDEIDYNEFCRRGQKQQKSSEACAGMPDTGHGAKQSPAD

SEQ ID NO: 469747 - protein, 347 aa, unidentified
MSITMIGLDTAKSVFHVHGVNEAGKAELKRKLRRSELIPFFEKQERCTVVMEACGAAHHWARILTGLGHTVKLIAPEAVKPFVKKGKKNDPADAKAIYEAASRPDVKFVPIKSVEQQGILALHAARSQLVKQQTMTANAMRGLATEFGLTVPKGMSKLDELMALVDSDETLPAQARQAIRGLHDHCHDLDEAIVTFEAEIVAHARKDETARRLATIPGIGPITASLIAATVGDISLFKTARDFAAWLGLVPRQNSTGGKTRLGRITKAGNREIRKLLVLGATSMVYRADGWNSAVGAWLRNVLQRRPVRLVTVALANKMARIAWAVMTRKEVYRPKGGVAAAVTAAA

SEQ ID NO: 469748 - protein, 329 aa, unidentified
MKKHYIIGVDVSKLKLDVHCYGQSQSLLVSNDNKGFKELLKWIRKEISKDVSTIMVVMEYTGIYTYSFEKFLYDCGLDYVKRPALDIKQSTGMKRGKTDKADAIMISEYGWYRKEELIPMKPVSETQQQLQQLMAYRDKLVADKASYEARVKELKGQLGNKLHSRIIESTENVMQMLEVEIKETKATIEELISKDQELQINYDLARSVRGIGFVTAAHMLIVTENFTRFNDPRKFACYAGVAPFEHQSGSSIKGKTRISHLANKKIKSLLTMAAYCAIIHDPELKVKYEQKLKEGKAKMCALNIIRFKLIERIFAVIKRQTPYVLSQVA

SEQ ID NO: 469749 - protein, 350 aa, unidentified
MSKTLNSAIAVIGIDIGKNSFHVVGHDEHGAIVLRQKWSRGQVEARFANLPPCLVGMEACVGAHHLSRKLKGFGHDARLMPAKYVRPYSKGQKNDFRDAEAIAEAVQRPTMRFVATKTAEQLDLQALHRVRERLVSQRTGIINQIRAFLLERGVAVRQGLRVLRAELPRILATPPDVLSPRMVRIVEGLVDDWRRLDERIDTLSDEIEAIAHQDAGCERLMSVPGIGPIISSAMVAAIGTGDVFTKGRDFAAWLGLVPKQISTGDRTILGKISRRGNRYLRVLFVQAAWVALVKVKPTRWGYGLKRWIEAAKKRLHHNVLAVALANKLARIAWSVLARGRAFEVSEPQAA

SEQ ID NO: 469750 - protein, 481 aa, unidentified
MSARRSPCAMKMRYADTHRGPVNVGDAWYCESAMSLTWELPAPRIVVLSTQSRVVRKRLLRATAFPTQKEDAMDQLIARCAGLDVHKETVVVCVRVPGPGQDRLQHVRTFGTMTADLLALRDWLTAQAVTQVAMESTGVYWKPVYYVLEDAVPCLLVNAAHMRNVPGRKTDVQDCVWIAQLLEHGLLRGSFVPPVPIRELRDLRRYRTVLIQERVRETQRVQKVLEDAGVKLASVATDILGASGRAMLEALVAGTTDPEVLAELARGRLRAKLPALRAALAGRFRGHHGFLVGELLAHLDYLEEAIERLSRQIEDHLRPFAALVQPLDAIPGLNQQAIEGIVAEIGVDMQPFPSAAHLVSWTGICPGHHESAGTHTRDKTRNGNRWLRTALIEAALGAIRTKDCRLAARYRRIMRHRGHKKAVVAVAHTILVIIYHMLTHHVPYQEVGAAYLDQRDREQATRRYVKQLERLGHRVVLEPAA

SEQ ID NO: 469751 - protein, 452 aa, unidentified
MPSLGQACGETIDPHPTNQNVNTNCPFDLVIGLDRSDRKADLFLIDTRTGQKKKLTLDTAPEALHDWLAKLRQQHPQAKIAVCLEQPATNLILFLETYSWITLYPINPITLQKFREAFVTSRAKDDAKDAEYLAELVLAHHDKLKVWQPDDPQTRRVLQLVYHRRAVVDQRTGLTNRLQGLLKQYFPQALELCGEDLWRPLATDFLIRWPTLQSLQKARPQTVKQFYHVHGSRSEKLIEQRLELINKAIPLTDENALLQSYALRVQLIAKELQLLAKTLEKFEEHIAEAFKQHPDHQIFDAFPGAGPVLAPRLLASMGSERERFGRAKNLQCFTGIAPVTKQSGGTCNIHRRYLCPKFIRQSFHEYAKESILHSRWAAAYYGQQRNKGCKHHVAVRALAYKWQRIIWRCWTSRTVYKEELYEAALKKSGSALVGLLDKIELGKSPTSAVNKT

SEQ ID NO: 469752 - protein, 345 aa, unidentified
MDIFFVVGVVVSKNKLDYCLMSNDKVLKQGTIVNETSAIRMTLILFLREFKLSNEQILICAEHSGQYNYPLIYSCECDRYKLWLENPNQIKIYCSGLQQGKNYRLSSKQIAIYGSRNSDKIKLSRQPVSEVEHLKQLHNELEMLEVDSAKLHSQLIDQKNYMSEEVFNINATRLINLLRGLEDAIATIKSEIKCIFAVNGFLSEQLELLTSIENVDTELALKMIVETDAFTRFENCRQFCSHAGIAPLNKDLKINEHSTHTINPKSDKGIKTILNQAALSIVKMNDSELKNYYIRKVKEGKDEKIVLNAIRVKLVARMFAVIKNNQRYLPYIRKEGSTTPLIETL

SEQ ID NO: 469753 - protein, 440 aa, unidentified
MQVTQVRCAGMDVHKKTVVVCCLSVDANGNPIREIRSYNTTTRELLSLCDWMAGLEITQVAMESTGEYWKPVYNLLESSFEVMVVNSQHFKQVPGRKTDVKDAEWLAELLSYGLVKGSFIPPLPQRDLRDLTRQRTTLIRERARVINRLQKVLEWANLKLASVISDIGGVSGRAMLKALVAGTEDPQALANLAKGRMRSKHTELAEALSGRVRDHHRFLIQTHLDHLEFLDAQLKPFDTRIEQLIEQHTPVVEPPVPPSGSVLQTQSADLPLAWRQALPLLDTIPGIARQSAELLLAEIGSDMRRFPSAAHLCKWAGVCPGNHESAGKQASGRIPPANRWLRSILVQMANAAVRCKASHFAAVYRRLAPRRGHKRAIVAVAHRLLIAVYHMLKRHEPYRDCPTQLSQLTQLRRVQTLQAQIERLGYQVLLTPTDTAQPPS

SEQ ID NO: 469754 - protein, 437 aa, unidentified
MEELSDEPLYRDRVCGIDIGKAGLAATIRVPSDKNPARRAAETRSFGTTRREVLALADWLRSWQVPAVVMEASGDYWKGPFYRLEAEGFECVLADAKQVKHLPGRPKHDPGDSRWLAACFERGAVTSCFVATEEFRLIRLHTRYRRDLTDERTREKQRAEKLLESAAIKLSSVVTDLHGVTGRDIMDHLIAGERNPKVLAQLARARARRKIAELEEALEGAEFFTPAHAALLATMLARIDQLNTQIARLTEVIETLLAPYEEQLQQAESMPGWGRRSAEDTVAETGADMTRFPTGAHLASWAGRTPLDNKSGKRKGRAKSKKGNRYLAAVTGETAVAAGKTQTREGARYRRLARRRGKAKAQVAVGNTQLKVYHKLLSTPGTRYQDLGADYYDRQASTRRQIAHHVGKLSALGFEVTLCRIPSADPDPSEPANTHAA

SEQ ID NO: 469755 - protein, 338 aa, unidentified
METYAGIDLHSSNNFVGVIDSKDKRLYGKRHSNRLEDVLRALEPFQESLKGVVVESTFNWYWLVDGLQDNGYQVHLANPSAIKQYEGMKHTDDRWDSFWLAHMYRLNLLVEGYIYPKEHRAVRDLLRRRLLFVQQRTAQILSLQSMISRNLGFKMSNNEIKKLAVNDIEELFDCPNLVFMATNSWATIEFLKHIVRGIEKRVMSQVKLRKEFSKLQSIPGIGKILALTIMLEVGDIGRFATVGDYSSYCRCVESKRISNGKKKGENNKKNGNKYLAWAYVEAANFAKRYCPKAHSFYQSKKAKTKNVVAIKALSNKLSRASYYIMRDQVAFDEDKLFS

SEQ ID NO: 469756 - protein, 347 aa, unidentified
MNFYKVSHKYYCGVDLHSRTMYICVVGQDGVVLLHRSLPCDPVRFLLAVAPYREDLVVAVECVYSWYWLADLCAREGIAFVLGHALYMKAIHGAKAKSDRIDSEKVVVLLRGGLMPVAYAYPADMRATRDLMRRRLLFVRQRGSLLAHVQITHHQYNVEPPGKRITYRSKREGVGEGFSDPSVRQSIATDLALADHLEVVIGELELAVLRQARVHDPNSLALLMSMPGIGKVLALTILYEIHDISRFPSVRDFASYSRLVKCERSSAGKSLGTGGHKIGNAYLKWAFSEAAVLFIAKSEQGRTVLKRLERKYGKPKALSVLAHKLGRAVYYMLARKQAFDPQRFASV

SEQ ID NO: 469757 - protein, 338 aa, unidentified
MTVVTVGIDLAKNVFAVHGVNAAGKAVLVKPLVRRAKLLELIATLPACLIGIEACTGAHYWAREFQKMGHTVRIMAPQLVSPYRMGGRHGKNDAADAAAICEAVTRPNMRFVPIKSVEQQGQLFVHRAHQGYVSERTALINRIRGLLSELGIVLPQAFKAFLSGVAQVLEDLPGYCNQVIGDLLNELYHIEEKIKNSEKIIQQLARDNSAAQLLMQFRGIGPMTATAIVASIGNGHDFKNGRQFSAWLGLTPRQQSSGGKARLGRITKAGDSYLRTLLVLGARSVLLGAAKNDDPVSRWALQLKERRGYGRALVAIAAKNARMCWAMLHLRDEFRFPA

SEQ ID NO: 469758 - protein, 386 aa, unidentified
MSRPGSGARFLEFLCTEPHADDAMEEEKMELMHRRCCGLDVHKETVVACLRLVCDGKVTTEVRTFQTTTADLLRLSEWLAANECTHVAMEATGVYWKPVWHILDDGEFTLLLANAAHVRNVPGRKTDVNDATWLAELLAHGLLRASFVPDTQTQEMRTLLRTRKQLVREQSSHVLRVQKTLEDANIKLDSVLSDVMGKSGRAMIEALIAGETNPTKLASLADRRVKCSQDELREALRGRVTKQHRFLLRLHLNQIDALAAAMATIDAQVEESLEPFRTAVELIISIPGIKNLSAHVIVSEIGIDMSRFPSAAHLISWACLCPRNDESAGKRRSNRVRKGAVWLKTTLVQCAWAAVKKKDSYLQAQSSASGLAVARRRRFSRSRPRC

SEQ ID NO: 469759 - protein, 350 aa, unidentified
MIIGIDYHPDFQQIAFADTETGECGEQRLNHNNQEAEKFYRDLRQRGIRVRVGLEATGYSRWFERLLVELGIEAWIGNAAEIKTHRVRKQKTDRHDAQLLLKLLLEDRFPRVWVPAPENRDLRHLLWHRHRLVQMRTRIMNQLQALAMNEGQRWKKKLWGEQGRAKLEKLPLAPWASQRRQDLVALLDRMNSTIEQLTKAVEQEAGKRPEVLRLMTHPGVGSLTALAFVLIIGTPERFHSGKQIGSYIGLVPSEDSSGGHQRLGHISKQGNTLLRFLLVEAAQAATRCNPDWRRRYVHLAMRREKNIAKVAMGRRLAVRLYWMWRKEWDYAQFLKFGSYAGKLVTGHGGH

SEQ ID NO: 469760 - protein, 470 aa, unidentified
MAAVMIGIDPHKATHTAVAISAAEEPLGELQVRACAAQADQLLAWAAAWPQRTWAIEGAGGLGHLLAQQMLAAGERVLDVPPKLGARVRLLAAGDTNKNDPNDARSVAVAALRSPGVAGVRPDDHAAVLKIWSKRYRDLGRTRTQVVCRLHAVLCDLVPGGVSKAITAGQAGRILASVTPPDAVAAARCELAAAFVEDLRAVDARIRETRKKLAAAVAATGTSLTGLFGVGPVIAAAVIGDVRDVSRFPGRDHFAAYDGTAPIEVSSGPRKVYRLSRRGNRRLNHAIHMAAVTQVRHRHSQGRAYYDTKLAEGKTRKEALRSLKRQVSNAIFACLQADARRAAARAEGPGGQPGNDSVASVAGSHPRHRLFGQATPGPRHHPTTASANPAPGPAVPPGGAGHSSIAATMPPAKPRVQAERPQRSEDEQPGGAARRRPYSAARKARGQGSLVKPQRPKGTSPSAKRTDRTT

SEQ ID NO: 469761 - protein, 445 aa, unidentified
MAPQTVAPVKFGSTRRRMKSSPCSTPGIEKDERGNVMEVIYTNCCGIDVHKKSISACCRRMGTNGEVRKEFMHCGTMTRDILKLSDWMKSAGVTHVALESTGVYWKPVWNILEGIFDVILVNAKHIKQVPGRKTDMKDCEWIAQLLQFGLLPRSFVPPRPIRELRDLTRQRSKLAQQKGSVVNRIQKVLEDANIKLSSVATDIMGVSGREMLESMITGEADPVTLASLAKRRLRAKIPELILALEGKLTSHHRFLLNLLMRQLKDIESYIEELNVMIEEKMRPFEEVLRLLVTIPGVDQYTAECLIAEIGIDMDQFPSSAHLASWAGICPGNNESAGKRKSGKTPKGNRWLRRVLGESAWAAGKTKNSYLSAQYQRILTRRGKKRAIVAVGHTILVICYHVIKEKKAYEDLGHDHFARMNPDRHKRYYVDKLESLGYEVTLTKAA

SEQ ID NO: 469762 - protein, 343 aa, unidentified
MQTITTIGLDIAKSVFQVHGVDAAGQVVVRRQLKRRYVLAFFQKLPPCLIGIEACASSHYWSRELRALGHTVRLMPPAYVKPYVKRQKNDATDAEAICEAVTRANMRFVPTKTPEQQSCLMLHRTRHLFIRQQTAVINAIRAHLAEFGIVAPVGRKGVTELLHVVADPSDRRVPEVARACLAALGTQLLGLKEQIVEFDRLIMAWYRSNETSKRLHYIPGVGPLLATALAASVADPQTFRSGRNFSAWIGLVPKQHSSGGKDRLGSISKQGDRYLRSLFVAGALSVIRYAKIHGTKHRPWLMALLARRPTKVAAIALANKLARMAWAMMARGERYRNPVALAA

SEQ ID NO: 469763 - protein, 365 aa, unidentified
MGEKTLYCGIDIHYKKSSLCILKRNGEEKEQIEINTDKREIENIINKYQKYNMQYAIEAGNMTRYFHKIANNFNNTKKVHIVHPLKFKIITESRQKNDKNDSKNLALGLLKDYLPYPVYIKSENSRQLKLLLNLRRRYVTTKTKIIQQAKSIIRSLGIKPMVKSLKSVRSFNIVIDLMENNFDKDTIELLREELVEENKKIVNIEEKIMELINKAYKEEYDLLISIPGIAFVTAATLIAHIDDIKRFQKAGQLSSYFGLVPSEYSSGEKVKHGRITKEGIKEARALLIQAAWVFIRMRSKNDDRLKALRNKYHKIAFKGKNSQKAIVSIARHLSRIIFGVLNSRMLYSGIILNKQESIKPAVIKQ

SEQ ID NO: 469764 - protein, 427 aa, unidentified
MNNTQNNKIAQVTNDTMVIGIDIGSEKHWARAFDNRGIELSKKAFSFKNTAEGFASFEDWYENQRRTAKLERIMVGLEPTGHYWFNLNQFLAENGVRVVLVAPQHVKHSKEMDDNTQRKDDQKDPRVIAKLVTEGRYFLPYRPSGVYADLRDGFNRRCGIVESMTRAKNRLYRWFSINFPEYLHAYGSVTAKTGLMVLKKAPLPKDIVELGVEGVDKIWRDAKVRGAGKKRAMTLVALAEQSIGEKTANEAARLELWQLLEDYEHFAHQFEVIEEMLKRKVHELPHADKLLAIPGIGYFTVMGFFAEVGSIDRFDNPKQIQKLAGLAVVENSSGKRTGLPGISKRGRDRLRWVLFQAAMNAVKNNQEFRVIHQYFTTRKDNPLKKMQSLMAVAGKIIRVFYGMVRSGAAYDPERLLRDIHRPEKGAA

SEQ ID NO: 469765 - protein, 353 aa, unidentified
MITIGVDAHKGIHVALAVDEGGRELGEWRGPNSPDGWCTLASWAASFGEPSQWGIEGAWSNGRGLAQHLVGLGLTVFEINARWTARERRNSRKPGKSDRLDARAVARCVREEAPKLPLVNAEDDSVLLDLLSNEREAAVAEGTRLRNQIHALLLQVDPQYGRHLPSLTSAAGVRALKNYAAPVAGKLVEHRAASIRRLALRLELAQEQAGDLADQIRELAQARYEPLTRLCGVNLLTAGVLAGILGPGLRFASDAELAAYAGASPLETSSAGLVRHRLNRGGNRRLNAVLYRIVLTQAHYLPEARAYIARRMSEGKTKREAHRCLRRYVARAIWRLWQECLQPGSRRLAEIAA

SEQ ID NO: 469766 - protein, 385 aa, unidentified
MTIQIQAPRFIPRDYDVFGGLDVDKKSMSVVFTDHAGSQRALRMAHQVTPLVNYVRKHFAGQRVAFAYEAGPTGFGLHDELVRRAYTCVVVAPSKVPRAPGERVKTNRLDSRKLAESLRGGQLHSIHVPSGVYRNLRHLVQMRDTHVRQLTSSKLRIKSLLLYEGIPFPEPSEKWTARAMRELQTLPCSETVRFKLDDLLDTLHFHFQAAARATKQIRQYCLDDPELQQSIDLLLSLPGIGWIVGSHLVARLGNPREIKNGRQIAGFLGIVSSEHSTGDKQNRGEITRSGDSRLRNKLIQSAWTAIKRDPELRAFYRRIYQRHPKKVAARKAIVAVARKLTNRIYVVLKEQRPYVIRPDSSIAPLTVEETVGPRERLDGAQNDQS

SEQ ID NO: 469767 - protein, 398 aa, unidentified
MMAATVIASAAKQSIIPAMRHGLLRFARNDGVDGPRMASMCQTGDVSRTRQRGPSMTKISTIGLDLAKNVFQVHGIDASGTVVVRRQLKRAAVERFFAGLPPCLVGMEACGSAHHWARAIRRYGHEVRLMPPAYVKPYVKRNKNDGRDAEGLSEAVNRPTMRFVPVKSVEQQATLAVHGTRALLVRQRTMAANALRAALSELGIVAAQGYEGLRKLMTRLEEPSEEIPENMRCALLLLAKQWQALDVDERVLERQIGKAARGDRDARRLMEVPSVGPIIASTVLAKVPDAKVFRSGRDFAAWIGLTGKDHGTGGKHRPGRISKQGDRMLRALLISGASAHLRQQKRRGVTDPWLRDLLARRPYKVVMVAFAAKTARILWAMLSKGEAYRDRASAPAAA

SEQ ID NO: 469768 - protein, 354 aa, unidentified
MMTSTGVDVFGGVDTHGRTHHAAAIDGAGRLLGDAEFAATTAGYRALLAWLTRFGRQARVGVEGTGTYGAGLARHLAAAGVAVVEVDRPDRKTRRRQGKSDPLDAIAAARAALAGTATGAPKTRSGPVEAIRALRVARRGAVKARTAALNQLHGLLVSAPEGLRAELTMLHTTALVSRSAGFRIAADRLLEPTMATKAALRSIARRIQALDEEIALADARLRPAVTALAPRTAAIFGAGPDVAGQLLATAGDNPHRLRSEAALAHLAGISPLPASSGRTDRHRLNRGGDRAANAAIHRIVLVRMRYHQPTRAYLTRRTAQGLSKREIMRCLKRYVVREIHSALLADFETLPATA

SEQ ID NO: 469769 - protein, 376 aa, unidentified
MTVTEIVTEIETEIVSDTVSEIEPEKTPVYGLENAYGYGRSLAVWLLERGCSVKDVNTSLSFAQRKSTPMYQKSDSYDAQAVALVLINMLDELPDAVPDDAYWTLSQLVKRRDNIMTQIIRLKNQLHEQLCSAYPSYKKFFYDIDGKTALYFWEIYPSPKHLRGVTAEELTENSKPVIRISTTRRAETILEAVKNDGAADRAYQSNRDAITRSIVRDLKHYRQEQEKINQSIEELFPVFGCTLMTIPGINQTMAAIILSAIGNINRFSNAGKLAKYAGIAPVNFSSAGKGKDVSPKQGNRRLQSIFFFLAIQMIVVSKNGIPRSKTFYDYYQRKQQEGKSKTQALICISRRLVNIVYGMLKNKTEYREPSEQQNSN

SEQ ID NO: 469770 - protein, 346 aa, unidentified
MKKTNTVRVNGNMIFKGHKLTIGLDLGDRWSNYCVLDEAGEVLLEQKLATTPEAMKQTFERIPRSLVALETGTHSPWLSRLLKELGHEVLVAHAQKVELISKSNRKDDRHDARTLARLARIDPELLGPVRHRSAKAQIHLTVIRARAELVSARTALVNAARGLAKSHGERLRKCGAEQVSRELAAELSAELREVLEPLLKEIESLNERIKEYNARMEKIAKESYPQVALLKQVKGVGTQIALTYVLTLDDPHRFAKSREVGCFLGLKPGRRDSGQSQPQMHISKEGDRYLRTMLVQGAHYILGPFGEDSDLRRWGLRLAERGGKNARNELLSRWPESWRYYCIGCG

SEQ ID NO: 469771 - protein, 443 aa, unidentified
MMPLQEVAAQMKVLYERVAGIDVHKDMIKVAIRSPGEKPWTRATEVLEFRTFYGVLQEVGRLLRRRGVTHVVMEASGIYTDPVYYALCEQDFEQVVVVNPAHARALKGHKTDAKDCARLAELFECGLLRGSYMPPAELREVRDLTRYRMKTVQARTSEVQRLGKALESAGIKPGSVASDLTGKSATAMIEALIDGERRGGVLADLAVGRMRTAGKLAGLSMALSGRFSEHHALLCRLHRDRIAVFDEAVDGLDGRIAGKVTRWQREAGLLASVPGFGDVVTSAWLGEIGPAPHQWFASHEKLASWVTLCPGNNISAGKRKHGRTGDAGTYIKPVLIQAAWAAIRTKGRLQARYSRLVRRFGGEKNPAAKKKAITAIAHTLLKIAYQVLKSGMPYQELGADFCTRRESPEQRQAYLERQLQKLYPGRTVTITIGPPEAALPPRR

SEQ ID NO: 469772 - protein, 381 aa, unidentified
MTTAAPHNEHGNTTEATLFVAFELSEKTWKLGFTTGHGQKPRERTVPARQQERVLDEIAHAKRRMGLPASAAVVSCYEAGREGFWLHRFLQAQGITNHVVDSSSIEVNRRRRRAKSDGLDVRKLLSMLMRYAQGERQVWQVVKVPSVEAEDHRHLHRDLETLKQERASTTTRIEGLLSSQGLRVPSLTKLPEQLDALRLWDGSPIPPGLRRRVLRVYAHHTFLSEQIAAVEAERRAQLQASTDARIAKVRQLMLLKGIGINGAWLLVMEFFGWRAFKNRREVGGLAGFTPTPYQSGDSAREQGITKAGNRHVRWMTTELAWSWLRLQPDSALSVWFRERFGGGGKRLRRIGIVAVARKLLIALWRFLETGVLPPGAVLKEG

SEQ ID NO: 469773 - protein, 407 aa, unidentified
MLNAVGIDVSKGRSTVAVLQPGGVVVRKPFDVYHKQSELQELSSFIKSLDGETKVVMECTGSYHRPIVEVLHRAGIFVAAVNPHLIKNFGNNTIRKVKTDPADSKKIARYTLDNWDRLQEYSGMDAKREQLKTMNAQFDFFMKQKTAVKTNLISLLDNTYPGVNDLFDSPVRSDGSEKWVDFAYSFWHVDCVRKLTLNAFRDRYMAFCKRHGYQYSESKADEIYNASKELVAVFPKEEGYKQLIQFSIKQLDLESEHVEKLRADMNELASQLPEYSVVMSMYGVGPTYGPQLIAEIGDIMRFTHREALTAFAGVDPGKDDSGQHNSKSVSASKCGPARLRKTLFQIMSTLIQKMPPDDPVYKFLDKKRSEGKPYYVYMTAGANKFLRIYYGKVKEYMRSLETDQSQS

SEQ ID NO: 469774 - protein, 338 aa, unidentified
MTGEKKYCGIDISNLTLDICYANEEGIHQYHQLSNDTMGFKKLLELTNEGCHFVMEYTGVYHMNLIFYLHEKKCAYSVVNGIQIKRYIQMHLERNKSDRKDAQRIYEYGYERQPPLYEMPDSLYFECKSLSNAIDTFTQEITSFSNKIHALKKQPTETKMIQKSYEKVIKNMQKEKKDLEQKLEEKLREWQPELVKKVGSVMSIGKRATALLIIKTQGFAHTDSYQQLISFAGLSPVIYQSGSSIKGKSKICKQGGDELRHTLYMCALNAKENNLACKQLYERLVAKGKNKKLALIAVCNKLLKQVYGVVKSDTIFILNNYIYKLSNLAASFIPIYLI

SEQ ID NO: 469775 - protein, 407 aa, unidentified
MTVFVGDDWAEAHHDVHLMNEAGDRLAAKRVPEGLEGVAALHAMIAEHATDPAEVVVGIETERGMWVQALIAAGYQVYAINPLSVSRYRDRHNVAGAKSDPGDAKVLADLVRTDSHNHRPVAGDSDAVDGVKILARAHQNLIWDRTRHSNRLRNDLREFFPAALEAFEELADRDAVAVLAKAPSPEGAARLSIAQIRSALRKGGRQRNLDTRAAEIQTSLRSPQLAAPSAVTAAFATTTKALVEVIAGLNTQIKALELELANHFRQHPDADIYLSMPGLGDVLGARVLAEFGDDPERYASAKSRRNYAGTSPLTKASGKKRAVLARHVRNRRLYDAIDQWAFCSLQTSPGCRDFYDQHRSAGDLHHQALRALGNRLVGYLHGCLRNRTHYNEHTAWAHRPQQTQIAA

SEQ ID NO: 469776 - protein, 328 aa, unidentified
MCTLGIDVSKNKIDLCLLTAGPGGKKKHKVLTNEPAVARKVVDWLNAQKCVPESVTVVLEATGIYHENLAYGLHEAGVSVCMANPCRVREFAHGMDILNKNDAVDAFVLACYGELKSPAVWVPPSPEVRKLRALLRQRDALREDVQRTVNRLEKANSTSTPQEVIRSLERMKSWLNEELARIEKLITDHTDNDPGLKADLDLLKSIKGVKDQVGREMLALLKDGTFKSASQVAACLGLTPVEKTSGSSVRGRPHMSKTGPSGVRAKLYVAALTASRWNKQAKAIYERLVAKGKAKKAAPGAVMRKLVHLCFGVLKTRLPWDENYVATA

SEQ ID NO: 469777 - protein, 338 aa, unidentified
MTYGAIDLHTRYSQIRIIDGDGRVVREQKVRTTAEQLIAAWAGYGPLRILVESSTESEWVAQALEAAGHTVIVADPNYAPMYGEVRRKVKTDRRDAAALAEANRRGWYRAVHRVSTPQRARRQVLRSRRHLVQLRSGTISLIRTLLRQDGYRLPRCSAPAVADRLAALAVPSALRATLAPLTRVLRQVSEEIATLDRTLAVVATTDPIVRRLMTAPGIGPIVALTFRAFVDEVSRFRSAGQVSAALGLVPREDSSAERRHRGHITKAGPRELRSLLVQAAWVCWRRAKASGTLRAWTEHLAARRGRRIAVVALARRLSRILYALWRDETEFNAATLAA

SEQ ID NO: 469778 - protein, 384 aa, unidentified
MRRANLWSRGVPLRVPKVMTGSKPKDQEVGPMHGSAMALPTITVGLDLGDRYTQFYQLDAATGAIKAGRLRTRPDVLRDHFICTPRRIVLEVGTHSPWVSRLLEELGHQVLVANPRKLRLIYGGTRKTDRLDAEALARVGRLDPQLLGPVRHRGRQAQADLGRLRARECLVRARTQLVNHVRSAVKTVGGWLPATSTASFAHKVEPHLPDKLRPALTPLLREITELTAQIRHADRALETLARTQYPETDRLRQVAGVGSLTALCFVLTLEDPTRFRSSRSVGAYLGLCPRQRDSGTHTSQLSITKAGDPMLRRLLVTAAQYILGPFGPDCDLRQWGLRLAARGGKNAKKRAVVAVARRLAGILHRLWVSGDRYQPCRARNRAAA

SEQ ID NO: 469779 - protein, 369 aa, unidentified
MADYREAFVAFDVAKIKHAVAVADSGRAGEVRFLGEIENRPVTIERTIRKLAKRYDRLHVCFEAGPTGYGLYRQVGDLGHDCMVVAPALIPKRSGERIKTNRRDAVTLARLHRAGELSAVWVPDIVHEAVRDLVRARQAGAEDLRRKRQQLLSFLLRHGRIYDAGGHWTLAHRRWLARQAFEHPAAQIVFQEMSDAIEDAAQQLHRFDEQLAAIVETWSMKPVVEAYQAMRGASFLVAVIFAAEIGDVRRFETPSQLMAFLGLVPGERSTGDTVRRSGLTLAGNRRARRALVEAAWTYRYPARVSEPLRARLEGLPKAVRDIAWKAQVRLCARYRRLAAAGKKPPVIAAAIAREMAAFLWAIGREVAPS

SEQ ID NO: 469780 - protein, 327 aa, unidentified
MSDAIVGIDVSKETLDANCARGRRKQSRIFANSPEGWKLVLSWLKAMGSKQAHVCMEATGRHSLGMALALHEAGHVVSVVNPAQIRDFTRTKLGRNKTDKVDAALIREYAELFKPKPWVPPSPAMRRLCELQTVRAGIVNNRAEWNNRIGSGLDDSTATRLAAATIEHFTSQLEAIDRVIGETIDQDAELRGRRELLLSVIGVGETLAALLMAEMPESGVLRRSSEMIAYAGLNPSHHRSGSSIDRPTRISKIGNATLRSSLYMPALSAMRFNPAVAALVARLKSAGRLKPKQIVVAAMRKLLVLCFGVLKTGKRFDPAIAMSAEPK

SEQ ID NO: 469781 - protein, 341 aa, unidentified
MAIIGAFDLHRRQLTYDYLDVVTGEIDRGRVVPADRAHLRSFLARFEGQDEVAFAVEGCTGWRYVVEELEQAGIGAHLAEPAETATKRGRKRRAKTDRSDARHLRELLRKDDLPESWIPPAHVLEARARVRLYKDLDEERTAWLQRVQATLYHQGVPVIASLTSAAGQARLAAAELSPAGRQAVEVGLRQMDRLTAELDPLRADLARFSRRQPGCRALRTTHFGIGPITSVAIWAEMGDTRRFSSSDDAVRHTGLDITVYASDSKRARGHLARQGPATLRWALYEAAVCATRPNSPDHAYFLAVKRRADGHLGVISVARKLARRVHHTLRALGDQAWEPAA

SEQ ID NO: 469782 - protein, 427 aa, unidentified
MTTYRIAGVDVHKKMLAVAVADIAADGEFRFTRRRVGTSPTELRELAAWLDTQAVEEVVMESTAQYWRPVWEVLERVWQPARRTREGASPTAGTLYLAQAQSNKGRRGRKRDFVDAERLVKRLVAQELVLSFVPDAEQRLWRTVTRRKYQLTRNRVQVHNRIEALLEEAHLKLSSLVSDLLGLSARRMLRAVAEGETDPTALATLADRRLRATTAQLTDALGATAELNPVYRQLIAMALDDLELIEAQILQLDREMGGLLRSHQDAVERLAEVPGLGVDSAQQIIAEVGPTAQTFPSAKQLSSWVGACPGAEESAGKNASHRTPSGNRQMRRLLYLAANAAVKTKGSIFQLVYRRLVPRLGHAQAIGAIGHRLCRLIWKILHDGVRYEERGPEVSRVRTQRRAAQMIRDLRKLGYRVEFGPSQLGTT

SEQ ID NO: 469783 - protein, 376 aa, unidentified
MGTPWAQTLDDVGVREIFQGLEGVPLMTMVGGLDVHRAQITFDYVDDDGLVHWGQIRPATRKTLRGWLAEHCPDGDAEFALEGCTGWRYVSEELAGAGVGVHLGDPAEIAVLRGPKKRAKTDRADARLLRTLLLQGRFPESWIAPAHVLEIRTLGRLYCTLMDERRAWQQRIHAQLFHQGCPPVRALLSVTGRAALAGAELSAVGGQYVDTALGRIDELSTEIEPLRAQLVNFARHQTGCQALPRHYGIGWLCAAIIWAEIGDARRFSSSDQLVRFAGLDVTVYSSDGKRSPGHLSRQGSPELRWAAFEAAKCAARRGSPDYGYYRKLAAKRDGHNGKNPTLAVERKILRRCHHTLRELGDAAVALPVAEPQEVAA

SEQ ID NO: 469784 - protein, 368 aa, unidentified
MDVHKDTYSLCSYDAHDNLLFSETKIKADTDAVLSYLKCIEKKFIDDDVMIVCGYEAGPTGFTLCRELQKKNISCVVMAPSSLPKAPDEKKRKTDKLDAQKLALHLAHNTYKAVHVLTPEMEVIKELTRTRATALKAQKKAKQNLLSFLLRKGMVYPYGGQSRYWTQKFFAWLKTLEFTNPLEKYSFEEYLTEVNHQMSRIARLDAKIAELAEDPLIKDDVKKLCCFSGISTLTAVSLVSEIGDFNRFEKASYFTSYLGLCPGTHSSGLSNQSLGITKAGNKNLRCLLIEAAQAMGRSQICGKKSLRLQARQKDMNPLVIAYADKAAQRIKRRRNSMMFRGMNANKATTAAAREMACFIWGMMTNHIA

SEQ ID NO: 469785 - protein, 471 aa, unidentified
MELRNAIGIDPDSKGFVCAHVKLSEEKANTRGYMATDSDLRNFLRWVKAEGDPIVAIEGSNGLSKPIEEALRKEGIIFYSFKPSDTDKFRKVVVGQNKNNQKDAESVARYAMALEAQGKLERHRRVWFPDQELQLLTRSYERKSEAMTAEVNRLWKLLRLASPDLYLALGGNNPEVELSENILKTQGILTLLGEKPDIGQWKTLSEEQLLQAMGGGNYKGRGKLIQELRKLAGSLQPVSLALALLIRSSAQQIQWFKREQSEITRMLEVLTRDTLAVQVLKEMRGIGTITATTMIAEIIDIRRFVREDNLASYSGFGRREHSTGESTRMVSTRSFNHRLKDIFMTAARNYVLYNPDSHLAGYYRNLVKAGMDPMEATKRVARALVRVIFRTLSSLVEKAEGEQLSEQNRKAGESDMASGSLRSDRSHESNISLSSLPGSKAGKAKRVKGAVTKARRSKMSKKGKAVSKKIA

SEQ ID NO: 469786 - protein, 353 aa, unidentified
MTLSILGYDLLFPMDVDKKRIHLAVMDGQRLLKRATLPYDPLNLLNFVRRNFPDKKALFIYEAGPTGYGLYDFLTEHEEECRVAVPSMIPKAPGQRVKTNRLDAYNLGVQMRTGELRCVHVPENKYRDLRHLTRLRLKYRKRMVGIKNGLKGLYLFEGIVFPEGIWSRRLIKEIGKLKHRREVEFKVGELLKELEFFQIQEIKAKAEIRRFCNKDKELQACITYLMTLPGLGWTIASYILGALGGYKHLSSAKKTSGFLGLGPRENSTGDRIRRSDITAVGDPQARKMIVQSAWVGIRKDSRLRAIFERILSRNPEPFRKQKAIIAVARKNVCRIHAVLRDQRKFKDSLEKVA

SEQ ID NO: 469787 - protein, 415 aa, unidentified
MEPVLESCAGMDVHEKKVDVCIAHGPLDKSPKFEIRTFSTMTSDLEDLSSWLKKYRVTTIGMESTGVYWKPIFNIMEGEFKIVLANAQHLKAIPRKKTDIMDCKRIAKLLRYGLLPNSFIPPREIRELRDLNRTRRKLVGMMTSEKNRIIKVLESANIKLSSVVSKISGVSSLAMIRSLLEKDKLTKEEISQLAKGSLKKKVDQLEKALNGKLTDHHRFLLKMHLENLDHLARQIEKIDEEIKRKMIPFQTEAKLIQTIPGISEVSASAILAEIGTDMSQFPDERHISSWAGICPGNNESAGKKKSGKTQKGNSSLKATLVEAAWAASKTKGSSYSAFYHNIVRRRGKKRALVALAHRMLIDIFYVLKTGVPYQDTGAKAANEVAMKRREQLMIRSLEKAGYSVVKTSHAEMAVA

SEQ ID NO: 469788 - protein, 340 aa, unidentified
MSKESVSSHATVYAGIDVSAATLAVAVQRENREGFEQRQFANSAADHKQLIGWLLKGGERVRVSLEATGIYSLDLAMALDMAPSIEVAVLNPKMANRFAQTLRRSKTDAADAVALAEYSRRMQFVAWQRPGMIALELRAISRHLVALTDEHTRLNNRLHAAEVSATTPRCIRQDLKHSLDGLKKRILRLRKAALSLVDQSEELKPKLKQLIGIPGIAETSALQLLGELAALDPKMTARQWVAHSGLDPAHQISGSSVYKPSRISRHGNRYLRRALYMPALVGVRFDPHLKAFYLHLQARHKTKLQALMAVSRKLLHGIFGIFKNGTSYDGAKLFPALEAA

SEQ ID NO: 469789 - protein, 406 aa, unidentified
MKSVIAFDVSMGKSYMVIYNAARSCIFEGEILHNRPHFEQLNKRIIDLVQKDGQVPAIVFEATGVYSRPLERFMNDHGFPYCLLNPLESKIQTATMRIHKTDKSDAHRLAQTHFTTERRIKKPQDHYFDQMRALSRYYHELDEELAMLRSRMHTLLQLTFPEMESLFTQKSELFLNILQLFPHPDYVKNLSKTVVRNRLLANTDKKLAPKTAEKKAIQLISAAQDSYPAVDQDDIRCEQLKDYAKRSLAILRKREELIQQMVVLSEERNEYQILISMPGIGKNTAVRLIGEIGDMTRFENHKQLNAYAGIDIRRFQSGTLFYKDKINKRGNSHLRKILYFTIQNMIRQRRFGHNHFVEYYDKLKTQPYNKCHKVASIACVNKLLKCLFHLITHNLTYNYEIASVSS

SEQ ID NO: 469790 - protein, 323 aa, unidentified
MGVPTVSTDATTVIVGIDISKDDVDFFVLNWKGCPSGRRPRRATDLAILATELATFKPRLVVLEATGGLETPVWAALEAAGLRVAVVNPKRVRDFARSLELLAKTDSLDARMLARFGELLGPAPTRLPDRVARDGRELVRHLDALVGTRAQHRTRRRQLAGELALASVERVIASLSEEIALLEQQIKEALRQQPGPCQRAAQLRTAPGVGPKTSWALLAELPELGQLSGRQVAALAGLAPMARDSGCFRGRRRIVGGRARVRKALYMAARSAVRCDPHLAAFRARLLAAGKPKQVALIAVARKLLVALNFMIRDRRPWIPLPA

SEQ ID NO: 469791 - protein, 338 aa, unidentified
MVYGAIDLHMRYSQIRIVDETGAVLRDQRVSTSRERLVNAFEGWGRIRILVETGTESEWVAQTLEAASHAVIVADPNYAPMYGDLQRRVKTDRRDVAALAEANRRGWYRAAHRTSAAQRGTRQVLRARRQIVQMRTGAVALIRSLVKQEGYRLPRCGAERVPAQLETLRLPAALHALLAPLTKMIETATSEITTLDAQLQARAAADPLVQRLQTVPGVGLIVALTFRAQIDDVRRFRHAGQVSAAIGLVPREDSSAERRHRGHITKVGPRELRSLLVQAAWACWRSKHSATLRAWVEHVAARRGRRIAVVALARRLSRLLYALWRDGTSFDVKKLAAA

SEQ ID NO: 469792 - protein, 344 aa, unidentified
MLILGVDAHKRSHTVVVTDVTGKQLGVKTFGTTTADHLELVRWADRHGSERCWAVEDCRHLSRRLERDLLAAGEAIVRVPPKLMAGARNAARTYGKSDPIDALAVARAALREPNLPIARLDGPDREVRLLVDHREDLVGERTRIVGRLRWHLHELDPSWEPNRRSLDRPSTLTKVEQHLEAIDGLVARIARSLVQRCRDLTVEINALEVEITALVEKLAPSLLTICGCGPLTAAKIVGETAGIDRFRNHNAFARHNGTAPLPVWSSNHTRHRLSRTGNRQLNAALHRIALTQAHWHPDARALIARRRANGDGGLEAIRVLKRRLSDIVYRALLPDLQAALPRAA

SEQ ID NO: 469793 - protein, 408 aa, unidentified
MNAVGIDVSKGKSMVAALRPMGEVALLPQEFLHTGVGLEQMAYAILALGEDTRVVMEATGRYHEPVAAALHEYGIYVCVLNPLYIKQSGGGSIRKVKTDKADAMKIAKYGLDNWVDLREYTPMDTVRQQLKLCSRQYNLYMKTVVSLQNNLISLTDKTFPGVNELFSSPERADGHQKWVDFVMTFWHCDCICRVSEKAFTERYQKWCKRKGYHCSVEKALDIYASSCGHFTTLPKNDNTKLLIVTAAQQLLAGKTTLAALRAEMTRLASQLPEYETVRAMYGVGETTAAQLMAEIGDVRRFPRRSSIVGFAGVDPAVDQSGKHETQSTHTTKRGSPHLRKTLYQIVCTYLRKAPADEPVYQFLDKKRAEGKPYFVYMTAAQNKFLRIYYARVKECLEAFDAQQGISQG

SEQ ID NO: 469794 - protein, 338 aa, unidentified
MVYGAIDLHMRYSQIRIIDAEGQVLREQRVVTGAERLVTVFSGHGSMRILLETGTESEWVAQALEAAGHQVIVADPNYAPMYGEIRRKVKTDRRDVAALAEANRRDWYRQTHRVSASQRALRQMLRSRRQLVQMRSGTIALIRSLLRQSGYRLPPGSSERVPRQLVQLVLPADLAATIARLGRTVSTLTTEIAALDGRLQMQADADPIVQRLQSVPGVGPVVALTFRAFVDDVARFSSAGQVSAAIGLVPREDSSAERRHRGHITKAGPRELRSLLVQAAWACWRSTASANLRAWVERLAGRRGKRIAVVALARRLSRILFALWRDQSVFTAATLAAA

SEQ ID NO: 469795 - protein, 624 aa, unidentified
MQLRSAPVLGRRRMPLKGRTLLRPSKSTTEWWEEKSNFPEGLPLDRVGRGGCQRKHRPICHWCVSARARAWSLWLAAWTLASLQSARALAAVIPFGRVYGLRPKAGLAGTLGKKAVSTTNQAMAKQVKSKSFPGGPIRPAKQMPTVHAHAAGIDLGNAAHFVCVPADGVPADQNPVRQFGVFNPELDKMVEWLEQCQVQTVAMESTGVMWIPVFQKLEAAGLEVLLVNTKRLKHVPGRKSDVLDCQWIQQLHSYGMLTGSFRPADIICRLRTLMRQRENVIASAGSETQHMQKAMQEMGVHLHVAVSDVTGDTGLRIIDAILEGQRDPKELVKLRDWRVRRSTVEEMESALQGDWREELLFVLRQSRQAYAFYQAQLLALDEKIIALLAQIPPAPAPPRDGSSPPSSSTTTSPEKAVGQGKGSSVTAPNSACGPAAQKKPRKKDKTSKGGNPFPKHIRPQLTQIFGVDLTRIPGLNLVSVLMILSEIGTDLKKRWRNGDAFAAWLGLCPGSNISGGKVLSSRTPHVVNRVAVLLRLAALAIGRTDTCLGVFYRRMRAWHGAPKAMTATARKLAVLIYHLLTTGEEYQEPDPKQYDERVLKNKIIRLSRQAKELGFDLVPLEQTV

SEQ ID NO: 469796 - protein, 370 aa, unidentified
MSESSTIFVGLDQHKESIAVAYVGADRSLEPTYLGPIGTRTSDVDAMVRKLQSKGKKLVFAYEAGPCGYGLHRHLTRKGHDCLVVAPALIPRKAGDRVKNDRRDAVNLCRLLRSGDLKSVYVPQIADEAIRDLCRAREDAVSDLRAAKYRLKSFLLRHDIRFNGKADWKSAHLRWFGEVKCATPVQQVVFQEYVRALAHCFERVERLELALDEHVKSWRLSPVVEALQALRGVRFTVAVTAIAELGDLTRFAKPRQLMSFLGLHPSEYTTGEKRRLGGIAKTGNSHARRALVEGAWAYRFPARVSKQIQARQEKLPEAVRDIAWRAQVRLCKRFQKMIARGKNANVVVTAIARELAAFMWAIAKEVPVAA

SEQ ID NO: 469797 - protein, 436 aa, unidentified
MTLINFVAANQKYYAFNLLSVFIMVFWSVQYLLQHLLVQTQVSHQLLQPLILILQLPQTPQFRHARPGKFFLPVNGMDYFLPLRLTVRNVLTRRITMNIVFLGIDLAKNVFQLCGLNQAGKPVYTKRTGRKELLQTLANIPACLIGIEASTGAFYWQREFEKLGHKVKVISPQYVRPFVRGQKNDGNDAQAIAVALMQPTMQFVPRKSPEQQDIQALHRARQRIVNHRTATVCQIRGLLLDRGIPIGSAVSRARRAIPLILEDAENGLSSRMRRTIAELYDLFNDLGRRIHFFDKEIETVFRQSEACPRIAKVKGIGPKTATAVVAAIGKGTEFKNGRHFAAWLGLVPRQHSSGDRQVLMNMTKKGDKHLRTLFIHGARAVVRVATNNNDGHMNQWVNQLKERRGFNKTTVAVANKNARIIWSMLRNDTGYQVVCN

SEQ ID NO: 469798 - protein, 359 aa, unidentified
MFNNSTFFIGLDLGDKQSHIFVLDPKGEVIEESRLPTNPTSLQRKFASLPRSRVAMEVGAHSRWASQLLKDLGHEVLVANARKLRAIYSNPRKGDRADAETLARLARLDPNLLSPIHHRSPQAQADLAVLRSRDALVRSRTLLINHVRSVAKSSGARLPSCSADSFSNKAAASIPQPLCPALLPLLETIASLTQQIHAYDRQITSLGETRYPETQPLRRIDGVGPITALAFVLTLEDPSRFQKSREVGPAIGLVPRTDQSGDRDPQLRITKTGNSYLRRLLVNSAQYMLGPFGPECELRTWGLMLAERGGKNAKKRAVVAVARKLAILLHRLWKNGEIYDPFYRSRSNAGQPVIASAAA

SEQ ID NO: 469799 - protein, 432 aa, unidentified
MNPHPYDLIIGLDRSDKTADLCLINTRTGQRQAQTLDTAPEALWEWLAALRQQYPQARVGVCLEQPAVHLISFLEAYDWIALHPVNPITLQKFREAFVTSRAKDDTKDADFLAQLLLTHYDKLPLWAPEDSQTRALQQSVAHRRAVVDERTALANRLIALLKQYFPQALTLCGDDLWRPLATRFLLKWPSLGAVQKTKTATLKQFYYLNGSRSQSLLAQRLDLIAKAVPVTDDAALIESFVLRVQLICRQLGLLTRTIAHFDRHIAQTYATHPDRELFASFPGAGPVLAARLLAALGSCRDRFGHAGALQSHSGIAPVTKRSGGSCYIHRRYRCPTFKKQSFHEYAKESILWCRWAAAYYLQQRTRGASHHTAVRALAYKWQRIIFRCWLNHTPYQDDIYQAALRKHGSPIVALFDRVELGKSPFKNPVNKS

SEQ ID NO: 469800 - protein, 384 aa, unidentified
MYKHNILFIGLDTHKVSTEVAHVEDHRGVKPVHCGKIKTTKAAITKLARQYQSKYPQATLHFVYEAGPCGYWIYRLLTSLGHCCYVVAPSLIPKKPGERVKTDKRDALKLAKLIKDEELTPIYVPESEDEAIRDLSRARETAMKDLKDAKYQLKALFLRNNITCKVNDNWSLQHLRWLTELILPHPSQQIVLQEMIQIITERIQREKRLANELFHQVKSWRYYPVVKALQAIRGVRLLIATGLVAELGDLRRFDHPRKLMAYLGLVSKEHSSGDKRRLGSITKCGNSRARRLLVQGAHTYKHNAKISTELQKRQEGLPKEITDIAWQAQLRLCRRYNRLLSRGKHRNVVVIAIAREMAAYIWAIAREVVISPVNSRLRVSRVPA

SEQ ID NO: 469801 - protein, 400 aa, unidentified
MKTVLSVDVAKNKSMIMLMNNDGEILIDTKEIKHNLGEFEKVKEEIEKINLENLTVFMESTGTYHLPVERYFKENGFNTLVINSLTTKNNFDTIRKTKTDKKDCYRLAKLFFVNEVEYHEISKKDLYANLKAMTRQYFYLTQVNIRCKNRYKRLINICFPEFEGFFARNRIYEDTALNFIKAFPHAYIVREKRIDALYNNLRKVDARHDYYYKRLARQLKDTAMDSFPGVDKDHADVKNLSDMASILQENNRLIDEIRKNMIELAKQSPYFEIVNSFYGIGEVLAAELLGELGDITRFDNHKQLIAFCGLDPAIVQSGKSINVHGAISKRGDKYARWILFNISQMVVKLGHQYPSHPVYNYYLIKKAEGKHYYESLTACSTKILRMLYSMCKNNKRFLEE

SEQ ID NO: 469802 - protein, 416 aa, unidentified
MSNNFRFWVGIDWAKANYQICTIDSDGEIQKEFVVDHSGSGIAEFLEWLINLAKGDSSVIALAIEMPQGSMVESLAERGFAIFSINPKQVDRFRDRHTVAGAKDDRRDAFVIADSLRTDEHCFHRVRLDDPLTIQLRELSRMEEDLRQDTNRTMNQFRQQLHRYFPQLLVLSPGADEPWLWELLDLAPTPAKASRLTKGRIEKLLKAHRIRRLEAETVQRELRTPALQLAPGSVDAASRHALMLLPRLRLLRLQRQEIASQIEKLLEQMSEPEQSEGQSDKHRDAKILLSCPGIGRIIAATMLSEGSQAIRERDYHALRSYAGTAPVTKQSGRKRVVQMRKACNPRLRDALYHWARVASMCEDRSREHYKQLRRQGQTHGRALRGIADRLIGMLIAMLKTSTLYQPSRRPSLNLAA

SEQ ID NO: 469803 - protein, 419 aa, unidentified
MESSRSKVCGIDIHKRFLVVTILERNGPKKTKKFLNDLEQLLELKDWIITEQCQAVAFESTGEYWVSLYDVLQGYVEIIVANSYHIKWIPGKKTDTIDSEWIAELALNDLISPSRILSKGMRDIRALTRLREKLVNERTDHKNRVHKVLDSACIRLSAYFTDIFGKAGLKILKCILSGVPPEEVIRKLPKRLHARSDAILDAIRTQLLTHQLIQLQTSVTMIELLTGKIKELERTILNDLQKDRRKLQILISIPGIGTVGATTILTEIGDVKDFSSPDKLAKWAGITPRVYQSADKLYTGSITKQGSKHLRWILVEIAHSCIRTKNTALRIFFDRIFNRSGYKKAIVALARKILKLVWHLLTNDEHYQEKNTLLTKSSCLPNPRVTGSFSVSAAIELLVKAGFQVIDGDDHPDKRVLGT

SEQ ID NO: 469804 - protein, 427 aa, unidentified
MAYRVAAVDVHKKMLAVVVADVAGEGDYQFERRKFGATPDQLYALAQWLGEQEVEEVVMESTAQYWKPVWGALEQYWKPARQQRAGASKMSGTLHLCQAQSNRGPRGRKSDFVDGERMVKRLVAQELVLSFVPDPEQRLWRTVTRRKHQLTRDKIRFQNQLEALLEQAHIKLSSFVSDLLGVSARRMLQAIAAGETDPAVLAALADCRLRATPEQLRDALGACTQLNAVYRRLLNMALEELKLLEEHIEQLDREAAGLLQEHQDVVQRVAEVPGFGVDSAVQMVAEVGPEAGTFDSAEQLSSWVGVCPGSEESAGESKSTRSPKGNSTMRRLLNQAAQSAVKVQGSIFDITFRKLLPRLGYKAAIWAIAHRLCRLLWILLRKGVRYQEFGPQVSAKSQSRRTARMIKELKKLGYRVEGGALPVGAQA

SEQ ID NO: 469805 - protein, 343 aa, unidentified
MQSITTIGLDIAKSVFQVHGVDAAGQVVVRRQLRRRHVLAFFEKLPPCLVGIEACASSHHWSRELQALGHRVRLMPPAYVKPYVKRQKNDVTDAEAICEAVTRPSMRFVPTKTSEQQACLMLHRARHLFIRQQTAVINSIRAYLAEFGIIAPVGRKGVERLLEVVADTADQRLPEIARACVAALGDQLRALKAQILKFDRCIIAWHRSNATSRQLDELPGVGPALATALVASVADPKAFRSGRDFSAWIGLVPRQNSSGGKDKLGSISKQGDRYLRSLFTTGALAVIRYAKIHGTRHRPWLTALLARRPTKVAAIALANKLARMAWAMMARNERYKEPAALTA

SEQ ID NO: 469806 - protein, 394 aa, unidentified
MILVGIDIGKNKHTFSIINKSSGEILLSPSDFSNNLEGFLFLIQKLNNYTKSELLIGMEDTGHYHFALLKYLLDRRYTVALINPTTTDLTRKLQGGITKNDHLDSLTIWDVISSNHRNKPYRVTKLNRFDLYEQKQLTRHHHNLKEELNTYKNRLQKCIDIVFPEFNSLFHSKYGIVYMNILKAFSSAKAIANADIRSIRKCFEFKGQGKRISLSAEQLKLTAKSSIGIPSVAEEIQIRHLVSQIELLEKQLSEIDKRIEEFSLKNNSPILTIPGISHFSGTSIISELGEICNYTKASQIIKFAGVAPYHYESSQFTAQHTAITKKGSKYLRKTLYQIILPVISNNEVFHAYYTKKLNEGKGHRCAQGHCIRKLLRVIYHILSTGQPFNPELLV

SEQ ID NO: 469807 - protein, 366 aa, unidentified
MEQVTTFVGIDAHKKDLFVAMLIGATPTPVTWQLANEPAAVRRMVRKLERDAPGPVHVFYEAGPCGYALQRQVATDRITCDVIAPTLMPRKPGERVKTNRRDARKLAELGRAGLLTVVQPPTPADEAVRDLARARDDAREDLQRSRHRLGKLLLRRGLHYAGKNWTQAHRRWVDSLTWSHAAERAVVEDYQLAIDHTEARLIELDARLAELAEQAPYREPVGWLRCFRGIDTLTAMLILAELHDFRRFGSARALMAFLGLVPGEDSSGEKHRRGRITKMGNALVRRILVEASWHYQHRPVVGRALKARRTAQPARVIAIADKAQQRLCRRFRRMLAAHKPPAKVAVAVARELAGFIWAALQSPVVA

SEQ ID NO: 469808 - protein, 343 aa, unidentified
MKVTAIGLDLAKSVFQVHGVDDKGHVLLRRALRRSQVALFFSNLPPCLIGMEACSSAHWWARKLEAMGHTVRMMAPQFVKPYLKANKTDAADAEAICEAVGRPGMRFVPRKSVESQTLLALHRARQGFIKARVAQTNQIRGFLGEFGIVLPQGPKNLEPRMPGILEDAENGLPVNLRQLLHRLVQHAHYLRGQAEEIEAEIKRWHERTEASRRLAEIPGIGVLTASALVASIGDARAFANGRQLAAWMGLVPRQHSSGGKPKLLGISKRGDTYLRTLMIHGARAVIIRAKAKPGFAESWLGRLLARRHKNVVACALANHSARVAWALLAHNRHYRPAYTRAQA

SEQ ID NO: 469809 - protein, 359 aa, unidentified
MTSLTKVKTFFNTVNLTGDDDLFVGIDVHKKSYHVALFLNNAPAVDFVMPARKEQLTDKLKTTVPALKCVVYETGPTGYGLARHLEKQNMPVSVVATSKIPKNSAIDDKTDKLDSKKLSQYAAKGLLSPVKIPTLKQEADRQLFRMRHRQARNMARVKTQIKSFLLMHDIDEPAGLNHWTINSIDQLRILPLQQTLRLSLDELLNDLDYYNLRVKEMNKTLVQHLNKGQLALRIELLKTHPGVGTVVACQFATELFHYREFTNTRYLFKYLGLSPMIRQSGERSKRGSINKVSNSRLRTNLIQAAWQWIRLDINARKTYLRILNNCGSIKQKAITAMARKLSGHLWTMLMKNQPYDPGK

SEQ ID NO: 469810 - protein, 330 aa, unidentified
MTHYIGIDVSKNKLDIAWLKATDNLKFKTKVFKNDYSDYAALINWLIANITDDLSNIHITVEATGVYHENIAYYLFDKGLNVSIINPAYIKSYAASLGSRNKTDKKDSMLLARYTYSAKPKLWTPPPAEARHLKSLLSRLDALQEDLQRELNRLEKAQATDTAPIVKASIEHMIASLQAAIVKLNGDIDDHIDHHHNLKQDQTLLQTIKGVGPVVSKQMVSLMHNKQFSQASQMAAFLGLVPKHSESGLFKGKSRLAKNGSSDIRAKLYMPALVAIKHNPDIKAQYERLLANGKCKMQAVCAAMRKLVHICFGVIKHQQSYQAKVELISA

SEQ ID NO: 469811 - protein, 408 aa, unidentified
MKHHRYFPEAMLRICPGLYDYSVRKNRPVLSDGGPDAVSGLRLSRLFRRSFAPDRRSFSCDKPDSIMDRLSPVTRICKVGFTMENELHFIGIDVSKAKLDVDILRPDGRHRCKKFDNTLSGHEALVRWLRGHDVNRAHVCMESTSTYMEDAAAHLSDAGYTVSIINPALSKAFAQSEGLRSKTDKVDARMLAHFCREKRPSAWEAPHPTERALKALVLRHQALTEMQTQEKNRRETAPEVQLASIDILLGCLSAELARIEKQIKDLTDNDPDMKRRRKLLNSIPGIGEKTAAVLLAYTGLRLKFGTARQFAAYAGLTPVQHESGSSVMRASRMSKAGPVQLRKALYMPALSALYHTAWGKAFRKRLEESGKRAKVIIGAMMRKLAQVAYGVLKSGKAFDASQHELLIA

SEQ ID NO: 469812 - protein, 360 aa, unidentified
MNHTVYGIDIAKSVFQLHWVDQETGEIFNKQLKRAKFLDYFVNLTSCLIGMEACGGAQHWGRKLTAMGHHVKLMPGKAVKAFVMGNKNDAADARAIRMAVQQPGIKAVALKTEAQQAVLALHRMRQQLIKFRTMQSNELRGLLMEFGEVMALGRAALNAAMPGILARLDERLPAFLIETLRERWNMLSTLDHQVADIERRLQTWMKEDQASQDIAEIPGVGLITATAVVATVGNANVFTSGRQFAAWLGIVPGQTGTGGKVRLLGISKRGDSYLRTLLIHGARSVLEHSKEPSAWLQGINPRRPKNVVVVALANKMARTIWAILAHGKKYDRGHVSVKPADLPTAASVHGLVMDHARRRG

SEQ ID NO: 469813 - protein, 343 aa, unidentified
MQTVTTIGLDIAKSVFQVHGVDAGGQVVIRRQLKRRYVLAFFQKLPPCLVGIEACASSHHWSRELQALGHTVRLMPPAYVKPYVKRHKNDAADAEAICEAVTRANMRFVATKTPEQQSGLMLHRTRHLLIRQQTSVINAIRAHLAEFGIVAPVGRNGVEQLLGVVADSNDKRLPEVARACVAVLGAQLKMLKEQILEFDRMIRAWHRSSELSMRLDDCAGVGPILATALVATVADPKMFRSGRNFSAWIGLVPRQHSSGGKDRLGSISKQGDRYLRGLFVAGALAVIRYAKIHGTKHRPWLTALLARRPIKVAAIALANKIARMAWAMMAKGERYKEPVALAA

SEQ ID NO: 469814 - protein, 418 aa, unidentified
MSLDQNATPMRVTGGVDWAKDDHAVCVVGDHAEVIDRFGVAHDAAGLRTLVRRLVKAGVEQVGIERPDGPVVEALLQAELTVFVIPPGQLKNLRSRYGSAGNKDDRFDAYVLADVVRTDRRRLRPLVRDSAATLALRSLVRARKDLVAHRVAAANQLRAHLQVVFPAAAALFADIDSAISLRFLTRFTTQDQADWLTATSDPSSPKRLAAWLRSVGYCGPTHPAVLPPRLTGAPRGLTGAAATTHAATTSAFLAVLQTLTAQIDTLAARIGEELTLHPDGHIFTSLPRSGTVRAARLLAEIGDARGRFPTADSLACLAGVAPSTRQSGKTKTVSFRWAAELRDAVSDFAADSRHANPWAADLYHQALTHGHDHPHAVRILARAWIDIIWRAWHDEVPYHPARHNALQRILNQDQPAVA

SEQ ID NO: 469815 - protein, 343 aa, unidentified
MKRNTLGLDLAKNIFHVVGYDYRGKQILRKQLRRKQVTSWFAQQPLCLVGIEACGGAHYWARTLIAMGHEVKLIAPQHVKAFVRGQKNDYNDAAAIAEAVTRPQMHFVPIKSIDQLDLQALQRMRTRLIRERTGLSNQLRGLLAENGIVIPRSLALLRRRLPELLEDADIGLTTFFRRLLHGGWQHLLEIEDKIKALDQELAATVAQDENCQRLMTIPGYGPVVASSFSVAIGDGRCYRRGRDVSAMLGLVPRQHTTGGKPKLLGISKRGDNLLRVHLIQGARSVLMHARGKNDPLCQWALKIRAERGFNKATVALANKLARIGWGVLRNQTTYQPGHKLHTT

SEQ ID NO: 469816 - protein, 347 aa, unidentified
MRKIAYLSMDVHARNCVLGDMDGNGNFRGNRSFTTCEINIIKTLKAIKAKKKYLVMEAGPMSNWVAQVANDHATKVFICDPRENALIYKSSHKHDKVDTKKLCRLLRLNEFKEVYRPENDQRALFKAAVQHYQDLRDQLKALKQKTKAMYRQWGIINVFTDSVYSVSGRDKFLQQVRHRPIYLQLKRLYTLLDATAAMKQEAEKSMVSLGRNYPEIKEFKKIPGMGIIGPHTFDAYIQTPHRFAKRNRLWKYCRLAVTDRSSDGKPLGFKRLDKSGVSELKAVSYRAFLSAMKGDNEVRRFYHNSLQRTHDRKHARLNTQRKILSVMLSIWKKGDAYRSELFLDPSI

SEQ ID NO: 469817 - protein, 367 aa, unidentified
MPRIAGQAGPVTGGAGTHADVHVAAVVDQVGRVLGTQAFPATAAGYRAALAWMRAHGELVKVGVEGTGSYGAGLARYLAACGIEVAEVIRPNRQARRQRGKSDAADAVAAAVAALSGEASGVPQSRDGAAESIRALKVARAGSVKARTQAGNQLRDLILTAPEPLRQQLAGQPCGRQADVAARFRPGRPACPAEGAKAAMASVARRHQQLTAEITRLDTMLEELVRHAAPEGFLAKRGVATQVAAALLVTAGDNPGRVRREASFAALCGASPAGASSGKQIRHRLNRGGDRQANSALWTIAMTRLAHDPRTKAYAARRTTEGKTSKEIIRCLKRYIAREIYKALCRPNGQTPSTPQIKQDLSVRVLT

SEQ ID NO: 469818 - protein, 359 aa, unidentified
MTKKAEKAADTQDKTPAIYFGFDLSKPTFEESWRRTGQPPVKLDDLRKMRTTVFERTREGIERWWSRASRMLKPGETAAVIMEATSSFSLEVAAWLKEICPQVCIVVLPGKRVRSWGEGVGVCNKTDKIDARILACFGAERQPDASVLPVGVYADLRALSRARVDCVELLTATRQRLDEADRAHHDEHTAQVLRKAHGQVARALEQQIAQLEKEMRKLIKGNKQLANDVELLMSIVGVGWHTAVSVLVELGDLRNYERRSEIVAMAGLNPVVCSSGTSVEKPRHISKRGSSAVRRILFLAAMSAVRAKQTTVFRTMYETMLGNGKAKMVALVAVMRKLLSVMRAVLVSGKAFDADYKRA

SEQ ID NO: 469819 - protein, 361 aa, unidentified
MFTERTSVGLDVHARSVVAAAFDGDTGEVFMKRLTPGNDDVIAWVRSLPGPSAVVYEAGPTGFGLARAFDTAGIRCEVAAPSKIQRPPGDRVKTDARDAMLLARLLRLDDIVPVTVPTVEREAARDLVRAREDVRGDLMRSRHRVSKLLLRQGIVYYDGTAWTGTHLRWLRKQHFDTPGLQLAFDAEHEAVLQAEARRDRLDAAIEAMAADSEYTPVVHRLGCLRGVATLTGFGLAVEVGDWERLTGSSIGAYLGLVPTESSSGQSRSQGSITKTGNTHARRLLVEAAWQHLKPYRTPGATMRARWELAPAAARARGHAGNRRLHERWLHFNDRKKDPVIANVAIARELAGWCWSLAVMDD

SEQ ID NO: 469820 - protein, 338 aa, unidentified
MYYTGIDLHKRTSYITTVDEKGQIVARGNFRNIETDILDHFVSLGKENQIVIESMCSWYWLYDLLTDNGFQVVVSNPVKTKAIASAKIKNDKLDSHMLAQLLRAGLVCTVHVSTLETRRLKELLRHRNRLVQDATRMKNRIHNLLMKNNCQIPVSDLFGLKGLEYLKKIDLPSYHRESLETYLHLYQGLKDRIEPLTKRVDELAKENAMAKLLMSIPGIGPIVAMYMVAEIEDIRRFPSYRHLSSYAGLVPSLDSSGGKERTGRITKQGSPHLRTALIEAAHTIPRMKRSRLNIFFRRRIVKSGYRKAIVATAHKLLQVAFYVLKNRTPYREEYSLCA

SEQ ID NO: 469821 - protein, 367 aa, unidentified
MTASRADANERPRPRKGTLALSILAERVDVVIGVDTHTDSHTAALLTKAGALLAELTVTADDAGAATLLAWVAGRAEGQRRAWVVDGARSHGVGVSRYLLGAGEAVYDAARIPGAARRRGGKSDQLDAVQVARIALTATKVSIPRGDGDREALRILHTARRHYTDTRTATVNLLKSLILTAEDRLRAHLRTLNTDQQVRHLRHLDPATGLDTADRIRHEHLHALATQIAVLDQALADNLKQLRTLVHAMCPALLDQPGVGPVSAAIALTAWSHKGRLRNEAAFAALAGVNPIPASSGRTVRHRLNRGGDRTLNAAAHTIATSRRMHHQHTRDYVARRTAEGKTPKEINRCLKRYIARQLFRIMQATA

SEQ ID NO: 469822 - protein, 313 aa, unidentified
MLYVGIDIAKNKHDVTALNVPGKTVLKPLTFSNNKAGFELLDLSLRQLNQDCLIALEDTGHYAFNLLNFLHEQGYKVYTYTPLLIKEFAKSLSLRKTKTNKKDAHGIALKLLSDPNREQFQHDNRQVELKILARHIHRLKKKQSDWKVQYTRCLDIIFPELDKIVGKHSEYTYQLLTCYPNPQKRLEAGFDKLIEIKRLTASKIQDILSVAPRSIGTTSPAREFEIIKHYKRLIDKAETCVNDLMAEFNSIITTVTGIGNRLGAVILAEIQNIHAFDNPAQLQAFAGLDSSIYQSGQIDLAGRMVKRGSPHLR

SEQ ID NO: 469823 - protein, 420 aa, unidentified
MRNAGIHANSLLEVRRMYNAVGIDVSKGKSTVAVLQPGGTVIRKPFDVSHTSQNLNELADYLSSLDGTTKIVMGCTGRYHEPMIKALSEAGLFISIVNPHLIKNFGNNSLRKVKSDPADARKIARYTLDNWTELRQYSGMDNTRTQLKTLNSQFSFFMKQKVAAKANLIALLDNTYPGVNKLFDSPTREDGSEKWVDYAYSFWHADCVRKIGLKAFTERYMSFCKKHHYIFQQDKPEKLFNASKELVAVFPKEKTYKLLIQQSIQQLNLASEHVERLRREMNELASTLPEYSTVMGIYGVGKTYGPQLIAEIGDVSRFTHREALTAFAGVDPGVDESGQHKSKSNRASKVGSARLRKTLFQIMTTLLQNAPEADPVYRFLDKKRSQGKPYYVYMTAGANKFLRIYYGKVKECLRNLEQTE

SEQ ID NO: 469824 - protein, 355 aa, unidentified
MSQEKYIGMDVHQATISAAVIDAHGKLIMECLLETKAATIVEFVRGLQGPLSLTFEEGTLAAWLHDLLKPHVDRLVVCDPRKAALMKDGNKSDRIDARKLAELLRSNQLKPVYHGEHGVRTLKELGRSYLTLTKDVTRVMNRIKALYRSWAIPCGGTTVYAPRHRAEWLAKIGEPGVRVRAERLYQQLDVLQPVRQQARHDLLLESSKHPAVKLLRQIPSIGPIRAALLVALLQTPHRFRTKRQLWAYSGFAIEIHDSGEYRCVRGKLQRNRERITVRGLNDNHNKDVKSLFKSAAISASTRPGPLHDFYAARIAKGMRPTMAHLTLARKISAITLTMWKKGVGFDPQQLHRQAA

SEQ ID NO: 469825 - protein, 359 aa, unidentified
MFKPDGMSKKIVKQVAGIDVAQKELVVCLGRMYDDWTPELYSHKTFPNTEKGFTALALWVKHHVSEEVAISFVMEATGVYHESFAYFLDDKGYEISIVLPNKISNYSRTLTVNTVTDKTASEAITRFGLERKLDKWERPKKLFKSLRQLTREREQVVQMRTMAKNQLHAEQAEAEPNSSTLTRVKEQISFLNKQELAIKAEIAVLCGQDEKIKETIKLLSSIPGVGQLTAATVMGETNGFELIRNKRQLTSYAGLDVKEKQSGTSVKGKPKISKKGNKYLRKAMHMPALAAIRHDERFKAIFARLVSRHGIKMKAAVAIQRKLLEMMYILYKNRTVYDKQYFKNAEAENIRMEQTPGKD

SEQ ID NO: 469826 - protein, 309 aa, unidentified
MKEELVYLGVDIAKSYLDAAIGNEKRRFANDRVGHRELIKWIKQIKASVQVICESSGGYERALVQALVGAQLKVSLVQANRVRQFARAAGIFAKTDRIDAKVLCDFAEAMQPGTISASQLEQQHLRELESQRRHLTHLLVMERNRAARVSDASVQRLNRTLINQIKKQIEQLDLLIKEHIEASPELSAKAQKLTAINGVGARTAALLLARMPELGQLNRREVAALVGVAPFNRDSGKMRGKRAIYGGRRPVRHGLYMAALVAARHHPILRGFYLRLRAAGKPAKVALTATMRKLLILLNSALKPDLNYA

SEQ ID NO: 469827 - protein, 312 aa, unidentified
MDVLHTAPRRCFGIDVAKDNLVVSDGGLSFAVTNDRRSIRTFLKQKQPDFVICEATGGYELLLLEECLKAGLACHRADIMKLKAYIRSMGTLGKSDAIDARHMAAYGRERWQSLPLWQAPDPDEAQLQALVRRRADLVALRVTEHNRSKAVGAKAVALSYKAMLSAIQRQIDGIERQISALVAKSARLRRRIQICTTVSGVGLLSAASLLALIPELGTLDRRQAAALAGTAPHPSESGSTRGRRRQRGGRPQVKKTLFMPAMCAAQGKGQFASFYRRLIENRKPPIVAIAATMRKIVITVNARLRDDQIQQS

SEQ ID NO: 469828 - protein, 386 aa, unidentified
MYYVGIDVAKDKNDCIIIDSEGKPVIDVFTFENNKMGFEKFYRSVASLLPIEVRVGLEATGHYSLNLIDFIDSKQLPLIVLNPLSVNLYRKSTTLRKTKTDKIDCLIIAQMIHSGEHKSYSPVSYPLRELKTLTRHRYRLIQDQSRIKVSITRLVQILFPELPNHFCSIHQKSSYELLKRYPSASLIADLHLTTLTNILAKSSRNKYSKDKAVEIRDAARNSIGSERTSFQLELMQNIAIISAFQKELKIIDSEIKKSMDEINSVILTIPGISYTLGAIILAEIGDISTFDNPSKLLAFAGLEPGISQSGNFISDNQKMVKRGSKYLRWAILQAARLIAMRDPVFNEYMHKKLNEGKHYNVAKSHVARKLIRVIHKLLSSNTEFER

SEQ ID NO: 469829 - protein, 414 aa, unidentified
MLFVGNDWAEDHHDVEVQDHTGKRLGKARLSEGVEGIERLHALIGGFADPHDEAGAGQVLVGIETDRGPWVSALVAAGYRVFAINPLQVARYRERGTTSGAKSDAGDAHVLADMVRTDSHQLRPVAGDTALVEGIKIVARTHQSLIWDRQRHVARLRADLREYFPAALAAFKTSTTDLDDTDALEILAAAPTPQAAARLPLSRIITATRHARRRDPRGRAQVIQAALRAPALGQPEVLAGAYAVSVTALVGVITTLNTHIRTLQGQVEAYFGRHPAAEIYRSQPGIGAIIGARELGEFGDDPHRYRDAKARKNYAGTSPITRASGKKRTVSARYARNDHLTNAVHRQAFCALTSSPGARAYYKSLRDRGISYNAALRQLGNRLVGILHGCLKTGTLYDETTAWAHHQHDQQAAA

SEQ ID NO: 469830 - protein, 449 aa, unidentified
MMEQGMATSKAKTGRSKLEVMHPDAAGIDVGGSMHFVAVPNEAAEQSVRPFGVYTRDLHEMADWLQACGVKIVAMESTGVYWIPLYELLERRGFEVMLVDARQVKNVSGRKSDVLDCQWIQQLLSYGLLKAAFRPQDQFCELREFNRLRTRLLADQGRSVQHMQKAMTLMNIQLSQAISDVAGVTGQKIVRAIVEGERDAQVLAAYRDSRIKASVEEIAASLQGTWRAEHLLALKQALGRFDFYEQQLQECETEIQRAMAKLEVHTKELSKGKKRSKAKNAPKFNVRERLLKMCGVDVTKMDGIDETTALNIVAEVGTDLSRFPSDKHFASWLGLCPGTRISGGKVLGAKTKHSVNRASQAFRQAAAALRSSKSALGAYYRRLCGRMDKGKAVTAAAHKLARLFYALMTKGEEYVDQGQQYYEERYRQRVIHHLQRRAQSLGMCLVPTA

SEQ ID NO: 469831 - protein, 315 aa, unidentified
MPIFVGIDVSKEHLDWAVHGSAEGGRVKHDEAGLEELVARLRALKPERVVLEATGGLEMSVLAALSVAGLPVAVVNPRQVRDFARAKGHLAKTDRLDAKCIAHFAAVMQPPLTPMPEAETLELELILARRRQLITMLVSGKNRLAGLLGPRRIPRVVSSIEHIIKTLTNELEKLDDEMKTKIEQSPRWLSKDALLRSVPGVGPGTSRTLLVDLPELGTLNRKQIAALVGVAPFNRDSGKLRGRRAIWGGRASVRSMLYMSCVACLRFNPVIRSFYERLRTAGKPVKVALTACMHKLLTILNAMAKANHTWKVVSA

SEQ ID NO: 469832 - protein, 350 aa, unidentified
MIIVGCDYHPGFQQIAFVDTETGECGERRLQHREEAEKFYRDLAARGAQVRVGMEASGHARWFERLLAELNFELWIGDAAKIRAKRVRKQKTDRQDAQLILKLMLKDDFPQIWVASWENRDLRQLLWHRHRMVQARTRVMNQLQAVALNEGLRCKKRLWRETGREQLEAFPLAPWASRRRRDLLELLDRLSPTITELTQTIEQEAEKCPEARQLRTHPGVGSLTALAFVLIIGRAERFQCGKPIASSLGLVPAEDSSGERRRLGHISKQGNSLLRFLLGEAAQVTVRCDPRWRNQFFHLAMRRGRKIAKVAMARRLAVRLYWMWRRGWDYEQLEKFGPHAGQPGNPHGVQ

SEQ ID NO: 469833 - protein, 444 aa, unidentified
MAMRKREDEVFPNAAGIDIGASSHWVAVPRHLAEAAGEELVREVGAMTDDLNELARWLVKLGVDTVAVESTGVYWIPVFEVLEQHGLKVWLVDARQLKYVPGRKSDVQDCQWLQKLMSLGLLHAAWRPSAEVCVLRAVARQRETLLTSQASWVQRMQKALVQMNIQLTEVLTDVMGVTGQAIVRDIVAGVRDPEQLARHRQRRVKASQAEIARALQGNWREEHLFVLGQSLAMYDDIGRHLADCDARLDGLLDARARTQIALGKLPRAGSKTRMEHDIRQRLANWAGVDLTRINGLGVTVVMKLLTEIGPDVSRFVSVKHFCSWLGLCPGTKISGGKVLSSGTKRSANRARQALKMAAQSLWRSESALGAFYRRLSARMDKPKANTAAAHKLARMVYFMLTRGEAFVDQGQQRYDEQQRQRSIAALKRRAAALGFQINPVGAAA

SEQ ID NO: 469834 - protein, 351 aa, unidentified
MMIIGVDYHPSFQTIAFLMEETGECGEQELNHSDGQAEKFYRDLKQRGIGVRVGMEATGYSRWFERLLAELGFEVWMGDPAEIKAKRVKKKKTDREDARLMRKLLLENRFPRIWVPDPENRDLRQLLWHRHRLVQMRTRIMNQLQALAMNEGYRWKKKLFSEQGRALLEKLSLAPWTSRRRQELLELLDRMNPTIVELTAAVEREARKRPAVQRLMTHPGVGPLTALAFVLIIGTWERFPRGKQIGNYVGMIPSEDSSAGKQRLGHISKQGNSLLRFLLVEAAQAAARVHPDWRRRYIHLAMRRHRSIAKVAMGRRLAVRLYWMWRNGCDYSPSLEFGSYAGQLGTGHGVK

SEQ ID NO: 469835 - protein, 339 aa, unidentified
MEATTVGIDLAKEVFWVSGADARGKEVFSKKVRRKDLLKELSNIGPCLIGMEACGSSHYWARKIGELGHTVRLMPAQFVKPYVKSNKNDQNDARAICEAVSRENMRFVLAKSQRQQDIQSAHRIRERLICSRTALSNEIRGLLAEQGVVFGLGFKRLHEELIRVASDEQTELSLFFRAMLGELYTELCDLELRLEAMNRRIREIFNQEESCRRLGEIPGVGPVIATAMVAAVGNPKTFASGRSLAAWLGVVPRQHSSGGKQTLLGISKRGDTYLRKQLIQGARSVVLRAASKTDPQSRWIDQKVKSRGINRATVAVANKNARIIWKLLVTGESYRPIAA

SEQ ID NO: 469836 - protein, 349 aa, unidentified
MVIIGADTHKRSHTVVAVDANGRSLGERTVAATPAGHLELRRWAERFVERGWALEDCRNLSRRLEADLLRAGERVVRVPPKLMAGARVGGRAPGKSDPIDALAVARAALREPDLPTAQLDGPEREVRLLVDHREDLVAERTRIQNRLRWHLHELLPGSEPAPRSLDRRVVLDDLERRLSVESGTIARLAMELLGRVRELTAAINRLEREIAALVRPLAPSLLELTGCGSLTSAKLVGETAGASHFHSRAAFARHNGTAPVPVWSGNVTRHRLSRGGNRQLNAGIHRIAITQLQRPGAGRDYVEHRRAAGDTKTEAIRALRRRISDEVFRRLRHDEHESNRQPAGLLAAA

SEQ ID NO: 469837 - protein, 296 aa, unidentified
MPESMCHWNAQGVCVVDGSGKIVRETKVESEPAALIGWLGSLGFRLGRIGLEAGPLSQWLYMAMKQAGLAVELLETRHVRDAFKAMPVKSDRNDARGIAQLMRLGWFRPVHCKSMAAQEVRAILTARKLVQSKLLDVENSLRGILRGFGLKVGKTTRKNFAERIKELVKGHPNLKTIGEALLSVRAVLLGEFHTFEKRVRAMSCLNANARLLMSTPGVGQIVALTYASAIDDPARFRSSKRAGPLFGLTPKKYQSGETDRSGRISKIGDASVRAALYEAAHIMLTKPIKGCSRLKS

SEQ ID NO: 469838 - protein, 340 aa, unidentified
MPLYGGIDLHANNSVVVLLNDQDQVIYEKRLPNHLPAILEPLRLHPGEIEGVVVESTYNWYWLVDGLMEAGYCVHLANPAAIQQYSGLKYSDDHSDARWLAHLLRLGVLPEGYIYPKAERAVRDLLRKRAHVVRQHTANVLSMQNILARNTGARFSLTRMHEFTKQELQRLLTEEAQVLAVTSSLAVLDCLQQQIKILEQSVQKRLRHTPSYEQLLTVAGIGPILAQTIALETGAISRFPSVGHSASYCRCVDSNKLSNGKRKGTGNVKNGHPYLAWASMEAAQFALRFQPAAQRFDQRKLAKSRHNTVLARKALAHKLARACSYMMRDLVPFEATKAFG

SEQ ID NO: 469839 - protein, 406 aa, unidentified
MDPTASNNPMEVIPMIIVAVDVAKDKHDCFITNTDGEVLFDPFIITNSQSGFEDLFDKIRSVTDSLQNVKVGLEATGHYHLNLLGYLLDKGLHTCLINPLQTSLFRKSLSFRKTKTDTVDARAIARLLMSDQTLQPYSLTSYQNEELKSLTRYRADKVRERAKLKSSLSRLVVILFPELEKLVPTLHMATVYDLLTEFPGASLVASAHLTRLSHLFSDSSKGRYGKEKAIEVREAARHSIGAVFPAKSLELRHTIEHIRFLDAEINEIEAQIFALLDKDPPKMLAIPGMGPRMAAVIIAEVGDFKRFSSPDKLLAYAGLSPTTYQSGQLTSTYAKMEKRGSRYLRYALFNATKYVCIWDPTFRAYLAKKRAEGKHYNVAISHAAKKLVRLIYHLETTGETYLSKVS

SEQ ID NO: 469840 - protein, 402 aa, unidentified
MNAVGIDVSKGKSMVAIMRPFGEIVSAPFEIKHTASGINSLVELINSVEGESRIVMEHTGRYYEVLAHQLSEANLFVSAINPKLIKDFDNDSLRKVKSDKADSVKIARYALDKWQNLKQYNVMDELRNQLKTMNRQFGFYMKHKTAMKNNLIGILDQTYPGVNTYFDSPARSDGSQKWVDFASTYWHVDCVRKMSLNSFIDHYQNWCKRKKYNFSQSKAEEIYGKAKELVPVLPKDAITKLIIKQAVDQLNSASTTVESLRTLMNETASKLPEYPVVMAMKGVGTSLGPQLIAEIGDVSRFTHKSAITAFAGVDPGVNESGSYEQKSVPTSKRGSSDLRKTLFQVMDVLIKTHPQDDPVYQFLDKKRAQGKPYYVYMTAGANKFLRIYYGRVKEYLSSLPES

SEQ ID NO: 469841 - protein, 357 aa, unidentified
MQNKNTEVDFSNQRFYIGLDVHKKSWKITVRTNQMELKTFSMNPQPEELVKYLQKNYPEGEYLSVYEAGFCGYWIDKQLRQLGVKNIVVNGADVPSKSKERINKDDIIDSRKLARELENGTLQGIYIPSDYYEGIRSLCRLRYSVTKEQTRIKTRIKSLLTYYGKDFPENYECKNWSGRFINFLEGIEFNQVTAKQTLNHLLKELKDKKQRLAEIIRELRDSTKEAGIGEKIKQIMSIPGISFITAITFYTEIMDMKRFKRLDELCSFVGLVPATHSSGDRERILGLSNRQSKYLRNLLFESSWVAVRNDPALTMKFGELTQRMVKQKAIVRIARKILNRMRHIWLNDTEYVIALIQ

SEQ ID NO: 469842 - protein, 377 aa, unidentified
MKIKAYLGLDVHKNSIVVAIAKADGSEPFSYGKWGGSNLSAERGLVKLLKSLGLTKEEVSIVYEAGPSGFVLARRLLQLGYECIIVGPSEVPSKAGERVKTDKRDARKLARFHRAGELTAIHIPEARDEAVRDLCRARSDASQALARSKQQLGMFLLRNGFRYEGKTNWTQAHMNYLRQLRMPHPAQQLVVEEYIMEVDAGVARVDRIEQHMKDLLPSWERQPYVRALMAFRGFQEVAAMTEISELGDLSRFSHPRQLMGYLGLVSNEHSSGEKRRQGGITKTGNGHARWMLIECASHYSHTPRVSPNLSARQAGQSQEVKAIAWRAQNRLNYRFKKLSARSLHRNKVAVAVARELCGFLWELHQQVTKEITAKVAA

SEQ ID NO: 469843 - protein, 341 aa, unidentified
MTKLSAGLDVGDRTTAICVINDADDTCLEVSVPTTPTAIHAALKPYRRRLHAVGLETGTRSSWLYSELSQRRLPVVCLDARYAHAALSAKRNKTDKTDAHGIAVLLARGLFTTVHVRSRQAVRVRLLLNVRKTLQRKALDLQMALRMAEKMFGGNVERRGRKLVRTKAKAKGDDIHRGLSDILHRCSEALLSEVKTLDRLVLQSANSDPVCRQLMTVPGVGPITALSFRAGVDDPKRFKSSRTVAAYFGLTPRRFQSGQTDYSGHISRMGDRAVRTALYTAAQAMLRSKRATPLREWGLALAKRKGKKLANVACARKLAVIMHRMWITERDFGQLCPKHSS

SEQ ID NO: 469844 - protein, 326 aa, unidentified
MRTESTPGARGPVFCGVDTHADSHWLCVLDWRGRKVLSRQFPADAAGYEALAGAIAAAGEPACVAMEGTSSYGAGLTRHLASLGMPVREALSPARTQRRRPGQGKCDESDAERAARAAMSGSRLGTPKSQDGWVDGVRCMLAARSGAVKARTSAINTARSLLTTAPEGLRSRFRGMGGPRLMEELPSVRAEGALGAALGALADLWAAARDAALDMELAIEASLEENCPALLAMYGCGPVSAAKLAVAAGDNPGRLRSEASFAAICGACPIPASSGKTVRHRLNRGGDRQANSALHEIARQRVMRDPETAEYAERARGRGKSDRPAI

SEQ ID NO: 469845 - protein, 442 aa, unidentified
MAMRKREREDLVFPNAAAIDVGASSHWAAVPPHSTDAPVREVGAMTDDLNGLADWLLACGVDVVALESTGVYWIPVYEVLEQRGLKVWLVDARQVKYVPGRKSDVQDCQWLQKLMSYGLLRAAFRPAAEVCVIRAVARQREVLLTSQASWVQRMQKSLVQMNIQLTEVISDVMGQTGQAIIRDIVAGQREPKILAKHRHRRIKASEQDIVRALTGNWREEHLFVLKQALAMYDDIAKHLRECDAKLQTLLSERSANSVELGKAPRAGSKARGEFDVRQQLANWAGADLTRINGLGLDSVMKILSEIGTDLSRFANVKHFCSWLGLCPATKISGGKVLSARTKRSANRVRQALKMAAMSLSHSDSALGAFYRRLCGRMDKPRANTATAHKLARMVYFMLTRGEAFVDEGQQRYEEQQHQRSVAALKRRAAALGFQLNPVGAAA

SEQ ID NO: 469846 - protein, 391 aa, unidentified
MIYVGIDVAKDKHDCFITNSDGEVLFQVFTIQNNREGFDGLFSRIQSVSHDMSNIKVGLEATGHYSYNLLGYLIDKGLPTFVINPLHTNLYRKSLSLRKTKTDKVDARTIAMMLMSDVNLKSYSDTSYHNEELKSLTRYRFDKVQERAKLKQSVSRLVTILFPELEKLVPTIHIASVYALLSELPSAGKIASCHLTHLTKLLENASRDRYSREKAVQIREAARVSIGSNMPAKSLELKHTLKLIGELDSEISEIESEIKRIMDQIDSPILTIPGIGYRMGAMILAEIGDFSRFDSPDKILAYAGASPSTYQSGQLESSYSHMEKRGSRYLRFALINAAKYVCHWDETFGAYLQKKISEGKHYNVAITHATKKLVRLIYAMEKSGKPYIKAE

SEQ ID NO: 469847 - protein, 344 aa, unidentified
MAQVTTARVTTVGIDIAKNGVCIHGVDAHGHVVVKKRLARQKVLPFLTQLPPCLIGMEASGGAHYWAREFTQLGHTVKLMSPQFVKPYVQSQKNDPNDAAGICEAVERPRMRGVPVKSITQQDVQALHRIRERQIKARTALINQIRGLLMEYGIVIPQRASQVRHKLPIVLEDAENGLTATAREWLHALAEELQALDQRIAATDQQIERVFEADEACQRLAQLPGIGPLTATALVAAVGDATEFKNGRQFAAWLGLVPRQHSTGGKTTLLGMTKRGNCYLRTLLIHGARAVLRVVDRNTDARSRWLPGVKARRGMNCASVAQANKTARVAWALLAKGDRYRHAA

SEQ ID NO: 469848 - protein, 403 aa, unidentified
MSFNGAPVMAASVVAVDVGKNTAVLLVTDSARHRLLGPVGFAMTAAAVAAVVERVSAVLPAAPVKVGVEAAGHYHRRLLGSGVWPAGWELLELSPVRVSEQRRVQGRRRVKTDAVDLEAITELVLAGYGVPVTARSGRITELSGWAMHRSRRIWTRTATKNQLLAQLDRCFSGLTLALPDVLGTQIGRLVAAEFADPHRLATLGVTRFVRFAANRGLRVRRSAAERLVAAARTALPASEAVVARQVLVDDLGLLGDLEVQIAGAEAKIAQLLPETPFAVLLSVPGWGMIRAGNYGAAVGDPRRWPGASQIYRASGLSPAQYESAGKRRDGSISREGSVQLRRALIDLGIGLWRSDPAARRYGQRLRARGKKSGVIGCAMAHRANKIAYALVRDQAGYDPDRWA

SEQ ID NO: 469849 - protein, 392 aa, unidentified
MVVSVGIDVSKDKHDCFILSSEGEVLVDGFTIPNTMDGFNCLLQRIQDCTTPQDKIKVGLEATGHYSYNLLGFLLDNGLPTYVLNPLRTNLYRKSLSLRKTKTDRVDARTIASMLLSDAGLKPYTDTAYHNEELKSLTRYRFDKVKERAKLKSSISRLVCILFPELEKLVPSLHIASVYALLAELPGAKQIAAAHLTRLKALLETASKGHYKRDMALKIRDAARNSIGSWMPAKSLELQHTIRLIRELDNEIVEIEEQIQAIMDELNSPITTIPGLGFRMAAMIFAEVGDFTRFDSPDKLLAYAGMSPSTYQSGQLKNCYPHMEKRGSRYLRYALYNATKYVCHWDPTFAAYLAKKRAEGKHYNVALSHAAKKLVRLIFAMEKSRRTYYLAA

SEQ ID NO: 469850 - protein, 340 aa, unidentified
METKGKKQVWVGVDVSKETFFAAVDVLDEDGSKKPVNSLSANEFELTETGSGSFLKWLSQSFAEYNFSIVMESTGCYSKKLKGFLREKQNDLPISILNGRLSSNFVKSLGLPHKTDKSDAQALARFGTERSPKAALADDPDRESLKELSRERSALLKARAALANRSDSLFDAFTKEINDRAIAALSLQVKAIEKEMERCIKANAEMRHEAELMKTVPGVASTSAYGFLAELGSLKQYSSRKLSSMSGLLPHIFISGTSVNKTCLSKRGSARVRQLLYLDCMTAVNKIPELNSQYQNLVSRGKTKMTARCACTRKLLLIVRAVVVEDRPYEKNPKKVAKTA

SEQ ID NO: 469851 - protein, 322 aa, unidentified
MITPISCVGLDIAKAKFDVALLNALGKYRSKVFANTPEGYDQLLNWLRKHDALEAHLCMETTGVYGRSLARFLTQQNLLVSVVNPAQIHAFGKTELVRAKTDKADARLIARYCQMHRPPPWIPPADEIVILQALVQRLDDLLGLQNMENNRLETAESAAQPSIEAILVVINQQIDTVRRQIQEHIDDHPDLKSQKKLLLSIPGIGDNTSATLLAFISPFERFHSAKQLVAYAGLNPRIRQSGQWAGKSPIAKAGNILLRKALYMPALTAKRYNPVITAFCNRLLARGKRPMQVIIAAMRKLLHIAYGILKSGQPFDPEKALA

SEQ ID NO: 469852 - protein, 430 aa, unidentified
MKSNTQNAKIEAITEKTLVLGIDVGSEMHYARAFDYRGIEYSKKPFKFSNTEAGFVTFKEWILNLKERHEKDKVVPGMEPTGHYWFNLGKFLQDNEMKPVLVNPHHVKKSKELDDNNPTKNDRKDPKVIAGLVREGRYMIPYLPDGVYADLRTASNIRFQLQAELTRIQNRISRWFNIYFPEYKTVYGKSDAKSGMLILKTAPLPEDILTLGIDGVNQIWRDEKLRAVGKARAKTLIEAAEHSVGSKEGAVSARMEIRMLLEDYESRNTRLQEVMVLIEELVRKIPMTEKLLEIKGVGIRTVSGFLAEVGDISRFNNPKELQKLAGLALVENSLGKHKGETTISRRGRKRLIYLLFEVAMSLVSKNQEFRELHNYYTTRRLNPLKKMQSLMAIAAKLIRVFYAILTKGVDYDPKKMVSDIKRPAVYLQAA

SEQ ID NO: 469853 - protein, 312 aa, unidentified
MPENTVLDYVGVDIAAERLDYCVNETTEGNFPNSPTGRAELIAKVKRLPHPRVICEASGGYEKLVVAELLAGGIEVCVVQPGRVRAFAYAEGLLAKTDRIDARLLRRYAQKVPLRLAVPVDAVLTTLRELLDHRRALTTQLSEVEGRLPLAGATLAKLLGRQRTFLKKQLEQVEKTLRCHIDNDPDLRGKSERLQQIKGVGPVLASTLLAFVPELGKIESSQLSALIGVAPHPRDSGKSHAPRHVRGGRSSVRHVLYMAAVCATRCNPILAAFYQRLKANGKPAKVCLVAVMRKMVCLMNRLILDPNFTLAH

SEQ ID NO: 469854 - protein, 403 aa, unidentified
MGAVAGLDWAAEKHDVLIADERGALLDARVVEHSEQGVRELVCLLVDHRVQRVALERPDGLLVARLLDAGIEVLAIHPNQVKAARERFRPAGGKSDPFDAFVLCELARTDHHRLPRLAPSGDETVALRALSRSREDLVAMRVELANRLRAELDAFWPGARAIFADVDSKIALAFLERYPSPLEAKALGPKRLGGFLARNGYCGRRSAQELLERLRRAPVGCAGEAELEARRAIVLALVAALRPLVEQIGLLTAQIRGALAAHPDAAIFGALFCDPKSAVTAAGLVAEIGDNRARYPSADALAADAGMSPVAVESGKRRSAAFRRGCDHRLRSHFACLADSTRHWHPWAGEVYRRARARGCDHPHAIRVLGRSWARVLWRCWQDEAPYDPARHGNLRRLQTQGG

SEQ ID NO: 469855 - protein, 343 aa, unidentified
MTICTLGVDLGKNSCSAAGLDTTGKVVLSRRMRPSTIPGFTAKLAPCVIAMEACCGAHHLGRLLAAQGHTVWLMSPEYVRPYVKAQKNDDRDAEAIAEAATRPTMRFVEMKTQDQLDVQSLHRVRSQLVGARTNLINQARAILMERGIVAPQGRQKFERALDAMLADTDRLPEGRIRRFMMETREEWKTLDDRIAALDMEFLELTRTDELARRLLTIPGIGSLNATALAAAVGDASTFERSRDLSAWLGLVPKQYTTGGKPKIRGISKRGNRYLRTLLIHGARAALPSLAKSETPLGSWLLGLLARCHYNTVTVALANKLARIAWVTLRRGDTLSIDRAAMPI

SEQ ID NO: 469856 - protein, 362 aa, unidentified
MNYVGIDIHKRYSVCVAQDERGRRLGEARIEGNLAAGFAQFFRSLGGKSRVVIEACWNWQAIYDRLERVEQIESISVANPYKTRLIAEAQIKTDRLNANGLATLLRGNFIAPVHVPGRQARARKNVLRQRLYWARLRTRIRNRTHALLDRQQEIQLPQCSDVFGARGRSFLRQLELAKPDAYLLGEDMELLELIGRQIKEQEKRIGAGNQHDALSRRLQSLPGMGLILSAVAAAEIDSIERFNSAEKLCAYAGLVPSTYSSGGNTWHGRMLPFCNKWLRWAFIEAAWVAVGCSGYFGSFYRRQRARGKKSNTAITIVARRMCRIAWSLLREGRDYNAQPPPKHATNSPVAPREDWRLRSATT

SEQ ID NO: 469857 - protein, 351 aa, unidentified
MAATQSAIAVIGIDIGKNSFHVVGLDGRGAIVLRQKWSRGQVEARFANMSACLIGMEACVGAHHLSRKLKALGHDARLMPARYVRPYSKGQKNDFRDAEAIAEAVQRPTMKFVATKTADQLDLQALHRVRERLVSQRTGIINQIRAFLLERGIAVRQGQRFLRVELPRILATPPDVLSPRMVRVIEGLASDWHRLDERIEGLSSEIEELAKRDAGCERLMSVPGIGPIISSAMVAAIGTGDSFSKGRDFAAWLGLVPRQISTGDRTILGKISKRGNRYLRVLFVQAAWVVLVKVKPNRWEGHGLKPWIEAAKKRLHHNVLAIALANKLARIAWSVLAHGRAFEANKLQAAA

SEQ ID NO: 469858 - protein, 332 aa, unidentified
MEEITTVGIDLAKNVFSVHAVGSRGEVVLRRTLSRAKLSELIAQLPPCLIGMEACSGAHEWARRFAASGHTVKLMAAKFVMPYRKSGKNDGNDAEAICEAVARPNMRFVPVKSLEQQSDLTLHRVRQGFVEERTATLNRLRGLLTEFGHVLPLRASEVHRRVPQLLGKLPTRVAACARDLLEHAARLQAKTLEYEHEIKIHVRSNALACRAQTRLGIGPINASALVATVGNGHDFKNGRQFAAWLGLVPRQYSTGGRTRLGHITKRGDPYLRTLLVMGARAVLQRAASLTDPLSRWALAVRERRGYHRACIAIAAKNARVAWALLAKEPVAA

SEQ ID NO: 469859 - protein, 348 aa, unidentified
MTIVEKTRPVTGGVDTHAEMHVAAVVDHLGGVLGIEAFETTESGYQRMLRWMRAHGDIRMVGVEGTGSYGAGLARHLSRAGIELVEVDRPNRQSRYRVGKSDPLDAVGAARAALSGVATGRPKSRDGNVEAIRVLMVVRRSATSERIVTLNQLRHVCFTAEPAVRRRFEGLSIAELTRTAAALKPRIGDDQVRHATLITIRTLARRVVYLRAEVAEITGLLKPLVERTAPGLLAVYGVGYEVAARLLVAAGDNPERLRSERAFAHMCGVAPLPASTGKTTRHRLNRGGNRQANNALYRIVITRMSSDERTRTYVTRRRAEGKSTGEIVRVLKRYVAREVFHHLQPATS

SEQ ID NO: 469860 - protein, 343 aa, unidentified
MEYFAGIDVSLEQSSVCVVDGAGKIVREAKVASEPEALVGFFRGLETRVTRIGLEAGPLSQWLYAGLVAAGFEVVLLETRHVKAALSAMVIKTDRKDARGIAQLLRMGWFRPVHAKSPAAQEVRALLVARKLLQTKLLDVEFSIRGILRGFGLKMGEVSKGRFATRVRELAAGHAMLERITEPMLRARETLRTEYAKLHGEMLAIVKPDPVCRRLMTVPGVGALVAITFKSAVDDPGRFTRSRVLGAHFGLTPRKYQSGETDVTGAISRVGDAMVRMALYEAAHIMLSRVTRFSSLKRWALNVARRRGLKRAKVALARKLATVLHRMWVDGTSFRWGKQAASV

SEQ ID NO: 469861 - protein, 408 aa, unidentified
MTVVGIDVSKGKSMVAAMKPGGELVAAPYEVRHSDIELSRLALDVLCMEPDTRVVMEATGRYHEPVAALLHSEGIFVSILNPLLIKQSGAGSLRKVKSDPKDALKIAKYGLDNWSTLREYTPTEAIRQQLKLCERQCDLYSKNIVMLTNNLISLSDKTFPGVNELFSSPEKADGHLKWVDFYRTFWHCDCINRMSPDAFGERYKKWCKKKGYHFSADATNALYAASCGLYTTLPRDNNAKLLVTVAADQLIALRENQSKLEAEMLNLCKQLPEYETVMAMYGVGKSTGPHLMAELGDIRRFPHRSSIVAFAGVDPGVVGSGKMQLSSVATSKRGSPQLRKALFQVVSTYVKRKPKNEAVYQFYAKKRDEGKPFFVCTTAAANKFLRIYYARVKECLNAAESAVQTEEG

SEQ ID NO: 469862 - protein, 438 aa, unidentified
MSNKVIFNLDDLFISVGIDVGADFSWMSIALPNQQFVGKPYKILHSSIDSLTTAVSKIKEAEELYSLESRIFLESTGIYHYPLFCYLRDKGFNCSVINPIITKNSTNINIRKVHNDRFDSKKAALVGLKPDLKVSLMPSDLALNCRNLCREYYDLMDNRSAYVNKLQGELRMVFPQYLGIFSKVTINTSLTLLETYTSPSAFLKADKQEIIDIIKSTARFGLTYAQNKYNAIIQAATDANQFGYIIDSNIKRIRLYISFIRKYDEEINNILESLHELVDANEDADFVKQIHLIETFKGAGFLSAVSIMGEIGDFSAFSKPKQLFAYFGLDPAVKQSGKFEGSKVQMSKRGSAIARRVIHTLTLQSISISRNGEAKNPVLREYYLKKCDSKPKLVAMGAVSHKVCNMIFAILRDNKSFEIITPQEHIKQYNASKCDMAA

SEQ ID NO: 469863 - protein, 492 aa, unidentified
MKLRKDQPKQSQKLKPKKTAGTAHCPQTVGWHQMNRKQRREMARKIQAEDLSLEVVHPHAAGIDIGNESHYVAVPPARDEQPVRRFGCTTAELKAMAVWLKQCEIRTVAMQSTGVYWIAVYDILEAAGLEVYLVNARETKNLPGRKTDVQESQWLMKLHCYGLLRTSFRPSQEVRTMRTYWRQHQDLVQAGGRHIQRMQKALTQMNIQLANVLSDITGKSGQAILHAILEGERDPYELAALCNPNVKASEEEIARSLEGNWQEDLLFMLKQEQEGYEFCQKQMAECDEQLQQYLRQRKDQSAGARLPEEKRKARRNKNRKNRPQFDVREQLFRTTGVDLSRVDGIDVLTAMTVISEAGWDMSKWPDEDHFVSWLRLSPDNRVSGDRVIGKGRLPTNNRLSVALRMAANTLRESNSYLGAQFRRLKRRLDTPVAIKAMAAKLARLIYRMLRYGMQFVDQGAEVYEAAHRQREIHYLKHKAASLGFHIIEAAAS

SEQ ID NO: 469864 - protein, 355 aa, unidentified
MDNVKYIGMDVHKEAISVAVLDSSGKLVMECTIETKASTILDFLKGLRGSLHVTFEEGTWAAWLYDLIKPHVTELVVCNPRRNALLKEGSKSDRIDARKLAELLRSNMVRSVYHGEHGVRTLRELARSYLTISTDLIRVMTRVKAIYRSWGIPCRGKQVYAERYRAEWLGKIQEAGVRRRAEFYYQQCDALRVLRQEVRRELLAESQKHDAWKLLREIPFIGPIRAALLIALMQTPHRFRTKRQLWTYSGFGIETHSSAEQRFVQGELQRVKKPASIRGLNRNHNHELKNLFKGAATVAAAKAGPFKEFYDALVAKGIRPEMARLTLARKMAAITLTIWKKGARFDAQHLKPQTA

SEQ ID NO: 469865 - protein, 419 aa, unidentified
MSFKIFKFNCCGLDVHKTWIYACIGITDSNNRTEYKQARFSSFTKGLHELCDWLAKFNCNDVCMESTGKYWIPVFNILEQHKIWITLSHPKYTKPMKGNKTDRKDAKWICDLYMCGMVKPSFIPPADIRELRDLVRYRYKLTCMITGEKNRAQNCLTVSNLKLDDVFSDVFGKSSRSITEQILQHPGETFDVTPFVDARCKTPIKEIQAAIDGAISREQAVKLRQCLDHIDELNKHISEVEQEILRLSDKYEAALNLIRTVPGFNKNPMTAIQVLSEIGCDMSVFPTDKHLVSWAGCCPRNDKSDRKIKSTRISRSGTYFKPVLVQVANALIKSKKHPEFITRYKRIKARRGHKKAIIAICRMILTAIWHILTDLKPYTPEGFLESRPVKEEKILTISQALNLLKLRGYVIKDDLLPTS

SEQ ID NO: 469866 - protein, 399 aa, unidentified
MIEDHGQVDVFIGVDVGKTNHHAVAVDRDGKKLLDKPLPQDEDKLRAIIDKLAKHGTILLVVDQPATIGALPVAVAQDAGIMVGYLPGLAMRRIADLHPGEAKTDARDAFIIAEAARTLPHTLRSIAVADEQTAELSMLCGFDDDLAKQSTAASNRIRGLLTQIHPALERVIGPHLDHPAMAELLRKYPTPAALRRAGQTRIATYLRRWAPRAGKRWAADVITALSEQTVVVAGTDAAGIVLPQLAAQLTQLRASRAEVHARVEAIVEAHPLHPVLTSIPAVGVRTEARILTEVVGKDFKNAGHLASYAGLAPVTWRSGTSIRGDHPSRKGNKVLKRALFLSAFAALKDPVSRDYYDRKRGEGKRHNQALIALARRRCDVLYAMLRDGTFYETPTAKAA

SEQ ID NO: 469867 - protein, 288 aa, unidentified
MNEGSTEHIEMTAGLDLGDKYSYLYVLEADSGEFVEEGRLRTTPEDLRRRFDSEQKLKVAIEVGTHSPWVSRLLEGCGHEVLVADSRKIRLIYGDKRKTDKLDAQKLARLARADPELLYPIEHRGEESQAHLALIHSRDALVRSRTQLINHVRGTLKSFGARLPKCSAESFHTKVADALPCELAEALEDVVATIGSLTERIRDYERRIERVCEQSYPQESGLLRQVAGVGALTSLTFVLSLEDPDRFEKSRTVGAYLGLVPGKDQSGDRDPGKRISGEGEEMLSVGCW

SEQ ID NO: 469868 - protein, 383 aa, unidentified
MKAVCGLDVHKDSIFLCILHSDGELFEQVFGVLTFQLEEMRKLLQKHHVFEVCMESTSIYWIPIWRVLSPHFTLRLVNPYFIKQLPGHKSDVKDAQWIAECTMKELVRGSFVPPEIIQQLRQYDRRIFDLNAEIVRKVSKVDGVLQRCNIRLSNYVSNIECKSYRDVVRRLSEGVTNPSELMKLVHGRIVNRHGAETILASLTGVVSQAEIDVLRQLHEEIDIAESHRNECQQRMLEICEKHFPEELERLQKIPGIKERAATSLIAEIGTDMSKFETANHLASWSGLRPRNDESNKKIKSRKITHGNVYLRNTIIQCAWAASRQKDSFFSRFSYHQTIVRRKNNMKVIVAVARKLLITVWHVLHDKTDYVDFKPDREESANNG

SEQ ID NO: 469869 - protein, 585 aa, unidentified
MSTTTALDRIGVGIDTARYGHRVWFLRPDRQPAAKPLTVMENQAGYQALQECLERLHQQHPQAHFHVRIDAAGQYASNLEHFLRSLDLPMTLSIGEPKRNKDYQKAHFPKRTSDDTESQAMARFAVVEQPAATPPPTPQMSLLREVAGRLQAQVKQTTRAINRLHNLLARVFPELATLTDDLAARWVLRLLDKYPSAERIAQARLGSLEKIPYLPQDKALPLHQAAQRSVASLRGEVAETLVRDLVAQVGHCQQTEQNMRKLLSAAFAELPPSGHIQVVTIPGIGAATAAALVAKIVDIERFTTPQHLVSYFGIFPEENTSGVDKHGNPVPPGTMRMSHKGNDLVRGYLWNAARVAIVHNPALRALYRRLRAKGKRGDVALGHCMRKLLHLVFAVWKTNRPFDDQHFPWELPSDTAVSTPPATAPVAAAATTASNDKAVGHKADITAEKVVTTADSSVKPAPVPVNPPSAEAPPAARPPVDFAFLRQQVTMEQVLRHLGLFEQLRGRGLQRRGCCPVHSRTGQGPKTFSVHLGKHLFQCFEASCAVCGNVLDLWAAVRRLPLYEAALDLAATFHLPRNREEEPVR

SEQ ID NO: 469870 - protein, 323 aa, unidentified
MIVGIDVHKNYCEAASIDEEGRLIKRWRFKNQSESIQEFLPNLPYGTRVAMESCSYFYPLYNELERGGFQVNVAHPLKVKLIAESRNKNDRVDSLILAQLLRMNYLPTSYIPPEPTRQNRDLLRYRAALARQRTQVTNRIHHLLEKQGIKTSQLSHSDLHSRKAQENLAQLQLPQIERSILDMELNLVRALNGAIQNANIEIAKEAKENPQVKLLMSIPGIDYYSAMLLLAEIGDINRFPDAKKLCAYAGLVPSVSQSGTRTIYGHITKQGNRWIRFVLVEAAQRTSTIQHDSPLGAMYRRIKARKGSAIAKVACARKLLKII

SEQ ID NO: 469871 - protein, 430 aa, unidentified
MSLIVPSAIDSEREEQPLPYDWFVGIDWGSRQHQVYVLDRDRRRVGERVVDHDGASLARLADWLWTLSAGQPQRVAVAIEVPRGAIVEGLLDRGFHLFALNPKQLDRFRDRHSAAGAKDDRRDAFVLADSVRTDQPSFRRVHLGEPHLLLLRELSRAEETLLEDFRRHANRLRDQLHRFYPQMLQLCAAADEPWLWDLIDLAPTPAHTALLTEEQVQRVLKAHRLRRVTAQEVLTCLQALALPVAPGAAEAAQAHCQFLLPCLRVLAEQLQACSQQVSALLSTLAEAPGKGEGPSDVAIVLSLPGVGRKITAWLFAEAAQPLAERDYQMLRTHGGVAPVTKQSGKRRVVVMRRGCNPRLRHALYHMARVALQRDAHCNRVYMALRAKGQRHGQALRNVGDRLLRILMAMLRHRTCYDASRIRREPVVQMG

SEQ ID NO: 469872 - protein, 411 aa, unidentified
MSYKVAGIDIHKKVLMVVVADVAAEEWEFESRRFGTAAREREHLVAWLQQRGVQEIVMESTAQYWKPIWLDLEPHFRQLHLAQAHSNRAPKGRKHDFADAQRLTRRLVAGELILSFVPDAPQRGWRTITRAKVQLVRDRVRLQNQLEALLEETRVKLSSIVSELLGLSGRRILRALADGENDPVALAQLGDFRLQCSQEELADALRGHWQPMHRQMLRLFLERLGLLDRQIHQLDRMAAETMQPYEDAVVRLAQVPGFGPDSAQQIIAEVGAQARAFGSAAQFASWAGLCPGREESAEHNQSSRCPKGNPFLRRVLTQAAQAAVKKKGSHFQIVFRRWLRRLGYQAALWAIAHKLGRLVWKILHDGVHYQERGEPSDPVAQRRRARRMIQALRKMGYQVEIFSLNPQPAQG

SEQ ID NO: 469873 - protein, 626 aa, unidentified
MTMTRAGVEHIGVGIDTARYAHHVSFLTPDRHEATRAIMVEESGDGYRKLQSVLEKLKRKYPHAHFHIHVDAAGQYATNLEYFLQVLDLPKTVSVGQPKQNKDYHQAFSPKRKADATESFAMARFAVVEQPGASERISDEFYILREIAGRLQSHVKNTTQAINRLHNLLARVFPELGVIAPNVAAAWVLTLLTKYPTPERIARATQPSLAQIPRLSSEKATKVQAAAKRSVGTLRGELAEKLVGQEVLHLKQCQRAQQELEELLLQAYRALPATGHVHVESIPGIGSITAAILVSKIISIERFETAENLVGYFGVFPMEHSSGVDRQGKPQIRTSHMSPKGNDLVRRYLFCAAKSAITHNRAVRALYSRLRARGTRGDVALGHCMRKLLQLVFGVWTRNEAFDENHHRWIEVPRQQPTDDVNERTNTTNGVPTEDRPAQQKAAGLKRDIVPARKEVTTAEPTVDALHETVNDQPTKQRVPPKIDQRHGTGRGSIDYAYLRGQVTIEQVLRRMGHFECLRGNTQLKGPCPLHGPTREGSQSFSVNLRKNVFRCLNPVCAAEGNVLDLWAAHRNLRIYQAAIDLADTFHLDTTPNRGEATRNSEPATNGTIHNSSRRKKNGVITPDAN

SEQ ID NO: 469874 - protein, 486 aa, unidentified
MIKHRNIFTRKNQAVLELFATADHPKKVLCVVFDYAKITHTALCCDGTGKVLKTPFPVKNNPEGLEHVIEIVGKLCRKHRIERKHVFFGGEDCGTFALNMIYNLRERGFLVVGVNAADAAKQRENHQASTDKLDLLGIANMLVNKRGAVAGGSIGAQRAMRSLTRHRKQQVRWLTATGNRIHQLVDQLFPGFLDERNSAVPPFSEASLYLMEERFSSRQIARRQDKALLKQLKAKGLQHAEQAIIQLKTYAREVLDHPLELSGMLQSSLTCEVHLYRCLRENIQQVNREIAQQLARTPAAVLTSIRGIGITLAAGVSAEIGPTETQPSLRSLSSYAGIVPQVKQTGGPEKSAQIGRVSRRSNRILKDYIVQCGNHLGLHGPADLMEDHRRRSANGQHADFGMARRFLRIAMRLMRTGECYVPPELQHAATLQELREYYLQLWPGLLEKWVKAKAVETAFDAENPLGQWRNMIQEIYEIKLPLPSQK

SEQ ID NO: 469875 - protein, 361 aa, unidentified
MAGTMTFAGLDVHARSTHAAAINLLSGEIERMRFGPGVEAPVAWLSGLAGPVHACYEAGPTGFGLYRAAVAAGVRVDVVAPGKTPRAASDRVKTDRKDAELLARLLVAGQLAPIKVPPAAVESARELTRLHDQCRRDLMSARHRISKMLLRHGRVYPKPTTWKADHRRWLTSQHFDEPTSELVYLNLLAQVDALTSRKLELAGQIAQLATDERRWPTVARLRCFRAIDTLTALSIHLELGADWERFEKAPRIGAWLGLTPSLNQSGESKAQGSITKTGSTLARRLLVEAAWHYGPRPHVGPTLQTRQHGQPEHVLQIANKAQHRLHHVYRQMKARGKPHGVITVAVARELACFLWAAATAD

SEQ ID NO: 469876 - protein, 460 aa, unidentified
MGNSQTSFTIIHSHAAGIDVGSRSHLVAVDQNKDHVREFGVYTKDHQQLINHLHQHGITTIAMESTGSYWQTLFTALQQAGFEVLLVSGSQTKNVKGRKTDVIDCIWIQKLHSLGLLSGSLLLSDTFQQLRTYYYHRQHLVQQSARYSNKMQKTLRLMNIRLDVVLNDITGQSGMAVIEAILEGHREADYLVALVSARVKNRAAGRSRQEIGDALQGWWREELLFELRACLDFNQLYESKVKECDKVIEAFLVKYAPPVEVSVEEKKQLKTHRKRAGKHAPDFNLSQLAYQYFRTDLFAVSGISYNTVFCLLTSLGHDIHKFPNAKSFASWLGLVPNNKVSGGKVISNRRPSGRSSIAKSLRQAANSIGNQKDHELTPFFRRIAFKKGRIAAIIATARKLAVIIWHMLTKGEAYHKERVEQNQEKQRAMKLKHLDKKLHALQLSKEELERLLIKHSLSIG

SEQ ID NO: 469877 - protein, 380 aa, unidentified
MTRLLVVGREPVVEIVYERVAAIDVGKKIVAVAVRTPGERAGKRRVQVRKFSTYYRTLSEMVAWLVGEGVTHVTMEATGVYWRPVFHALCEAERPLEVLLVNARHVKNVPGRKSDALDAVWLAELTECGLLRGSFIPPAQIAVIRELTRYRKKLIQARTSELQRLAKVLEDGGIKIDSVASTLTTLSARDMIEALIRGERDPAVLADLARGRMRSKIPDLTLACAGRFGAQHALMCTLHLEHIDHLTDMIARLDGRIDEVSLPFARQIELLATIPGIGERTAQVIISEIGIDMTRFPTAAHLASWAGLCPGNNESAGKHRSARTRKGNTELCAVLTECAWAAGRTATYVGAQFRRFHRRFGKKGGQKAATATAHTLIVII

SEQ ID NO: 469878 - protein, 357 aa, unidentified
MGLAKSQTEDHRMQIKSIGIDLGKTTFHLVALGSRSQVVIHKKFSRFQLLEYTANLPSSLIGMEAGVGSHFLGRALREQGHEVRLIPAQFVRPFVKSNKNDYRDAEAIAEAVERENMRFVPIKTEDQLDLQALHRVRDRLVARRTSVINQIRAFLLERGISFRKGPASLRRQMPEILENADVKLSPAMRRLLDFLWQEWKGLQLQIESLNTELEQIANSDPSCVRLQQIPGVGPLVSTAVISAIGNGTAFKKGREFAAWLGLVPRQWSTGGKAKLLGISKRGNPYLRKMFIHGARAAVLRVKREGSSLGKWMSGLETRTARNVVIVATANKLARISWAVLASGNDYQPVHRAGVVSN

SEQ ID NO: 469879 - protein, 325 aa, unidentified
MEEPGTADRLVDCFVGIDVAKRQLDVHILPSAHTFSVARDAAGLERLVSTLRPHAPRLIVMEATGGLEVVVCAQLAAAGLAVAAINPRQIRAFAVALGRRAKTDRLDAAVIASFAERVRPDPRPLPDATTQALGELVTRRRQIVGMITAEGNRLQQAVDQRLQKRLKAHLVWLQRELSSIEDDLDRAIRNSPIWCAQADLLTSVPGVGPATARCLIAELPELGQLDRRRLAALVGVAPISRDSGTRSGTRQIGGGRARLRAALYMATLVGVRHNKALAACHARLIAAGKRPKVALVACMHKLLLILNAIIRTNQPWHDDHSPASI

SEQ ID NO: 469880 - protein, 399 aa, unidentified
MAKQTTTAIKRLAKAKPLAAKQTSVQQQAKPEAQADVICLGVDVHLRQHVVCRKIDGATPQPAQRMTPEQFEAWAVKQKSQARRVVCCYEAGPFGYGLQRRLSALGITCHVVRPQDWDKHGQRVKTDGRDARELAEALARYEAGNKHAIAIVRVPGIEQEQRRAISRQRDALVNEVRRLGAMGRSHGMNHGHEVSGRWWRTRPWKAVTQKMSAFLRGLLEPLKDMLVLVEEQIKKLTGQITAKATEKTAAAQRPKGLGALTAQIIDNEVLDWSRFNNRRQVSSYTGLCPSEHSSGGSRRQGSINKHGNPKLRHALVEAVWRMMRLQPGWKRLEKVLEKLKAFEGKKAPNKKKTAVALARELAVDLWRLNTGRTTLAELGLIAAEEGEIIEEGSQLAMSA

SEQ ID NO: 469881 - protein, 426 aa, unidentified
MKFNTQNKKIAAITEKTLVVGIDIGSEVHFARAFDWRGYEYSSKPFQFTNSEEGFEAFRVWIEDMKAKGGKETVMPGMEPTGHYWFNLGRYLQDRGMKPLHVNPHHVKKSKEMDDNSQAKNDRKDPKVIAGLVNAGRYMYPYIPNGVYAEIRTLNSLRVFAQEEAIRLKNRIARWFSIYFPNYKDVYGNVNAISGLMVLKKAPLPEDIVKLGVEGVNHIWRESKVRSVGLKKAKELVTAASHSVGVQNSQDAARIELQFLLSDYEMQAKREAELMAMIEAKIKKIPYVENLLAIKGIGMKTAIGFVAEVGDIRRFKDPKEIQKLAGYAIVNDESCKHVGESHISYRGRKRLRYVLYEAAVSVLAHSPEFRLIHHYYTTREHNPLKKMQSLVAIACKLIRVFYRILTSGITYDPGKMMGDIQRPQAA

SEQ ID NO: 469882 - protein, 341 aa, unidentified
MRKTLFCGVDLHSNNALYVITDQEDRQRFKRRLPNQLPVVLETLEPFRPRLKVVVVESTYNWYWLVDGLLDHKYPVVLAHPGAIDQYDGIKEADDLTDAAFLARLARLEILPTGYIYPKEERPVRDLLRRRSLVVRQRASTILSLQNMALRQTGQNFGWRALRRLSDPERAEVLGDHDCLTFVTTEQLDLIELLSEKIQRFEAKILEHAQLRPAYECLLTMPGVGVVLALTIMLETGDIGRFATVGDYTSYCRCVRATHTSNGKSKGKNNGKNGNAYLAWAFVEAVHHALRTCPPARSFYDTKCAKRNGALATKALAAQWSKAAYYMIKRQESFDLARVFG

SEQ ID NO: 469883 - protein, 464 aa, unidentified
MRVVARLPAEPVALATTSNRKVPQEGHYIRAMDSRAKRRTSDKHPKTMNEAAQWQQHRAFGAVDWASEKHYVIVVDQAGKVIEEFQIEHSALGWKKFREKLQPYGPIPFAIETSQGAVVEQLLESAMIVYPLNPKSAQAYRQRKAPSGVKDDQLDAWSFADALRVDGHGWKALRPEEPLIKELRLLCRDEVTLIEQRTAFVQQLRHALAEYYPAALEAFENWTSVSAWIFLQRFPTPTALAQAGKRQWQKFLHTRRLWGSDQGPRRMEIFSHASEFAGTQPTVNAKSLLALSLVQMLFSVEKQLAVYRQRIEELFARHPDHDLFGSLPGAGPKIAPRLLSEIGDDRQRFDGDAQALQCLGGTAPVTKRSGKYRHVHQRWACDKHLRHAVYLFAEQSLSRCVWAELYYRHHRQKDRSHANAIRRLGHRWLKIIHKMWIERAPYNAELHHRNQLQHGSWIFKLKPS

SEQ ID NO: 469884 - protein, 462 aa, unidentified
MKNKTAKAQKGKHKNKKIQFNEQWEKVHPDAAGIDIGSREHYVCVPPDRDPERVRRFGTTTPELEAMAQWLRRCRITTVALEATGIYWIATFQILEKQGFQVVLVNPRQVKNVSGRKTDVQDCQWIQKLHTFGLLGSSFRPADPYCVARSYVRLREDLVHHRSTQIQLMQKALHQMNVQLSHVLSDISGESGLAIIVAILAGQRNPVALAALANKRVKSSKEQIAQALVGDYRSEHLFALQTAYDLYLAYEGKIRACDDRLVKELENLPNQVDLQRKPLAPAPKNKQIDEGLRAGLYLKLGVDITAIEGVGARVGLAMLTEVGPDWGAFRSEKDFCSWLGLCPDNRISGGKILSSRTRRVVNRLADALRMAATTLERSQSALGAFHRRMKAKLGAAEAITATAHKLARLIYRIIKHGEAYVQEGLQQYEEKNRQRKLNAVRKMAESLGLKLSEAQELTASVS

SEQ ID NO: 469885 - protein, 428 aa, unidentified
MEVIHPRCAGVDVSKKDAKVCVRVQGAGRRGTSTTVRTWGSTTAEILALGEHLLAEQVSGVVLESTSDYWKPFYYLLEDQLNVMLVNAKAARNVPGRKTDVSDAAWLADLGAHGLLRASFVPPEPIRVLRDLTRAPTIITRARTTEIQRLEKLLEDTGIKLSAVASNIVGASGRAMLEALIAGERDPAVLADLAKQRLRDKIPALTEALRARFTDHHAFMVRLYLDRVDAHSADLARLDGRIEQAVAPVRGVQELLMSIPGWSQIVADVFIAETGADMSVFPTAEHLASWAGVVPGRDESAGRVTSGATRPGNRHLKAALGVAALSAARSKNTYYSVRFRRLAGRRRTARSGNHTTGGMSIAGMTALVAIEHQMLTDAWHMLVNGAFNRDPGPDYYTRHHPGRTKTKAIKQLETLGYKVTLEPLTEVA

SEQ ID NO: 469886 - protein, 342 aa, unidentified
MRNTMIGVDLAKNVFQVHGASMTGEVKFRKKLSRPQFRKFMEDQSDCIVVFEACGGAHYWAREMAQLGHDVKLIAPQYVKPFVKRQKNDAADAEAIVIAAQRPEMRFVEPKSEDQIARAVLFRARDRLVHQRTEQINALRSILYEQGQVFPTGTHNLSKIEVFLKEPNNGLLELVQDECEELLASIAELTSRINTKTLKLKKQAERSEVARRLQTIPGVGPLTAVAIEAFAPSMKSFRRGRDFSAWLGLVPKQHSSGGKARLGKVSKAGQIDIRRLLIVGAMACTGWMGRKSIQDGSWLCRLLNRKPKMLTAIALANKMARTIWALMTKEEDYRDPAMTAAA

SEQ ID NO: 469887 - protein, 366 aa, unidentified
MDIMHYVGLDIHKKTISFCVKLADGTIVSEGVVKATRKDLDRWMATLPRPWMAAMEATIFTSWVYDHLLPHAAAVKVAHPLMLRAITVAKRKNDRIDAGKIADLLRVNLLPECYMAPQELRDLRRSLRYRNLLVRQSTQMKNKVSGLLMESGIEYSKQKLHQKQYFSELLKRKGEEQLPPSLTPLLELSRTTIETAQKMERQIVRGLEQDPLLAERVERLLTIPGVGPITGLTWALETGEPGRFNSVKQAMSYCGLCGSEDSSAGKQKRTPISKQRNKHLQSVLIEAAKLAPRYNLELAQVYQQEKDKGNHNRATLAVARKMVAYLLAVDRRKTGFVIPPAEKVVSPEKVTSAAEKVALRREGGLM

SEQ ID NO: 469888 - protein, 339 aa, unidentified
MNEVTLIGIDLGKHSFHLHAQDATGRMVFRKKLSRQQLLRTLAKVPSCRVVMEACAGSHWLARQLAGMGHEPRLISPQFVRPFVVGNKNDFGDAQAICEAACRPSMRFVSPRNEAQQTVSAMHRLRERLVRERTATVNQIHGFLLEFGISLPRGAALMSRLPTVLDHETLPPRLVGLVVRLRAQVHYLEEQLRQVVQDLKASLREDDKSRRLLEIPGIGPITASALAVELGDARQFANARQFAASIGLVPRQYSTGGKPTLLGISKRGDRNLRRLLVQCARAVMQHTASRTDALSLWVKTLSTRRHSNVVACALANKLARIAWAVLARGTHYQARALTT

SEQ ID NO: 469889 - protein, 367 aa, unidentified
MKKVSTVGAKPSKKISQQKLTVGLDLGDRNSWYCVLDESGQIQLEQRIRSNAKALREVFGQLPHSRIALEVGTHSPWISRLLSELGHEVIVANARKVRLIGESRKKDDRLDAQTLARLARIDPGFLSPVKHRSAQAQADLMMIRARAGLVRARTALVNTVRGLAKSYGERLRGCNVRNMNPEKAEGLSPELQSALEPLLAGIEELSEQIREYNQRIEKLAQESYPQVALLRQIKGVGTLIALTFLLTLEDPHRFRKSRDVGCYLGLQPGRRNSGQSEPQLHISKEGDPYLRTLLVQGAQHILGPFGMDCDLRRWGLKLAERGGRSGKKRAIVATARKLAVLLHHLWVSGEVYEPLHNSRRTAVAAAA

SEQ ID NO: 469890 - protein, 347 aa, unidentified
MKILALDLGKYKTVGCAYESETGAHQFERTFTTPAALERLAQEVKPDRVVIEVCNIAGWVCDLMGQLGIAVQVANTSDDAWRWRKVKQKDDRRDALKAARLSAVNQVREVYIPQITVRQWRALITYRRHLVGRRTKIKNHIRDLLVREGQILARGSRCWTKLGQELLSSMARPLAEVGVAELWRGELWEELQQLQMVQARMASVEEKLNAIGEADKRVQLLRTIPGVGPRLAEAIVALLDQPQRFRKASQVSGYIGMVPKAFDSGESERRGHITRQGSGLVRSLLVEVAWAGLRHNAWMRQTYQRLSGGGKKARKKIAIVAVGRKLLVRCWAMLRDNCAWDWQPQIT

SEQ ID NO: 469891 - protein, 342 aa, unidentified
MRSVKGRQRSSHVMSALVCGLDVHKESTYATILNHEGKVINQMRMSTEKVLSYLAHYSVNRVAMESSTAVAPLYRKLASKGFDVLVSHPKKTRYIAEAKIESDRVDSKAIAELARLEALPLVYVPDEETAKLREKVRRRAFLVRQRAKLKVKIQSVLTYEGINPPADHGLFTLKGIVWLRSLSLEPVDSYLRIMSIFNREIKLLSKQLLGLAEEDEDVKLLMTIPGIGYYSALLVKSEVGSIDRFPFRERLCSYAGLVPSTRASGAKVRHGAITKEGSRWLRWVMVQAAQTHVHRFDSTVTRMYDRVAQRRGHQVALTAAAHKLLLVCYSVLKNKRPYYSQA

SEQ ID NO: 469892 - protein, 316 aa, unidentified
MEAPVAGIDVSKDKLVVYFQGKYYEFQNNKQGFEGVKQVLPKGCKVAIESTGIYHINLAKYLGKEYDVRIINPLVLKKFKDIRGKKSDKNDAKKLAELVISMGSEFTTSEAKESTSQWDFITRSIVRVKNRLRRDLILLGYKDSLSKKNLNEVLRGEDNIVLSEVRFLLDELERLEVRKREIEEELEDLVPKDSLIFTIPGIGRTLGCIILARVGDVKRFGNKKRFVAYCGLDPLVESSGKSVVSRGISRRGDAVLRRAFYLAALTAIKVNPIIKRFYEEHKENLKGKKLITACARKLAVITWAVLYYNKPFDASE

SEQ ID NO: 469893 - protein, 350 aa, unidentified
MTMVGGFDVHRKQITFDYVDDDGLVHWGQIRPATRTTLRSWLAEHCPDGDAEFALEGCTGWRYVSEELAGAGVGVHLGDPAEIATLRGPKKRAKTDRADAKLLRTLLVESRFPESWIPPKHVLEIRSVGRLYCTLMDERRAWQQRVHAQLFHQGCPPVRALLSVAGREALAHSELSAAGREYVDAALRRIDELTVEIEPLRTQLVNFARRQPGCRALQGHYGIGWLCAAIMWAEIGDARRFSSSDQLVRFAGLDVTVYSSDVKRSPGYLSRQGSPELRWAAFEAAKCAARRGSPDYAYYRRLAAKHERHNGKNPTLAVERKILRRCYHTLRELGDAALALPVPERDEVAA

SEQ ID NO: 469894 - protein, 323 aa, unidentified
MTKHITICAGIDTGKSKLDVAVEGSREQLQVENTSEGHAVLLAWLRRHRVKRVGIEASGGYEQPVVAELRRKRFVVVVFQPAQVRAYAKFHLQRAKNDKIDAALIAACTAAVRKIHPAPDPRLQPFAEQLTMIDQIGEDIARLKNRIESCRNTQIKGLWEEDLARLAKREKVELKALIASIRKHPDLAKRLDLINSIDGIGLPTAVAILVRMPEIGQITREQAAALAGLAPYDDDSGEQVGTRHIEGGRKRLRHALYAAALAASFRWNKQLMTLYRRLIAAGKEHKRALVACARKMLVFANTIVARGTPWQDRPPENATLTAS

SEQ ID NO: 469895 - protein, 412 aa, unidentified
MLDSSSIGSRTAGVFVGIDWGNSHHQLCVVDADGGVVEQGKATHDVAGLGELIERLARHRSVVGIAIERSEGLLVETLQAQGYRLFCVSPKLSARARERYRLAPTKSDAFDAFALADSLRHEHRHWRSLAVPSPLLAELRALTRDRERLVWNQRDVENQLRSIVLAYHPGVLRLFSSLDRDITLAFLRDYPTPQHAARVGPARMAAFCDRHGYSGRTKPELLVDRLRPNLLSAAAGTVSGKAFSAMLFVDQLELLNTQVRSITKQIRERLSQHVDAPIFLSFPGMGEVTAATMLAEMGEDRARFPTADVLLAETGTAPVTRSSGRSRTVRFRYAANKRMRHAIDWWAFVSVRENEWAHDAYQQARARGQLHNRALRGVGARWTRILWRCWTDHTTYDPATHLKNQAAGTLTA

SEQ ID NO: 469896 - protein, 422 aa, unidentified
MKGPGFRVVGFDCAEEEHVAVLLDEAGEHERLVKTVNQRDRVQECLAKLILAAGEGASLVVVVESKRAHGRLVVEEALKLGCEVMQANTVALNHFRDVEGQPRKDDEWDAFLAARMAYLRLRGCRELVEVTDQERALARFTRSHGRLTEDRTRQVLRLRSVLLELAPEILHRSWKGPKPGSKAMTYLLDRWPGFEGLERAQLRSIEKILRRCRYGGEAAHVAKLVRDMARRISIEPEEREAITLEMNALLDKIAACEASREKLLEEITRRVGENPVGVKLMEMHGIGPIIAGVLVSELLPVARTVTEAESATYAGVTPTGRKSGKSLDTSHLSQGVNKHVLNALYSSSVVSIKHSAIDRAYYNKKLRDYAGHSKPHVAAFIALSRQRHKVVYKLMTTEARYDTEVLIASHLERIEEARKAVA

SEQ ID NO: 469897 - protein, 410 aa, unidentified
MEVLYPHCAGLDVHKQTVVACARHMVNGTVTREVRTFRTTTKDLLALSEWLASQGCTHVAMEATGVYWKPVWHILSDGDFTLVLANAGHVKNVPGRKTDVNDATWLADLMAHGLIRGSFVPDVQTQELRGLLRTRKQFVRERSSHVQRLQKTLEDANIKLDGVISDIVGLSGRRMIEALISGQSDPEALAVLAHRRIKAPPAALREALRGRVTHHHRFLLQLHMQHIDALDAALDAIDREVDIHVEPFRGAVLLLTTIPGVSDLSAQVIRAEIGGDMSRFPTVGHLISWAGLCPRNDESAGKRRSNRMRKGAPWLKTTLIQCAWAAARKNGSYLQAQFHRLRSRRGAKKAIGAVAASILTAAYHMLKDGTLYHDRGPDHFDRRAKTVQTRRLVTRLQTLGYAVQITPLAA

SEQ ID NO: 469898 - protein, 347 aa, unidentified
MNLTHYIGFDVHKKHINFCCKRANGELVEEGRLVAERSVLRSWAGTRAYAWHGAMEATLFSGWIFDTLKPYAVKLEMAHPAMVKAIAAAKKKNDRIDARMIADLLRCNLLPACHVASAEIRELRRLLRYRQLVVRESVRMQNKMAGLLMECGTPFEKVRLHGKRYFSGLLDTLEEVPDSVKDLLRLSRNAFEMFQAAQKQLIQKLLSHPQLYQRVERLTTIAGIGEITALTWALEIGDPTRFASCAKVMSYCGLTSALRSSADKQQRGPISKQRNHWLQTALIEAAKLAPRWNPQLAALHARELERGHRNRATLAVARKLACYLLAVDKSCQPFQLRQPANLLPETS

SEQ ID NO: 469899 - protein, 424 aa, unidentified
MKSASTTAKMSNTTNKNVTSLPVRPAGGVTAGLDWANADHVISVVDDTGRVIARTNIEHTRAGLRTMVRFLTKHGATEIAIERGDGVVVDRLLEAGITVVVISPNRLKNLRGRYGSAGNKDDRFDAFVLADTLRTDRTRLRPLTRDSHTTQALRAAVRARRDLVKHRVALANQLRAHLLVAFPGAVGLFADLDSPISLKFLTRFESQDRADWLSTKRLAAWLASVSYSGRTDPGVLLAHLHDATRGASGDDGAARAHVTRAMVTVLTGLVEQIRILEDQIAEQLALHADAHIFTSLPRSGTVRAARLLAEIRDARGRFPDAESLACLAGVAPSTRQSGQHKAVNFRWAVNKELRDAVCDFASDSRQANPWAAKIYNDAIARGKDHPHATRILARAWLGVIWRCWQDNTPYQTNRHNALQALTAA

SEQ ID NO: 469900 - protein, 336 aa, unidentified
MYSGIDLHSNNSVVAIIDDADRVVAQKRLPNEITKIVGFLARWQGELAGVVVESTYNWYWLVDGLQDAGLHVHLANTAAIKQYDGLKHSGDETDAQHLAHLLRLGILPTGTILPREDRVVRDLARKRMQLVHCCTTQVLAVENIMARQLGGRMTSNQIKRLTADAIDSMPLTADVGLAIKANVAVIATLQSQIDILEQRLQERVKPRPQYGLLTSVPGIGQALATVIFLETGPIDRFPDVGNFASYARCVDSVHTSNRKKKGEGNVKNGNKYLCWAFVEAANFARRFCPEAKRFHERKKARSNNIVATKALAHKLARACYHILKEGKPFDATRCFA

SEQ ID NO: 469901 - protein, 365 aa, unidentified
MQKINTMRVCGKNASEGQLTVGLDLGDRSSAYCVLNEAGEIALEHKLPTTPEAMKQVFAGMPRSRIAMETGTHSPWISRLLVELGHEVIVAHAQKVRLIVKSRRKDDRLDARTLARLARIDPQLLSPVKHRSAQAQLHLTEIRARAGLVGARTALVNAARGLVKSSGERLRKCGTQQFNREITNGLSAGMREALDPLLREVESLNERIREYDRRIERMAKETYPEAALLKQVKGVGDLIATTYVLTIEDPQRFLKSRDAGCFVGLQPGRRNSGDSEPQMHISKEGDEYLRTLLVQGAHYILGPFGEDSDLRRWGLKLSARGGKNAKKRAVVAVARKLAVLLHRLWVSGEVYEPLRNSQKAVSAAA

SEQ ID NO: 469902 - protein, 363 aa, unidentified
MELTALHKRVIACDVHQAQVTVCAILEEPDGSVRIEQQRFGAFQRDRRALAEWVGARRPDVVVMESTGIYWKSPYAALEAVGIRAVVVNARHVKNVPGRKTDIGDAQWLATLARAGLLRGSFVPPATLRELRLIARQRQQLMGQLASEKNRLHKVLTDGGVRLGVVVSDLHGQSARAMVKALIRGQPPHEVLRHASRRLKATRAEILDAVQGELTDSHRFVLDELMQHIEDLEARVARFEARLLAGLADQRPVLALLQTLPGVDLIGAALLLVEIGADMDVFASADRLASWVGICPGNNESAGKRKSGRIRKGNPYARRLLCEFAHAASRTPSAFHAGNLTATRRRTMKRSRCNATRPAGSRH

SEQ ID NO: 469903 - protein, 425 aa, unidentified
MKYTQNEKILQLTEQTLIIGVDVASETHYARAFDYRGIEIGKIIRFDNNAEGFTKLSIWVKEIQAKHGKNTVMVGMEPTGHYWFNIAQYLKAENIKIVLVNPFHVKRSKELDDNNPTKNDRKDPKTIAMLVKDGRYMVPYIPEGIYSEIRTAMETRWQIVKQLNRIRNRIKRWLNIYFPEFNEVFCDWEGKAALIALKEFPLPIKVLEKGVDGIVTKWQGIRAVGRKRAVKLVEAAGKSIGVKEGLVAAENDLVTLLEEYELRLKQYDRVMVFVEQLAMQIPGFKEITKIKGVGLITAAGFIAEVGEVKRFEHPKQIQKLAGLNLKENSSGKHKGKTTISKRGRKRLRALLFQGIMPVVAKNAEFKELHKYYTTRAQNPLKKKQSLVLLCCKLIRVFYALLTKRTAYDGQKMMKDIKRPKLQEAA

SEQ ID NO: 469904 - protein, 347 aa, unidentified
MSIVAEKYDYVIGIDTHAKTHTYAIINAKNSAIIETKTFPTHPAGRTRALAWITHYTGLLLAAVEGTGSYGRLLTTTLIEAGIDVTEVKPPPKTTRTGEGKSDPIDAQAAARHILGTPTTGLLTPRATGPRNALRVLLAGRRQVETQRTRTINALHALLRTNDLGIDARNSLTTTDYQTIAGWRTRTGEDLTTRICREEATRMAKEISRLKTELDTNYHKLEAVLKTLAPAVLDIFGVGPVTGAQLIASYSHKGRIHSEAAFAKLAGTAPLPASSGNTTRHRLSRYGDRQLNSALTAILNTRLSHDTRTQEYRDQRLQRHENNPEIRRALKRYIAREIYRKLQHIMA

SEQ ID NO: 469905 - protein, 349 aa, unidentified
MKIIGCDFHPSYQQIAVVDLVTGEMVEKALSHQRKEEVRAFYAGLEGPVRVGIEASGQSQWFERMLAELGHEVWIGDAAKIRASCERKQKTDRRDAELLLRLLAEDRFPRIWVPTAAERDDRQLLLHRHKLVRMRTQVKNQLQAQALNQGVQRKRKLWSEAGRKQLESLPLLPWASRRRAELLQLLDQLEASISELDRAVAEQALARPAARRLMTHPGVGPVTALAFTLTMGPAERFQRGKQVASYLGLIPSEHSSGGRQQRLGHISKQGNPFLRGLLVEAAQSAVRHEPEMRRAYQRLAQRKCRALAKVAMARKLAVRLYWMLRLQVNYAQLIQGSHAGQPGTFCGRG

SEQ ID NO: 469906 - protein, 370 aa, unidentified
MQFIGIDLHTNKFTCSYRDEHTPADAKKGNKTATFTLTSAGLSDFYLTLTPQTYVLVEATITTFSFVRLIQPLVKEVIVGNTYELKQISLARVNTDKIDANILSRILKMLVLSGEQAGFAVTVPPVDIQELRGLYTTYRLYQKQIVQIKNRIHSLLKEKLYGFTQEEIFDKKNREKIRGIESDTAMSFQIQELLDMLDYHESRIDPLKERIMAHAEPHMKEIDILTSMKGISVFIAIAVIADIIKVDRFRNSKAFTSYLRSSPKVSASNTSVKIGGINKMGRKLSSTLITQSLNHVLAASEKLNRWYTRLTKYKKPGLVRTGLRRKVFAEMYQMLKKGEYHYARVANNHEAKIGQYKRFLEKRKKLLKSA

SEQ ID NO: 469907 - protein, 306 aa, unidentified
MMLGVDVAKDNLVASDPYGKVRTIANSKDAVGKLLSTLDPGATIAMEATGNYHKLLANAAFSQGFKVIVFNPRDVLHYAKSISPRAKTDQVDAKVIARYALARPEYRPYEPTPAVAQKLLNLSRARVSLVKKRTSLENELRECPELSEYLEPAIDGLCRSVAKLNKELSAVTAKVTEHALMVGIPGVGTLVGAYTLALLMSGEFTRSDSFVGFTGLDVRIRQSGKKTGKACISKRGDPEARRLLFLAARTAANRPGPFQELYLRYQTNGLSKTAATVAVARKIARTLWAIYTKKQPYRPERVLAQE

SEQ ID NO: 469908 - protein, 283 aa, unidentified
MAQTCAKLESNAVVVGIDVSKDHFDAAQYPSGDLIQTSNDTKGLRTLLQWIGRQRAVHVVFEATGPFHRQLESHLAKASIPFSRINPRHARKFAEATGKLAKTNRVDAVMLARMGALLEPRTSEIWNEQQSALQELAAARRNLIRDSTARLNSQQNLQLSLLKRLKRYRLRQMEAQIAAIDQAISELIPTDGSLSRKRAILVSIPGIGEATAAMLIADIPELGTLENGQVAALAGLAPVTRQSGKWQGKSFIRGGRIHVRNALYMPALVAMRHNPDLQSIYPG

SEQ ID NO: 469909 - protein, 424 aa, unidentified
MKVTYQTCCGVDVHKSFLVATIVKTTGGIEPSYQKKRFSTFNNSILEFKQWLLDNHCHDVCMESTGKYWVPVFNLLEDEINVVIANPKWVKAVKGNKDDTKDSKWIGDLFRLGLVKGSYIPCKIVRILREYTRYRYKLVSCRSSEKNRYQNALTVCNVALDSVVSDIFGKSSMSIIDYLLEQSGTSINHEEIASKLLRSLKSKEDAVIESVEGYQMTDAPKYRVRLVRAHMDYITAEINDVDKMIENMIFSNPDFENAVQFLCTIPSVKRDSAITIISEIGTDMSQFGGSKRLCCWAGLTPGSNESAGKKKSVRITRAGVYLKPALVQCAHAAVKSDKSPYYKKKYESLVKRRGKKRAIIAIARMILTAIYQMLSTGEQWNPSDLYKIDMPVALVEKQKAKAIKQAKKLLQREGILPPDEPLAS

SEQ ID NO: 469910 - protein, 337 aa, unidentified
MEVTIWIKFTTNVVVLTCTKKLIVACFRKGSKQELRNFGATTRELLELANWLQNGGCEMVAMESTASYWKPLYNILESSELKAMVVNASHMKAVPGRKTDTKDAEWIAELLQHGLLKASYIPDKQQRELRELVRYRKSLVSERTRELNRLQKMLEGANIKLSGTVSDINCMSARNILEYLLTGEFFDEAKYDEMYKQKIIAHNLKASKEQLIDDLNGVMTPLQRRMMKELLSHLDELNVHINNLEDEIDNFMKPEEKKATQAIQDVTGIGKNSSQAIISVIGTDMSRFPTAGHLAAWAGLCPGNNESAQKEEDRKNAKRECSFTFNPGSLCAFRYKK

SEQ ID NO: 469911 - protein, 352 aa, unidentified
MTMTTLTRSITGGVDTHLDVHIAAALDERGTLLGVESFATNLRGYRQLLTWLESFGEVELVGVEGTGSYGAGLTRHLHDAKVRVVEIDRPNRQRRRRRGKSDPEDAVAAARAAKAGEANGEAKTRDGNVEAMRVMRVARSSARRARTQALNQMRSLISTAPEPIREELRYLNVYRLLEHCVAYRPAEKRDLVSITKRTLKMLAERSVSLEEEIGELDAVLKPLVRVTAPELIACSGVGTDVASALLVAAGDNPERLRNEATFAHLCGVSPIDASSGKHERHRLNRSGDRNANSALWHIVIARVVCDPRTRHYIERRMKEGLTKKEAVRCLKRYVAREVFNLLPRRHFAIDSP

SEQ ID NO: 469912 - protein, 387 aa, unidentified
MYFVGIDISKFKHDCAIVDELGDVITPSWSFQNDREGFSLLKELLDALDGKKKIGLEATGHYGQNLKLFLENNDFSFMEFNPLLINRFVHSKSLRKTKTDSIDALMIAQYLMTVEYKPYPPSFYTFEKLKSLTRFRDSLIRQRSRQLVELTNILDKVFPEFKPFFKGRFSATALYILSHYASPEKISNMNSKSYEPLRRLSRGRFSMVDFVELKTLARNTVGSTSDYLLQEMEITIDIYNQLQSKAGEIELQIHDCVLDLAPPMLTIPGIGAASAAVILSEFGDLSKFNSPSKLLSFAGMEPGYFQSGTSESTGKMVKHGSSHLRYAMMNCAQTVINNEPTFAAYYAKKRAEGKEHRVALTHVAKKLLRVIYTLQTKELSYNPDLVR

SEQ ID NO: 469913 - protein, 328 aa, unidentified
MEHELHFIGIDVAKAKLDVDMLRPDGRHRSKKFANTPGGHDELVSWLQGHQVSNAHICMEATGTYMEDVAAHLSDAGYQVSVINPMLSKAFVQSQGIRSKTDTVDARQLAYFCREKRPAIWEAPHPVERALRALVLRHQALTEMHVQEQNRRESAREVQLPSIDMHLLWLETELKRLEKQIKDLTDDDPDMKQRRKLLDSIPGIGPKTAAVLLAYVGLKDRFREARQFAAYAGLTPRQHESGSSIRRVSRMSKLGHASLRRALYMPAMVTLYKTEWGRVFRERLEKNGKNAKLIIGAMMRKLAQVAYGVLKSGRPFDATLHQGNACAA

SEQ ID NO: 469914 - protein, 390 aa, unidentified
MKQNTTSGQSPQQAPKQSLRQSAKQSSKQTSIQSPKQSKKICEGPITIGIDLGDKTSRYCLLNNRGEVVKEASVGMTKKGLAQAFGTMKRCRIVLEVGTHSPWVSRLLESLGHEVFVANPRQLKLISQSSRKDDRVDAIMLARLLRADPELLRPIQHRSEAMQMDLMAIRVRAVLVEARTKLVNAARGLAKSVGERLPTCDADNMGISQMGSLPKELQALLKPLLKQVESLTGEIKARDEQIEQIARMKYPETKLLRQVSGVGPLIALTFVLTVADKQRFQKSRDVGCYLGLRPKRSQSGQSEPELHITKEGDLYLRKLLVQGAHYILGRKGPDTDLKRWGTRLALGGKRSKKRAVVAVARKLAVLLHKLWSCGEVYEPLRNSVARQAAA

SEQ ID NO: 469915 - protein, 430 aa, unidentified
MYYFDFISVGIDVGADFSWISILTPDHKPIVKPFKVLHDSTDSLEKAVSTIKKAEESNSMKAHIFLESTGIYHFPLFCYLKESGFEVFVLNPLITDSNKNSGIRKVKNDKNDSLRIAKTAYTHDLKTSIIPSDIVINLRSLTREYYHLVDSKTAYVNKLHKELRLVFPSYSKVFSNLTGKTSLLILKTYKTPDAILKAPKDEIISLIALNSRKGLNYARCKYNKLIDAATLSKSFGQHLDSVFQIIQLNIEFIEIFNSKIEAILKSIKDFTIQHESHIFIKQIHLLDSIKGVGFISAVTLMCEIGDFSAFKKAKQLYAYFGLDPAVKESGKFKGTKVSMSKRGSRLARRVLFTVALVSVRGSKSGTPNNPVLKDYYDKKKLSKPKKVALGAVMHKISNIIFAVLRDNTPFVLRTPDEHRKAYNSHLSLVA

SEQ ID NO: 469916 - protein, 342 aa, unidentified
MNKVAIAAIDLGKHTFHLHAQDDRGHELYRKKFNRVALAQHLANLEPCTVVMEACGGAHFMAQEVAKLGHTPKLIAPHLVRPYVKSNKNDFADAEAICEAATRPTMRFVPPKNQAQQALAMLNSVRESYIKDRTATVNRIHAALLEVGVSLAPGFKSIKELPALLEMSSFSGSIKKILMGLHEHFNYLDGKVKALDKDVECQAAEDDLASRLMTMPCVGPITSSALAAELGDGKQFKCGRGYAASIGLVPKQHGTGDKTVLLGISKRGDRNQRRLLIQCARVYLIQLDRQKGALADWVRQLLASRHHSNLVVCALANKLARIAWAIAAHHTEFDAGPAAMNA

SEQ ID NO: 469917 - protein, 405 aa, unidentified
MFCGIDWASERHAVCVLDDAGTTIGAFEVAHSADGLEQLVTRLGRLGDPAALPVAIERPDGRLVDRLLEAGHPVVPVQANAIKAWRDAEVVSGAKHDPGDAALIAEYLRLRSHRLRVLAPFSAETRALRAVVRTREDLVDQRVAATNQLSACLEAFWPGAKAVFADVWSPIALDFLARYPTPESATQLGEARMRAFLTKHGYSGRRPAAELLARLRAAPAGLLGTPEVEACRDAVLAMVGVLRALNQAIKQLDRSVLANLGEHPDAEIFTSLPRSGRISAAQVLAEWGDCRQAYDHPDAVAALSGIVPVTKASGKHRTVSFRWACNKRFRAAITGWADNSRHASPWAAKVYADAVARGCDHPHAVRILARAWVRVIWRCWLDHTPYDPANHGAARKLTEMADSAV

SEQ ID NO: 469918 - protein, 347 aa, unidentified
MRFYTGQHRYYCGIDLHARTMYLCILDHTTGEVVLHRNLRSEPGAFLRAIEPYRDDLVVGVECIFCWYWLADLCAEKGISFVLGHALYMKAIHGGKAKNDKVDAHKIAVLLKGGAFPTAYVYPRGMRATRDLLRRRLLFVRRRGELFTHIRIVFHQLNLPAPAGALLEPRHRSGLLETVPEPGVRASVEADLDLAERLDHVIHSIERTIQRQAKVDDPETLRLLKTIPGVGRILGLTMLYEIHDIVRFPRVGDFLSYARLVKSQKASAGKVTGTSGAKIGNVHLKWAFSEAAVLFLQKNPPGQRLMSRLRSKHGKGKALSVLAARLGRASFFMLSRSTPFDMDRFLN

SEQ ID NO: 469919 - protein, 409 aa, unidentified
MRISVGIDIAKEIHWVTAIDADGIVRIDRKLLNTPSDIAALADELTALHGTVRIGLDVIGGIAGLAEAILAQAGFALVHVPGIAINRARQGTVGGENKSDPRDARTIADQVRTRADLRRIEPATEIDLEIRLLVSRRGDLVQAQTQRLSRMHDLLVGIFPGLEACLDLKTKEPLQLLTRYVTHSELRAAGKKRLVRHLQAGGGLPNVDALADRALAAAAEQTIVAPAERMTARLIRELAAEALVSRARIVELDRELEALLGRHHRPLAIRLRSSRWRSHRRDAALIRSLPGMGVVLTAELIAEAGNLSRFRSADALASAAGTAPVLRQSGRTRFLRRPNGGNKGLKRVFYQSAFCSLIHDDSRTFYDRKRREGKRHHQAVIALARRRVNVLWAVLHSRTPFQSGFKTAA

SEQ ID NO: 469920 - protein, 435 aa, unidentified
MSSLVCLDGSPAKGPHGCRSRPENPDKWVQAHALREEPPSALQGTNSGEEVKRVPRYIGLDLHRDYIHGCEFQPEGPRGGQERHFRFPNTPQAWTAFCGQLDRDTQVAFEVTGSAFEVHDSLSPRAGKVLVANPLELRRLGSGRHTDRADAARLAKLLALDAVPTVWVPPQPVRQVRRLLACRERLDSYRRALENQARATLRRHHIRVPPRANVQEWVKMADTARLPAGERAILLATLQAAQALKARMEDLTAQITQRVADVPEVRLLLTLTGVGLLTAAAIWARLGDPHRFSGPKQVARYAGLDPSVDQSGQRDRRGRITRHGDGLLRRMLIEAAWSAARHDTGSLGEFYRRKVKQLGARRALVALARKLLIVAWRMLQTGEPYRACKPALVHRKEQTLRRLLGQPPVWQAIHLHKAVRLPVQDPPVPTQVEGE

SEQ ID NO: 469921 - protein, 411 aa, unidentified
MDVFCGIDWAEDHHDIALAGRDGGLLARLRIGDDAAGLARLLELLAENGDSPDDPVPVAIETPRGLLVACLRATGRKVYPVNPMAVARYRDRHSVAGRKSDHGDAVVLANILRTDLHAHRPLPADSELAQAIAVLARAQQDAVWDRITAHNKLRSHLREYYPGFLAAFAAAKGGITRPEARAILAAAPTPADAAKLTLAQLRALLRKAGRSRGIDAGAQRLRDALRTGQMRQLPLVEQAMGRQALALLRQLDAACHSADDLEQAATESFNLHPDAGIITSFPGIGPLTGARVLAETGDDRSRFTDAKGLKAYAGAAPVTRASGKTRSVTRRHVKNNRLAQAGYIWAFSALTASPGARAHYDRRRGNGDRHAAAQRNLFGRLLGCLHHCLATGQHYNEKTAFPNQAAGPAAA

SEQ ID NO: 469922 - protein, 360 aa, unidentified
MNNNNTLYVGLDVHKESITVAYAINSEPVELMGKIGTSPTDIQNLCKRLRSKSSQVSIVYEAGPCGYGLYRRLVKSGFDCMVCAPSLIPKKPGERVKTDRRDAIRLVRSLRAGDLSAVYVPGIEDEAFRDLARAWASARDDLRHARQRLKSFLLVHGVHYVGRADWGPAHRRWLSKYSFESPWRQLAFDEHRRTIEDRQAQCERLESALKEAVTEWRLYPVVEALQAMRGIQFITAVGLISELGDLTRFEHPRQLMSWFGITPSEYSSGGSRHQGSITKAGNSYARKLLVEAAWSYRHPARISPAIQKRQENLPRPVIDRAWDAQLRLCKRYRKLQAKGKNVNITIVAVARVNRPGNPGD

SEQ ID NO: 469923 - protein, 420 aa, unidentified
MYYVGIDVSKRFHIVCVLGEDNKLLKKNFRVESEIEQFDALYQMLHLIDSDVSQFLIGMEATGLLFENLYLFLKKLGYNVVLLNPYQTNRFREMDTMKYVKNDNVDSQMIAALLKSGRYSKGYVSEDIYQAIKSLYRHKASLMEEMKKAKRQVSTTLAVVFPEFEQIIKDPFSVSGMALLNKYPTAKHYKGASVVRILKVFRNIKGNNFNEEKAQELLDLATLSIYQGNAKEERAYVIHSNLRRIEFLQEEIEQCEKQMFTLLNESNEATKTSISKEDEVYIADLVDNLRSIDGVSDKTIFAILSECGDISRFKTGQAFIGFLGLYPTLMQSGSTTKYGKLAKRGAKLAKLAIYQAAIACVRHNDELKKIYLDKKSLGRAPKECVVIIARKLAMIIYSIYKNNTPYNPARVFNTKASLSH

SEQ ID NO: 469924 - protein, 384 aa, unidentified
MEKTNTSLVLEKEEVLLQPSSFSNTKDGFDSLIQKLSSYSKDSILIGMEDTGHYHFALLKYLLEKNFTVALINPKTTDYTRKMQNGITKNDKLDTLTICDVLDTPVRKKQYRITKVNSFDLYEQKQLTRHHHNLKEELNVYTNRLQKCIDIVFPEFNSLFSSKYGIIYMNVLKTFGSAENIASTDIRTIRKCFEIKGRGNRISLTAQQLKDSAKSSIGISSAAEVIKIKHLISQIELINEQLAETDKKIEEFSIQNNSPILSIPGISHFSGTSILAELGEISNYSKPSKIIKAAGVAPYHYESSQYNAQHTAITKKGSPYLRKTLYQIILPVINNNPVFKQYYDLKISQGKGHRCACGHCVRKLLRIIYHLSSTNQQFDDALLR

SEQ ID NO: 469925 - protein, 335 aa, unidentified
MYHPDLLNLSNTGGFMQVDLVLFGVDVSSLWLDINQYGSASNLHIDNSIEAISEWLEQIPKASIIGMEVTGRYHLLLAKLAFAAGMRVYVLNPKDIHYYAKGVGRRAKTDRGDALLIARYLAAEQPLLREWLPMSQEQEQIHALFLRRSSLVKIRHALMMTTSTLTGVDTELAAALLSMQRLIDSIGKQILHLSKKQGDEYYNRMMAMRGIYGIGPLTAAYLAGLFSRVPFHSSDQAVCFLGMDLKFADSGKKQGKRRLSKRGPSEARRLLYNAAAAAGRGLFKPLLDKFRERLPYAGAVIALARKLVRIAFAIWQNGEEFKIDRFSSPFLTKTA

SEQ ID NO: 469926 - protein, 360 aa, unidentified
MQTKVSEKLFDGQSIYVGIDCHKKNWTVTILGEHYEHKTMSQNPDPDILAAYLRRNFPGADYHAVYEAGFNGFYSCRRLRELGINCNVIHAADVPTGNKEKIQKLDPVDSRKLARSLRGKEFEPIHVPEPFLEADRALVRQRFRVMKDVTRTKSRIRSLLFQFNINVPDRFTAGQTRNWSKVYINWLKELQIEHESLRQTLDNYIRIGELQRKELLSVNRQVRSLSQTDAYRGNYNLLISIPGIGFLTAMTFLVQIGDMRRFRQLDDLCDYIGLVPMMKGSGPKLYTGKMINRGRKELKIMIIEASWDALRMDPALMAKFNELIRRMNKNKAIIRIARKLVSRMRYVLLSHEPYKLGITE

SEQ ID NO: 469927 - protein, 372 aa, unidentified
MTQSNILFIGMDVHKESIVISLADDDRTEVRRYGSIGGTMPDFKKALRKLVSTGKSLFFCYEAGPCGYELYRFIVSQGHQCIVVAPSLIPKKAGDKIKTDKRDADNLVRLLRSGDLTSVFVPNEEDEAMRDLSRAREDVVLALKSAKQRLKSFLLRHNKRFDGSANWSEKHLRWLTEDINMPYPEQKIVFQEYLSSVTEANERVKRMDKEILFYAQQWRLFPVVKSLMAMRGVRMVVAVTIMAELGDLTRFENPKQLMCFLGLTPSEYSSGDKQKKGAITKTGNQHARRVLVEAGWSYRFPAKVSKEMQKRHEDVPLNVRDIAWKAQLRLTKRFRVMANKGKPNNLIVVAMAREIAAFMWSIANEVPILPRD

SEQ ID NO: 469928 - protein, 415 aa, unidentified
MDVLHPRCAGLDVHKDTVVAAARVMAAGAAETTVRTFDTTTPGLLALSAWLAEQGCTHVAMEATGIYGKPVWHVLADGTFSLILANAAHVKNVPGRKTDVADAAWLADLLAHGLIRPSFVPEEPTQAMRALLRTRKQLVREQASHVQRIQKTLEDANLKLSSVLSQIMGKSGRAILTALIEGEQDPDILLGLVERGVKAPPERLRAALQGRITDRHRFLLRLHLRQIDALDAAITEIDAEVERDLGPFRHAIRQLRTIPGISDLSGQVILSEIGLDMSRFPSASHLLSWAGCCPRNDESAGKRRSTRLRKGAPWLKTTLVQCAWAAVRTKGSYLQAQFHRLRQRRGPKKAICAVAASILTAIYHMLRDGTLYQDLGPQHFHRRSPEAQANHLARQITKLGFDCALTPRGEQRVSV

SEQ ID NO: 469929 - protein, 320 aa, unidentified
MRNTVGLDISKLTFDATAIVGNAEYSAKFDNDSKGLDQFSDRLKSLGCQNLHICMEATGNYYEEVADYFAQYYSVYVVNPLKISKYAESRFKRTKTDKQDAKLIAQYCRSAQESELVKRQKPTDEQYRLSRMIAAYAQIKSECAAMKNRHHAAKDEEAAKAYAQIIKAMNEQLEVLKEKIKEQTEKPNCKEGVKRLETIPAIGRMTAAVLFHHLTSSKFETSNKFAAFAGLSPQQKESGTSVRGKGKLTKFGNRKLRAVLFMPAMVAYRIRAFPDFIARLEEKKKPKKVIIAALMRKLAVIAYHVHKKGGDYDPSRYKSA

SEQ ID NO: 469930 - protein, 348 aa, unidentified
MRFYTQQHQYYCGIDLHARTMYNCILDQAGDTVLHKNIKTNPNLFLKTIEPYRDNLVVAAECIFTWYWLADLCAEESIPFVLGHALYMKAIHGAKTKNDRIDSYKIAKLLRAGMIPMAYVYPAKMRASRDLLRRRMHFMRKRADLRAHIKNTNSQYNLPPLGRSFPYRAKRNDVKAQFTDSCVRKSVQVDLDLIDYYDKMIKDLELYIHRSAKSHDAKDQYLLRTIPGIGPILSLVLLYETENINRFPRVQNFASYARLIKPIKESAGKRTGKTNKKIGNAHLKWAFSEAAILMMRERDEAKKFVQRKQSKHGKAKAIAILSHKIGRAVYYMLKHQKPFDPDKFFNKK

SEQ ID NO: 469931 - protein, 321 aa, unidentified
MQTNPAVVYAGVDVAKATLQLHLQGQQSEFRNTPKGLRELCAELQKVPNVHVICEATGGYERALVKRLQQEQLPVSVTNPARVRAAAQAQGQRAKTDRIDARVLTDYGQRYEPKATPPPSATQEQLVAQTQWLKQLIHGRALAKTQAEHHQDPFVRRQHAKLMTHLDSQIEAVEKQIKALLEQDAALQQRVNCLDEIQGVGPRTAWMVLAHMPELGQLNRHEVAALAGLAPWTRESGTMKGLRCIGGGRPEVRLALYMAALSAARCNPVLRTLYKRLRAKGKLSKVALTAVMRRLLTYINQRIKALLSETATAQTEVLQKA

SEQ ID NO: 469932 - protein, 348 aa, unidentified
MDKITAVGLDLAKQIMQVHGIDAAGRVVLRKAVRRERLLALLAQLPRCVVGMEACSGAHHWARELRQLGHDPRIMAAEFVRPFRKSLAAKNDANDAEAVCTAVVQPNMRFVSIKSVEQQALLSLHRIRQGLIEERTATINRLRGVLAEFGVVFAQSAARLQRALPAVLADEERLPALVQRSVQMLREHLHDLDSRVAEFDRGIAQHAKSSAPAQHLVALSGVGPLTASAVVATVGNAQDYRNGRQFAAWLGLVPRQYSSGGKRKLGRITRRGDAYLRALLIQGARSTLQAALRRAPARHDRLSAWIVQLAQRVGYHKTLVAIANKHARIIWALLARDQALDLARTTMR

SEQ ID NO: 469933 - protein, 339 aa, unidentified
MKTHVGVDLHQRFCYCVALDASGRLIASAPVVNQQEALRQWIGKLPAPRQVVMEACGFWPAFQRAVAPVAERMVMVHPLRVKAIASAKLKNDRVDAATLAHLSRCDLLPEAWMAPFAVQELRLTVRRRRELGQKRAAFKNLLQSVLHQQGLIKPCTDVFGKRGRAWLAEVEMSPAARAAVDGHLRVLATLDEEIRRLERELKTIAANDARARWLMTMPGVGAYSALMVLAEMGDPARFANKRALVNYAGLAPRVRESAGKAKRGHISRQGSEHLRWIMVQAAQIAARCSPPVKAAYLRLKLRKPPQVAITIIARKLLICSWALLRHGVCFNPEEFMHTN

SEQ ID NO: 469934 - protein, 361 aa, unidentified
MAKARTLVGLDVHAAKVVAAILDTESGELRFRALGGESGPVVDLCRVLPGPVRATYEAGPTGYGLARALLDAGADCLVAAPGKIPRGATDRIKTDRRDAEHLVRLLLAGKLQPVRIPGPAEEAMRDLVRAREDLRMDLMRSRHRLSKLLLRHEIRFEGPGGNWTDRHRSWLAGLSFEDAAAQATFEDYLGAVDSLLHRRGEIERRIGGLIPTSPWAREVGRLRCLRGIDTLTAVGLCAEIGDFARFGKAGQLMSYLGLVPSEHSTGQSRRLGSITKSGSRHGRRLLVEAAWHYRSAPRVGRMLERRQEGQPATAIAVSWSAQRRLHRTFSTMRRRKKRSTVTAVAVARELAGFCWAIALIE

SEQ ID NO: 469935 - protein, 416 aa, unidentified
MPLALPDALFFTGIDWAAETHAVCMLDTAGKIAAEFTIEHSADGIAALLRRLARYGDPGGMPVAIERPDGRLVDLLLEAGHPVVPARPNAIKAWRDGEVLSGAKSDAGDAVVIAGYLRLRAHKLTVAVPCSDETRALRTVVRTRGDLVEMRVAATNQLSALLEAHWPGARAIFADVESPISLEFLTRYPTPAAAAHLGEKRMAAFCVKHGYCGRRSAAELLARLRAAPAGTGLESLAEALRDAVLAAVGVLRALNASVKNPGRSIAAHLGEHPDGAIFTSLPRSGQVSAAQVLAEWGDCRQAYEHPDSVAALAGVTPVTKESGKHRAVHFRWACNKRFRVAITTFADNSRHASPWAGKTCNDARAAGKDHPHATRILARAWIRVIYRCWIDGVPYDPARHGAAAALAEQSAKQIAA

SEQ ID NO: 469936 - protein, 405 aa, unidentified
MPSSSRASRRNAKNALKLKAQARKRADSATSPVELEKLEPIHRRAAGIDIGSAENYAAVPPETVAPGESSVRVFGVFSEQQDALVEWLRSCQISTVAMEATGIYWLTLYDKLEGAGIEVYLVDPHGVKAVPGRKSDWLDCQWIQKLHTYGLLQRAFRPDAPIRRLRTLTRQRTELVCAGASQQQHMEKALVCLNLQLGLVISDLAGETGMAIIRAILAGERDPEVLVQHRSARCTKASIGEMKQALRGTYNDEDLFVLQQSVDTWDFLQEQIGECDGKIELALNAIPTARAVEVKAPPLPVAAAADQPKKKTKGTASKNAPAKDFTPILQRICGVDLTQVMGLNLLSVLMLLGEIGTDMTRWRSAQAFCSWLGLCPGAKISGGKVLSRRTRKVTNRAATIHVWRQ

SEQ ID NO: 469937 - protein, 444 aa, unidentified
MNEQMPPIAVAAAAAPDVDDPAQAFGQLTHYGGFDWAKAEHHALVVDRQGHIVLSLRFANDADGWAHFRRKVAAFPGLGIAIETNCGPAVERLLDMGLTLYPLNPKAAERYRDRKAPAGAKDDALDAWSIADGLRTDGHGWRPLRPQDPLTTELRLLCRDEVALIEQRTALVNQLKAALHEYYPAALDAFDDWTGEGPWRFVITFPSPDVLVKAGRRKQERFLHANKLYRPQTAEQRLSAFAAAKAFANPNAAVTRAKMLLAVTLAKQLCSLESQLREYRARIIELFDDHPDHDCFGSLPGAGAKIAPRLLSELGANRAVFATAEALQGYAGTSPVTKQSGRSRFVIVRRACNKTLRATVHLWADLSRKSCVWAEAYYQKKKADGMGHAAALRCLGQRWVKILWTMWRNHAVYDEATHTRNQVRHGSWVVGLLPTNPAPTTAGR

SEQ ID NO: 469938 - protein, 320 aa, unidentified
MASRESLFIGIDVSKQTLDVAFGADPHAPRETIPSTDEGVQLLVTRLQRLQPTLIVLEATGGLERMVFAQLLQAGVPTARVQPRRVRALAHAEGRQAKTDRLDARLLARFAERVRPPHHQATDEQRASLRDLLVRREQVIQMRTAEINRLTAAAPNLRPGIQQHIDWLDQEIRALEQERDNEAERTDEVRRKRELRESVPGIGAITALNLLLRLPELGTIKRTEAAAVVGVAPYANQSGAQHKPRHISGGRRDVRSVLYMATLAATRRRLVRRAFDQRLCQAGKPRKVAIVAAMRKLLTILGAILRQQKPWDPAVHTSAP

SEQ ID NO: 469939 - protein, 473 aa, unidentified
MAKGSGGSGMTRGDRRRNARRERLRELLPRDGAVIGIDLADVKQALAVIDHDVRVLARKTVRVKAFRLGEALDWAVAQARAKGFAQVTVACEPTGPRWLQVQRLCAERGVPLVCIQPLVSHIAREQQDFTTHKTDESDCVMIARLAVELHCYIPEELDESWAQLRHLGRRRAQLITAATASVQRIGDFLSVAWPTVTETCAGPFESVTWLAAMQLVTSRCGGQPARLAAMGEEAFTAAVRAAVRDWAGQKAHGPISRRVFAALADTEGVVVSSRRGLLRRVADELGDLQRTRAQLRATEADMVAVLDELGLSRLAGIPGLTAVGAAAILAETGDPRRYDNSSSLVKHAGMSPSDNASGAFSGQAHISRRGRPGLRLVVWRAVWPMLQYNPVMAAKYQVMTRAADTAAAGPAPQHGTAAAAAARARRAKARVACAASLLRWIYCMVIHDTSWDPAVASGAASWHDAPRARAEAA

SEQ ID NO: 469940 - protein, 417 aa, unidentified
MSDDIRWFAGVDWASEIHQVVLVDAHGTVTGEHTFPHGGEGLGAMCDWLLTATGTSAEAIAVAIEVPHGPVVETLMERGFPVHAINPKQLDRFRDQFTVAGAKDDRLDGRVLADSLRTDRHCFRPLHAADPVTVELREWSRMAEDLRQERNRLSNRVREQLWRYYPQLLKLTDDAGADWFLALWTLVPTPAKATRVHKSTIERLLKAHRIRRIGADEALTTLRQKPIQVAPGTTEAATAHIRTLAVRLKVVNRQIKDAHRQLDALCAKLAGPEEVEPGQSHEQRDVTILRSLPGVGRIVVATLLAEAWEPLRERDYHALRSLCGAAPVTRRSGKRCVVVMRQACHVRLRTAIYHWARVAIQHDELSRRRYRELRKRGHSHGRALRTVADRLLAVACAMLRTRTLFDPARASVLKEAA

SEQ ID NO: 469941 - protein, 353 aa, unidentified
MQIVSALDVHRRQITYKTLDLGSGEVRRGRVSPATRESVREWLEPFAGLDAHFALEGTTGWRFVVEEIERAGHRAHLADPAETAAKRGRKRRAKTDNADCDLQLKLLLAGELPESWIPPAHILELRTRVRVRKTLIDQRTAWQQRLQAQLFHQGIPTGLKPRTRAGRDALAKAELSAAGRELVALALRMLETIDRELVPLDRDLRAFARRHPGCRALISNLYGVGAITATAILAELGDARRFTSSDDAVRHSGLDVTVYQSDSKRAPGHLSHEGPELLRWALFEAAQSAARQTSPDHAYFLQVKQRIDHNRACLSVARKLCRRAHHILRQLGNDALAPLEELPAEKEIVRPAA

SEQ ID NO: 469942 - protein, 370 aa, unidentified
MYKAGQVATKLEGDSIMDEKQLYWVGVDVSKDDFDAAVVEPGQHPSAEVVRGLPAQTFRRDPKGVREFVRWLRNLVPASKPLAVRVVMEATGGYSIELAAMINKRCPDLFPSIANPQWTKAFRDSLGLRNKTDRLDARALAFYGLSHQPDPYEPLSPPQADLRSLSRCRSNLVNDRVAHQARLKQKPASPVSRNSYKEMVALLNKKIKELETEMLRVIRSDANLKRDYALLMTIPGVGFVTAATVLGELGDLRRFGSSRQIGAHAGVTASHNDSGKSTPPARMSKKGNSRLRHALYMASLSAKKYNPHMKVVYQRLEGKGKAKKVALGAIMRKLIVLMRAIVVSGRPYDRKRKTQCKNAPGNLATPSKLA

SEQ ID NO: 469943 - protein, 428 aa, unidentified
MRKQKLIRHKQYCQIVKEITRSDQYMVVGIDIGKDQHHAFMGTATGKSLFRKLIFENNIDGFSRLLKTADEIKLQNDFSKIVYGLEPTGNYHKPLARHLIRCGSNVVLVSGEAVKKNRSLLDGRWDKHDTKCAANIADLVSRGRCLYYDSPSPEIIELRSLLSLRKRLKREEHSLRMRIRNNLLTQYFPELDRFYSACESESLAIVKWCLDPDQIAGMAFEPFFQMVTQIRRGPAQLLRLRKIYQQASESIGCPMGSAAAFEAQLLVDKLKQVRQQLKDTEAAIKEDALKFEEYSCLLTIPGFGPYISAKVLASIGDPFRFRNRKQLIKMAGYDLCANRSGKTSDKAIPVISKKGNSELRYALYQAAKVASTKVDLFRTYFTELLRGRERERGIKTKMCVKLAAKMLIIAWTLMKKREPFDPEYLTIE

SEQ ID NO: 469944 - protein, 323 aa, unidentified
MQGQKSPERSAEPGVYVGVDVCKDWLDVYLHPIGQKFRAANTPEGLKALKRRIADLPVELIVMEATGKFHRQAHRTLHAAGLAVAVVNPLRARLFAEAVGQLAKTDRLDARVLALMGQALEPSALAPAPEALEALQELARARAAAIADQTALSHRRGASQTAFLKAELGRRLKVLAAHIERLDAEIERRIGADAALKRRYDIVLTIPGVGPVAAVALVIGLPELGACSGKAAALLAGLAPLACDSGEKAGERHIRGGRAFVRTGLYLAALAAARCNPQLSDDYKRLRDAGKKAKVAIAAIMRKLVGLANVLIKEDRPWRPIHA

SEQ ID NO: 469945 - protein, 378 aa, unidentified
MLNNTILAIDLGKYKSVVCIHDVDSGEFAFTSFTTCRAELEGLFAKHQPSVVIIEACLLAGWVYDHCGQVGVRCLVANTASEAWKFKHLKRKTDKDDALRLAQLYLLGQLPTVTLPSAAVRQWRSLLATRQHLVGRRVATQNRIRALFVAQGLPAPRGARAWSTSGLAGLTAHAKPLADCVPDQLWRGLLDVALIEYRQVNELIAQTETRLDALGKANAAVKLLQTAPGLGPRTAEVIVAYLQDPQRFETGKQVSAYSGLVPRQHQSGEMDRRGRISKRGPALLRKLLVECAWCMVRYNAWARGFYLRLTGGGQRRKKQAIVALARKILVRAWAMLRDGKAWHDPQAGPKAALAPSKQKRQAEAQRRREAKAVAATGT

SEQ ID NO: 469946 - protein, 375 aa, unidentified
MIDQEGRQLAKTLRFTNTTSGAESLLAFITGNNAEKDVVVIGMEATGHYWLSLYCFLFDAGFQVNVINPIQSDAIRNLFLRKTKNDAKDSFLIAETIRIGRFSKTDLADEDILSMRQLCRHRMDLVDYIADQKRKIIGVLDRVFPEYQNFFSDTFGKTSTELLSKAATPEELLAIPTEELCKLLRENSRGRFGEAKAEELRNAAQNSFGITIGTAAFTMQLRQLLEMIELLERQLIELETEIEQYLVKLDTPITTCPGVGKVLGAVILSEIGDITRFPEPKKLVAFVGIDPSVRQSGEFVGTQNKMSKRGSPHLRRAIWLAATVAAFHDPVLSTFYQKKRSEGKHHYTAIGAVARKLTFIIYAVLRDNKPYVPNC

SEQ ID NO: 469947 - protein, 347 aa, unidentified
MKSKKNRKTQQTTWIGIDVAKKSYDAAIYLPLGSDDKPRSIIELPKNTFERTEKSIKAFHNWTYQIRDKAGVPGGQMRIVMEATGRYSQELADWFRCEMPFTKPVILNPKTVSDYRKSLYKGNDTDAIAAAALARFGAERQPEEAIENPLEYQHLRELTRQRLKMVEQRTAAYLRMEEIKEIKIIADVQQDLIDTLNKSVEKLDSEIRKCVAKSDELRENAVYATSIKGIALTTAASVFAECGRLENYRSRQLGGYSGLAPFNHCSGTSVNYAHISRQGPKQLRQALYTPMTSILRHNPEMRAFRQRLIDKGKTPMQARCAVMRKVLILIRALVVNKTMYQENFHKI

SEQ ID NO: 469948 - protein, 347 aa, unidentified
MEYFAGLDVSLETVNVCIVNPAGDILLEKKIAAEPAAIIHLLKSFGSPFKRIGLEVGPTSSWLYGELRAAGYGAVCLECRHVKAGLSAMRNKTDRNDARGIAQLVRLGWFRQVHVKSEEAQRTRMLLVNRQQLLTKALDIENSVRGSLKVFGLRIGVVARRGFEARVLELVADDPIVLAVTKPMLRVRRALLEEFERLDRLCQQLARRDPVCRRLMTVPGVGVVVALTYRTGVDAPERFSKSRDVGAHFGLTPKRYSSGQTDYDGRISRCGDEMVRTALYQAANVLLHHGRWSSLRSWAMRIAKRGSVKGAKVALARRLAVVMHRMWTDGTDFRWSDTSRMTVPTAA

SEQ ID NO: 469949 - protein, 399 aa, unidentified
MISVGIDVSKGKSTVCVLKPYGEIVCRPFEMQHVEKALESFHNMLQKLDGEIRIVMEATGIYHLPVLTFFHDKGYFVSVVNPFAMKKYAKDNSIRGAKTDKLDSIMIANYGIEKWFKLQGYEGEEETYAELKLLGRRYRHYMEFHVKALQELTHVLDYVMPGIKKLFNSWTEASGKDKLSDFVERFWHFDLITSMSHEKFIEEYLAWAKEKKYHQSSSKAEAVYELASSGISTLSSSTPSTKMLVQEAVSVLRTVDSSLSLILTRMQILAKSLPEYSTVREMGGVGDVLAVKLIAEIGDVRRLHNAKSLIAWAGIDPPPYESGQFIGSKRKITKRGSSTLRKVGYEVMRVLKTHAAPKDDAVYNYILKKESEGKSKKHAKIAGLNKFLRIYYARIIAVH

SEQ ID NO: 469950 - protein, 358 aa, unidentified
MIAMKYYTSTTQFNCGIDLHARQMYVCLMDQNGHKLVHTNIRNNDFDYFLKLIEPYRHSLTVCAECMFGWYWLADACQAAGLPFVLAHALYLKAIHGGKNKNDRLDSEKLAHLLRTNLIPPAYVYPADKRPIRALLRQRILYVWRRSELLARIQSHQLAYNRPPLRQTRPNRDPWAERLLAQEDNPVRQLALQNDLALIRHYDAQITVLEEQLHKLTRAAAWRDYTLLQTVPGIGEHLGLTILHEIGDIERFPTVKDFVSYCRLVKGTVASAGKIKGLRGAKLGNPYLRWAFGEAAVIAKRDHATIGPLAQRLEARMNGNKFKANTVLAIKLARAVYFMLRSHTVFDPDRLVAALARH

SEQ ID NO: 469951 - protein, 343 aa, unidentified
MEYYAGIDVSLKESSVCVVDTAGKVVREVKVASEPEALVRYFDELGLPVSCIGLEAGPLSQWLHAGLMAAGRDAVLLETRHVKAALSAMTVKTDRKDARGIAQLLRMGWYRPVHAKSAPCKDTRALLAGRKLLQAKLLDVELSIRGILRGYGLKVGEVSRGRFEARIRELTAGHAILETVIGAMLAARMALWNEFTRLHREMLKIARADRVCRRLMSAPGVGALVALTYRSAVDDPSRFEKSSAIGAYFGLTPKKYQSGETDRDGGVSKVGDGMVRTALFEAAHIMLTRAVRFSSLKRWALGVAQRRGMKRAKVALARKLGVVLHRMWVEATEFRWSNAVPAA

SEQ ID NO: 469952 - protein, 349 aa, unidentified
MKIIGCDFHPGYQQIAMLDKESGELLEKKLSHSHEGEEARKFYAELAGPVRVGLEASGQSQWFERLLAELGHELWIGDAAKVRASTDRKQKTDRRDAELLLQLLEEERFPRIWVPTPTERDVRQLLLHRGKLVRVRTQVKNQLQALALNQGVQRKRKLWSAAGRKQLENLPLLPWANRRRAELLKLLDELEESITALDGAVSQEANTRPAVRRLMTHPGVGPVTALAFALTLGPAERFRRGKQVGSYFGLIPSEHSSGGKQRLGHISKQGSSFVRGLLVEAAQSAVRHEPQLRREYQRLSQRKCRALAKVAIARKLAVRLYWMLREEVDYAQFIQGSHAGQPESFRGRS

SEQ ID NO: 469953 - protein, 445 aa, unidentified
MKDEPEITADDSQQAEHISAGIDIGTEAIYISIKGQPVKNFATFTEDLIDAARYLRQHGVTVAVMEATGVLWLPLMEILETFAIDPYLVNGAHARAIGGRKSDVQDCQWLDHLHRAGLLRRCFIPEESIRQLRTYVRLRDDHIGIAASHVQHMQKALELMNLKLHNVISQIQGASGMRIIKAIIAGERDARKLVALCDKRIRTHKHDAVVRSLQGFYKPEHVFALRQAVECWEFYHQQIAACDHAIGQLLEELTQELPPAPPPTHARKPIRHHRPDIDNLDDKIVRLSNGRDATQIPGLTALTVMQAISEVGTDMTRWPTKKHFTAWLGLAPRRYASGKRKRDRRPKTHNRVAQIFRESAQSIAASKHLALRGFYYRIRAKAGPKVANVATARKIAELFYNTMRYGIDYVEQGLERYDAQYRAQQIRSLEKRAQQLGLTLASLPT

SEQ ID NO: 469954 - protein, 338 aa, unidentified
MSIVFVGIDLAKNVFAVHGVGEAGKPALVRPAVPRARLHELIASLAPCTVAMEACTGAHHWARLFAAHGHTVRLIAPKFVAPYRMSGTRGKTDAADAAAICEAVQRPNMRFVPIKSEQQQSQLMVHRARQGYVQARTACINRIRGLLAEFGHVLALKADTVRRQAGALLEDLPGWANTVIGDLLSELHRLDERIAQYDRHVAQIAREDQRAQRLMALPGIGSTTATAVVAMIGNGHEFNCGRQFAAWLGLTPGQYSSGGKTRLGRITKAGDGYLRSLLILGARAVLARAKASSDGISSWALALQQRRGYWKAVVAVAAKNARLAWAVLRSGEAFKMPA

SEQ ID NO: 469955 - protein, 342 aa, unidentified
MKYTPVGVDSVDIAKHLIQVHLIDENTGDVIDKQLRRQDFLMFFCNREPCLIGMEACGGSQHQARELTKLGHKVRLLQASFVKVFVMGNKNDVMDARAIWMAVQQPGKEIVVKTEEQQSVLVLHRTRMQLVKFRTAQINALHGTLLEFGETIHKGRSAMERELREALERMKERLPPYFITVLEDQYNRLSNLDSLIEDIEKQLTSVAKQNETCKRLLDIPGVGPLIATAAVTTMGEASAFKSGREFAAYVGLVPKQTGSGGKVRLLGISKRGDTYLRTLFIHVARAVALLTKEPGPWITELKKRCPASVAIVAMANKLARMVWAISAHGRKYDRNHVSIRPY

SEQ ID NO: 469956 - protein, 341 aa, unidentified
MGIVAVGIDLAKNVFAVHGIDETGKVVLRRPSVKRDQLLELFAGLPPCLVGMEACSGAHDWARKFNALGHDARMMAPKLVAPYRDGGKRKKNDAVDAEAICEAVQRKKMRFVPIKSEEQQSRLAVHTAREGYVTQRTATINRIRGLLTEVGIVMPKKAETVRKLAQQHLEDLPGYLNQVVNDLLDELSRLDQRVAQYDGMIKEMARQDSRSQRLMQIKGIGEVTASAIVALVGNGHDFKNARQFAAWLGLVPRQFGSGGKVQLGRITKVGDPYLRKLLVMGARAVLNAAEGKTDRMSTWALQVKERRGYDKDLIAIAAKNARIACAMLSKGNDFRQSLKEA

SEQ ID NO: 469957 - protein, 386 aa, unidentified
MLYVGVDISSESFDVCFYLPEKKKMKSMKYKQDREGFREFLKKLNAYKDEKQVGMEATGSYHSNLYGFLRSKGIDVQLLDPYTLSKFMKAMSRSKTDKKDAKSIAVAMYRIFDLLSVSQVPEEEMSAFRDLVRMRSTVVANCSDLQRKLKSKLKIHMPELLKTFRSVSSPVLLHLLSVYPSREEILANEEDAVKLLSSHRNWSEKKAREVIDSLKDSIGKPDTFGTYSTITSTFIAEIKLLKDHVEALNEEIKRFLEKFPDNPLRTIPGIAEVTEAEIVSEVGDIDRFSSGKAFVSYIGLDPVIKQSGNMTRGLSISKKGNKHLRRTFYHLAKNLIANTEKYRNKYEKMKKRGVKNKVALIATARAAAEMVYQLLKNNVPFDLSLS

SEQ ID NO: 469958 - protein, 384 aa, unidentified
MSELNDLSRSLTSLEQDKTIIAVIEMSQSSWLVAGIIPGIERHPLKKLEPSEEELVRLLMRWRTEATKNGQTITRFAVAFEAGRDGFWLARWLRARDIETYVIHPTSVAVSREHRRAKTDRLDTGLLKRVFIGWLRGEPDHCHMAAIPTLAEEDAKRPNREREGLVQRTRIVNRMKSCLARFGIRKFKPTLRKAPERLATLGTPEGVPLPPNTLLELRRDMARLRFVMDQIKEVEEARAQRLEQAPQEKTHAMVRLIARVIGVGIETADMLVHEILSRQLRDRRAVARYAGLTGAPDESGNKRREKGLAKAGNARVRRGMIQLAWRFLVFQKDSALARWYRTRTESAGKKRKTMIVALARKLLIALWRLVTIGEVPAGVVLRAA

SEQ ID NO: 469959 - protein, 366 aa, unidentified
MSEGTTFVALDDSKRKVVVAILRPGATELEQRELPKEPHLIRRLFQRLTREGPVRACYEAGVSGYDLHRQISACGVACQVMAPALTPRRSGQRIKTDRRDAAKLVRLFRAGELTPIHIPNEAEEAARDLLRCREDVRRDVLRWRHRLLKFLDRHGRLYVTGKNWSQRHWTWIRGQHFELPTLQRTFEASLFALEQALARVTDLDKDIVALAATEPYRTPLGWLRCFRGIDTLSAMILLVEIVDFQRFQHPRELMAYLGLVPSEYSSGEAQRRGAITKTGNTHARRVLVEAAWHYRHRPTVGGALRQRTADQPSHIVGHAWRAQQRLHRRYRHLLGHGKRPPIAVVAVARELVGFLWAAMTQRVVAA

SEQ ID NO: 469960 - protein, 354 aa, unidentified
MAQSSTLYIGLDVHKEAIAVAYAAKDYGADVVYLGSIGTRQCDIDKLVRQLQSKAKRLVFVYEAGPCGYWLYRYLTKKGYDCWVVAPSLIPKKAGDRVKTDRRDALQLARLMRSGDLTPVYVPKVEDEAIRDLCRAREDVLRDLKAAKLRLKAFLLRHDIRSTGQATWNPAHLRWLSEVVCPTPAQQIVFQEYVRAVNEQTERLQRLEQELQEQVKSWRLNPVVEALQALRGVQFTVAVTTVAELGALTRFENPRQLMGYLGLTPSESSSGERRRQGSITKAENTHARRALVEGAWAYRYPAKVSRHLQLRLENQPKAIQDISWKAQVRLCTRYRRLLARGKHANQVVVAIARE

SEQ ID NO: 469961 - protein, 358 aa, unidentified
MKRSSKYVGLDVHQATTVCTVRDDTGRILARTVLPTEAAAVVEYFRSMRGAIHVALEEGTQAQWLYDLLGPVVQQVIVCNRRGARYEGNKADQSDADELADLLRCGRLRSVFHGAADRATLKELARAYTNLVEDSTRVMQRMKAVFRARGIRTRGTAVYQATQRATWLRQLPDDGARFRARALYRELAVLQELRPEARAAMIREARRDPAWRGLRTVPFLGPVRVALLLATLQTPWRFRTKRHLWAYAGLAVVQRASAEYELDGQRRIRRRRRAGMTRGLNPNHNRTVKAVFKGAATAAATRPGALQDWYQELLKRGLREELARVTLARKLAALTLRLWKHGGRYDGTQLTVQAGHAR

SEQ ID NO: 469962 - protein, 355 aa, unidentified
MDSNKYIGMDVHQATISVAVRDSAGKLVMESVIETKATTILEFIRGLRGSLWVTFEEGSSAAWLYDLLKPHVAEVLVCNPRKNALLKAGNKNDRVDARKLSDLLRAGLLSPVYHGESGVRTLRELARSYLTITKDLTRVMNRVKGLYRSWAIPCAGQKLYSPRHRGAWLEKLSEAGVRRRAEQLYQQLDALAQIRREARRGLLSESRKHPVSQLLGQIPRLGPIRVAVLIALLQTPHRFRTKRQLWAYCGLALQTRISGEYRVTEGQMQHCKRAPALRGLNVNHNHDLKALFKSAATQAGAGKDPLGDFYENLLSKGMKPAMARLTLARKMAAIVLQVWKKGEAFDPGQLKRQSA

SEQ ID NO: 469963 - protein, 335 aa, unidentified
MLLTGPNGHVHREVRTFGTMTIDLLALSDWLAACEVTQIAMESTGVYWRPVFNLLEDEHRALVLVNPQPIKAVPGRKTDVKDSEWLADLLRHGLIEPSFIPPAPIRELRELTRHRKALVQQRTQEVNRLQKVLEGATIKLASVATSMLGKSAREMLEALLAGEADVAVVANLARGPMRAKIPQLRQALRGQLQPYHQILLRQILAHMDFLEAAIPRLEGEIEQRLRPYEQAVQLLQTIPGVKAVAAATLVAELGVDMTQFPSAKHLASWAAVCPGNKQSGGKRLSGKTRRGNAWLKAVLCEVAWANARSQTSYIGAQFRRLTRRRGVYQDPASLP

SEQ ID NO: 469964 - protein, 341 aa, unidentified
MQIHSVGIDLGKTTFHWVALGAAGKVLVRKKFTRKQLLAYTANMQTSLIDLEACSAAHFLGRALRKQGHEVRLIAAQFAKPFVKSNKNDFVDAEAIAEAVERKNMRFVPIKTDDQLDLQAIHRVRDRLISRRTAVINQLRAFLLERGMVFAQKAARLKAADILENAEADLTPQMRNLINILWSEWRLVEQQIEELNNELERVSANDAGCTRIRQIPGIGPVVATAIVAAIGNDAAFRKGRDFAAWLGLVPRQYSTGGKAKLLGISKRGNVYLRKILIHSARAAVLRIKRDRAPIGTWLDALDARAPKNVVVVAMANELARIAWAVLSSGNDYRPTANAMAA

SEQ ID NO: 469965 - protein, 344 aa, unidentified
MNVTIIGLDLAKNVFQVHGVDARGATVLRKQLKRDQVAQFFARMEPCLIGIEACGGAHFWAAKLNALGHRVKMMAPQFVKPYVKTNKNDSLDAEAICEAVARPNMRFVPAKSAEQQAVLSLHTARESFVRARTAQANQIRGLLMEFGLIVPQGIRHVCQRVPELIEDASNELPGRFRMLIDRLLQHLKELDRQVHELEREIEQWHRGSEVSRRLETIPGIGPMTASALVASAGDPSNFKSARQFAAWIGLVPHQNSSGGKTQLLGISKRGNVYLRTLLIHGGRTLVQLAKTRVDQAESWLGRLVSRRHHNVAAVAMANKNARLAWALLSSGKSYEPMHIAVHAA

SEQ ID NO: 469966 - protein, 446 aa, unidentified
MEILYTHCAGLDVHKKTVKVCLLTQGANEQPHKEFRTYLTTTQELLKLSDWLHEQGCTHVAFEATGVYWKPIFNLLEGHFELLVVNAQHIKAVPGRKWIADLLRHGLLKASFIPSGPQRELRDLTRYRVKLTEEKAREINRVQKTLEDTNLKLGDVGSSIMGKASRMILHAIADGEKDPSRLAAFAVGRVRASQEQLEAALKGHATDHHRFLLREHLTQIHHLEQAIDRVTAEIIRRFTPPSSPEEPTSAAEKEDETTPERTSDPPSASPEGAVPPKAALSWAQAVVLLSSIPGISERSAIGILAEIGTNMQQFPTAAHLASWAGVCPGNHESAGKRLSGKTRKGNLFLRCLLVQAAHSASHQKQCYLAEQYRRIAKRRGAKRAAVAVAHSILVIIYHLLSDQTTYLEKGETFFEERDREGTQKRLVRQLSRLGYQVELQPITQAG

SEQ ID NO: 469967 - protein, 461 aa, unidentified
MRKARKVAGRRGKKRVDVTANLEILHPHAAGIDVGNAQHYAAVPVGRDPQPVQTFGSFTADLHRLGQWLRACQIETVVMQATGVYWIALYEVLESYAFKVYVVNAKHTKTLPGRKTDVWECQWLQKLHTFGLLNNSFLPPEEIRVLRTYLRPRENLVAGAGTCIQQMQKVLTQMNVQLANVLSDLSGKSGLEILKAILSGERDPYRLAALADPRVQASRKEIAQSLEGHWREDLLFVLRQVHDLYFFHLDNIAECDRRIEAHLQTLQSKVDLASQPLPQPTSLPRRKHIPQTNLQEELYRIAGVDLTRIDGIQVQTAQVVLSETGVNMTHWEDEHHFASWLGLSPNHQITGGKVIRRGTKKVLNRATTALRLAAQTLHHSQSYLGAQYRRLRAKLGAPKAITAMAHQLARLIYRLLRFGTEYHDKGMEHYQRQYRKNQIEWLKRQAAQLNMQLIPNTGVAR

SEQ ID NO: 469968 - protein, 355 aa, unidentified
MSQEKYIGMDVHQATISVAVMDAHGKLIMECLLETKASTIVEFIQGLQGTLSLTFEEGTSAAWLHDLLKPHVSRLVVCDPRKAALLKEGNKSDRIDARKLAELLRTNQLKPVYHEEHGIRALKELGRSYLTITKDVTRVMNRIKALYRSWGIPCSGTSVYAPRHRAEWLAKLVEPGVRVRAEHLYRQLDSLQPLRLQARRELLQESYQHPAVKLLRQIPSIGPIRAALLVALLQTPHRFRTKRQLWAYSGFAVETHDSGEYRYVRGKRQRNRERITVRGLNDNHNKDVKNLFKSAAISASTRPGPLHDCYVARVEKGMRPTMARLTLARKIATITLTIWKKGVSFDPKHLHRQAA

SEQ ID NO: 469969 - protein, 384 aa, unidentified
MKKNTIVNLQVTKSQIRRMAAKQRLTVGLDLGDRSSRYCILNEAGEKASEDQLPTTKAGLDSLFAKMAPCRIALEVGTHSPWVSRHLAAMGHEVLVANPRKVRLITQSVKKNDRMDAEQLARLARVDPQLLAPIRHRGPEAQGDLAVIRARAELVDCRTALINTVRGLAKPMGERLKSCDADYVKESLADGLNEATQNAIRPLLKSVEEITKQIGVYDKKIQEIEKRYPETKLLKQVNGVGTLIALTFILTLEDAERFEHSRDVGPYLGLTRKQRDSGDSQPELGISKAGDVLLRRLLVQAAHCILRDGAPDSDLKAWGLTKVQAGAKTGSGKKGSKRRKKKAAVAVARKLAVLLHKLWVTGEVYDPQYNRKAVEAAKGKAKAA

SEQ ID NO: 469970 - protein, 370 aa, unidentified
MKKRITFVGLDTHKNSIEVALADEGANSEVRLYGSIGGDLDSLDKMIRKLRIPGAELRFVYEAGPCGYEIYRHLRAQGLHCDVVAPSMVPRRSGDRIKNDRRDACNLARLYRAGELTAVYVPHEDDEAMRDLVRGRQDAINAQRKARQQLGGFLLRHGVRYPGKCLWSLAHGRWLAGVKMPHPAQQIMMQEYIHTVEECTQRVIRLNEQIQQLLPDWRMHPLVAALQALRGVAPVVAATVVVEIGPMGRFKNPRQLMAYLGLVPSERSSGGSVRRGAITKTGNGHARRALIEAAHSYRHPARISRTILKRQETLTEPVRQIAWKAQLRLCARFRRLIARGKSRNRVVAAVARELSGFMWAIAKQVPVPQG

SEQ ID NO: 469971 - protein, 317 aa, unidentified
MNHEDTFVGIDISQQRLDVAFWPSRQTALFPNTPAGRGQLARRLRARPVALVVCEATGGLERPLVERLERAAIPIAVVNPRQARDFARCTGRLAKTDRLDALVLAEFAATLKPAPRPRPDAAVVNLSALVARRRTLAAQRTAEVNRFQRERNLLVRRSLRSSIAALEREIKKFERHIAAQLAANPELDHKRRLLESVPGVGAVTSAALLAHMPELGQGNRQGICSLAGLAPVNHDSGLHRGQRRIAGGRSLARSALYMAALTAARRNPALAPFYRRLIAARKPPKLALAAVMRKLLTILHAILRSNQPWRLPVPAGA

SEQ ID NO: 469972 - protein, 408 aa, unidentified
MNPLFVGIDVSNRNNVAYLMNPDGSKYSSFSVQNNLGGAKLLSERIVSALSSMRLSDVVIGLEATSIYGDSLVYALREDGSLGRFQRKIHVLNPKQVRKFKEAYPDLPKNDFVDAFVIADHLRFGRIAKEVYMDDYRYQALRTLTRARFDVIQNLTREKQRFANYLFLKCSGMAQDKDIQNTSATTIALMERFETVDDLANEDLDELTAFIAKTSRGRFADPNAVAKVIQSAAKGSYRLPKTVNDTVNQAMSVSIASMRALKEQVKVLDKAIEQQFEIIPNTLTSIPGIGKVYSAGIIAEIGDIHRFDSQASVAKFAGLVWHKNQSGDFEAEHSQMIKSGNRYLCYYLLEAANSVRRCDSEFRRYYDLKFKEVNKYQHKRALALTARKLVRLVFRLLKDNRLYIPPEG

SEQ ID NO: 469973 - protein, 448 aa, unidentified
MRWIGMDVHRDFCEVAVGERGKLRSVGRVSTRVGALTALAQSLLPDDVVVIEATTGSDRIVSVLEAHELRVVVANTRKLKAISDAKAKTDRLDARTLAKLGMARMLDPVWTPDERTRTLRRLTNRRERLVRARTRAKNEAHGVLSRNLCERPPVTDAFGKAGRAWFAQLELPTDERLTLDGCLRQVDFFDAEIAALDREIAKTALQWPEIQRLMTVPGVNVQTAATFMASVGDIHRFSTPRKLVSYLGLDPRVRQSGNTPARHGRISKAGASEARHMLGEAAWKVTLTPGPLRAFYLRIRARRGPQIAATAVSRKLVVLFWHLLTREQDYAFARPAMTRNKIRKLELLAGAPPQKGRHGIAGGKSKQVFEAERELSRQAEAAYRRLISDWTASGPAKDGAGVTRGRASQRPSKGKAARQAKSPETCSSLGQSPAPPRQASHRNTPSAT

SEQ ID NO: 469974 - protein, 363 aa, unidentified
MSDGICFAGLDVHARKTAAAAVQLGSGEVFRAQLSGSPVAAIEWLRTLPGPVRAVYEAGPTGFGLARAAWASGIEMMVCSPGAIPRQPGDRIKTDTRDALKLARLHAAGQLRPVVVPAPELEALRDLVRAREDLRGDLMSARHRISKLLLRRGLVWEGPGETWSTRHLRWLGGVRFDQALVEVVFGEYLAHHEVLLARRDRLDGLIAEQSLQGPWAPIVARLRCLRGIDTLTAVGLLAEIGDINAFKHPKQLASYLGLVPSEQSSGTRRRQGAITKAGSSHARRLLIEAAWHYRRPPRVSLTLKRRQTSQPPAAIDAAWRAQIRLHRRWAHLDATRAKKRTTVAVAVARELACFVWEIAQQPD

SEQ ID NO: 469975 - protein, 315 aa, unidentified
MEKKYAGIDISKNNLDVAIHNSEKQWRFNNNHAGINQMCKLLIELDPAIVVFEATGGYEIPVYASLEEKGIPVALINPRQIRDFAKATGKLAKTDILDARAIAHFAAALNPTPRPLSENQEMKDIVTRRIQIMQMIVAEKNRLRSATKSMKVRIQAHIKWLEKEIDDIDQKIRRHIKENPDWKEKDKILQSIPGVGPVLSVTLLAGLPELGKLDRKKIAALTGLAPLNCDSGTKHGKRIIWGGRAKVRSMLYMGTLVAIRHNPIISAFYQRLCSFGKPKKIAITACMHKLLNIANAMMRSRVPWKYATLCINVIN

SEQ ID NO: 469976 - protein, 338 aa, unidentified
MGLYCGIDLHSNNNWVVVLDGTDKVVKEKKLPNDLGRVIEELDPFREELEGVAVESTWNWYWLVDGLMEAGFPVRLVNTSAVKQYEGIKHTDDKHDARWLAHLQALGILPEGYIYPKEDRPVRDLLRRRMYLVEKRTSMLLAMRGAFECRTGDRVSVNDIKGWTDDDVDTQIEDQIAALSITCLLEPVAMLSGQIKRLEDVARARARRRPGHRRLQTVWGIGRLLSLVILYEVGDISRFPTVGDFASYCRLVKSGRFSNGKRKGGGNPKNGNRYLSWAFHEAAHHAVQHYPKAKHFVQTKTAEVNGIVAIRALAHKLARATYYVLRDQVDFEPSKLFK

SEQ ID NO: 469977 - protein, 369 aa, unidentified
MGEDTMSRSSLWVGLDVGADEMTVCETDDQGKVIVEQLIPTKATALHALLKRERRRIKLIGLESGTFGIALARSLRKLRYPVAVFEARQASKFLAIRQNKTDKNDARGLADIARLGRDSVSEIRVKSPECQRLRSMLVTRQKIVQIRTTVEGTMRSLFRLNGGKLKSASSVATLRRNAAEEIKRLRRFEKIDLTEDIEPLLALSVATRAYVESLDKKLGKRAEDDPVCRRFLEIPGVGPITALSFFCAVEDPARFRRNADVGAFLGLVPMVRQSGQNVARLHISKMGDRMTRTYLTTAAQQHLRHGKSSLTAWGAGLSERLRKGAVQVAVARKLAVTMLAMWKSGERYDPYRGASPADVAVKAEPSVVT

SEQ ID NO: 469978 - protein, 428 aa, unidentified
MNKNEANPTEEYAALIGLDWASEKHDVWLWDVATGKSRHRVIEHTPEALADWLSELQSQYPGQRVAVCLEQSRGSLIYALMGHAFLDLYPVNPVTLAKYREAFAPSRAKDDPGDAKLLAEILRLHRDKLAVWKPADDQTRLLGFLNEERRKAVNLRTKLVLRLQAALKLYYPQAIQWAGVDLFTPIACDWLLKWPTLETIQRARPQTIRAFYYAHNGRRPDMVEDMIAAIATAKPLTRDGAVIEANRLTVQMLAKQLRALHGSIVEYEEQIAALFKQHPDAFLFENLPGAGPTLAPRLLSAFGVDRARHPTALELQTYSGIAPVIERSGKSCWTHWRWNCPKFLRQTFHEFAKSSIIHSAWAHAYYDLQKSRGKGHNAAIRALAFKWIRIIHRCWQTRTPYDEGLYLQALERRGSPLVPLIAVPTRVA

SEQ ID NO: 469979 - protein, 367 aa, unidentified
MKKISTVAAQPSRNLSQAQLTIGLDLGDRSSWYCVLNEAGAIVLEQKLGTTPKAMKEVFGAIARSRIALETGMHSPWVSRALSELGHEVIVAHARNVRLIGESRRKDDRIDAQRLARLARIDAQLLCPVRHRSAKAQADLTVIRARAGLVRARTALVNTVRGLAKSYGERLCGCNVRNMNPEKAEGLSPELRTALEPLLAGIESLSERIRECNERIETLAQQNYPQVAMLKQVKGVGTLIALTFLLTLEDAHRFGKSRDVGCYLGLQPGRRNSGQSEPQMHISKEGDPYLRTLLVQGAHHILGPFGADSDLRRWGLKLAERGGKSGKKRAIIAVARKLAVLLHHLWVSGEVYEPLRNRKPTAMPAAA

SEQ ID NO: 469980 - protein, 319 aa, unidentified
MANTSTLSAGIDVSKAKLDIAIHGQKFTTVAPNTPDGWRTVVAQMTREGVRRVGIEATGGYERGVTQHLRQAGVTVVVLQPLQVKAFAQLKLRRAKNDRIDATLIAACTHLIDEQNKLPPDPRFEALGDRLTFIEQIEDDIVRWKTRLEHIADKRLQRTVKAEIRRLEKRRDGELKRLEDELRTHDDLAKRFDLVLSIPGIGARTALSIVLRLPELGRVSREQVAALAGLAPFVHQSGARQGETHIGGGRARLRRALYAAALPAAFHWNKALKTFYERLKSGGKSHTSALVACARKLLIYANTVVTRGTPWSSKEATPA

SEQ ID NO: 469981 - protein, 320 aa, unidentified
MVEAVLGIDVGKDKLHVALLFPGKKPKAKAIANTPEGHQTLVQWLQQQDANQVHACLEATSTYGEAVAEALYEAGHRVSIVNPARIGGFAKSELSRTKTDKVDAALIARFCAAICPSLWTPPPTEVKQLQALVRRLEALKQMHQQESNRLETATAQVIALIEEHLKYLKQDIQRTEQLIKDHFEQHPALKQQRDLLTSIPGIAQTTASLLLAEIVSWKAFESAKQLAAYIGLTPQERTSGSSVRGRTQLSRTGSGRLRTALYMPAVVAKRHNPTIRAFCERLAGRGKTTMQIVGAAMRKLAHIVYGVLKSNRPFDPNLTS

SEQ ID NO: 469982 - protein, 334 aa, unidentified
MTFELLAIDLGKSSFHLHSIASDGAILSRKVSRSKLAETVNALAPKTIAMESCASAHHWGRQFKDNGREVLLINPRFVKPFVRGSKNDAVDAAAIYEAATRPTMRFVPVKSITQQDVQSLHRVRERMIIQRTSLINHARGLLAEYGIVLPQGAWRFVSQAPAAVESADLSDLGRELFLELLDQLTDVNDRIAKIDRKISEICRDREDCRRLSELPGVGPIIATALVASVEDGRHFKSGRELAAWIGLVPRQYSTGGKPRLGGIGRRANHYLRRQMIHGARAVISRLASHDDRRSQWLKELVSRRGYNKAIVALANKTARIAWALLTRQERYAAQ

SEQ ID NO: 469983 - protein, 438 aa, unidentified
MSFEDFYEAAFAVRPGEQNHTHFVKGGIRMLFGGIDWSDRFLDFHLRTADGRVLAQGQVESDVEGLTELFMALESHGPATEIGIAIETCHGAWIQPLLDRGYQIYPANPKTVERFREALSVAGNKSDKIDRKVLAMFLVTFHQDCIPLRPDAPEIVSLRVACQDRVRMVEERSAKLCELKAILKCYYPAFLGLFGNLKSTIALQFLAKFPTQKQMKGLTERRFRNWLKRHRYSWSQRIDDMIDVLTQPALPVAEHLQQAKAPLISYLAASIQILNSEIAKRDQWITEHLDQLPEANWVRSLPGAGVVLAPALLACLGRDPQRFASVADARALMGTAPVTKASGTVRVVQFRRGCWKFARRTLQLFADQSRHQCPWARAFYSKQRNSGHNHHAALRALAHKWLKIILAMRRGSTLYNERIFANSQRRYLLKIPVLHKAI

SEQ ID NO: 469984 - protein, 318 aa, unidentified
MRCGTEDRAVTTFGNNAAGHKALLAYLLRGNGRSRVCLEASGNYSLDLALTLQAHRQVEVSVVNPRRARRFAESLGERSKTDPVDAGVLCEYAARMPWVAWQPPSSLALRLRAITRAIEALGVMHTQEKNREHALAASQALPVLVLRETQRHQHYLEHRMKRLQREALRLIARDRELDRRFRLMLTVPGIGQTSALQILGELVVLSDTLDARQWVAFSGIDPSQFTSGTSVQKRPRISRGGSRHLRRALYMPALVAVRHEPHLRAFYQRLLSRGKARLQAVVAVMRKLLHALFAMFRSNQSYDGSKLCQFELATKMAA

SEQ ID NO: 469985 - protein, 306 aa, unidentified
MCCVLMVVIAPKIANTTKGHDELVSWLKGHKIDHAHICIEATGTYMEPVAECLYDAGYIVSGINPALGKAFAQSEGLRNKTDTVDARMLAEFCRQKRPAAWEAPHPLERALRALVVRHQALTDMHTQELNRTETAREVQRPSIDAHLLWLEAELKRLEKQIKDLTDDDPDMKHRRKLLESIPGIGEKTSAVLLAYIGLKDRFAHARQFAAFAGLTPRRYESGSSVRGASRMSKAGHVSLRRALYMPAMVPTSKTEWGRAFRDRLAANGKKGKVILGAMMRKLAQVAYGVLKSGVPFDASRHNPVAA

SEQ ID NO: 469986 - protein, 405 aa, unidentified
MEIIHERVCGLDVHKKTITACILATKTKEIRTFGTMTEDLFQLIDWIKASNCTIVAMESTGVYWKPIYNLLEVEEIETLVVNAQHIKNVPGRKSDVRDAQWIAQLLRHGLVRGSYIPNRDQRELRELVRYRRSLVEEITRESNRVQKVLEGANIKLGSVASDVLGVSGRRMLKAIVDGETDPTKLADLSLKKLRNKIPELQKALKGLLGPHQRFLLRKQLDHIEYLEFQVTQLDTEVANRFHSFEEDLELLASIPGVGRRTAEHVLAEIGTDMTRFKDAKHLVSWAGLAPGQNESAGKRKTENTRKGNKYLRSSLAESAKVCAKTKTFLGTKYHRIAARRGKNRATIAVAANILKIMFHLLTTRKPYTELGEDFQLNRKKEIEKTRAIKKLEKLGFKIEILDPPA

SEQ ID NO: 469987 - protein, 357 aa, unidentified
MNTTRTLSFANTHFFIGVDTHLKDWKITIRTNGIELKTFSMNPTPLELLAYLHKHYPDGIYHIVYEAGFGGFWALRIFKEHNIDCIIANPADVPTSNKEKVNKSDPIDSRKLARELENKSLHGIYIPSIQHEELRMLMRLRYRIVQSQTRTKNRIKGLLYSQGIQIPLQFSGHSRWSHAFILWLESLPMKTTAGQFTLQNLLIQLKEIRQHNTSILKQLRQEAKHHSIASIISALMTVPGVAFITAMTLYTEIIDMNRFSDEDHLASFIGLVPSIQSSDDTIKANSITGRQNAFLRYIMIESAWTAVREDPAMTFKFKELSKRMKSQDAIVRIAKKLVRRIRHVWLKQEEYQYALVA

SEQ ID NO: 469988 - protein, 391 aa, unidentified
MICVGIDVAKDNHDCFIMSLDGEVLNDVFTIPNSMDGFNDLFQKIRNTSGTLSKVKVGLEATGHYSYNLLGFLLDKGLATFVINPLHTALYRKSLSLRKTKTDKVDARTIAAMLMSDVNLKSYTDTAYHNEELKSLTRYRFDKVKERAKLKSSVSRLVSILFPELEALVPTLHLASVYALLSEYPGAQQIADAHLTHLKTILYDASRGHYDRDTAIAIRDAARHSIGSRMPAKSLELRHTIKLIGELSTEIDEIEAAIKAIMDEIGSPILTIPGISYRMGAMILAEIGDFSRFDSPDKILAYAGLSPSTYQSGQITSSYSHMEKRGSRYLRYALFNATKYVCHWEPTFATYLAKKRSEGKHYNVAVSHAAKKLVRLIYALEKSGQSFTRAV

SEQ ID NO: 469989 - protein, 370 aa, unidentified
MAQSSTLYVGMDVHKESIAVAYVAQEFGAAVVSLGTVGTRQCAIDKLIRQLQSKSKQLVFVYEAGPCGYWLYRSLTTKGHGCWVVAPSLLPKKTGDRVKTDRRDAIQLARLMRSGDLTPVYVPAVQDEAIRDLSRAREDTLHDLKTAKFRLKAFLLRHDIRSTGRATWGPAHLRWLSEVVCPTPAQQIVFQEYVRAVTEQTDRLQRLEQELHEQVTAWRLCPVVDALQALRGVQFTVAVTTVAELGDLTRFDNPRQLMNYLGLTPSEYSSGERRRQGGITKTGNSHARRALVEGAWAYRYPAKVSRHLQLRLEKLPKPIQDVSGKAQVRLCKRYRQLSTRGKNPNQVVVAIARELSAFMWAIAQQVPVTA

SEQ ID NO: 469990 - protein, 416 aa, unidentified
MNAVGIDVSSRKSTVAVLRPLGEVVCLPFDVTHDIAGLASLVEKLKAIDGETRVVMEHTGRYYEAVAKALHEAGFFVCAVNPLLIKEYGANSLRRVKTDKADAIKIARYALDNWADLRDFTPMDAIRYDLKTLNRQFQLASKQRTASANNLIALLEQSFPGIRKCFDSPVRSDGTQKWVDFAHSFWHVDCVRKQPFPAFCERYRKWCKRHAYFFKLSNAEEVYALAKSAVVLTPKSKVVKVLVQEAANQLSSISRSVEVYRAEMDRLAAMLPEYPVVMAMYGVGKSYGPQLMAEIGDVRRFERKQALVAFAGIDPMPNQSGDKNVRSNKSSKRGSPYLRKTLFNVIRTYLQCAPQDEPVFQFLNRKRAEGKPFYVYMLAAANKFLRRYYAKLRDYFASLDTLQPVAPIPATLKASL

SEQ ID NO: 469991 - protein, 430 aa, unidentified
MPPKKKNTSIVSVVHHVCCGLDVHKDAISACLVWSDKKGGEQFEIREYETFTDNLIRLREWLLEKVCPIIVMESTGPYWTPIHNILENHFTVVLVNPKYIKNVPGRKTDISDSRWLAGLLRHGLLKGSFIPPKFQRQWRDLTRMRRNYVKNLGDFKRRVHKLLQSANLKIDSVVSNLFGSTGRNLLNLLAKNETDLTLVQIEACLNGRLKEKAKELHRSVQGYFEEHHRNLLNLLLETIEALEKQIKILELQIEKMMSEQQQTIDRLKEIPGISDVSAQAILSEIGPTLENFENTAALASWAGLCPGNNQSAGKRRSGRSRVTKNHLKETMIEVAWPAIKKRGSYFKAKYYALRARLGPKKAIVAVAHRILKAVYHVIKNGVPFKDLGEDYLLNLNRESKLKYLRKQASLLGFELKPLNPPLPGPPVFTS

SEQ ID NO: 469992 - protein, 343 aa, unidentified
MYYLGCDVHRRQCTFHHMDQDGSHGLQESVPTTPDSLIRFLDRLKDSAIITFEATGSYFWLSQLFQSHPMIAEVHIVDPRRSRKLAEELAVQAGYGRAKNDHIDAEMLAEIERKGLAPLIHAPTPEQLEQRTINRHRFLLIRLRTRMINLVHSYIAMHSHEKLSLNDLKKGSVGAKIFFNSLPKYLQMIIKKLVDIIELHNQQIRQFEKELDKLLPENHPIIQIITSAPGFGLVLARTVLTEIIDIRYFKDHPKYLVSYSGLAPIEHNSDGKKGSIKLNRHCNYYLKYAFIEAAHAARNHPKYREKYQRDAKKLGKQIAKFNLARRLVKAIYWMLIHQQPFKH

SEQ ID NO: 469993 - protein, 348 aa, unidentified
MPLYVGIDLHSKSNHLAIIDEERKRIMKKKLANDPELILKVLSPYQSQITGIVVESTYNWYWLVDLLQEQGYRVHLANPVAMQKYVGQKHVDDTHDAFWLAELLNLNILPEGHIYPKETRALRDLLRKRQQLVRLRTSLILSLQNIVTRNFGITLSAGDLKSVTEDRVKPYLQENEDLLLAGSANKFCIDALTSQIYRLEVAVQKKLKLRPPYRQLLTLPGVGRILAMTIMLETGPVSRFSRVGQYASYCRKVTSRWTSNEKVKGHGNRKNGNRYLAWAFSEAAEQARRTHAASREFYQRKLRRSKKAPVAHNALAHKLARAAYWILRGNVPFEEAKMFGGTEAVLSS

SEQ ID NO: 469994 - protein, 486 aa, unidentified
MHPLATNMLTPTRDVYRFGFESAGALEITNEYSGLAVTPAHLYCFRRSQACMSHNFNLAYWGTVMGNEQEEPFTAYVGIDWADTKHDVCIRPLDAEASEFDVIAHQVEKIDEWVHDLHHRFGGRIAIAVELSKGPIVSALQKYDFIVIYPIHPSTLAKYRETFTPSRAKDDPTDAELAVDLLLRHPDHFKPLQPQSVEMRALATMVEHRRQLVDEKTRVTNRLRSALKQYYPQALEWFDHIDTLLFCDFLTRWPTLIQAKRARATTLRRFFGQHNMYREGVLKRRLDSIKGSVPLTSDDAIITPYQLQALMLTGQLRLMLQSIKEFDEEIESIASKHPDYALFRALPGAGPSLAPRLLVAFGEQRDRFRSAEDLQKYSGVAPVTERSGKKHWVHWRWQCPTFLRQTFVEWAGQTINKSYWAGQYYYQQREKGCTYQAAVRSLAFKWIRILYRCWQTGKVYDEAVYLKALERRGSPLLARPIVQESA

SEQ ID NO: 469995 - protein, 312 aa, unidentified
MDAIAVGIDVAKDRLDVCVRPSGESFIVDRTGAGIEALAERLRGLRPRIVAVEATGGFETVVAAGLVSADLPVVVVNPAQVRAFAQALGKRAKTDPIDAAVIAHFVEATKAEPRSLPDEMTRLLADLVARRRQIVEMMAAEGQRERRLTDQRLRKSIARLRKAMEKELDELDGEIDDHMRGSPVWAEKEDLLASVPGVGPIVARTLIAELPELGTLDRRQIAALVGVAPWTRQSGQWRGKSFIGGGRKSVRNVLFMAALVASRHNPILKPFRDKLVAAGKPKLVALIAVARKLITMLNAILRDRRPWQPKTA

SEQ ID NO: 469996 - protein, 356 aa, unidentified
MEHFVGIDLHSNNSYIAIIDNDNKRVFKKKVSNDLHNVLHVLEPHRKQIKGIVVESTYNWYWLVDGLMEKSYKVHLANPSAIKQYEGLKHSDDVTDAFHLANLLRLGILPEGYIYPKEERPVRDLLRKRLQLVQQRTALILSFENLLSRNLGTRLKVDEINKLTEEDVEDIFQQEYLIVSGKASIATINFLRARIEQIEKTVHKAARLRSEYKLLMTVPGIGKILALTIMYEAGPMERFAKVGNYTSYCRCVGSERISNGKKKGKGNRKNGNKHLSRAHVEAAYYAIRHYEYIKRYHQRKMAKTNNIVARKAIAHKLARACYYIIRDQKAFDPGKLFAHKIAATVNPYYCWDNHST

SEQ ID NO: 469997 - protein, 357 aa, unidentified
MRQQNYKKDFNGQNIFVGIDVHLKTWSVSVALPGGYLKTHTQKASAKELFEHLNKNYPNGTYHAVYESGFSGFSTCYALRELGVDCIIVHAADVPTTQKEKVTKSDPTDSRKLARSLMSGELDGIYIHSKDNLDDRGLLRHRAMLLKLMGGIKSRIKHLLYNNGVPYPEEFEQKSKHWSRRFISWLQHDVQLLSETRVTMDLLIEELLYFRKHILNVNKKIRTLANTDRYREKFENLISVPGIGAIVSMCLLTEIDDIWRFSNQRQFASFLGLVPVMQASGDNCYVGEKTFRGNKILGPKIIEASWVTIRYDSELAAKFGHLCNKGMKRNKAIIRIARKLSNVIFTILRENRKYVCR

SEQ ID NO: 469998 - protein, 350 aa, unidentified
MIIGVDYHPSFQAVAFLIEETGECGEQELNHSDGQAEKFYRDLKERGICVRVGMEATGYSRWFERLLAELGFEVWMGDPAEIKAKRVKKQKYDREDARLLLRLMRENNFPQIWVPGPENRDLRQLLWHRHRLVQMRTRIMNQLQALAMNEGYRWKKKLFSEQGRAQLEKLALAPWASRRRQELLELLDRLNPTIEELTAAVEREARKRPEALRLMTHPGVGPLTALAYVLIIGTPARFQRGKQIGTYVGMIPCEDSSAGKQRLGHISKQGSSLLRFLLVEAAQAAARIHPDWRRRYVHLAMRRHKSIAKVAMGRKLAIRLYWMWRNGCEYSQSLEFGSYAGQLGIGHGGK

SEQ ID NO: 469999 - protein, 370 aa, unidentified
MLNTTTFVGLDVHARSIKAVALDAMTGEVRSATFGYDAAEVAGWVSSVDPSAKCVYESGVTGFDLQKRLASMGIDCVVGAVSKMIKPPADRKRKNDRNDAEFLARMLSVGNVVEVWVPDDGCVAARDLSRALDDAREDLKRRKQRLSKFLLRHGYVFSETTPTGRRKGSWTAAHWAWIKSISFPEKADDDVLAYYVDAVRQAMEDKKRLEKLVEAEASKPRWKRRVDSVRCLKGIDVTSAADLVFEAGEFSRFKSARSFAAWLGLTPSEHSSGESVRQGGITKAGNKHLRRVLVESAWHYLGCSPHSKDLAKGQVPDPAARRHAAKGVRRLVERRRAMLERGVHKNKANVATARELACWCWAVGRMIENG

SEQ ID NO: 470000 - protein, 340 aa, unidentified
MLYVGLDIHIKHIAVCVLSEAGQLVQRARVRGIEEMLRLLKGLPDRFEVCYEASCGYGHYHDLLQPLAARVLVAHPGQLRLIFRSKSKNDRNDAERLAKLLYLGETPTVHVPSLDVRTWRELINCRSQVIAKRTRAKNGLRALLRGAGVVPPKSPGLWTQKGLAWLRQLELPTASQQLRRDLLLEEVEALNRQVRRIEQELNRRAQQTPAVARLRSIPGVGIRTAEAVVAFLDDPQRFPNAKAVGSYFGLVPCQDQSGDKNRLGHITREGPAVVRQLVAEATWQAVRRSPTVRAFFERTQRGDPQRKKIAVVATAHYLVRVMWALLKRGTVWQENEARAQ

SEQ ID NO: 470001 - protein, 312 aa, unidentified
METKFAGIDVSKLTLDFDCLPVSASRQFANDADGIVALVDLLKGSGVERIVIEATGGYETAVASALAVAKLPVVVVNPKQVRDFAKATGSFAKTDRLDAKLLALFGERIMPPLRTLPDEAQRALADLLDRRSQLVAMRVQEKARLATVTAIARKNVQQHIVWLDKCIAKLDGDLEERLRKSPVWCEKAAVLDSAPGVGQVTTFALLARLPELGQLNRQAIAALVGVAPFNDDSGKRRGARYIRGGRADVRCALYMATLSAITHNKPIKEMYERLTASGNPFKLAMTACMRKLLTILNAMLKKNQTWKIQPST

SEQ ID NO: 470002 - protein, 419 aa, unidentified
MNKIETKKQRIVNDKTLIVAIDIGKATDTGYCRCPSGKDIKPFEFTNNSEGFRKLWDRICWEKTSNHLEEVVVGFESTGAYGEPLVHYLRQKPVKLVQVNPMHTKRMKELQGNSPGKTDRKDPKIIADIIGLGHALSVVIPEGAAAELRRLTLARERSIQRRTALYNQLQDLVFIVFPEFLQVMKDVKTQSARYLLRHYPTPQDMAACGSEALAVILKRVSRGKLGKAHAQMLYDAAAQSVGLQEGRMGILLEMEEILSGLEACNCFIEKLEEEMLPYLGQIPYSDLLLSVKGIGVITVAGLIGEVGDFRQFHTLREVMKLAGLNLFEISSGKHRGNRHISKRGRPLLRKLLYFAAINTIRKGGVMHACYHRYLERGMPKTKALIAIARKLLRILFALVRDHSQYIENYFPKEALNLAA

SEQ ID NO: 470003 - protein, 331 aa, unidentified
MKKKDVIGIDVSKLTIDAYLQLAQAHAVFSNDPKGFRQLVKWIMKHTDCKTEELLICFETTGLYSLQLASFLSQSNIDFVMENPIQIKRSMGLVRGKDDHVDSKRIADYAYMRKEKLKLTQLPSEELIKMQNLLAIRERMIRQKAGYQASLGEYKRVLVQLQHKDFFVLLNNMINALKKQIRKADETLIEIIHSSSKLLNIYTLLTSIKGIGVILAANIMVTTICFTKFNDSRKYACYCGTAPFKYSSGTSINGRTKVSQMANKKMKALFNLAALSAIQHDPELKLYFDNRMANGANGMSTINIIRNKIIHRVFAVVKRGTPYVVMAKYAA

SEQ ID NO: 470004 - protein, 459 aa, unidentified
MKRSSGRGKRINVKRAEGKLSVTRPKVAGIDLGSVEHYVACPPRDGQANVKTFGTTTPELAALADWLQAEGVESVAMESTGVYWVPLYELLDHRGIEVVLVDARQMKHVPGRKTDMIDCQWLQLLHSCGLLRGAFRPADAFCRLRAVVRQKASLIEEQATWLNRMQKSLDQMNVRVHRAVSDISGTTGMAMIRAIVAGERDPRQLAKLRSERCARTPREMIEELTGNWRDDHLFNLKEALAMYDFILERIAAYETEIQRILQELTPNPDLGPAPEPNNPNKKKLLRARGQEPLRQSLYAVCASDLTSIDGISTSTAEVVLSELGPDLSAFPTERHFVSFVKLSPKLAISGGKPIRKRPKGTASTRVGAALRMAALTLRNSKTALGGAYRRLARRKGASVAVFATARKLAILIYRMLRYGAAYVDEGLQVYEQRFQAARLQMCQQIANQFGYKLIQQETA

SEQ ID NO: 470005 - protein, 367 aa, unidentified
MKNHSSIEQSVSSSDLSACITLAVDLAKQVFQVAGEDVLGQVLYEQRIKSREAFYDFLRQLSPHVMVLMETGPGAQAWARQLQDQGNPVRILPAGLVATHRSGPKNDRNDALAILRANRDEKICAVPVKSVAALAMQALHRARQGYVRRRTALSNQMRGLLLEHGVALAQGDVAISQKIPRVLEDATQPVPGLLRELIDELLAEWRHLGERISVLTGRLEVAANADMTAKRLMTVRGIGPVTATALVAKETKPERFPNARKFAAYFGMVPDQHSSGQTVRLGDMTKRGDAYLRSLMIQGAHAVLQQLRPDSQQPDDRRLLHWMSRLGRKEAAIRLANRNLRIVWVLLQNDQTYRRHAGDGQPATMGH

SEQ ID NO: 470006 - protein, 366 aa, unidentified
MKKTSTVRVNGNMIFKGHKLTIGVDLGDRWSNYCVLDEAGEILLEQKLATTPEGMKQTFERIPRSLIAMETGTHSPWVSRLLKELGHEVLVAHAQRVELISKSTRKDDRHDARTLARLARIDPELLGPVRHRSAKAQIHLTVIRARAALVSARTALVNAARGLVKSYGQRLPKCGTQQVSRELGAKLNAELREVLEPLLKEIESLNERIKEYDERMEKIAKESYPHVELLKQVKGVGTQIALTYVLTLDDPHRFPKSREVGCFLGLRPGRRDSGQSQPQMHISKEGDRYLRTMLVQGAHYILGPFGEDSDLRRWGLRLAERGGKNAKKRAVVAVARKLAVLLHRLWVSGEVYEPLRNSQKAMRAVA

SEQ ID NO: 470007 - protein, 430 aa, unidentified
MKSNTQNKKIEAITEKTLVIGIDVGSETHYARAFDYRGIEFSKKPFKFSNSEAGFEIFKAWILDIKEKHEKDKVVPGMEPTGHYWFNLGKFLQDNEMKPVLVNPHHVKKSKELDDNNPTKNDRKDPKVIAGLVKEGRYMIPYLPDGIYADLRTASNMRFQIQSELTRVQNRISRWFNIYFPEYKTVYGKPDAISGMMILKKAPLPEDILTLGVEGVNQIWRDAKIRAVGKKRAQTLVEAARHSVGTKEGATAARIEIRMLLEDYESRNNRLQEVMFLIEELVKQIPMAEKLMEIKGVGIKTVSGFLAEVGDITRFSSPKELQKLAGLALVENSSGKHKGQTTISRRGRKRLRYLLFEVAMSLVGKNPEFGTLHHYYTTRKVNPLKKMQSLMAVAAKLIRVFYAMLTKGVEYDPSKMLGDIKRPAEYMQAA

SEQ ID NO: 470008 - protein, 434 aa, unidentified
MRRVIGIDVHRTFGEVVIWEDGRLRHAGRIDMTRTALEGFGKTLLASDEVVVEATGNSMAVSRVLAPFVARVIIANPLQVKAIAQAHVKTDKIDAGTLASLQAAGYLPQIWTPDAETERKRRLVARRYQVVRHRTRLKNEVHSILHAHLIPKCPHADLFNGRGRAWLVAQPLPDDERAAIDRHVRELDRLAEDLALLDREIAQDAIDDSAVNRLMTITGVNLAVAAGIMAAIGDISRFNSPQKLVSYFGLNPRVRQSGLGAAHHGHISKIGRSHARAMLVEAAWAAAKAPGPLHAFFVRIRARRGHQIAAVAVARKLTVLCWHLLTKGEDYLWARPALVAIKTRAMQLQAGHPQQKGSRRGPAYAYNIKVLRPRDVDCRTGGAKLRAFGDAMETTAAKNRRAGASARQDKIGQPGGACSRCATLRHEVARAHQG

SEQ ID NO: 470009 - protein, 375 aa, unidentified
MNKTKHYVGLDVHKDTVTVAVAEEGRQGEVRIYGQVSSDLRAVEKALRKIGADGGSLHVAYEAGPTGFVLQRRLAQLGWDCVVVAPSKTLGAKGKRLKTDRRDAEMLARLHRAGELTAVYVPDLADEAVRDLTRARADAVHDLSRAKQRLKAFLLRHGYRYTGKANWSEAHLRYLRELELNAPGLKAVMEDCLRAIEQAGERVARLEDVLGTVAVTWRLYPAVEALMTLRGVQLVAATVLVAELGDIRRFEHPRDLMGYLGLIPREESSGQTQRQGGITKAGNAHARWILVEIVQHAWLPPKVSAHLSKRQEGQPEARKTLSWKVQTRLHKRAWQLTRRGVVKGKVTVALAREMAGFAWAMLQTVKWPETPPSFT

SEQ ID NO: 470010 - protein, 320 aa, unidentified
MYVGIDVAKAELVVAMGATGPVTTFPNDDVGLTALVGAMREAKPTLIVLEATGGYEIPCTAALAAAPLPVAVINPRSVRSFAKATGTLAKTDRIDARLLAQFGERVQPEPRPLPTAAQHELEALVTRRRQLLEMRTAEQHRLGQALGGHRQRVKQSLRKHLAYLDRELRITETDLRDRMQASPVWRARDDLLQSVPGIGPTVSQTLVAELPELGRLNRREIAKLVGVAPLNRDSGKRRGRRMTLGGRASVRAILYMACLSAIRHNPVLRAFYQRLTRAGKVKKLALVACMRKLLTIVNQMVRTGQHWRPSPSIACQLQPT

SEQ ID NO: 470011 - protein, 323 aa, unidentified
MQGKVSFQEDAMPVVYAGVDVSKEWLDIHLHPLGESRRFSNDKTGIRQLKRLLARHRPKSIVMEATGKFHRPAHRSLWLDGFAVAVVDPLRARMFARACGYLAKTDRLDARFLALLAESLRPPADTPPSPHVEALQELVNARSAAKCDITALQNRSKTATTALLRGELNRLVRRLEQHVERLDKEIERRVGEDPQLYRKAEILTSIPGIGRVTALALMAGMDELGSCSGKQAAMLAGLAPIANDSGARTGRRSIRAGRPAPRRALYMAALSACRYNPALARFADTLKAAGKPAKVILVAIMRKLLVLANCLLAHDRIWTPNPP

SEQ ID NO: 470012 - protein, 411 aa, unidentified
MRLFVGDDWAEDHHDVEVMDEAGTVLVRKRLPEGAGGMARLHALVGGLLGEDADDSEVLVGIETDHGPWVMALLAAGYRVYPVNPQQSARFRARHWVSGAKSDAGDAHVLADMVRTDSHQLREAAGDSAEAAGIKVLARTHKTMIWERTREVQRLRHQLLEYFPAALEAFGDLDAPDVLELLAKAPDPQRARKLTRAQVSAALKRARRRNIPDKATAILAALRGEQLAQPAALTAAYAATVRSLIAVIAALNEQVTVLEEQVREHFGRHPDAEIILSQPGMGAILGARVLAEFGDDPGRYRDGKARRNYAATSPITRASGKRKIVAARFVHNDRLVDALNAQAFTALTASPGARAYYDELRTRGISHNDALRRLANRLVGILHGCLKTRTLYDEATAWGHRQNQPQSPAAA

SEQ ID NO: 470013 - protein, 383 aa, unidentified
MWPEERAATAAFDVVDDARSRHRMCQRGSLNNESPEGVVHMQVSTIGVDLAKNVFQMHGVDNAGKVVITRQLRRKQVIDFLSKIPACLVGMEACGTAHYWAREISKLGHTVRLMPPSYVKGYVKRSKNDAADAAAICEAVTRPSMRFVPIKSADQQALLMLHRTRDLLIRQRTQLINALRAHLAEFGLVAETGREGLAQLAEIITDECNREALPSAMKQALQAIVDQLAALELQIGALDRAIHAHHRANDMSCRLETVPGIGVIGATAIASTVTDPSNFKSGRDFAAWIGLVPRQHSTGGKERLGGISKQGDRYLRRLLVIGATSVVQHARRHPQKHPWIIRLLARKPAKLVAVAVANKMARIAWAIMAKGGHYRAPELAAAA

SEQ ID NO: 470014 - protein, 382 aa, unidentified
MKKAITGVRRFVGLDVHAETIAAAIAEKDQVARDLGTIPNREESIRKLARKLNEGGAWAACYEAGPTGYALYWQLTKLGIPCVVIAPTLVPTKAGDRVKTDRRDAQRLASSFRAGELTPVWVPDAEHEALRDLVRAREAAKQDQLRARHRLAKYLLRHGKRPPQQIRAWTENYLQWIKAKVSFDQRSQQVTLEDYLNEVDHAGARIARLEKAIDEAVEQAPETMRELIQALQALRGVAKVGAVTIVAEVGTLTRFEHPRQLMGYSGAVSSEHSSGGKIRRGAITKTGNAHLRRVIVEAAWSQRYKPVLSPAMRKRQEGVSAEVQELASKARHRLHHRYMHLLGKGKTKQEVVTAVAREMLGFIWAIGVSVERAQAQKAKGAA

SEQ ID NO: 470015 - protein, 411 aa, unidentified
MDRLVERCAGLDVHKDSVAATVRVPGGGRERLQETRTFSATTRGLLTLADWLASYGVTLVGMESTGVYWKPVFYVLEERFECWLLNARHLRNVPGRKTDVQDSAWICQLLEHGLVRASFVPPKPIRELRDLTRYRKTQIEERSREVQRLDKVMQDAGIKLSSVASKTLGLSVRRMLEALIAGTHDPEVLAELACGRLRAKLPALREALAGSFRSEHHGLLVAQILAHVDYLDETITTLSERIEQLLAPFSRQRELLETIPGIGRTAAQVLIAELGVDMSVFPSSAHLASWAGQCPGNRESAGKRRSGRPRHGSKWLQTTLTESAKAAARTKGSYLSAQYTRLRGRRGPGKATGALRHSILVAAYQILDQNVPYHELGADYFDQRSSEQRTKRLVRQLEQLGHNVTLEPLAA

SEQ ID NO: 470016 - protein, 365 aa, unidentified
MTSVAHLGPTHLGLDVHKDTISVAILAPGRDGPDIERIPHDEASVRRLVGRLGDPRWLRACYEAGPTGFGLARLLESMRVGCQVVAPSLIPKAPGDKVKTDRRDCRRLARLHRAGELVAIRIPTPAEEAVRDLCRARADMVEDRTRARHRLGKFLLRHGRVWRGGNAWTLTHERWLCSQRFDEPALAATYAHYRAVLQGRDAQLEAIQADLAGWYDRAPFADAVHRLSAYRGITRLGALTLASEVGDWRRFPRAAAFAGFCGLVPSEYSSGHSTRRGHITKTGNAHLRAQLVESAWSYQHRPAVGVELRGRQQGLDPQVAARAWAAQLRLCGRFRRLAARKNSKNVVVTAIARELAGFLWAELAA

SEQ ID NO: 470017 - protein, 411 aa, unidentified
MRTNTCGKLSQLLNIFERWFSHMYSYFVGIDIAKNTHWASCLSSDGEIILEPFSFSNDNSGFQKFISKLESLDKTKILIGLESTAHYGENIISYLFNLDYNIGLINPIQTANLRRSNIRKTKNDKVDNKIIIKALTLGNYSLITSRDINNLKLKGLCRSRRNLVTMKSKAKIQLVSYLDQIFPELAQFFKGNLHLNVSYQLLKEYSSPKQISSLHLTKLSNILHDNSHGRYNKQDAIRLRELAKNSVGIDNPSLSLQIKHSILQIELYNEQIAEVEALYKQILDEMNTPILSIPGMSYNQAAVIICCIGDINRFEHSCQLLAYAGLDPSVIQSGNFQARSTRMSKRGSGMLRYSLVYSAHNVVKNNKTFRDYYELKRSQGKSHYCALGHVAHKLVRIIFKMLKDNVAFNLD

SEQ ID NO: 470018 - protein, 348 aa, unidentified
MQITTIGLDIAKNVFQVHGIDAAEKVVVRKQLRRGQILGFFEALPRCLVGMEACATSHYWARELTKLGHQVRLMPAKDVKAYVKRNKNDAADAEAICEAVRRPTMRFVQIKSVEQQGQLMLHRARDLLMRQRTQLINALRAHMAELGIVAAQGREGVKELVKIIASEQDARLPVDAHTSLVVLAAGLQALQTMIGSIERRIIAQHRSDEASKRLRSIPGIGIVGATAIAATVPDPKVFRSGRDFAAWIGIVPREDSTGGKHKLGPISKRGDQYLRRILVVGAHAVLKRARHQPEKYPWVTRLLERKPFRGRGGGGCQQDGARCLGIVGQGRQLSGGWREQSKFASVRI

SEQ ID NO: 470019 - protein, 345 aa, unidentified
MLHVGLDLSRKRIDVCLISDQGELIDRVTATPDRDGLHGLARRVAVYGEPVRGVVEAMNGARFVHDELVAHGWEVLVADAQKVKGLAPLACKTDKIDSRVLAELSFRDLVPAIWLPTFELRSEREISRWRLHLVKHRSTLKNRVHSTLITFGQRHMSDLFGVAGRKLLGELELPEPWRSHVDASLVLIDDLEARITQIAKDLRRSGADHRYIPILMTAPGFGWITSYTVACEIADINRFSSPVKLTGYTGLCPRVKQSGQMDQRGPLSKHGPKYLRWGLMEAAIAASSHPLYRERYQRTKRRLGKQRGPKVAQIDLARQLTQAISYMLTRNQPFAPAGAIFRLAA

SEQ ID NO: 470020 - protein, 456 aa, unidentified
MKIPQSTIRLLTGRLVKILLNREVSTMKSNTQNAKIEAITEKTLVLGIDVGSETHYARAFDYRGIEYSKKPFKFSNTEVGFATFKEWILDLKERHEKDKVVPGMEPTGHYWFNLGKFLQDNEMKPMLVNPHHVKKSKELDDNNPTKNDRKDPKVIAGLVREGRYMIPYLPDGVYADLRTASNIRFQLQAELTRIQNRISRWFNIYFPEYKTVYGKPDAKSGMLILKAAPLPEDILTLGIDGVNQIWRDAKLRAVGKARAKTLIEAAEHSIGSKEGTMSARMEIRMLLEDYESKNMRLQEVMVLIEELVKEIPMAEKLLEIKGVGIRTVSGFLAEVGDISRFNNPKELQKLAGLAVVENSSGKHKGKTTISRRGRKRLRYLLFEVAMSLVAKNPEFRELHNYYTTRRLNPLKKMQSLMAIAAKLIRVFYAMLTKGVDYDPKKMISDIKRPTVYLQAA

SEQ ID NO: 470021 - protein, 342 aa, unidentified
MQITTIGLDIAKNVFQVHGIDSNEKVVVRKQLRRGQVLAFFKALPPCLVGMEACATAHYWARELTKLGHRVRLMPAKDVKAYVKRNKNDAADAEAICEAVRRPTMRFVQVKSAAQQGQLMLHRTRDLLMRQRTQVINALRAHMAELGIVAAQGREGIKELLKIIAREEDVRLPVDAHTSLVVLAAQLQALQTMIRSIEKRIVVQHRSNEASKRLQTIPGIGVIGATAIAATVPDPKVFRSGRDLAAWIGLVPREGSTGGKHKLGPISKQGDQYLRRILVVGAHAVLKRARLHPEQYPWLTGLLARKPFRVVAVALANKMARIAWALLAKGGTYQAPALMAAA

SEQ ID NO: 470022 - protein, 394 aa, unidentified
MKLIGIDIGKNKHFFCIMDQQTGEIISQPISFSNDKEGFDFLVQKIKSYPKDSILIGMEDTGHYHFALLKYLLNLQYTVALINPKTTDFNRKIQGGITKNDKLDTINICDVLDTPERKKQYRITKVNSFDLYEQKQLTRHHHNLKEEENVYKNRLQKCIDIVFPEFNNLFNSKYGTVYMNILKMFGSAENIANTDIRTIRKCFEIEGRGNRISLTPERLKECAGSSIGISSSAEVIQIKHLTAQIELIEEQLTEIDKKIEEFSIQNNSPILSIPGISHFSGTSILAELGDISNYSKPSQIIKFAGVAPLHYESSQFNAQHTSITKKGSKYLRKTLYQIILPVIRHNPVFTKYYQLKISQGKGHRCAQGHCVRKLIRIIYHLLKTNQQFDPQLLR

SEQ ID NO: 470023 - protein, 344 aa, unidentified
MITVLGIDLGKNLCSLVGLDASGVVVLRRRMRREGVADFVAGLPPCLVAMEASCGAHHLGRRLAAQGREVRLMPPEYVRPYVKSQKNDDRDAEAIAEAATRPTMRFVALKSEAQLDLQMLHRARERLVSRRTALINQMRAILLDRGVAVPQGKRALQRALPQILADPADTGLSGRIVTLLADMLAEWEELDRRIAAFDTEFLALAREDEAVRRLVAVPGFGPLTASALVAAVGDARRFRRARDLGAWLGLAPRQATTGGRPRLLGISRRGDGYIRKMLIHGARAALPGLAARETATGRWLRGLLERTHKNRVVVALAHKLARIAWAVLARGAVFDLEHRAVATG

SEQ ID NO: 470024 - protein, 328 aa, unidentified
MFDKDGRMSEPTFERFVGVDVAKAWLDLCADPPATELASHVAYDDAGLQQLCETLARLRPTLIVMEASGGLEQRLACELAARSLTLAVVNPRQVRSFARASGQLAKTDAIDARTLCAFARLIRPQAKPPKDDSTRELADLLGRRRQLVDMRIQELQRQHTATTKAMRKSLTEHLTWLERRIAQLDDDMGKRLRDSDVWRLKDDLLQSIPGVGPVLSRTMLALCPEIGQLNRREIAKLVGVAPLARDSGRYHGRRRIWGGRSDVRRVLYMATHAAMKHNAPIAAFAQRLKAEGKLPKVVIVACMRKLLTVMNIVLKTGQAWRNSSILPA

SEQ ID NO: 470025 - protein, 404 aa, unidentified
MSNVAGIDISKGKSTVSVLRPFGEVVAKPFSVGHTGSELKELADYLKSLDGETRVVMEHTGRYYEPVARFLHDQGIFVSAVNPKLIKDYGNNTLRKVKTDKADARKIARYGLDNWVELCQHTPMDTIRMQLKTLNRQQGLYSKTKTMMKNNLIALLDQTYPGVNALFDSPVREDGSQKWVDFATAFWHVDCVRNMSLTAFTERYRKWCKRHGYNFSQSRAVEIHAGAQDLIAMLPKDALTKTMIRQAIDALNAVSASLERLKAEMRTLAAQLPEYPVVMAMHGVGDSLGPQLMAELGDVTRFTHRNAITAFAGVDPGADQSGTHEAKSTRASKSGPPELRKALFLVMDCLLKTMPADDPVYCFMDKKRAEGKPYLVYMTAGANKFLRIYYGRVKEYLALRENAD

SEQ ID NO: 470026 - protein, 344 aa, unidentified
MSNLDTWGTEVSAKELAVSLRRGETLEPLRNFTNTLEGHRMILHYLRRPGRAVRVCMESTGLYGLDLALALSGQRGLEVMVANPRAVRHFAQALMKRSKNDQIDAGVLEKFAGHMPFKPWQRPSAAMLGLRALARRLRELVEMQTAEKNRQHAVGLSQAIPAVVRRDLERSLRAQQTAIKRLTQQARKLIAQDPQLTERFELLDSVPGIGETSAAQLLGELGALAPDLDARQWVAYAGLDPREYTSGTSVHKKPRISKAGNQRLRHALFMPALVAVRYDPHLRAFYQHLLVKGKVKMQALVAVMRKLLHALHAMFKTHQPYDGSKLVRLNPTPAQQGISANLFC

SEQ ID NO: 470027 - protein, 416 aa, unidentified
MSLALPEALVFTGIDWASAEHAVCVLDAAGKITAQFTIAHSAEGIASLVRRLARYGDPADLPVAIERPSGRLVDLLLEAGHPVVPVSPNAIKTWREGEVLSGAKSDAGDAAVIAEYLRLRYHRLAPAAPYADETRALRTAVRTRDDLVEMRVAATNQLAALLDAHWPGAKAVFADVESPVSLEFLTRYPTPAAARHLGEKRMAAFLVKHGYSGRRPAAQLLARLRDAPPGTTGDALTEALRDAVLAVVTVLRALNGAVKDLDRSVAAHLGEHPDEKIFTSLPRSGQINAAQMLAEWGDCRQAYDGPGSVAALAGVSPVTRQSGKHRGVGFRWACNKRFRRAITTFADNSRHASPWAAKVYTDARAAGKDHPHAIRILARAWIRVIWPCWINGVPYDPARHGAAAALAERTSSQSAA

SEQ ID NO: 470028 - protein, 418 aa, unidentified
MTSIPCTTTERTLVGVDIAKKYNDVLVDQPRHRRRSFRVANRSEDYQKFATFLDGLADRPLIGFEATGNYHRTLAFFLAERGFELRLISSVAAARTREALYNSWDKNDPKDAQVIVHLLKTGVTQRYHDPLVHGVNELQELSKTHFQISLHKVRIQHSILTHYLPLYFPEAEKYMTTNRAQWFTHLLERYPCRSAVLKFAQDEFVKDAWAYVGRKVNKTAFLDDFYRTADKTIGLPVSEDSEAIRMFRVVLQEHQRLCKVRADIETEAESFLGGNEDFIRLKTLPGVGPILALTIMAEAGDLRRFTHHRQFLKYCGFDLSSLQSGQYRGKTRLSKRGNRRLRYAFWIAATIAIRMQENSFRDKYARYIAADPSDADLKRKAYTAVAAKMARVAHGMMKNRTDYRPFHERAVPGGAIPS

SEQ ID NO: 470029 - protein, 355 aa, unidentified
MNKTKYIGLDVHQASISVAVLEESGKLVMQSVIATRAAAIVEFLDGLRGTLQVTFEEGTYSAWLYDLLVRRVSKVVVCNPRKNALLKAGNKSDRIDALKLAELLRGGMLSAVYHGENSTRTLQELARSYQALTEDTTRVMSRLKAIYRSQAIAYGGKKLYTQRHRPEWLQQLQQPGVYRRAERLYEQLDLLQQLRRQAKQELMRESQNHSVCERLRSVPYLGPIRAAVLVARVQTPHRFRSKRQFWAYCGLGLETRSSADYQQIEGQLKRCRKKVLIRGLNVDHNHDLKNIFKGAAMSASIFSGPLQEFYQQRVAAGIKAEMAQLTLARKIAAIALTIWKKGERFDPTRLKAQAA

SEQ ID NO: 470030 - protein, 317 aa, unidentified
MEKMTNSTIGLDVSKDTLDAHRLPDGAVKRFPNDAAGHKALIRWVKAKPVDRVVFEATGPYSRALELALTSAGLPAIKVNPRQARRFAEAIGKLAKTDAVDAVMLARMGKALELSTKPSPSPNILQLKELLLVRRALIKDQTAAKNRQKVTSLPIIEKMINLRITQIETDIADIDAEVARLIAQDPELAKRAAILTSIPGIGDLTAAFLLIEMPELGSIDAKQAASLAGLAPMTQASGTWKGKDHIRGGRAILRQALYMPALVATRFNPDLKRLYQRLIDTGKPPKLAITAVMRKLVVFANTLIKKGYAWNQKPACA

SEQ ID NO: 470031 - protein, 321 aa, unidentified
MESAIAGIDIGKEEFSATLLLGDKETNGVFRNSTAGFAMLGRWLVKHGAERAHICMEATGTYGDDLAEHLHQAGHVVSVVNPARIKGFGQSELSRTKTDKADARLIARFCRAMQPEPWQPPAPEVKELKALVRRLDELKGMLTQETNRLGTADDVVKPSIQDMIGLIESRVHQVTQQIRDHVDRHPDLRGKRDLLETIPGIGPGTSAMILAEFGDVSRFPDAGSMASFCGLTPRHRQSGTSVHGRSMLSKTGSARIRKALYMPALAAIRYNPIIRAFRARLLANGKLKMIIVAAVMRKLVHIAYGVLKSGKPFDPSIATTA

SEQ ID NO: 470032 - protein, 348 aa, unidentified
MLIIGCDYHPGFQQIAFVDTETGELRERRLTHREEAEQFYIGLKGQRVRVGMEASGHSRWFERLLGELQFELWIGNAAEIRTKRVRKQKTDRQDAQLLLRLMIEDRFPRIWVPDSENRDLRQLLWHRHRLVQMRTRVMNQLHVVALNEGLRRKKALWRPAGRQELESFVLAHWATRRRQDLLDLLDQLTPKIQELTRALEAEVERRPVTRRLMTHPGVGPLTALAFELVIGTPERFHCGKQVASYVGLVPSEESSGDRRRLGHISKQGNVLLRFLLVEAAQVTVRSQPQWRSRFFHLAMRRGRKIAKVAMARKLAVHLYWMWRQGRDYGQLQKLGSHAGEPGNLDGVQ

SEQ ID NO: 470033 - protein, 355 aa, unidentified
MCGLKHQKEKRSMDYFAGLDVSVKETSICIVDDAGKIVREARVASEPEALLQVLTSTIYRFKRVGLEAGPLSQWLYSVLAEAGLPVICVETRHMRAVLKAQINKTDRNDGRGIAQMMRVGLYRPVHVKTLGSQKLRVLLTHRKLLQSKAIAIENDLRATLRNFGLKVGVIGTVKFETRIRELVANLPDLAALVEPLLIVRQVVREQLGILHRRVLAIVRDDDVCRRLMTIPGVGPVVALTYRVTVDVPARFRNSKAVGAVFGLTPAKYQSGENERTGAISRCGDEMMRMMLYEAAQSMLVRSTKWSWLKAWAMKIARHRGMKKAIVALARRLAVIMHRMWVDGTEFRWSREVAAA

SEQ ID NO: 470034 - protein, 370 aa, unidentified
MGNRNMFVGLDVHKETIDVSIAEGQRDGEVRHYGVIASDVEPLDKVVRALRTPDRQLHFVYEAGPCGFGIYRHLTKRGEACVVVSPSMIPKRSGDRVKTDRRDSQMLARLHRAGELRAIYVPDDTDEAMRDLVRAREDAVVVGTQAKYRLKAFLLRQGRRYPGREGWTLPYRRWLTDLSFPNAAQHIALQEYRDAIDETETRIDRLTAQVRQLAPTWRWAPVVAALQALRGVSFVTAVALVAELGDLTRFGHPRELMAYLGLVPSEYSSGPSVRRGGITKAGNPHVRRLLAEAAWAYQGIPRIGRQHAYRQEALPKVVCDIAWKAQLRLTARFKRLVARGKAKPKVATAIARERAGFIWAIAREVSPTPQ

SEQ ID NO: 470035 - protein, 393 aa, unidentified
MYYVGIDIAKRAHCLAVVDERGDKVVTNFSFSNTTEGFMSMLDKLYSVGITYENSRVCIESTGHYGQNLLVHLQGYGFEVAVINPLLTKAYQKAQSVRKVKNDAFDSLALAKWLRAENPSSYTLPPSKMLELKKIARFRTFLSQSISEHKNKVIAILDEIFPEYEKLFSDIFGKASIAILLRYPSPEALSRARLSTLTRILKENSGGRCGQEKAEALKEAAYSSFGTSDTLQAQTFELACLIDQIQNIQKKREEIDVFTKELLTQADTHITTIPGIGIVCAATILGEIGCISRFSSSSKLVAYAGLDSSVYESGEFKGSKGSPSKRGSRYLRRALYLAADSARKYDPCLSAYYEKKRSEGRSHRSAVCTVARKLCNIIYAVLKKDVPYTCQVS

SEQ ID NO: 470036 - protein, 388 aa, unidentified
MTQTLTAASKPVALDYDNTLVVAIEVSNVRWVLAAQVPGLPRLKAKRSVEPTAEALMAAINGYRNRAREAGRMVERVIAVYEASWSGFWLARWLERGGIEIHTIQPSSVPVDRRARRAKSDGIDAELLLRTLLAWLRGEPRVCSMVPIPDEADEDARRFIRERAELVAERVSLVNRIAAVLATLGVRDYNPLLRNRRGRLDELRTALGTALPPQARAKIVRMIDRLELVQAQVAELDQERDAVLEDRAPDKAAKMIQQLATLRGVGVQSATVLVREAFVREFPNGKALGSYAGLTATPYSSGGAEREQGISKAGNRRLRTVMVELAWLWHRYQPGSVQVSWFRERANAAGRRARKVMIVAMARKLLIALWRFATQGVIPEGAVLKPAA

SEQ ID NO: 470037 - protein, 426 aa, unidentified
MLEDTEERQEIIERVAALDIGKASLVCCARVPNPRQPGRRLQEVDTYSTMTRRLLRMADRLRELGVTRVVMEATSDYWKPVFYLLEAAGFETWLVNAHDVKHLPGRPKTDRLDAVWLCKVAERQMLRPSFVPPPQIRRLRDLTRYRVDLVTAQTAEKNRVEKLLEDAQIKLSVVATDIFGVSGRAMMAALLAGERDPTRLAQLAKSGLRRKIAELEEAFTGRFSEHHAFLLAKMLARIDAISADIADVDAQIEVDLAPFAEAAARLEQIPGISRVTARAIIAEIGVDMSRFPTPAHLASWAKFSPKVKESAGRKKGNGTTGHGNAYLARTLGQVAVGTSRTSTFLGERYRRIARRRGAKRAVVAVGRSVLVIVWHLLSDLGTEFHDLGRDFYETRINPERRARNHIAQLEALGYTVTAERQLPDTA

SEQ ID NO: 470038 - protein, 356 aa, unidentified
MNIIGIDYHKSYSHVTVLTETGELLGKGRIGNRLEDVAALFENLEGESKAVIEATRNWLVMHDMLEQYCDVTLANPFKVKAIASAKIKTDEIDSRVLADLLRADLIPEAHVPSKDVRLARNVLRQRLFFVRMRTMVKNRIHGLVDRHPEIEKGKGMKSDLFGKSGTRWLYEIDVGSDERKLLDSELTLLEALNARIKSSDRWVNELAKGNKEIDLLKTIPGIGKFFAVLLWAEIDGVKRFATPKKLAAYAGLVPSTYSSGGKTHHGRITRQGNKWIRWAMVEAVVPAITNDWWLRSHYEHIKVRAGYNGAKVATARRLLTLVFRVLSERRAYRPVREKMRDNIIASIEKKKIRSPR

SEQ ID NO: 470039 - protein, 343 aa, unidentified
MQDIIYDHYIAIDWSVKNMAIARMTKKSNKITVIDVPSDIENLQAYLKNLKGTKILAIEETTTSQWLYTELKEYVDRILICDPNRNKLLSEGPKNDKIDASKLVQLLKAGLMKEIYHSTDKFLYLRRIVSGYEDLVKAGVRLKNQRYSLLRACGKRGKEKIGITLDSQGEQFVLECLDRQIEAYEDEKNCYEKEFERLARKNPEIKHQKSLPGIGTINAVKIVARVVTPYRFPDKGCYLSYTGLIKLEKTSGGRNYGKKNPRYSRQLKSVYKSGVLAAIAGNNPINDYYQYLIQENGYPEHNARQKACRRLAILSLGVFKSGKKYQPFRRNHVKTNKESISGL

SEQ ID NO: 470040 - protein, 336 aa, unidentified
MNAVTTIGLDLAKRVFQVHGADVKGRPVLQKKLRREEVLSFFAKLPPCVVGMEACASSHHWAREIRALGHDARMIPASYVKPYVARQKNDAADAAAICEAVTRPVVRTAPIKSLAQQASRVLHRTHELLSRQRVSLINAIRSHMAEFGVIAPAGPQHVGSLIQRISDPKTPIPDAVRAPLGILVDEYVALNARINALEAQMRKNCREEPESARLLSIPGIGPITVSAILAGVPDIRGFRSGRDFAAWLGLVPRQNSSGGKERLGRITKIDRTIRRLLVIGAMSTIRWSRSKQNFAQSWLGRIIARKPIKLAAVALANKMARIIWAVMTREETYRPA

SEQ ID NO: 470041 - protein, 354 aa, unidentified
MTSTKYIGMDVHKESISIAVLNFAGKVVMECVIETKASSILQFIHGLRGDLQVTFEEGTWAGWLYDLLKPQVTELLVCNQRKIALLKDGSKSDRIDAHKLADRLYMNKLKPVYHGEHGLRMMKELSRSYLTITKDLGRVMNRLKALYRSWAIPCAGTQVYAPRFRSEWLSKITEAGVRRRAELYYQQLDALRLVRQQARKELLVEAGKHRATKLLRQIPGIGPLRAAHLVAVMQTPHRFRTKRQLWNYSGLGLETHDSAQYRVVEHQLQRSKKSVTLRGLNTNHNHDLKDIFKGAAMRASTAAGPLRDFYEALLAKGRKPTMARLTLARKIAAITLIVWKKEVRFDANYLKQAA

SEQ ID NO: 470042 - protein, 383 aa, unidentified
MFSLSGQGWFHSGPKIMEWTHPLLIGLAMGHDEVATTHQKEDGATMKITTIGLDIAKSVFHFVAVNQAGKLVKKKMLKRKDVLHFVAKIEPCLIVMEACGSANYWAREFKKLGHQVKLIAPQFVIPYRQGNKNDYNDALAIAEAAQRPNMRFVQPKPVEQQDIQMLHRMRERLNKQTTALVNQVRGMLAEYGIVIAKNKAAFRTSFPDILSDESNELTVKGRYIFTQLHEEFTDIEKRLKSCDAQILEERNTNPVCQRLETTPGIGPITSTAFYAAVGEGKDFSNGRHFSAWCGLVPKQHSSGGKDNLLGISKRGNAYLRTLFIHGARAVLQHCGGKQDRLSRWAYALAERKGFNKACVAVANKLARMAWAIAAREDEYRTFA

SEQ ID NO: 470043 - protein, 317 aa, unidentified
MAEPCGVGLDVAKATLDLACSTNPAARWQTTNDEAGWAALVAHVRTLEPAVVVLEATGGYETGAASALSTAGLPVAIVNPRQVRDFAKALGLLEKTDAIDAAVLATFAARIRPTPRPLPDDLQADLHALVTRRRQLVEMLTAERNRVPLARGAVRKNLLAHIAWLDKQLGKTDRELRTRIEASPLWRVRDQLLQSVPGIGPTTSACLLAALPELGTLTHRQISKLVGVAPLPDDSGTRRGYRRIQGGRSAVRNALYMATVTAITHNPTIRASYRRWRAAGKLPKVALVAAMHKLLIHLNAMLKQQTLWHPSPTAPTA

SEQ ID NO: 470044 - protein, 451 aa, unidentified
MNNEPEIVLDDEHELVIERVAAIDVAKASGKVCMRMPHPSRPDRRMSKVRDVDATTRAVTELADDLLGEGIERVTVESTSDYWRIWFYLLEAAGLRVQLVNARDVKNVPGRPKTDKLDAVWLAKLTEKGLLRPSFVPPAPIRQLRDYTRFRVDLTRERARCWQRMEKLLEDALIKVSAVVSRMDSMSVRDMLEALIAGERDPRRLAGLARGKMRPKYKALVEALSGRFDEHHAELARMLLDQIDALGAQISTLTTRIDELLAALIDTPGPAADGSVRDRDGEVELIVTGLDAAERLAEITGIGPVSAQVIIAEIGLDMARFPTAAHLVSWAKLSPRTIQSGAIQRSGKAGKGNPYLKGALGEAAAVAARTDTFLGERYRRIVKRRGKLKALVAVARSILVIVWNLLSDPTARFHDLGPDYYTRRIDTERRARNHLAQLAALGYRVTVEPAA

SEQ ID NO: 470045 - protein, 319 aa, unidentified
MNCIGVDVGKQELVTYDGVEHRTFPNDRSLDEFSRYAQRRKDLLVVYEPTSTYSRRLEAFCRTERIVCCPLNPRVIPHLRQVSCRRSKTDETDAELLYRYGIERGEKEAGLLFHDEVVQSVSAHLAYYRVIQKARVACQGLMEALKEDPAASDELIAELEGEIAVMKEKEARHLEEAQELIAADEAGTCQLEALLTIPGIGPITAVTLIVMFRKYVNASRRQMVALAGLDPVLFQSGTSVHKKSRISKRGNREVRKRLYEATLSAARYNPSIKGIYQRLKEQGKPDKVARIAAARKLLLIAYAVYKSGKRFRLLNECQP

SEQ ID NO: 470046 - protein, 340 aa, unidentified
MGEITTVGLDLAKHVFQVHGVDAEGATVLRKQLRRAQVLEFFGKLPRCVVGVEACATAHHWARELRALGHEVRLMPAQYVKAYVKRNKNDAADAEAICEAVMRPTMRFVPIKTADQQAAVLLHRGRERLVRQRTMLVNALRAHLAEFGVIAPQGLRNVGKLIAIIRDGEDARLPDLARQVLQVLAVQIEQIEASIAVLEKQLMAWHKSNPVSQRLATIPGIGPIIATAIASMVAEPSGFRSGREFAAWLGLVPRQNSTGGKTRLGGISKRGNQYLRRLLINGASANLLRSKATNADPWVIGLRRRRPSMVVAVALANKTARIAWAVMYRQENYQRMAAAA

SEQ ID NO: 470047 - protein, 412 aa, unidentified
MDNTAYYVAGIDVHKRMLAVVVANARDRELQFEGRRFGTTISELQRLSTWLQERAVQEVVMESTAQYWKPVWFELEGQFQLWLAQARSNRGPRGRKTDFRDAKRSVSRLLSDELILSYVPDAEQRGWRTLTRTKYQLRRDRVRLQSQLESLLEECQIKLSSVVSDLLGASGQRILRAIAAGETDPARLRGLGDRRLHATDEELRDALNGQPLPLHRKLLTLYLQRLDLIEGQIAELESMIAEAMKAHQDAVVRLSQLPGLGVDSAQQIIAEIGPRAESFPSAGQLASWVGVCPGLQESAGESSSNRSAKGNRAMRRLLNQLAHAAVRKRDCYLQIVFKRLSPRLGYAKAVWAIAHRLCRLIWKVLHEGVQYVEYGPAVSALTLKRRKQRLVTQLAKLGYSVQLTPIPARAGS

SEQ ID NO: 470048 - protein, 369 aa, unidentified
MKFVGLDVSKETIAVGVAEQGGGPARSLGKVPNTPEGVRKLVQRLGPPAKLLACYEAGPLGYGLHRLLTGMGVRCVVVAPALTPVRPGDQVKTDRRDAVRLAQLLRAGELTPVWVPGEEEEALRDLVRAREAAKRDLRRARQALNSFLLRHGVQPPQGTRRWSRMYLRWLDTLSFPHRATQVVFQELLHAVRELEARLERLEAEIHALATESRYAPLIQALQALRGVGEVVAATLVAEVGPFSRFRNPALLMAYAGLVPRERSSGAQVRRGGITKTGNAHLRFVLGEAAWAYRHRPAVKAGLRRRQQGADPEVLRIALQAQERLHRKYWRLLARGKPAGVAATAVARELLGFVWAIACHVEAQQAQQAA

SEQ ID NO: 470049 - protein, 409 aa, unidentified
MDVLFDRVAGIDVGKATVTVCVRTPGTGRKRDSETRTFRTMTRSLVVMADWLEECGVTLAAMESTATYWKPVFYCLEERMECWLLNAAHMKAVPGRKTDVKDAEWIAQLLEHGLVSPSFVPPPQIRQLRNLTRYRSQLMGDRTRDAGRLEKLLEDASIKLSAVASNITGTSSREMLAALVAGERDPAVMADLAHSTLRRKIPDLTEALIGRFDEHHAVLVGALLTRLEHTEAALRQIDAELAVRMMPYARQLELLQTIPGVGVVTAQVFIAETGGDMTRFGSPEQLSAWVGVAPAVHESAGKRTPAGSRRGNKWLCSMLVEAANSASRTKNTYLASQFKRIASRRGQGRAAVAVAHSMLVSAYWMLERDEPYQDLGPDWLTKRNDEAHARRLVAQLERLGHTVVLDPAA

SEQ ID NO: 470050 - protein, 350 aa, unidentified
MKKVVKQVLGVDVAQKELVVTLGRMHDDFSIELYAYNVFKNNDAGIIALMKWVQKLTAREVNVRYVMEATGVYHQKFAYYLDEYGYEVSIVLPNKISSYIRTLEIKTITDKTCSEAIARFGLERNLDQWKRPKEIYKQLQQLTRERDQLVAERVVAKNQLHAEQTEAYPYKNSVKRIKARIRFLNQQEKEIKQEIDAIVNSNQDLKNEVDNICTIPGVAQLTAVIVLAETNGFELIRNKRQLVSYAGLDVREKTSGTSVKGKPRISKKGNRNLRRAMHLPALGAIKHNETHKAIYARLVSKSGIKMKGVVAIQRKVLELIYVLHKNKTVYQVDYEETKREQLQLAAPFTN

SEQ ID NO: 470051 - protein, 332 aa, unidentified
MKEVIRVGLDTSKHVFQVYGVDRLERMAACRQLSRHQVEKYFAALPPTVVGLEACGASHYWGRVLRELGHEVRLLPPQYVKPYVKRGKNDRIDAEAICEAMGRPSMRFVPVKSADEQAAVMLLSVRDLLIKQRTMLANAIRGHAAEFGVIGAKGVGRIADLLVRARESVPKLAFDLMAVLAGQLEVLEIQLGKLEKQLRACHRENARSQRLATMPGIGSVTAVAMVLRVPDPTVFHSGRHFASWIGLTPREHSTAGKQRLGKISREGDETLRRLLVAGATSVVKLAKRGKGPAWLLALLKRRPAKVVAVALANKMARIAWAMMVSGEVYRAR

SEQ ID NO: 470052 - protein, 315 aa, unidentified
MDMKAVGIDVSKDRLDVHVWPDGIAFAVARDGKGLAELIERLLPLTPDLVVVEATGGFETVVAAALAGAGLPLVVANPAQIRHFAQAAGTRAKTDPIDAAMIARFGHDMKPDVRPLPDEATQLLADLVARRRQIIEMIVAERNRERRATVRRIKKSIARLVRALEKELAEIDAEIDAGVRGSPAWRDKEDLLASVPGVGPVVARTLIAELPELGTLDKKKIASLAGLAPYTRQSGQWKGKSMIGGGRKSVRCALFLAALVASRHNPVLKAFRDRLRAAGKPKMVALIAVARKLLTILNAILRHRRPWNATLVEAS

SEQ ID NO: 470053 - protein, 429 aa, unidentified
MNCTQNKKIEQVKETTMIVGIDVGSEKHYFRAFNWRGIELTRKPVLFSNSMEGFNSFYNTIVELMQENKLEEAMVGIEPTGHYWFDLGQFMGGKNIKFVMVNPHHVHKTKELDDNSPSKNDRKDPRIIAGLVKDGRYFYSYMPTGVYAELRNASNRRFVLVEEQTRTKNRLQKWIAVYFPEYKGIYTHIDAKGGLMVLKQAPTPEEITKLGEEGIIKIWKDAKLRGNGHKKAMKILNAAMRSIGLKAGLTEARMEMQDLIEDYELQTKRLERVNDLIKELCRQVRYADKLLEIKGIGITTVAGFIAEVGDIARFDSTKELQKLAGLELVADSSGKHNGRTKISKRGRKRLRYLLFEAAISVVGKNEEFKEIHRYYTTREKNPLKKMQSLIAVACKLIRVFHVILTKGVRYDASKMLEDIRHPKEQLKAA

SEQ ID NO: 470054 - protein, 362 aa, unidentified
MVYLGVDVHRKVSHVVALDEAGETLLSRRFEHSPDAFRRVFGELEPEPVSVAFEATYGWGWFAELLADAGIEAHMAHPLATKAVGAGRVKNDAVDAGTLAHLLRTNLLPEAWIAPPEVRELRRLVRMRASLVRIRSRLKCQVHAICADAGVPVPVTDLFGKKGRTQLEALALPPITASRLAAHLRLIDDVAREVIAADREIVVAFKGDDRVRRLLPIPGIGILTAATIVAEVWDVTRFPSADHLASWAGLTPTERSSADHVRRGHISKQGSRWLRWAMVEAATRIGSSRSAKLHRFADPIADRRGTKIARVALARRILTLAFYALRDERGCRDYPPLPRPSRRPVTARSLPVMASPDGRLSD

SEQ ID NO: 470055 - protein, 403 aa, unidentified
MNAVGIDISKGKCMVVIMRLFGEIVASPFEVNHTASELSELAKRLKSLNGETKVIMECTGVYYMPVAYALHEAGLFVSVVHAQLIHDFGNNTIRKVKTDKADSVKIAQYGLTNWLDLPEYIPEEDVRHMLKTYSRQYTKCCKVKTMFKLNLISLFDQTFPGVNELFSSPPRKKDGHEKWLDFAAYFWHCQCISTLSQKAFIERYRKWCKRAGYNFSQRKAEDIYLESLGHIGVMPKNDTTKLLITQIISQINTLAETILNIAIEMNRLASLLPEYPVVMDFHGVGEVLGPRLMAEIGDICRFPKKSSLVRFAGLEPVENQSGSFDGNRKISKQGSPHLRKTLFQVMDCLIKLTPVNDPVFQFLDRKRAEGKHYYSYMNAGSAKFLRIYYARVMEYLNQLEDNA

SEQ ID NO: 470056 - protein, 412 aa, unidentified
MDVVYARCCGLDVHKQTVVACLITPGARGQTQKEIRTFGTMTGELLALGDWLAAAGCTHVAMESTGVYWKPIWNLLEGQFELLLVNAQHIKAVPGRKTDVKDSEWIADLLRHGLLRASFVPDRDQRELRELTRYRASLVRERTREVNRLQKTLEGANIKLASVATDIMGKSGRAILVELVAGGADPAALAGLAQGRLRAKLPELERALVGRFGAHQRFLVSQHLGHIDYLDEVIAALSAEIAERLRPFEDELVRLDAIPGVARYGAEVLVAEIGTDMSRFPTDRHLASWAGLCPGHRESAGKRQSGKTRKGNHALRTTLVEIAKAAARSHDTYPSAQYHRLAPRRGKKKAAVAVAHSILIDAYHILKEGTTYHDLGGDYFDRRDKEAVERRLVRRLEDLGNKVTLEKLDQVA

SEQ ID NO: 470057 - protein, 461 aa, unidentified
MSRKKLADKQNRSGSKRLDWKALELVHPDAAGIDVGGSEHWVAISPDRDGEPVRRFGCFTADLREMGCWLVGKGVRSVAMQSTGVYWMPVFEILEQQGLEVYLVNAQHTKNVPGRKSDVQECQWLLKLHTFGLLNNSFQPTDEIRIGRTLWRQRTNLVAEASSVIQRMQKVLTEMNVQLSNVLSDLSGMSGMKIIGAILEGERDPWKLATFVEPEVKAKPEDIAKSLEGNWRAELLFVLRQHVELYRIYQEKITDCDLQLRNHLVSLGSKVDLKTQPIGDRPKGKKKSKNAPAFDLRTELYRITGIDWTQINGIDVLTAQTVIAEAGADLSAFRTEKQFASWLGLTPTNEQSGARILKRRTRKVVNRASMAFRNAALTLLRSQSYLGAQYRRLRTRLGAPKAITAMARKLACLFYRLIKHGQPYVDKGNEYYEVKYREQQIRSLLKRAQKLGLQVVIPNTA

SEQ ID NO: 470058 - protein, 344 aa, unidentified
MDHFGGLDVSVKETSICIVDDTGRIVKEVKVASEPAALLKVLGNPAYRFKRIGLEAGPLSQWLFSALAEAELPVICVETRHMQAVLKAQINKTDRNDARGIAQMIRVGLYRPVHVKTLRSQKLRMLLTHRKLLQSKAIAIENDLRGTLRNFGLKVGMVGKVRFEARIQELVENIPDLAVLVEPLLIVRRVLREQIVILHRRLLAIVREDEVCRRLMTTPGVGPVVALTYRATVDVPARFRKSKSVGAVFGLTCSRYQSGEIDWSGKISRCGDEMMRTMLYEAAQSMMHSKKWSWLKAWAMQIARRRGMKKAIVALARRLAVIMHRIWVDGTEFRWTREQAAAAA

SEQ ID NO: 470059 - protein, 397 aa, unidentified
MSTIVYVGLDVHKEKIQACSFIPGYGIKPDLVFANDTLSGDYQVAGKYLAGLRRHFGKDARFVCGYEAGCLGFSLCRELSGKFGVECHVMAPSTMSQEPGSRIKTDRRDAEKIAKCLSSNAYKEVRMLDREDESVRDYIRMRDDFKQVQKELKQKILAMLLRRGVRCDTCKVPWTKKFMAWLGSADMGGALAREAMDEYVSGLERVNEKLEKLDRRILELSGAPRYRDNVRKLVCLPGIKEHTALALCCEVGDFSRFKSPKDLAAFLGLVPGERSSGDKTRRTGLTKAGNSHLRRLLTEAAQGALRSKPSYKSKALKARQAGAPEAVVAYADRARARFTGKYRRMASGERLGPGLDFLEARKPYNVVVGAVARELACFACGMVNGLYEGAESASFKD

SEQ ID NO: 470060 - protein, 332 aa, unidentified
METFVGIDIASKNFDVVIRKNGINQKVETFQQTAADIEKLIGKLKPMSPTAVVMEATGIYYVDLARSLYSAGLPVSVINPKSFRHFAELMLKRTKTDAVDAALLAEYGQRMEPQTWEAPSQHLVDLRDVARQINRLTHMKVQSKNRLHALRATKTTNAMVIESEQDVMDFLELRIERMRQHALELIAADERLNRQLENITRAKGIAENSAICMMGELNVLPLTLKAPQVVHHAGLSVRQTQSGSSVNSPGRLSKAGNTYLRSALFMPSLAAGIHDPHAKAFKEALVARGKKKIQAQCALMRKYLMGVWACIKNDTPFDSAKLFSPEHKKACI

SEQ ID NO: 470061 - protein, 390 aa, unidentified
MMLPNGDKHSNFSVASSHEGSIQLVKRIYSALTSHSLDTVLIGLEATSVYGDNLVYFLREDATLAPFNSRIHVINPKQVKRFHDAYNDLPKNDYVDSFVIADCLRFGRINKEVYSGDYRYQALRNLTRARFFTVQNLIKEKQRFMNVLFKKYSTMTQEKVFSNTFSATALAVYEEFDSAEALANMDLHELTDFIIEKGKNRFLNPDAVAKAIQKAARSSYRLPKTVNDSVNQVFSISITSMKALESQIKEFDKAIKAQTELLPNVLISIPGICPVYSAGIMAEIGDINRFDNQAALAKYAGLAWKQYQSSGFEAEVTRLIPSGNRFLKYYLCEAAFSLVRCDKEYSDFYHLKYKEVNRCQHKRALALTARKFVCLVFRLLKDNRLYCPAK

SEQ ID NO: 470062 - protein, 417 aa, unidentified
MFKIHRQNCCGLDVHKTWIYACIGITDANGRTEYMEARFSSFPKGLKELDDWLTLYSCDEVCMESAGKYWIPVFNVLEQNHSVTLAHPKYTKPQKGNKTDRKDAKWICDLFMCDMIKPSFIPPPAIRHLRDLIRYLRKLTNMETGEKNRAQNCLTVSNLKLDDVFSDVFGKSAMSITRYMLEHPGEKFDVAPFVDRRCKTPVEQIQAAVDGAVSTEQAVKLRQCLDHIDELEQHKEKITQEILHIVEPFSDVLALIRTVPGFDKNPMTAITVLSEIGADMSVFPTDKHLCSWAGCCPRNDQSGGKVKCTRISRAGTYLKPLLVQVANALIRSTKHVEFSERYRRLKARRGHKKALIAICRMLLTAIWNILSKHVPYTAEGFLQHRPVKSEKILTVAEGLYLLRLRGYEIRGISAGVT

SEQ ID NO: 470063 - protein, 276 aa, unidentified
MFPVGIDVSKNTLDLCMLYDGIKGRIKTRNIQNNRHSVENILRWLRLQHCSPEDVHVVMEATGVYHERLATELHDAGFRVSLANPHRSREFARGMGIMTKTDKVDAYMLACYAFLKKPHRWEPPAPEIRYLGALLRRRDVLLGDALREENRLEKYLSTDTPADIISSCRRMAQLLREEVSNIERQIKAHIKASPALRRDYTLLTSIKSVGPQLGMHMLVVLRSHNFVSAEQAAAFLGVVPIEKRSGTSVRRRPRMSKIGPPQLRAKLYMSPCRTGW

SEQ ID NO: 470064 - protein, 377 aa, unidentified
MKEKLRFLGMDVHAETIAVAVAEPDGEVRSLGTIANREDSIRKFIRKLGSPEQLRACYEAGPTGFVLYWQLTQLGVKCDVVAPSLVPKKPGDKVKTDRRDALKLARSHRSDDLTAVWIPDEASEALRDLVRAREAAKRDQLRAQHRLTKFLLRTGRRPPLGVKVWTERHAEWLQQVRYAHPAQEATLLDCLHEVQHMAERVKRLEKSIVEVIQRAPASMQEVIRGLQALRGIAHLSAVTIAVELGNITSRFEGARDLMGYSGAFPNEDSSGKRIRRGGITKSGNAHLRRIVVESAWSYRHRPAIGARLRRRQEGLPAEITEIAWKAQNRLHKRYMTLMARGKDQRKTMTAVARELLGFIWAIGIKAEAMACKQQMAA

SEQ ID NO: 470065 - protein, 365 aa, unidentified
MEKDSKRPAEETRRYVGIDLGDKKSRLCIVDEQGKIVSQEWVLTTPEAFLKRFGDEAPMLIAMEVGTHSRWTSELLGRCGHDVRVGDARQLALITNSNAKCDKRDARTLALLVRADPRLLSPIEHRAENLQMDLTVIRMRDNLIETRTRLVSSVRGVVKATGARLPSCETACFPTEVVEAIPKPLLPALAPLLEVIDQLNEAIYEYDCRLEHWARTRYPDSGRLTQVKGVGTLTALTFMLTVGDKERFSRTRSIGGFLGLRPRLSDSGDNHPQLRITKAGDGLLRKTLVECAQYIVGPFGQDSDLRRWGLKMIEEGNGSKRARQRAVVGVARRLAVLLLSLWKSGQIYEPLRHSRMRESSREVAA

SEQ ID NO: 470066 - protein, 346 aa, unidentified
MKILALDLGKYKSVACVYETASLTHKFATIVTTPQALHDLLVAEEPERVVIEICPLAGWVSDLVATLGIELEVASTTHAAWRWKNVKRKNDRQDGLKLAQLSALGQLTLVHMPEPRVRQWRALINYRQRLVSRRTRIRNHIRALLLRQAVAMGRGAGAWTRAGIEQLQALARPLAEVSEAELWRGELELELAALQALAKPLRQVEQKLDQLSAADKRVQLLRTIPGVGPRGGEALVAVIDEARRFRRGKEVGAYLGLVPKQIQSGESNRLGRITHQGNGMLRSLLIEISWSGLRYNAWMRAVYERVRRGSKVRKKIAIVAVARRLLIRCWAMLRDGTKWQPALSNT

SEQ ID NO: 470067 - protein, 438 aa, unidentified
MGSEGCASIWDNDPVNKPARISRMPKCVLERVCECARTSDQHLPISGMDDMNAENEIVCGADIHRDFLVATMISRSGLKLQEQFGMDQDGLLGFKSWLLDHRCRRVAVESTGNYWYPIFCILEGHVEFILANAFQIKNIECKKTDRLDSERIAIYCLNNLIKPSRIYPNDYRDLRSITRSREALVNARSKPKNQIHQSLAVCCIKLSSVISDSFGKSGRYIIERLLEGMTIEQIISGIPSKRVRKKADELREAIRNSIDSVQILLIKTNLDAIDYLSEKIKLLEAEIAIKVKPFEKDLNIILSVPGIGLISAAAILAEMGDYRDFQNADKLAMYFGIVPSVYQSAGKLRTGKITKLGSKHMRRILVEVAKAISKTKKNSKLKRFFLRVLARSDKKNVAAVALARKVLCIIYHLLMKGEDYLEPEVQKKSQKYPVASHP

SEQ ID NO: 470068 - protein, 482 aa, unidentified
MKKKNIYVNQSQELLSMFEEAGNNEKIMCVPIDYAKKDHIVMFCNGYGHILRKPFSIKNSPEGIAYLTEQVTRSCSHRCIDPKHVFFGGEDVGSYAENFANTLRSGGWIVAGVNAHDAKEQRANIQASTDRLDLMGIATMLLNRRANCSPAQSGIYRNLRTLVRHRRKLVSMSTEERNRIHTVVDRLFPGFLDEKNNGIPPFSESLLYLMENRFRPLQIRRRKRHKLIEVLHRYGTSKPEDTSARLQEYAACVLNTPDEYIFTLQLSLVQHVKHFRCLQDSINQLENEIAVWLAQTQGAFLTNVRGIGIVLAAGVSAETGDPYKQKPLNNLVSYSGIIPRVKQTGGSEGKTRTGKVAKRCNRILKDYVVQSALHMGLHGPEDLMADYKRREAAGQHADFGIGRRYLRMAMCLMRTSQIYMPQQLRNTKVKPEERAGYYLMTWPYLRNKWNKAGALEAAFKNDRPLGQWRNMVQELYEIKLKL

SEQ ID NO: 470069 - protein, 446 aa, unidentified
MPVRGTHCAGVEVHTKTIVVGCLTAGPDGTGRRETRTFGTTTSELVALSDWLTSRGITPIAMESTGEDWKPVSNVLAANFEVLGVNAAPSKNVPGRKTDGTDAEWIAELLRHGLLRASFIPPLAQRERRDLTRQRTILVQERAAGVNRLQKVVEWANLKLSGVVTDVVGVSARAMLAAIVDGQSDVALLAELARGRLRRKRAELEQALDGHGPDHHRCLMAQPVTHVDFRADQMAACDPQITALIEAQSPPADPPAAREAQSLTPAAPPEQTPDVEGAWPWAEAVAIGDRIPGSGRRVAEIMVAEIGTAMRRFPAAAHLASWAKLAPGHNERAGKRTSGRIGTGNLWLRSALIQAAQAAVNRQDSFLGAFYRRLVARRGVKKAIVAVAQKLLTTASTLLCKREHSHERGAEYLDERRTQRRVNRLRHDLETLGYTVSLEPVAALVA

SEQ ID NO: 470070 - protein, 457 aa, unidentified
MRKKVKRTKGMEEARPFDGLSKVNLNAAGVDIGATEIVACVAGGDEVQWVKAYGNYTTDLRAICEWFRQHGVQTVAMESTGVYWIPLFEELEKQGFECLLISSRSLRKVAGQKTDVEDAQWIQTLHSYGLLKGSFRPEGDLVALRTLLRHRAQMLEHRAPHILHIQKALLQMNIQLSQAVTDVMGVTGQAIIRSIVAGERDARVLMGFRDPGCKHSEEEIEKALTGTWRAEHLFVLKQSLELYDFYTEQIEACDEEVDRLYGLIRPDWEAGELPPIPQKKRKTHSKNAPKKAREIREHLKRINGVDITVVDGFGVSLAQTVTMEVGTDMSRFADEKHFCSWLGLAPKHDITGGKVLSNRTLKTKNRAGQAFRMAAQSVKKADCPFGVMYRRLRARLGPAQATVATAHAIARVVYKMLKYKVEYDPLSVNEYQKKYEEQQIKHMRKRAAKLGYQLVPA

SEQ ID NO: 470071 - protein, 367 aa, unidentified
MSSVASPEGLIHLGMDTSKNTIVVATLLPGEENPVTDRVFNEEEAIRRLVGRFPDRSVLRAWYEAGPGGYDLYRLLTSMGVACQVVAPSLIPKGGSDKVKTDKRDSRRLARLGRAGELTPVRVPSPAEEAVRDLARARAVVLDDRKRARQRLTAVLMRHGRIWRGASYWTAAHRAWIAAQRFGEPALAAAVGHYRAALEVREAELAAIEAELAPWAAREPLAGPVARLGCYRGIAELGGLTLAAEVVDWRRFPAARAFMSYTGLVPAEYSSGERTRRGHITKAGSEPVRTALTEAACAYRHAPAIGAGLRRLQHGAAPETLARSWKAQRRLHARYVHLVHAGGKAAPEAVVAVARELAGFVWAEMTA

SEQ ID NO: 470072 - protein, 400 aa, unidentified
MRTVFGIDVSKASSEVAILVNGEKIHGYTMLNDAIGFNRLLNDLKTVHNPEIIFEATGVYSRRLRAFLEEYGYAYTQLNPLEAKKQLDSLRVRKTDKIDAEKLAHSQFILNRKPTYAQEEVYQHLRDLSRFYQNLTEDIVRAKNRLHKVLQVTFPELENLLSTPTGEQYWNLVMAFPCKEFVLRLSQSDLCEIIRQSTSKRISEKRIAYLTDKLIKLAKQSFCAVKKISPMLEEVRYYAQELLRLSEHRQVVLDDMVALAQPLPEYDILRSIPGIAETTATSIIGELGDIRRFQSTNQINAFIGIDLRHYESGNFLAKEHITKRGNPYARKILFKCIHNIASASHTNPCHIADFYEKRKRLSTIASTKPHAIASIHRLIRTMYYLITHNKLYDYSLTQNR

SEQ ID NO: 470073 - protein, 356 aa, unidentified
MTIVAHAHPFVIGVDAHARNHAVAVVACPTGEVVDEAQFPATVAGLQRAVSWVARRTGGDLDVLWVIEGVGTYGARLARVANDTGYAVAEAGRMNARANRGVGKSDPLDARRIAQSVLAVDEGMLRRPRADDGVRAAVRVLVASRDHLSAERTSAVNALTALIRVADLRIDARRPLTAAQITAMAAWRGRDEDLATAVARREAVRLAKRVIAADREIAANSKQLTDLLNASPARVLLDQPGIGPVTAAVTLAAWSHPGRVRSEAAFASLAGVNPIPASSGNTVRHRINRGGDRRLNRALHMATVTRIRMDPRTRAYVEKRTAEGRTPREIRRCLKRYLARQIYRQLNAAETALNPT

SEQ ID NO: 470074 - protein, 348 aa, unidentified
MTTTVYCGVDFHARVQTVAYCVIADGEIHLHELDHRKDDVRGFYSQFSGEVVVGLEASGYSPWFEQMLEELGHTVWLGHAAEIRRLANRRQKNDRRDAELILELLLKEEFPKIHRPSAQSIEILRMLRYRHRLVKMRTMIINNLQALAIGSGLSLQSRLLTRPGRQRLLAIQMSPVMGRQREEWLSLLDDLNARIAAAVKWLEQQAQIDSKVQLLRTHPGLGLLTAIGLVHSMEPVTRFGNQRKVAAYFGMEPMERSSAEKKRYIGISKAGSRLVRFLLVEAAQTAARHDQELKRFYQRLVSRRGRPKALVAVGRKLLTRSYIMLRDNIDYAEFLRRGVEARPARQDA

SEQ ID NO: 470075 - protein, 315 aa, unidentified
MNSLPCIGIDVAQATLDIAVEGQTASLQIANTVRAVRHWLSRLKEPSRIGLESTSHYHQLLAREALAAGHAVYLLNARDLSHYAQSVGRRAKTDRLDAQLIARYLAREHEHLHPYRLPTALQSQLEELIGRRHAVVVAQVALRQSFTAMRQPPSQLQPALQALTTLIEPMDAQLHALVQQDTTLHNAARHLLTVVGFGPLLSSALATAVNHLPCQHADAFVAYVGLDPRVRDSGQWRGRRRLSKRGPAELRRLLYVAAMSASNTAVWKPIYARYRARGLSSTATLVILARKLARIAFSIVKYGTDFNPKLLQQQT

SEQ ID NO: 470076 - protein, 427 aa, unidentified
MPYRIAGIDVHKRMLTVVVCDVEVRGEYEFERRQCGSTPSHLRSLAAWLVEQQVEEVVMESTAQYWKPVWATLEQDWKPLCQGRAGARPMSGMLHLAQAQSNRGPRGRKNDFADPERLVKRLVAGELILSFVPSAEQRLWRTVMRTKCQLRCNQVQLQNRLEALLEEAHLKLSSLVSDLLGLSGRRMLTAIAEGETDPAAVAARADYRLRATPEELCDALGACRELHPVYRRLLKTALEDWQRTEARITQLSQEMATLLAAHQEQVQRLAEVPGLGVDSGQQIIAEVGASAATFPSAKALSSWVGACPGEEQSAGVNHNRRSPKGNRHLRRILNQAAHAAVKLKGSVFAILYRRYVVRFGHNQTVAVIAHRLCRLIWKILHQGVRYEERGPAVSQKSKQKRTARMIRQLRDLGYRVELLKLAAGVPA

SEQ ID NO: 470077 - protein, 406 aa, unidentified
MEVVHKRCCGLDVHKKKVVACVLTPEGKEIRTFGTMTEDLQAMCQWIRQHGCTHVAMESTGVYWKPIYNLLEDQGLEILVVNAQHIKQVPGRKTDVKDAEWIAQLLQHGLLKGSYIPSREQRELRELIRYRKSLIRERASEVNRLQKVLEGANIKLASVASDVLGASGRAMLEELIAGNTDEQSMAALAKGRLRNKTKELEQALKGIVRPHQRKLLAIQLQHIDELDELIEEVSAEIARRMRPFEEDLARLEGIPGVGRKAAEMIVAEVGTDMSRFPTAAHLASWAGLCPGNHESAGKRYSGKTRKGDGWLRETMIECARAAARGKNTRLSARYHRIAARRGTKRAAVALAHTLLVIVYHLLKHKVAYQDLGPDYYARQNREALIRRHVHRLKQLGVQVVITGEAS

SEQ ID NO: 470078 - protein, 376 aa, unidentified
MKIFVGIDIAKLNHFAAAISSDGEIILEPFKFTNDADGFQLLVSKLESFDKNSIIIGLESTAHCGDNLVRYLVTELYQVCVLNPIKTCQMRKNNVRKTKTDKVDTYVIAKTLMMQDNLRFVSFFNLDMMDLKTLGRFRQKTIKQRTRLKIQLTTYVDQVFPEIQYFFKSGLHQHAVYALLKEAPSPKEIASMHMTHLANLLKVNSHGHFTKEQAKELRVLAQKSVGANDSAISIQITQTIQQIELLDSQLEKIEAEMTDIMKYNDSVIMTIPGIGYINGGMILGEIGDIHRFSNPNKLLAFAGLEPSVYQSDNFQAKTTRMSKRGSRVLRYALVNAAWNVVRNNATFKAYYDAKRAEGRSHYNALGHCTGKLVRVI

SEQ ID NO: 470079 - protein, 404 aa, unidentified
MELTAVYRCVAALDVHQAKLTVCVLYENDLGEVVTEVREFGGFKRDRREMAAWVASFHPELVVMESTGIYWKSPYAALEWYGLNLAVVNARHVKQVPGRKTDINDAQWLAILARSGLLRGSFVPPQHFRDYRLIARQLQKLTGIAAGEKTRLHKLLTDAGIRLSVVISDLSGKSAKAMIQGLLDGETPEQLVAHADPRLKATPDELREALAGELSDSHRFVIRELMAHLDELEARILRFRQTLLSHLRDYQGILQNLQTIPGIDELSAAMLLVEIGDDMSAFGSADKLASWAGVCPGQNESAGKRKSARTRKGNPYLRRILCEAANAASRTRCRLQDKFKALLIRRGRKRAIFAIAHKLLKIVFLLIQRGDYYRDADTDYEALTVQRNAPRWIKKLIQYGYITP

SEQ ID NO: 470080 - protein, 366 aa, unidentified
MKKTSTVRVNGNMIFKGHKLTIGLDLGDRWSNYCVLDEAGEVLLEQKLATTPEAMKQTFERIPRGLMALETGTHSPWLSRLLRELGHEVLVAHAQKVELISKSNRKDDRHDARTLARLARIDPELLGPVRHRSAKAQIHLTVIRARAELVSARTALVNAARGLVKSYGERLPKCGTEQVGRELAAELSAELREVLEPLLKEIESLNEGIKEYDARMEKIARESYPQVALLKQVKGVGTQIALTYVLTLDDPHRFRRSRDAGCFLGLRPGRRDSGESQPQMHISKEGDRYLRTMMVQGAHYILGPFGEDSDLRRWGLRLAERGGKNAKKRAVVAVARKLAVLLHRLWVSAEVYEPLRNSHKAMRAVA

SEQ ID NO: 470081 - protein, 373 aa, unidentified
MIHVGMDLHKSFSEVAAIDDQGNILDQRRLFNDDPAAIVRYFRSLSGEVTVTVEATRNWYWLYELLETEVAKIKLADSRQVLWIAKARLKNDKIDALKLAELERVNLLPEAYIPPRPIRDNRELLRYRICRVHDRTTTKNRIHGLLDKLGITHGFTDLFGKAGMAFLKQVPMRDVYRVELDGYLRTLEHLAKEIYVITRLIEKAVRADRRCDLLVTIPGIGVLTANLLLNEIGDIKRFPSARHLCSYGGIVPRLRQSADHIWQGRISKEGNRYIRWAIIESAQKAPSKDDELRRIYARIAFRRGKQKARVAVARRLLVAVWHVWTYEEPYNLQISQSRSLSKPGGDAGPERPRVRLGSSDSNDNVSRRGRIEA

SEQ ID NO: 470082 - protein, 391 aa, unidentified
MYIVGIDIAKRKHEAAVIDGEGTVIIKPFSFTNNCSGYNRLLAMLAKAKLPLDEVSFAMEATGHYWLALFTRLQKEGFRVQVINPVQTNSIRSFYIRQAKTDPRDALLIAEVIRFGHFSESTLHPENIYELRELCRGRHAIVSMQADVKRKVVALLDQVFPEYETAFTNMFGDTSMAILQTCPTPKELSEMRLEELCHLIEVSSHKRFRMAKAQELQALARNSFGFAMAGDVFSTMIRLYAKHLVFLKQQVQEMDRKIAEIMDTLDTPITTITGIGPTLGAYILSEIGDISRFSSAAKLAAYAGIDPTMRQSGEYNGVRNRMSKRGSPYLRHAIWLAASSAVLHDPALKLYFQKKRDEGKPYMASVGHACRKMVSIIYAVMRDNKAYCLCA

SEQ ID NO: 470083 - protein, 380 aa, unidentified
MEYCTTIGADVSDRTTKICVMTKAEGGERRIVVETTCATTKAGFEEALSKFDRSWPVVFETGTHCRWMDRLFKEMGFKTIVGNPGKIPSITKSNTKNDRNDARELARLAIADPAMLHPVFLRDEVYQQMLRFHHARNVLLSQRTQTINQVRGFAKSMGYRIECSSTEKFHELGKADWPRELEECAWPLMGVLKTVNLKIKAYDRLIERLAERPEFKPMVERVRVVYGVGVIGSTVFVAAIGGRPDRFDHTRDIGAYLGMIPKQDQSGDDDKQLHITHAGADIVRTALVECAGVAMMSNAKDTDLKLKGLRIAMRGGRIARKKAKVAVARGLAVTMLALLQHPEREYVPLSEDGKKGFERYRAEMEYLTMQKASRKEKKVA

SEQ ID NO: 470084 - protein, 338 aa, unidentified
MTIVFVGVDLAKNVFAVHGVDECGRPALVRPNVPRDKLLRLLAELPPCTIAMEACSGAHHWARQLQAFGHTVRLIAPKFVAPYRMSGKQGKNDAADAAAICEAVQRPQMRFVPAKTQDQQSRLMVHRARQGFVEQRTATLNRIRGLLSEFGIVLPQKADTVRQRARACLEDLPGYANTVIGDLLSEVSRLDERIAAYDRHIAAMTADDDRAQRLMRLQGVGPTTASCLLAMIGHGQEFSCGRQFAAWLGLTPRQYSSGGKQRLGRITKAGDPYLRSLLVLGARAALNAAKSRDDAVSRWALALAQRRGYWKAVVAIAAKNARMAWAVLARGEAFVMPA

SEQ ID NO: 470085 - protein, 334 aa, unidentified
MWHIGIDLHRRMLVMAAVKDDGEVIAPRRIDCQDTAEILEAVEQLKPFRAVIEATGTYRWLYDLLSPHGSVLLAHPLRLRAMVQRRAKTDKLDAQLLANLLRIDQIPLSYVPPKNYQQLRDLTRCRARLARGQAKAKINLRALLARQNLTAPYKVPFGPRGLAWFGKQDFGTIENLVRDQLLAQLEHYAKHMAVLDEQLEQACEDFPQVEALLDIYGVGVFSALLVIGELGEVKRFRAAKQVGAYAGLTCRVHQSGSHCYHGSITHEGSSWLRWVLVQAAMHVIRSDVALRNFHTRIRKRSSAKIARVATARKLAEICWKRLRRWNKQHEGEKE

SEQ ID NO: 470086 - protein, 322 aa, unidentified
MLTWIGIDISCKQFDAAWYTETGRKHIKLDNNDEGFAKLLEEAPEEVAFVMEATGSYSINLALFLHEHGKHVSVVNPLRTHSFGKAEMSRNKSDKSDAYSIARFGQEKCPKAWVPVTKEMVEIQQLRAFADKLKQQITQLSNQRHAFSQSKLQSADALSLIDIAIKFHDRILEEAMKDLEAAVGRSFQRQIELITSIPGIGKETATRLVALIGDFSRFRTSRQLVSFLGISPTLKQSGTSVHSKGRISRLGNPQIRKALYFCAITASSRNAQCKSMWDRMEANKRPGKLIIMAIANKLIRQIHAVVCSGKAYNPNFANFSLA

SEQ ID NO: 470087 - protein, 354 aa, unidentified
MSQKLDTSPAVIGIDIGKNSFHIVGHDHRGAIVLRQKWSRGQVETRLANLPPCLIGMEACVGAHHLSRKLQMLGHDARLMPAKYVRPYSKGQKNDFRDAEAIAEAVQRPTMKFVATKTADQLDLQALHRVRERLVGQRTGVINQIRAFLLERGIAVRQGLRSLRSELPGILATRTDVLSPRMLRIIEDLVGDWRRLDERIEGLSSEIETLARQDKACERLMTVPGIGPIISSAMVAAVGTGDVFSKGRDFGAWLGLVPKQISTGDRTILGKISRRGNRYLRALFVQAAWVVLVRVKCWERYGLKSWIETAKKRLHHNVLAIALANKLARIAWAVLNKGRAFECVKTEETASRPA

SEQ ID NO: 470088 - protein, 405 aa, unidentified
MNAVGIDVSKGKSTVTIRKPGDVILMSPCDIPHSQSAINDLIKQIKSLEGETKVCMEHTGRYYEPVATWLSDAGIFVSAVNPILIRDFGDDSLRTPKTDKADSKKIARYTLDRWAKLKQYGIMDKTRNQLKTMNRQFGFYMAQKTAMKNNLIALIDQTYPGANDFFDSPARNDGSQKWVDFIHTYWHVDCVRSKSLNAFTEHYQNWCKRKNYNFSAEKAAKIYQIYSDLIAVFPKDDITKMLIWQAVALLNTASKTVESLRSKMNELASTLPEYPVVMDMNGVGATLGPQLIAEIGDVSRFTHREALTAFAGVDPGKNDSGKHIQNSVRTSKKGSPYLRKALFQIMDSLIKRSPVDDPVYAFMDKKRSEGKPYYVYMTAGANKFLRIYYGRVREYLSNLSNNETI

SEQ ID NO: 470089 - protein, 483 aa, unidentified
MKSKPQEKNKRATNHPTQHHWHEMNRKQRREMTRQIQSEDLSLEVIHPDAAGIDIGNESHYAAVPPSRDSQPVREFGCTTAELKAMAAWLKQCRIRTVAMQSTGVYWVAVYDILEQAGLEVYLVNARDTKNLPGRKSDVQESQWLMKLHTYGLLRNSFRPSQEIRVMRTYWRQRNDLVQSAGRHILRIQKALTQMNLQLANVLTDISGATGQAIIKAILVGEHDPHKLAEFRDPRVKASEEQIAQSLEGNWQPDLLFLLKQEQDGYEFCHKQMAECDRQLAQYLQQREDRSQSAPLPEEKRKGRLKKKKGNAPQFDLREGLFRMTGTDLTRIDGIDVMTATTVISEAGYDMSKWQTENHFVSWLRLCPDNRISGNKVIGKGRLPTNNPISIALKMAATTLRESKTYLGAQFRRLRTRLGAPIAIKAMAAKLARLVYRMLRYGMKYVDQGAAFYELRHRELQIKCLKSKAEKLGYRVTPIPAAA

SEQ ID NO: 470090 - protein, 375 aa, unidentified
MGNDITCYVGLDTSKATHVGWAVFKDGSEDIEFDVANERHAVRRMVRRLIRKTDGLVSLCYEAGPCGYELQRWIKAEGAACVVVAPAFLPGKAGERVKTNRRDAKKLAQAHRADMLTEVYPPTPEEEAARDLVRGREDLMGDVRRTRQRIKSFLLRRGLSLPGSKGTWTLGYRRWLKNLAWEHEADRVVFSDYLLALEQGEERKKHLEAKIKEISLQDPWRERVGWLRCLRGVDTLTAMTLLTELHGWERFRTPRELMSYLGLVPSENSTGNDARRGRIGGGNRYARRVLIEAAQHYAKRPGIGASLKKRREGQPGWVLATADGAQLRLHRRFCRLLVTGKHRNKVVAAVARELGGFIWAILQGPAPVASTEKAA

SEQ ID NO: 470091 - protein, 406 aa, unidentified
MGKSSTVFVGMDVHKESIDITLAEVGGEVRRLGAIGGDRVSLLKTVRKLRSRGQELVFVYEAGPCGFWIYREISSLGLGCMVVSPSLIPRRAGDHVKTDRRDSERLASLARAGELEPIHVPDIRDEAIRDLVRARDDALISQRRARQQLKALLLRNDIRYVGKTSWTAAHRRWLSELKLPQGAQQIAFEEYIDAITLATERILRLIRAIESEVATWRFAPVVAGLQAMRGIQFVHAVTLVAELGDLTRFHSARQLMGYLGLVPREDSTGERRRQGSITKAGNAYARRAMIEAAWAYRHPARVTRIIATRQTGLPKAVCDIAWRAQLRLSAAGSINSDHIFSGNSDHLGDPAEAPGRTSASASTGGGKDDRHAQATRDPGAAPRRPQPGGGRTARRGLAKQRAARRG

SEQ ID NO: 470092 - protein, 437 aa, unidentified
MRRKAYGAVRVNDVDVAKVVRGRDDLAVTVGIDVGKFQLFAVCRWADGRFERPWRANNPVEIMELVALLQRLGANRKLIVAMESSGTYGDALRQALQDAAIEVHRVSTKASHDYAEVFDGVPSQHDGKDAAVVAELAALGKSAPWPYRPTEVWEQELAYWVEWMVGHRQVLNLWQGRLEGLLGRHWPEATRVLKLSSVTLLRVLAQYGSPQALAADPDAAAQLARWGGRFLDPGKIKRLLADARTSLGVRPGEWETRRLQDFAQQALQARAQAARGQRCLRVVARGHPVLEAQGKVVGVPTACVLWVSTGDPRKYYAAAAYRKAIGLNLVERSSGEYQGPLHISKRGSARSRQWLYFAVLRLVQKAGVRSWYEAKKARDPDAAKSVLVAVMRKLTLALYHVAVHNQEFDPRRLFARIITHTKTAPAFSLAKEVNVEA

SEQ ID NO: 470093 - protein, 429 aa, unidentified
MKKIRNHSAGIDIGAKRVFTSVEGEQVVSHLTFTEDFYKLRDYLLEHKVETVAMEATGVYWIILYEILEEAGIDVWLVDGRQTKQVPGRKTDVKDCQWICELHSYGLLNRCLVVDSDIKELRSYVRLREGHIDSASKHINQMQKALVVMNIRLKEVLSQIHGVSGMAIIEAILNGERDRNKLVSLCHSKVLKNKKDLVYKALEGKYTEAGLFALQQAYDGYYFYQNQISECDKKISEVVNRIGNSGSGQEKRKRKPIRHNKPNVEKLDGNLLNIFDNNDATQISGITDYTWLQLTSEIGTDLTKWPSEKHFTSWLGLSPGQNNSGKKNRNARKKGKPRAGQIFKVIAQSLINSKNIAIGAFGRRLRGRKGPAIAIKAMARKLAVIYWRMMIKGIDYVEHGVKMYEQQIAANKLKVFMRLANELKVEIPV

SEQ ID NO: 470094 - protein, 387 aa, unidentified
MSQTVAAPIPAAVDHERTLVLAIEVSNKSWVIAAQVPGLPHTKAKRTIDPEAEALLAAIAGYRARAAATGRSIERVIAVYEAGWSGFWLARWLMRHGVEVYVVQPSSVPVDRRIRRAKSDGIDSELLLRTLLAWLRGEPRVCSMVPVPDEADEDARRCVRERSELISERIGLTNRIGAILATLGVSDYNPLLRNRARRLAELRTALGEPLPANAHAKLKRLLARLELVLTQIAELERERDAVVETEASDGASKMIQQLTALRGIGVQSATVLVREAFVRRFANGKALGSYAGLASSPYSSGGIDREQGIGKAGNRRVRTVMVELAWLWTRYQPGAAQVCWFRERVASTGRRVRKIMVVALARKLLIALWRFVIDGVLPEGAVLKPAA

SEQ ID NO: 470095 - protein, 350 aa, unidentified
MEYVGIDWSYRRAAWCAVGEAGRVVGDGAVAADENGLARLVLQRGVDVRAVVEMMSGAIWVRDTLAAAGWQVQIAHARKVRDVAPLACKTDKVDARVLAELCRRDLVPELWVPAIEDRELRERLRRRMHLVRMRASAMNRIFGLLTQWGLRLSLRRLRQADAMDLLGQRGVPQVWRDSIAEALAVIDLLDARIAPIDRELGPLARGDARVRLLDTIPGVGDLLGLTLASEIGDVARFKSPRKLIGYAGLAPSVHQSGDRSRTGALSKAGSRTLRWAAVEAAQHAWRPSNPWHQLYAELAARAGKNPAKSAVARKILIAAWHVLSRDQPFKHAAPRRPIPVSASSRRFLAA

SEQ ID NO: 470096 - protein, 414 aa, unidentified
MSNRRKKIQKVNQKVLIATVDIGKKSHYGYWRSSSGADCRPFGFANTRAGFDTFWRTICTAQDQQDADSIIVGFESTGPYGEPLVHFLRTKTVKLVQINPMHTKRVKELSDNSPLKSDAKDPRVIADILQLGHSLRVIVPTGQAAELRRLTTARERAVTDRTALLNRLQDRITIIFPEFLTVMNGVRSVSARYLLKRYPFPEDIIRLGRSRLAKRLHALSKGQLGEKRAAALIAAAKESIGITEGAASLRREVRYLLEQIAGVQRFISELEAEMETYVGMIPYRNSLLSIKGIGTVTAAAIIGEAGDLSAFRSAKALIKLAGLNLYEVSSGVHKGTRRITKRGRPLLRKLLFFAALNVVKKGALMHAYYQKRIQQGMPPMKALVAVMRKLLRIMYALVRDNTTYTAEYSILKAA

SEQ ID NO: 470097 - protein, 343 aa, unidentified
MKYIGLDLHKRNVFATVLGADGKIISRANISSKREDISHYLKAQGAGSELSVAIEASYNWLYYYRILEAITDNITVANPLKTRIIGEARVKTDKIDSAALAHMLRADMLPGVYVPTRTSMENKLLLRSRISLVRVRTQIKNKIHAIVDRNRDSYSGLENLSDIFGNTGIFILKGTQIPQPDYMILTGYLDLISDINKKIAELETEIDKRIAPDKDIELLKTIPGVGSFTAFILKSEIDDIKRFTSKEKLTSYAGLTPSVHQSGPRSYTGKITKQGNKFIRLALTEAAQVSIRYSEYFRYHYNKVRAKQGGNSATIAVTRRLAEIAYVILKEKREYIEKPIIYS

SEQ ID NO: 470098 - protein, 296 aa, unidentified
MLILGVEYHPSEQYSALADTETAECGERRLNHSAGEAEKFYRNLQQRAASVRVGMEATGYSRWFERLLAELGSELWIGDAAEIKTKRVRKQKTDPNHARLLLQLLLEDNFPRIWVPSPENRDLRQLLWHRHRMLQMRTRIRNPLQALAMNQGQRRKKKLWNEPGRAPLEKLPLAVWASRRSTDLLELLDRMNPPIEGLSAAIEREARKWPEVLRLMTHPSVGPLTALAFVLIIGTVERFKCGKQIGSYVGLIPCEDSSAGHQRLGHITKQGSSLLRFLLGEAAQAAARCDADWRRR

SEQ ID NO: 470099 - protein, 368 aa, unidentified
MPFSVMRKSDDRVVIAVDPHKASWTAAAVDGSLQPVATVRVPVSRDGYRALRRFAHRWPHARWAIEGAAGLGAPLTSLLRANGIEAIDVPAKLAARVRVLSSGHGRKNDDADALSVGIAALTSPALRTAEVDVATTALRAIVEHRDDLVKTRTQTVNRLHVVLTRLVPGGAKRQLSADHAAALLRGVRPHDAAAKTLRALAMDLISEVRQLDRRIAKAANDIQMAISASGTTLTKLHGLGVLTAGKILGRVGDASRFRSAAAFASYTGTAPIEASSGDVVRHRLSRAGDRQLNFCLHVMAITQVRQDTPGRAYYLRKRSEGKSHNEAMRCLKRRLSDLVYRRLIHDADTQKAGPGGHSGAALSSRAAG

SEQ ID NO: 470100 - protein, 377 aa, unidentified
MQVVYPRCCGLDIHKKTVVACMLLTDPDGTNRRIVRTFGTMTVDLLALGDWLSLHQVTHVAMESTGVLSSTCWKRGAPSCWSMRSHIKAVPGRKTDVKDSEWLADLLRHGLLRPSFLPPPSIRVLRDLTRYRKNLVEVRTQEINRLHKVLETANIKLGAVASNVVGVSGRRMLEAIKQGEADPQVLAELAKGRLREKLPALRLALDGRVQAHHQLLIGELLDHLDYLDRAIHRVEVDIAALVAQEEKAVELLLTLPATGPVTAAAIIAEIGTDMSRFPSAAHLASWAGVCPGNKRSAGKQRSSASTKGNKQRKHNPVRNRSHDCSHAGDVPACALSAHRAETRQAACHDGGGPQPAGEHLLHAARSGLLSGVGAGLL

SEQ ID NO: 470101 - protein, 363 aa, unidentified
MSNTEDIVLAVDYHDKNLVVRMYDLAVSQEQVIRAETTAAAIEALVKVAARRAGPRGGRVVWVMESTTGWARVKDLLGKRAEFVLANVLQMPVPPKARRRKTDKIDTKRLLREYLNGPLPRAYQPPLSWRRLRRLVGARESLVSRQTALRNWIDRYLAHETWASRKGLWSDRGICRLRRFAERQEEPDRTVLSVKLDQLAEVGTHLDRLVEQIEGVCAAWLEARRLDEIFGIGAVSAVSILARIGEVTRFGSAEQLISFAGLAPGIRQSDRTSREGHLGGGGTDKHLRHYLIEVSLWARKIPRYCPTYERACRRRGKKIARLVVARLLLRGIYKMLRDGVRFDPVGRRESARRLERQLTAGGR

SEQ ID NO: 470102 - protein, 344 aa, unidentified
MEHISRIGMDTSKHIFQLHGVDAAEMPVLRKKLRRKEMVRFFENLAPTVIAIEACGASHHWARLLQSLGHTVKLIPPQLVKPYVKRGKNDAADAEALCEAMSRPAMRFVPVKTAEQQAALMLVGVRDRLIRNRTQLANTIRGYAAEFGLTAAKGMAHLVPLLERIQADESLPPLARELFAIQAKEYTQLQAQIDAVDAKLIAWHRADECSQRLAKIPSVGPIGAMLLRMKTPQPELFQSGRQFAAWIGLTPKNHSTAGKLKLGAITRAGDEGLRTVLVVGATAVVQHAQRSGKASPWLAALLKRKSPKLAAIALANKTARIAWKMMITGETYKAIAVPAALAGA

SEQ ID NO: 470103 - protein, 381 aa, unidentified
MPTMTHPDPVEQTCTHTAGGELPGGELPGGELTGGEVTGGVDTHSDTHTAAVLDLTGRLLGHRQFPATPAGYAGLLGWLCGFGPLARVGMEGTGAYGAGLAHHLQTAGVELVEVDRPDRTTRRHRGKSDPVDAEAAARAAQAGRAVGVPKTRGGPTDALRSLRVARRSAVAARAQAQTQMKSLIVTAPDTLRTSLRGLGNRELITQCATRRPDRSTATDPATATVLALRALARRHQHLSAEIAELDTLIGPLVAALNPALLALTGVGVEVAGQLLVTAGDNPQRLVSEAAFAMLCGVAPLPASSGLTVRHRLNRGGDRQANSALYRIVLCRLHWDPRTRAYAARRTTEGMSKPEIIRCLKRYIAREIYTALLNPHHPASTA

SEQ ID NO: 470104 - protein, 375 aa, unidentified
MSDHSEAFVGLDTSKLRNAVAIADGDRGGEIRFYGEIENTPAATAKLVRKLAAKHQRLTFCYEAGPTGYGLYRQITSLGFECVVAAPSLIPKRPGDRVKTNRRDAMSLAKLLRANDLTAVWVPDGGHEAIRDLTRARETAMLDLRTKRQHVSAFLLRLERPYPDGKKTWTKAHMGWIAGQKLDYPQHRIVLEEAMLAVRQAQERQERLEQAIAAAVQDWSLAPVVTAFMAMRGIDLIAATTLLAEIGDLSRFQTPRELMAYLGLVPSEHSTGDEIRRGPITKTGNRRARRMLVECSWSYLHPPRVGRAKQPKVDAAPPAVREIAWKAQHRLYRRYRALIRKGKRSTVAIVAIARELAGFIWAVARAATTARAVVA

SEQ ID NO: 470105 - protein, 430 aa, unidentified
MQLFIPTTNKEETTMRGLRVKRVRTVKEGTLIATVDIGVANNTGYCTTLDGRSTKSFRFDNTKEGFEKFWCITIASKNRLGCDEVLVGYASTGPYAEPLVHYLANKQVKIVQVNPMHTKKMKEVNDNSPLKTDDKDPRVIADIIRLGRALTIVVPEGNAAYLRRLNNARERHVGERTAFLNQLQQLVFLIFPEFKTVLKDMKGKTAQHILKRYSTPERIVTLSKEALGEEMRKRSMGKFGIKEAEFLIGLARETVGIKEGLAGIFMDIRHILMQLEAEVRFISEIEAEMGATLERIPCSVKLLSIKGLGTVSVAGLIGEVGDFSKFSTQSKIMKLAGLDLYEISSGKRKGQRRISKRGRSLLRKILFYAAIQMIRKNGIMYDYYARLTGRGMERMRALIAQYRGSSYGSSMPSCGITETMWDNTKPPKGG

SEQ ID NO: 470106 - protein, 333 aa, unidentified
MCQGGHPGVRRSDVPCGVGIDVAKAQGAIALRPAGERWAVPNDTGGVVMLVERLPALHPPLMVLAATGGLERAATAALATADLPVVVGNPGQARACARATGPLAQTEAVDARALAHCAAVLRPTPRPLPDAQTQERRALLGRRQPLIGMRTAEQHRLAGTNARLTKDSAAHMTWRNAAIATLDDDLETILRASPLWRDNDDLLQRAQGIGPVCARTLRRERPALGMCTRQQLAAVVGVAPRHGDSGTLRGRRMIWGGRAPVRPVFSMGTLVATRFTPQINVFDERLLAAGKVKKVALTACRHTLLTMLNAMLKPRTPWQPQEVQREKNIQRPP

SEQ ID NO: 470107 - protein, 358 aa, unidentified
MSHYRVGCDAHRRYSQFAVLDQNGQLRQQTRVDHEPGAIRAFLEGLPDGTPVALESVGNWYWIADEIEAAGCLPLLTHAAKAKAMMGNVNKTDKLDAKGLAKLLHLESLPTVWLPPGEIRDERELHRTRMALSKLRTALKNRIHSTLAKYGITTTDHSDIFAGAGRIWLQGTLGRLPPETGRCVAQEIEALDGLGDQISQLERRIRQRTALTLSIQLLKSLPGVADVLAIIIEREIGSIDRFDTSGQFTSFSGLVPTVHASGGKTRFGHMRKPCNQYLKWAFIEAANVIVRHRHHPAWKTKYVCQIYDQVSRRKGHAVAVGAVARHLAEAAFWIIKRQEPYRPPASRQASPKQVRGRA

SEQ ID NO: 470108 - protein, 356 aa, unidentified
MDKVIREGAVRVGVDLAKRVIQVHAVDATGHVLTSRALPRARFIDWCVRLPAGCVVAMEASSSAHHWARKLVALGLDARIISAQLVEPYRMEGVSGKNDANDAAAICEAASRPKMRFIPVKSIEQQSMLCVHRLREGLKEDRTACINRIRGLLAEFGLVFPQSPRELQAALSDVLEDAGNELGTLARLTLQRAQAQWRELDDHLAWCDERIDAHRRSNPEVQHAATLIGIGPVTASAAIATVGDFKQFKNGAQFGAWIGLTPRQRSSGGKNNLGGITKRGDTYLRTLLIQGAKSAVMTAHRRQDKISSWVLALRERSGWQKAVVALANKNARILWAVMTRGDVFDPNHLSVKPAAT

SEQ ID NO: 470109 - protein, 424 aa, unidentified
MKNNVVVGVDVSKEFSYLCMVGPDGKKLAKPFKVLHTLEGLNFALKRLKEVEYQYGSKCILVMEATGVYSRLLFHFFHQSNLDVWMVNPIQSNSIKNIKVRKVKNDKVDAYRIALLFLLGKAVPVRPPREDLAEINILCRQYFRLSDGFTKNKNHLVSLVGQVFPNYDKVFSDITSESSLYILENFSSPNKLLKADKETLVQTIAKLSRKGCNWALKKYDALIDVAREALILGCAPPAAEIAILADTAVLRALNEQLRVIECKIRALSSNVMEIKLVSSIPGFGILSAAFVSEIRDFCNFKSPKKLVAFCGIDPAVVQSGKFKGSQVNISKRGSPFLRRVLYTAALASIRKKKNGDYFNPVLVDYYEGKIQSKPKNVALVAVMHKLVRYIFAVLRDEKPFRLITPEEQLKAFEEARLSPLKMTV

SEQ ID NO: 470110 - protein, 392 aa, unidentified
MKLVGIDIEKKHFFCIMDKDSGEVLLQPSSFSNTKDGFDSLIQKLSSYSKDSILIGMEDTGHYHFALLKYLLEKNFTVALINPKTTDYTRKMQNGITKNDKLDTLTICDVLDTPVRKKQYRITKVNSFDLYEQKQLTRHHHNLKEELNVYTNRLQKCIDIVFPEFNSLFSSKYGIIYMNVLKTFGSAENIASTDIRTIRKCFEIKGRGNRISLTAQQLNSAKSSIGISSAAEVIKIKHLISQIELINEQLAETDKKIEEFSIQNNSPILSIPGISHFSGTSILAELGEISNYSKPSKIIKAAGVAPYHYESSQYNAQHTAITKKGSPYLRKTLYQIILPVINNNPVFKQYYDLKISQGKGHRCACGHCVRKLLRIIYHLSSTNQQFDDALLR

SEQ ID NO: 470111 - protein, 403 aa, unidentified
MNAAGIDVSKGKSMVSVMRPLGEVVAKPFTVCHTGSELKELADYLKSLDGETRVIMEHTGRYYEPVAQVLHDAGLYVSAVNPKLIKDYGNNSLRKVKTDKADSKKIAKYGLDNWGELRQYASMDMIRYQLKTLNRQHALYSKMKTAMKNNLIALLDQTYPGVNALFSSPAREDGTQKWVDFAASFWHADCVRGMSQATFTERYRKWCKRNRYNFSSDKAAEIYTGAKDQIAMIPKDDLTKRLIRQAIDSLNTVSKTVEQLKAEMLKLASQLPEFPVVMEMHGVGDSLGPQLMAEIGDVTRFVHRGSITAFAGVDPGANQSSEREAKSVRTSKSGPPELRRTLFLVMDGLLKSMPQDDPVYQFMDKKRAEGKPYLVYMTAGANKFLRIYYGRVKEYLASLENAD

SEQ ID NO: 470112 - protein, 387 aa, unidentified
MKKAYLGIDAHKDQNTIALAFAGRGDPELYGKAPADLAAFVRVLRRVLEKYGLTKEDVALCYEAGPTGFVLARRLRSLGFECEVVAPSLIPVKASDRVKTDRRDARKLAGLFRAGELTFVNVPDVADEVIRDVCRGRTDAADVRGRARQQLGALLLRNGHRYGGKSPWSEAHMRYLRELVLPAPAQKFVLEEYLQRVDASVAQVERIEKQMEVLLPDWQRRKFVEALQGFRGFQLVAAMTLGSELGDLLRFDHPRRLMAYVGLVPGENSSGERRRQGGITKCGNSHVRWMLVEVAHHYRYPPKVSRELSLRQEGLSRDVRAVGWRAQERLHRRFCRLLLRGVHPNKVVIAIARELLAFVWELARVLEKERAAAAPQESARPAARKAS

SEQ ID NO: 470113 - protein, 391 aa, unidentified
MIYVGIDVAKDKHDCFITNSNGEVLFQVFTIQNNREGFDSLFSRIQSVSPDMSNIKVGLEATGHYSYNLLGYLIDKGLPTFVINPLHTNLYRKSLSLRKTKTDKVDARTIAMMLMSDVNLKSYSGTSYHNEELKSLTRYRFDKVQERAQLKQSVSRLVTILFPELEKLVPTLHIASVYTLLSELPSAGKIASCHLTHLTKMLENASKGRYSRDKAIEIRDAARTSIGSNMPAKSLELKHTLRLIGELDSEISEIESEIKQIMDQISSPILTIPGMGYRMGAMILAEIGDFSRFDSPDKILAYAGASPSTYQSGQLESSYSHMEKRGSRYLRFALINATKYVCHWDETFGTYLQKKISEGKHYNIAITHAAKKLVRLIYAMEKSGKPYIKTA

SEQ ID NO: 470114 - protein, 311 aa, unidentified
MEHSPVVGIDVAKEHLAAHVRPTDEALRVSYDDAGLAALLTRLRALKPTVIVLEATGGYEVPVVAALADAGLPVVVVNPRQIRNYARALGQLAKTDPLDARVIARFAEAVRPPVRPLPDAQAQALRALTARRRQLVDMLGAEQNRRRLVRDQPVQRQLAAHIAWLEQALRGLDHDLTTLLRSTAAWREKDDLLRSAAGVGRVTSCTLVADLPELGCLTRRRIGALVGLAPFARDSGVFRGRRMIAGGRAHIRRVLYMATLSAIKHNPAIRGFYHRLVTAGRPPKVALTAAMRKLLTILNAMLRDRRPWQPA

SEQ ID NO: 470115 - protein, 398 aa, unidentified
MFTIWAGVDIGKEHHHCVALDARGERRLSRRVGNDEPELLELIREVLALAEPGEVLWAMDTNHGSAALLIGLLLEHGQPMVYLTGLTVHRAAAGYRGQSKTDAKDAHVIADQARMRQDLGLLRPGDEVAVDLRILTGRRLDLVNDRTRQINRLREQLLGIFPALERALTRKGRGLVVLLTGYQTPGTIRRIGARRLESWLKNRGVKNASSLARTAVEAAEAQHTALPGEKLAADMVARIAKGVLALDAEITELDALIEARFHDHPHAKVIETLPGMGPRLGAEFIAATGGDLTAFGTPDRLAGFAGLAPVPRDSGRVRGNLHRPRRYHRGLLRACYLAAMASLRCCPVSQHYYQRKRNEGKSHIQAVLALARRRLNVLWAMIRDNTSYEIRPAIPTAA

SEQ ID NO: 470116 - protein, 320 aa, unidentified
MQTPSVVLNIGADVAKDEIVVACSEGSFPVRKVANQRTALLAFLNGLPAGSRIGVESTGSYHELFADAAHQLGFLVFLLNPKDTHHYAKAVGLRGKTDRVDAELIARMIAHEHTKLHAWIPPTAQQREMDRLIKRRATLISLREAVTMSLHELDGFAAELKALRTRFNQLIARIDLRVKALIDANPDRKQNFTRLCTITGVGPVVGTALVNTLERVPLKSADAFVAFTGLDPRPDDSGQHRGKRRLSKRGPGELRRLLYLAAMSAIKTKTWRPLYEHYRAKGLSSTATLVILARRIARTAWSIYTHKTEFDPGRLTKPFP

SEQ ID NO: 470117 - protein, 449 aa, unidentified
MRKKKNKANKRIHLQSLPLINPNAAGIDVGAKEHLVAVPPDRDPQPVRTFQAFTPDLHELARWLKRCGIETVALESTGIYWISLYEVLEQYGFEVRVVNARHVKNVPGRTKTDVLDCQWIQKLHSFGLLNGSFRPDHQIRKLRTYMRLRDNLVVERTQAIHHMQKALFEMNVQLSNVISDIVGETGLRIIEAILAGERDPEQLAAFCSTRIKSSRQTVAKSLHGNWDEALLFCLKTALETYRFNENKIQECDHCIERQLATFDSRAQLSQQGESLRSQLHRVCGVDLTKIPGIKEQAAQIIISEVGLDMGPWKTEKQFSSFLGLCPNNLITGGKVLRRATRKVYNRAADTLRLCAQSLTHSKSALGAKYRRLRARLGAPKAIVAMAHHLARLVYRMLRYGQNYVEKGIEHYEEKFRLQRIKWLKKEAQSLNLRDIVKSCVLEAGASLLK

SEQ ID NO: 470118 - protein, 454 aa, unidentified
MKKQDSYDYYAGIDCAQNKHDFAMKNNQDKFLIKRGHFSNTLQGYEKFLNTVLSKCLNKDKILFGMEVTGIYGTNLYERLKSDGYHVVMISPDSVKNYRDYKRLNKTDKIDSGCIAELLLNGDAQIVHVAKNGYTDLKAYIRRRNALKVTCTQETNRFLAKVCLCFPDLLKVFPSGRATLKAIFSIYPTPYSIIEADFDELVSVLQKASKNKFGVDKANELIHAARNSIVVRKSISDGELYNIHSLIDSIDSLESEIRNLEKIIDSKAEEFPAYHVLLTLTGCGKITAATIVAEIGDIPRFHKASQIVSLAGLYGDNSKSGSSVNKRGKISKKGSRYLRHAIYMVAEFARRNNPIFKAYFTRKKNGDRTKHTLAVNAVANKLCKVIYSLMKNQSTYIIQYRDLVKLSESTQNEFFQNAETDFSAKTRRKKYLYEDEYGELHEFVFKSIKTALIE

SEQ ID NO: 470119 - protein, 376 aa, unidentified
MKKKRDREGMVTAALDLGDSKSLATILSPDGDVVDRFSISMSDDGYSLFASKVPKDARIAFEATSMAYPVSRRLTALGYSDITVAHSKELAWIVKSKKKNDRIDSLKIARLHMAHMLPESHLLSREEQVKRDLLIQRVTLGKEIGKMKLKLIAYLKREDVYLSLPESSDSFSRERRQAIRSMRFGGDGDDDDGRDLVVGTMMDRLEFLERQCAPLEEKVRTIVRGSEDIRRLMSIKGVDFYLASLASSYVGDVNRFPDDDHLASFLGIVPESWDSANVKRRGHMSKEGPSTARWAFSVMTDTVMRYNPRLKTYYLSVKKRKNSGSLAHVATMRKLVRMIDHMLRYKENWRWEDEASTAKKLANLDRGAEAKTTGGD

SEQ ID NO: 470120 - protein, 428 aa, unidentified
MADPIHDVRPQTWVAIDIAKQFHAVLIETSQGRRQRFKMASTACEHDRLIALLSSLPQPCRIAFEPTGNFHRTLAWRLLAAGFDVVTVSTVAAARYREARFNSWDKNDPKDAQVILEMLKQGLTQFYHEPLLTGCHDLQELSKTYHQVALARKRLADTLLNHYLPLYFPEMARYWEATRAEWFIAFLQRFPTPGAILTLNESEFVQAAGPLLGRKVNKTGKLLEMYALAQHSSALPVLEDSLAVQTFRQQLAHMAHVAALRRTLEQQAQVLLQDRWEFRCLSSLPGVATILALIILAEVGDIRRFGHHRQFLKYCGLDLAKSQSGQSKGKERLSKRGNARLRYAFWMAALVAVRMTENSFRDKYERYLASAPHDADRKRMALTAIAAKMARVAYGLLKTRTMYQGYFEHALPGGSTSLALAIEATMTS

SEQ ID NO: 470121 - protein, 313 aa, unidentified
MVQSIGIDVSKGKLDLGIINSDNTTESLQFGNDHKGIPSLVKVLRSYQEIEDIPIVIEATGGYHYGITFFLIEKGFKKVFVINPIITKKHLSSQIRKIKTDKKDALLLAKIGLLEDLHTYAESKKEVLFKRKVRLYHFLKKQLQQVNNRLSSVKSLSIENDFEQDMLTKTKKEFEANIKTVKKEIMTGITVEIPEIRGVSDLHFKAIAAELGNIDRFQNHKQVVAFAGLDPSIRESGSSVLGRSKLSKRGSKTMRYFLFQSAWGVMMHNDKYKRYYAKKRSEGKHYYTCLSAIARKLLCEIYHNLKEHPYSIN

SEQ ID NO: 470122 - protein, 340 aa, unidentified
MQIEVLGIDLGKNSCSMVGLDGRGAVVLRRRMRRESIIKQLAKLPACVVGMEACCGAHHLGRVLRAQGHKVRLMSPEYVRPYVKSQKNDDRDAEAIAEAATRPTMRFVDLKSQEQLDMQTLHRARDRLVGERTALINQLRAILLERGVTVAQGRRRLERHLTNADALDDLSDRMRLLIEDMRAQWSELDRRIAQMDAELAEWARNEEAARRLMTIPGIGVLNATALIAAVGSAESFPRGRDLAAWLGLVPRQVTTGGRPRLLGISKRGNKYLRKLLIHGARAALPTLLDSPTPLGAWLRGLIARMHKNAAVVALANKLARMAWAVLRHAEPFRLNASVVS

SEQ ID NO: 470123 - protein, 344 aa, unidentified
MKALKSHVAGIDVHKEMLAITVLIGELDREPKEYQFESFTFTDDLMALGLKLKEMGVTDVAMESSGIYWKPVFNVFNPLGLKVVVANAAPIKNVPGRKTDMNDSRWIAELHRFGLIRASFIPDGEFQRMRLLSRHRTNLTEDLARVKNRIQKVLEDGNIKLSIVVSDIFGVSGLKVLKQIAGGYTHPNILITEVTTKIKRMEEMKKALTNCLTTEHCFVINVLMKQYEELKNRIEEGENELCKKVEPYAHLVEELDKIPGIDAILAMGIIAEASANMSSFKDERAFAAWSGVASGNNESAGKKKRAKCRKGNPALRKMLIQAAQKATTARNPFIDLNTTNSAFA

SEQ ID NO: 470124 - protein, 397 aa, unidentified
MIAVGIDVSKSKSTVAILNTDGSIRAKPFDVHHNLDELHSLALYIKSANEQPIILMEPTSHYHYPILKVFQEEQLPVCLINPYLMKKYGDNEIRKAKTDKKDALRIAQYALEKAYSLTPYESAEQKYDDLRFLSRQYKQRISTLTVAKVQLQNLLDETMPGITSILPLKSRDPENCVLLRFIKRFKSFDVIRKMGKTRFLESYKVLVKKTTDRYALSKGLAIYELVINSVTTRGENPLSSIVQEQCVDLVSTAQTAADEINLQMRIIAETIPEYKILHDMPGVGDRLGPIILAEIGDIRRFHSGKALNAYAGNDAPPYQSGQFESRNRHISKRGNPALRKACFEVMQALKLSKPQNDPVYLFMIKKEQEGKPYNVAKMAAVNKFLRIYYARAMELYK

SEQ ID NO: 470125 - protein, 422 aa, unidentified
MLEETQDTEEFIERVAALDIGKKELVCCVRVPGQGKRGRRLQEVRTYQTMTRSLLVLADRLGELGVTRVVMEATSDYWKGPFYLLEAQGFEVWLVNAKDVKHLPGRPKTDRLDAVWLCKVAERQMLRPSFVPPPVIRRLRDVARYRADLVAVRTAEKQRVEKLLEDAQIKLSVAASDIFGVSGRAMLAALLAGERDPKVLAELARGRMRAKRSVLEEAFTGHFTDHHGFLLARMLARVDALDADIAELDGKLEELIAPFTAAADRLDEITGVGRTAACAIIAEIGTDMGRFPTPGHLASWARFAPAVKQSAGKTKGKNATGHGNPYLARVLGEAAAAAGRTDTFLGERYRRIARRRGAKRAIVAVGRSILVIIWHLLADPDARFHDLGPGFYDTRINPERAKRNHVRQLEALGYKVTLQPAA

SEQ ID NO: 470126 - protein, 427 aa, unidentified
MTRISVGVSKNRSTVCIMDQDGKVIMRPFLVWHSTEELDFLADTLKRLNGEVRVIMESTSVYQYPIALQLKERGLFISIVNAYEMKQFANIDFRGGKTDKKDSRTIASYGISYWDKLVEWQIPKDTYFNLDLLNRTYMNAKKHRQIILQELQHYIDCAMPGMDKELHSLNLNTKKDFMLDFVEKFWHRDEIVNMTEAEFTEVFTAWAKEKGYRPGKGKAAKIYAIAKSCIPYYPANPTVKTILQCIVDKLSGVNRTLVTIVTQMIEEAKKLPEYQIVREMPGVGDPLAARFFGSAGDIRRFKNSKALVAYAGIDSPPDESGDFSSTHRHITKKGSKVFRDTGYEIMMALRAQKRTWEKVRKNAEVYDYMLRKEAEGKPPKVAKIAALNKFLRIIYARIKELYDNMALAERAKTKTRSKTRAKTKVTA

SEQ ID NO: 470127 - protein, 342 aa, unidentified
MEHYAGIDVSLEYSSVCVVDANGKIVREAKVASEPQALIAWFGSLGFGLERIGLEAGPLSQWLFAAMREAGLAVELLETRHVRKAFEAMPVKSDRNDARGIAQLMRLGWFRPVHCKSMSAQETRSLLTARKLVQSKLHDVENSLRGILRGFGLKVGKTTGQKFAGRIEELVTGHPHLQMIAKALLAVRAVLRTEFAAFEKQTRRMVRSDMQARLLTSIPAVGPIVALTYASAIDDPTRFKSSKQAGAHFGLTPKKHQSGETDYTGRISKIGDASVRTALYEAANVMLTKPVKGCSQLKSWAMRIAKRAGMSKAKVALARRLAVIMHRMLADGTPFNAAAAAV

SEQ ID NO: 470128 - protein, 356 aa, unidentified
MKKIQDFVIEGKEIFIGLEDSKRTWKIAVRSEKMLIHQTSMEAKYQILIKHLRNKFPGCRIHLLYEAGFKGFNLHDQLTEDGIECVVIPPHVVTEPKVNRIKTDKRDAKRLAKVLEDHDYKFGCYIPDRERREDRQISRTLGAVKKDIIRNRNRIRKFLDFQGITLPFKDSKKWGRAEFMALKDLALSDPLRKSLDILLEMLEALWKHMEELRSYLRQLCRKERYRKAYEIAKSMPGIGWYTAIRLVLELGEDLSRFGSSKEIAGFVGLGCSEYSTGETEHKGHITGMGSGFIRSTLIENSWVAIRKDPVLLGKFNRVWSGSGSKKKAIVAVARMLIVRFRACVMSGNPYVIGVVR

SEQ ID NO: 470129 - protein, 340 aa, unidentified
MPLYGGIDLHANNSVVVLLNEQDQVVYQKRLPNDLPTILEVLAPHHAEIKGLVVESTYNWYWLVDGLMEAGYRVHLANPAAMQQYSGLKYSDDHSDARWLAHMLRLGVLPEGYIYPKAARAVRDLLRKRAHWVRQHTANVLSVQNIMVRNTGARLSVKRIRELPKKELKRLLPEADQVLAITSSLAILDCLSQQIKALEKIVHQRLHHTPSYEQLLTVKGIGTILAQTIALETGDMNRFPTVGNYASYCRCVDSTKLSNGKRKGQGNVKNGNPYLGWAYMEAAQYAIRFNPSAQRFYQRKLAKSNNNTTLARQAVAHKLSRACYDVMRDLVPFETTKAFG

SEQ ID NO: 470130 - protein, 365 aa, unidentified
MNQYISVGLDVHAESITAAILEGDVQVPEIIKLPGDLMKVRRLFRRLSKKGPVRACYEASGAGFVLQRVLSADGFHCEVIAPSLIPRKPGDRRKTDRLDAAMLARLYRSGHLTPAHIPTEVQEALRRLLRLRYTYQVYCKATKNRIGGMLRNHGFVYREGKSYWTKTHRQWLTKLRLEIEGPLQTALAAELEHLEYIDTQRGALDAELDRFAHADPYRAKIEALCCLRGVKTLTALTLLCEIDDVHRFRSPRSLMAYFGLVPSERSSGERERRGPITKAGNVHARRLLIEAAWNNRHRSGADLILKRRRQGQPPDVVAIAMKAQHRLYKKFWRLDERKHRHVAITAVARELSGFVWAILKAVPQN

SEQ ID NO: 470131 - protein, 351 aa, unidentified
MLYAGVDAHKKYSQVVLTDDHGTRIAQASLSNDLGCFQNFFKQATELVKAVVEAGRTWGVIYDLLESIGVEPFLANPLKTRAIAEAKIKTDTIDAKTLADLLRADLIPLVHVPSHEVRSQKNLLRQRFWLVELRTRVKNRTHHILDRNHVTLPSCSDLFGKAGRQLLDQIAIPAPDNLLLRAHLELLDYIEKQIDQAERWTKEALKDHPGVTRLRTIPGIGKTLAALVALEIDDISRFSGADKLCAYAGLVPTTYASGGKVHHGNLLPACNRWLRWAYVEAAWIAQRTSPYCHAYFERIKRRKGANCGNTALARRLCEITWHCLREKRSYEERSSARTASIQPAAFESSWS

SEQ ID NO: 470132 - protein, 409 aa, unidentified
MKLFVGLDVSSQDAKICFLNGEGDCLQSFTITNDLPGALILKKKILDTASKSNCKIIKIGLESTSIYSYHPAMFLHNDKELRTYGSQVFMINPKQISNFKKSYPEMDKTDTIDAFVIADYVRFGRHTMSIVKEEQYMALQQLTRSRYQLVHALTKEKQHFLQHLGLKCSQFTQDVESSVFGNAMMELFLERFSLEEMAQMPLQELVFFLQEKGKKRFGNPEDVAKSIQKAVKGSYRLSKVVEDSIDLLLSTSIQIMRTYQAQIKEIEKGIESLMSTLPQTLDSIPGVGPVFAAGIVAEIGQIDRFADETRIAKYAGLFWKKYQSGRFTAENTSLTKSGNPYLHYYLVEAANSVRRHVPEYRDYYTKKSAEVPKHKHKRALVLTARKFVRLVDALLRNNQIYAPGRGVDR

SEQ ID NO: 470133 - protein, 343 aa, unidentified
MKTITTIGFDIAKSVFQVHGVDAAGEVVIRRQLKRRHVLAFFQKLPSCLVGIEACASSHYWSRELQALGHTVRLMPPAYVKPYVKRQKNDMADAEAICEAVTRANMRFVPTKTPEQQSCLMLHRTRHLFIRQQTAVINSIRAHLAEFGIIAPVGRKGVTELLHVVADPSDKRVPEVARACLAALGTQLLRLKQQILEFDRMIMAWHRSNQTSKRLHYIPGVGPILATALVASVADPRTFRSGRNFSAWIGLVPKQHSSGGKDRLGSISKQGDRYLRSLFVAGALAVIRYAKVHGTKHRPWLTALLGRRPTKVAAIALANKIARMAWAMMAKGERYKQPVALAA

SEQ ID NO: 470134 - protein, 337 aa, unidentified
MRLHYLGVDLAKNVFQLHGEDAEGNIVYRKRLGRARFLNDIGRLAGCQIGIEACTGAFYWQREFEALGHSVRIIAPQYLKPFARHQKNVQNDAAAICTALRQPNMRFVPPKSLGQQDIQALHRVRQRLVNRRTALVSQTRGLLLDRGLAFGLSITRARRVVLRLLTMERDRLGDLFTSLPEQLFEMLCELDRRVVWLDREINRVFRSNEACQRIAKIRGVGPKTATAIVAAIVDGAEFNNGRHLAAWLGLVPKQHSSGNRQMLQGISKRGDRHLRALLVHGARAVLRTAPKHHDAVSQWAIGLQERRGAAKAIVAIANKNARIIFAMLRQNTEFGTA

SEQ ID NO: 470135 - protein, 430 aa, unidentified
MGLIAPTTIRPEREDQPLPYEWFVGIDWGSQQHQVCVLDRDRRRVGERAVDHDGASLARLADWLWGMAVGQPQRVAVAIEVPRGAIVEGLLERGFHLFALNPKQLDRFRDRHSVAGAKDDRRDAFVLADSLRTDQPSFRRLQLDAPQLLLLRELSRAEETLLEEFRRSANRLRDQLHRFYPQMLQLCSAADAPWLWDLLDLAPTPAHAALLSAEQVQRVLKAHRLRRITAPEALACLQAPALPVAPGATEAAQAHCGFLLPCLRVLAEQLRACGQQVDALLRTMADEPGAGERPSDVAIVLSLPGVGRKITAWLLAEAAQPLAARDYQVLRTHSGVAPVTKQSGKRRLVVMRRGCNPRLRHALYHMARVAMQRDTHFSSVYTALRAKGQRHGQALRAISDRLLRILVAMLRNGTCYDASRIRRESAVQMG

SEQ ID NO: 470136 - protein, 314 aa, unidentified
MQTLDIGVDVAKDEVVVACAQAAFAPHAVKNDRTAITRWLRSLPAGARIGVEATSHYHLTLAGLAQASGFSVYVLNPRDTRHYARAVGARAKTDRVDAQLIARYIQHEAVHLRRYRPPTETERAIDQLLRRRAKLLALRSAAAMTLQGVPALKAQAVALRHHLDRLISRLEAMLTERIAAEPGKRATCARLQTIVGVGPLVGAGLGNTLDRLAFGSADAFIAFLGLDPRPQDSGAHRGRRRLSKRGPAELRRLLYNAAMSAVTTTSWGPIYQGYRARGLSSTESLVILARKIARTAWSLHRHGTTFDATRITRC

SEQ ID NO: 470137 - protein, 404 aa, unidentified
MWYVGLDWADTHQDVEVLDEAGKRVGARRFAHRHEGLNELKHFLLSIATQPEQLACIVETNHGLLITFLLEASIPVYPVNPKTANQLRKAAGAKTDQIDAHLLAKIGRLDLAELRRLEPDSPIVQELKTLTRDQDALIQTQTRLVNQLTACLKEYYPAALHLFSKLQQRSTLLFLQAYPTPQAAQAASLEEITATLRAGKHTHPTRVAPTIIEELHHPQLVASDAMVRAKSRLLLSLVHQLLVVIEEIASYDEAIRPLFLSHDDHELWRSLPRAGQRLAPRSLAEWGEDRGRYADANSVQTLAGTAPVPFQSGNYAKAHKRFACLKPLRNALYQFARATTLQEAWAASYYQRKRAEGKTHSMALRALANVWVGIIYRMWQTKTCYQTMTFEAAQLAHAPQQHAA

SEQ ID NO: 470138 - protein, 320 aa, unidentified
MEKEKVYVGIDVAKASMDIAVHPTGLRWSFPNDDTGIGKAVTCLQELAPMLVVLEATGGIELPITAALVVAGVPVVVVNPRQVRDFAKATGRLAKTDTLDAQVIAHFAAAVRPTPRPLPDNQAREFSAILVRRRQVVQMLTAERNRLSTARKSVRGRIQTHITWLEQELADIGDDLRCNVQESPVWREKDNLLRSVPGVGPVLSATLLTELPELGTLNRRQIAALVGVAPLNRDSGTLRGKRTVWGGRAPVRAALYMATLVATRYNPIIRSFYQRLCATGKAKKVALTACMRKLLIILNAMLKHRTPWGYVAPQILGPCH

SEQ ID NO: 470139 - protein, 431 aa, unidentified
MKYKLKQKQNQRITQIKESTLVVGADIAKKVHVARAVDYRGIELGKECTFHNDASGLTMLVTWMEELKQAHDKTEIVFGIEPTGHYWFPLAAYLKERGFKIVVVNPYHVNKSKELEDNSQTKSDYKDAKVIANLIRNGKYAEPNLLTKEYADLRVIMNLREKLTVSFTQVKIRIGNWLDRYFPEYTSVYKEWESKTSLITLRRFPLPIDIVAKGPDAILACWKTEVKRGVGIKRATDLVATASTSIGLTEGTEAARIELAVLLQQYDLFNEQIETTMAKAEQILERIPGTTQMLSVPGVGVTTIAGFLSEVGDIRNYDHGQQIIRLAGLNLTENSSGSRKGKTGISKRGRSRLRALLFRTMMGMVSRNLEFKALHHYYTTRNQNPLKKKQSIVALCGKLIRILFTLGTKQKEYNVKDVIGPVRQSQMQEVA

SEQ ID NO: 470140 - protein, 334 aa, unidentified
MPKNMQYERAYGLDLSKKTFHGCILDGPDLVNRHFFTGDMGPKGKAKLAGRLCKGDLVLMEAGTSSFSLARFLIENTEAEVTVLNPAKLYNIFNSTLKTDKTDSEKIARIARNMPKDEWPVVSIPTITEQAERAAVTFEIFLAEEQTMLVNRLHALFNSMGYPFVKKSELKVEEKRLRLANEYLCEATIAIEQAVMLSDQLVQLAKQMEQCLQTLREICFSHPIQALSLFSISGVGLMTASSQIAYLNDGSRFDSPDSYVNYVGLSERRFDSGKVVSKGHISHMGNRCIRRNIIQAAWSASRKSAHNPLSVKSKGGVIPRPLGRKEDVVYWGDG

SEQ ID NO: 470141 - protein, 315 aa, unidentified
MVTGIDCSKDYFDITVLKDGKAVFKGRFSNNAVGFRDMLPHVLQTHVVMEATGPYYFQLARFVHDSGIKVSVVNPLTVRRFAQMRMSRAKTDKKDAMVIAEFAQMTSPRLWEPPTEAIQHIRNVETYLEGLKQRRQMLSNQLHAFEAAGTIEELLYREIKEELQSHDTRIRDKERQIEQLIKENYAEMATHIRSIPGIGPRSVSMLIIATGGFGMFENYKQVISYFGLAPRIYESGTSVRGKGHICKMGMGQVRKVLYMAATSAIRCNKACKNLYERLRSKGKPYRVALIAAVNKLIKQVFAIAKSGKPYIPQFG

SEQ ID NO: 470142 - protein, 356 aa, unidentified
MNKRSKLNFSGQAIYLGLDVHKKSWSVSIFTKYGEYKTFSQPPEAEVLIQYLQRHFPGARYHSVYEAGYCGFWIHDQLRERGIDNIVANPADIPTQDKERRNKRDRIDCRKLARGLRGGDIKGIYTPPRWRLEDRSLIRTRLSMGRKQARCKNQIKSMLLFYGVAIPEQREMGHWSRRFIRWIEEIRMERSSGDVALKLHLEELCHLRQILVKLNRSILALARTQEYRLWISLLKTIPGISTLTAMIVLTELHEITRFRSLDQLSSYVGLIPDTRGSGEKEHVGGMTQRHHWSLRWLLIEASWIAVRKDPVMMEAFNEYCKRMRKTKAIIKIARKLLNRIRYVLKNQAEYVAGVIE

SEQ ID NO: 470143 - protein, 315 aa, unidentified
MAMLVAQTKPVVGVDVAKNELVIYQDQSDRLEAIPNTKASISKWLRTLAGTASIAVEATNTYHVLFADMAYEAGCTIYMIDGYQLSHYRKGVNVRAKTDALDARLLARYLKKEADELHPWIPPCPLYRQLLSLFRRRAALVQARTGLVQSWSNEPLLKTAFAAQINSMKRLEALVEKKIKDVLQRAELMGQVSRCMKVEGIGFLTAARLVTTFQRGEFSNANAFIAFLGLDLRVSKSGQSDGPRRLTKRGDPEARRLLHNAAMSGSRTAAWKPFYEEQRKRGFSTTQALVMLARKMARVVFALLKTQSEYQSKAA

SEQ ID NO: 470144 - protein, 421 aa, unidentified
MEETNEPAELVERVAALDIGKAALTACIRVPHEDKPGRRCQEVREYATTTRALLGLADYLRCQGVTLVVMEATSDYWKPPFYLLEAEGFECWLLNARHVKNVPGRPKTDKLDAVWLAKVAERGMCMPSLVHPKPIRQVRDLTRYRRTLIRERAREKQRLEKILEDAQIKLSAVVSDLFGVSGRAMIEALIAGQRNPWALARLARGTLRNKTRILEDALTGHFGDHHGFLCQMMLARIDGLTAQIGQLDARVEQAIAPFARQVTQLDEIAGVGTTSAQELIAEIGVDMSRFPTAGHLVSWAKFAPIDNSSAGKKKGSSTGKGNPWIGGTLGEIVLGASRTHTFLAERYQRLARRRGKRRAIVATGNTVLTIAYHLLSDPTARYTDLGPGFYDSKAGRERHARNLIRQLEHLTGKKVALNEAA

SEQ ID NO: 470145 - protein, 349 aa, unidentified
MLADEVDYVIGVDTHRDQHTLAIVAAPSGALVAQRSVRADGRGYREAVRLADEHAPGVRVWAIEGAGHYGAGLARYLARHQQPLHEVSRTSRGERRLRGKDDSLDAVRAAHTALASEAIAKPRAGQQQEALRVLLLARRSAVDVRRVALVQLRSVIVTAPDELRLELRRLPVGALIRRCARFRRSSSRTPEQLATITALRSLARRIEAATEEANDLEREILAHVRASVPELLDEAGVGPIVAAQLIVSWSHHDRVRSEACFARLAGVAPLPASSGQTIRHRLSRGGDRQLNRALHTVILHRRQHDPATRDYIARRIAEGKSARDATRILKRYLARHLYRVMQNATPLTT

SEQ ID NO: 470146 - protein, 379 aa, unidentified
MKKDTRFVGFDVDSEKIAVAVAEPDGEVRSLGEIPNREESVRCLVKKLGPASRLRVCYEAGPHGYGLYWLLTKLRVHCDVVAPTLVPVKPGDRVKTNRRDALKLARSYRSGDLTPVWVPDAEHEALRDLVRAREVAKKDQLRARHRLGKFLLRRGLRAAAGMKNWTSKHLLWVKTLRFEQPAQEATYLDYLHEVEHAAERVARLERAIDQAIEALPAAMKAVIAGLQALRGIKQVSAATLVAEVGPLSRFPRPKQLMGYSGMVSSEDSTGSSVRRGAITKTGNAHVRRIVGEAAWAYQYRPAMSPEMKKRQEGLSEEVKEIAWKAQSRLCTRYRRLVAKGKLRQKVTVAIGRELLGFIWAIGTQIEKEQRNAKLGRRAA

SEQ ID NO: 470147 - protein, 366 aa, unidentified
MQEISTMQASGSDNFKGPQVTIGLDLGDRTSNYCVLNATGEILLEDKLPTTLQAMKQLFGRMLRSRIAMETSTHSPWVSRLLKELGHEVIVAHAQKVGLIVKSRKKDDRIDARTLARLARIDPQLLSPVQHRSAQAQIHLTEIRARAELVRARTALVNSARGLAKSYGERLRKCGTQQVGRELAMGLSAELRAALEPLLREIESLNEHIKEYDRRIEKMAKDTYPEVKLLQQVKGVGDLIALAYVLTIEDPHRFKKSRDAGCFVGLQPGRRNSGESEPQMHITKEGDRYLRTLLVQGAHYILGPFGEDSDLRRWGKKLAERGGKKAKRRAVVAVARKLAVLLHRLWVSGEVYEPLRNSKKAMSTAA

SEQ ID NO: 470148 - protein, 337 aa, unidentified
MIVIGVDVHKYSLTAVAVDEVGRTLAELTASDEQALLAWSISLPIERLWAVEDCRHVTRALERALVSASEQLVRVPPKLTAPQRRSGRVRGESDAIDALAIARAALREPGLDRPRAGEGRLRELRLLLDHRDDLVDERRRAQQRLRWHLHELDPLLGVPAGALDRPVWLDRIARKLARSEQTLQVRIARELVSRCRALTRTILELERELAVTTAQTAPALLELPGCGAVTAAKLLAEIGPIDRFQTDAQLARHGGVAPLEASSGRVRRHRLDRGGNRQPNCALHRIAATQARVHPVARAYLERKQAEGKTRREAIRCLKRQLARVVFNTLKASPTLT

SEQ ID NO: 470149 - protein, 387 aa, unidentified
MDVHSKNYTLCAMEPLIGEEDRIFANIQVTADYKNILMFIEQLKMKLGMSDEYDIQCGYEAGCLGYSLYNQLTAAGVKCVILAPTTMLTQQGKRVKTDARDALMIAQCLSYGGYHAVYIPTQEDDSVKEYLRMRDDHKEALKKIKQQINALCLRHGHHYEGTTWTIKHVTWLRKLELPSLYRETLDEYMASFDEQTAKIERFDQRIEELSSQEQYWEKVKKLCCFLGIKTHTALSLIVETGDFSRFAKGNTYAAFLGLAPGEHSSGEKTNRTGISKAGNRHLRQLLIEASRGICKGAVGHKSKELRARQNGNTAEVIAYADRGNTRLRSRYYKFIRHGKKKNVAVAATARELACFIWGMMTSVTGWRRYIIAICQSRVLCTADAASP

SEQ ID NO: 470150 - protein, 433 aa, unidentified
MGLIVPSSIHPEREDQPLPYEWFVGIDWGSQQHQVSVLDRDRRRVGERVVDHDGARLARLADWLWTLSAGQPQRVAVAIEVPRGAIVEGLLERGFHVFAINPKQLDRFRDRHSVAGAKDDRRDAFVLADSVRTDQPSFRRLQLDAPQLLLLRELSRAEETLLEAFRRSANRLREQLHRFYPQMLQLCSAADEPWLWGLITLAPTPAHAMLLSEEQVQRVLKAHRIRRITATEVLACLQAPALPVAPGAAEAAQAHCQLLLPCLRVLAEQLQACSQQVSALLSTLAEEPGEGESPSDVAIVLSLPGVGRKITAWLFAEAAQSLTERDYQMLRTHSGVAPVTKQSGKRRLVVMRRGCNPRLRHALYHMARVAMQRDAHFSSVYAALRAKGQRHGQALRNIGGRLLRILMAMLRHRTCYDASRIRCKPVVQMGQKM

SEQ ID NO: 470151 - protein, 386 aa, unidentified
MTLFVGIDVSKYKHDLAILNEHGEILSKHFQFANTYQGFQKLKEHLETLEIPTSELHIALEDTGHYADNLVAFLQKVGYPTFTYNPLLIKEFVKSLTLRKSKTDKKDALSIACKLLADPIAERYIVEPQMQELKEMTRYQNRLIHERSKNKTLHVRVLDKVFPELAKIVKNVHNQFVYELLTSYPTPQKIKRAHFSSLLKIKRLTADKANQIQEAACLTIGNGALALQLELIQLIEMISIQTKQINQVQEQINVLMAEIDSPITSITGLGVRLGAVILAEIKNIHNFKTPGQLQAFAGLEPSIYQSGTMDITGHMVKRGSSYLRYALIQAAKLLANYSPHFKAYLRLKISQGKHYNIAVSHVAKKLIRIIYTLLKTNQTFDERKLR

SEQ ID NO: 470152 - protein, 341 aa, unidentified
MDITTIGLDLAKSVSHVVCCNQAGKIVRKKMLRRTQILHFFSELAPCLVGVESCASAHYWAREIAKYGHQVKQIAPQHVKAYVRGNKTDFNDALAIAEAVVRPEMRFVRTKTQTQQDIQALHVMRKKCERDRTANSNEIRGLLNEYGIILPVGISHVYKSLPELFDRQVENGLSELFKELLERHYQKLVELDEHLNWYTKKIKQLSQHEACRRLQSIPGVGPIIASALYQHIGNGSEFKNGRAVSSSLGLVPKQHSSGGKHNLQGISKRGDSYLRTLLIHGARAVMRVSKHKETPLSQWIKRIEQTRGRNKAAVALANKLARIAWALLAQGGDYQPELTTA

SEQ ID NO: 470153 - protein, 341 aa, unidentified
MTIGIDLGDVWSHYCTINEEGEVIDRGRFRTNPSGVDKRFRDLEPIRIAMEAGTHSIWISEQLRDLGHEVIVANVRELRAISHSDRKSDSVDAEKLARYARLDPEILRPIAHRTVAQQETLTLIRGRDVLVRLRTSAVNSVRGLAKPCGYRLPASSTLCFAKRCLAMMPSGLAVALSPLLHQIGDMTVKIKEYDRAIKKLTETKFPETQALIKVYGVGHLTALTYVLTLGKKERFRRSRDVGCYLGLRPKRSQSGDSDPQLGITKAGNGYLRQLLVECANHVIGPHGKDSTLRRWGLSLGARGGSHARRRAVVAVARKLAVLLHRIWITQEAYVPFYAAAA

SEQ ID NO: 470154 - protein, 283 aa, unidentified
MHRTKVGVDLAKNIIQVCTLHGKKVTSNVEMSTDEFSLWLAQSKPVTVAFEACSTSNYWYQQAIKSGHDARLISAKLVKAVRQNQKTDKNDALAIAQTLFLPEVSFINGKSIEQQQLQSIQRLRELAIKSQNASQKQIVSLLLELNIRLPNTQGGILRGLEGVLEDGEINLSDTFRATLSIAKVQLENMISAIGEYDKYLEQSIQSLPDCKKLLKLEGVGPVNAVNLYIALGASQSQPFKSGKNASACIGLTPVQHSSGGKEVMGTIGKYCKNGSLRLLAATY

SEQ ID NO: 470155 - protein, 461 aa, unidentified
MTRYGRKKKGVPQKGGSFPVVNGDAAGIDIGSEEHWVAVPEDRDENPVRPFGCFTSDLHAMARWLKKCGITTVAMESTGVYWIPPFQILEEYGFEVKLVNARHVKNVPGRKSDVSDCQWLQRLHTYGLLSGSFRPDDQICVLRSYWRHRANLVRYASDHIRHMQKALTQMNLHLHKVLSSVTSVTGMNIMRAIIGGERDPQKLALMREPGVKNSAEIIAKALEGDYRQEHLFALKQAVELYDFYHRQIEACDREMERYLHTLKGKVDPVQSPLPKQKRRGKKPVGNQSFIDIRTELYRISGVDFTQIPGLDALTAQTILSEVGLDPGKFPTEKRFVSWLGLCPNNRITGGEVKSTKTRKTVNRAANAFRMGAQTLANSNVALGGFYRRIRSRLGSPKAITATAHKLARIFYRMWTTGQAYADLGKDYYENRYKERVLRNITKRARELGYDAVLQPIEQRVA

SEQ ID NO: 470156 - protein, 441 aa, unidentified
MEVVYRRCCGIDVHQDFLTACVLVNEPGKPREVRKKEFRTYWSDLQKLKLWLYASKVEQVGMESTGVYWKPVWNVLEGHFPLLLANPYHMRNIPGQKTDQKDSEWISDLLAHGLLRPSFVPPRPIQDLRDLTRYRAKLAGERNRVHNRIAKILEDANVKLGSVASDILGVTGRRVIKAIIAGQEHPDWLADKACGTLRAKRNQLRLVLKGRITDHHRYMLRELMADLDRIEAKIMRLETEIAERMHPYADAIERLMSIPGFKLITAWSIIAEMGTDMSAFPDAAHAASWAGLAPGNNQSGGKRRSGRTNKGNRWLRRALVQSAWAVSHKSNCFLTAQFYRRAARQGEKKAIVASAHQLLVIAFYILRDGTVYHEKGGNYFDQLNPERTKRKLMARLERMGFDVILRNSTHPVPSPSAPPPPARRRGRPCKCFERGINCKHR

SEQ ID NO: 470157 - protein, 339 aa, unidentified
MKNFIGLDAHSKTCTFVVIDKEGEIINEGKFSTNERNLSTFFKGLNGKVHIMFEETNIAQWVFCILKDLVHEVIVCHPAYLPKKSGPKNDYRDALHLAIQLRAGNYTKVYHEDHPLMHLRTLIRFYENAAIRLAVLKQNFKALCRSEGIITQSSHHTSRNRDKLEEFKNPIKKAVATRIFDEMNDLEMKKQKWAAEFKSNKFDMPLVKNLCSIPGVGPVRGNTIAAYISVGHRFKNKHKLWSYAKLIRHRDESDGYILRKRTPHGRTELKNSFMGAAQRVVMSPSRSALKDYYEQMIKKTNCKRKSSKALARKIAAISLAIMKKGTKYDDEKVRSSLQQ

SEQ ID NO: 470158 - protein, 360 aa, unidentified
MASPTLTQPEGADHPDVVIGVDTHKEFHVAVALAPNGGRLGECSIPANRQGYGVLQDWALELGSRPVFAVEGTGSFGAGLCRELLAVGYSVVEINRPDRSTRRRLGKDDAIDAEAAARSFLAGTATIAPKGGTHLVEMIRLLKGNKDSASKSRTRAINQIKAILVTAPAVLREQLEPLAHDVLMATSSAFRVPLVDSPMAAAKKALRFLARRVLRLEREIDELLNDLDQLTQQACPGLRQTYGIGTDGAATLLVTVGDHPERLRSDAAFASLCGVSPLPASSGKTNRHRLNRGGNRQANATLHRIVVVRLRWHEQTKAYAARRLKEGRSKAEIMRCLKRFIAREVFHTLLGRPPVRTTAA

SEQ ID NO: 470159 - protein, 424 aa, unidentified
MNPRVKIACGLDVHRSKIVGSIVTSAGTHETRTFTTNIDDTLALKDWILTHDCERVAMEATGIYWYPVYNLLEEHVTVQVANPLFIKGIPGRKTDQLDAEWIATLCLNGLVKPSFVPGLQVRNRRDLVRTLQRLIQIRTRHKNRIHKIMIRAGIRIGAHLSDLFGPSGLRILHGLLEGRSIDTILKDLKNAKIAKKRDELAKSICGTLDENDVYLIRLELDAIGSVNRLIDNLKQRISHQMMPENEDLDTMISIPGIGYDSAVNILAEIGDVRQFPSGKHLVSWAGLAPGMNESAGKQGPGHITKRGSKFLRTFLIEPAHSIAGMKRTNHLKQFFARMRAKLGYKPAIIALARKLLMLIHHLLVNCEPYFEENLPIKKPVKINPSSLSSMTPDQILKILSDAIAELSPSNRAEFNQKLSRLDNS

SEQ ID NO: 470160 - protein, 330 aa, unidentified
MGAIATIGIDLAKSVFQVHAIDATGKVVVRRALRRSQLLDFFERIPPCLVGMEACASAHYWTREIGKLGHQVRIMPATYVKAYVKRNKTDAADAEAICEAVTRPTMRFVPVKSDVEQSINMMLKTRDLLTRQRTQVVNALRSHLAELGIVAAAGFKASAKLIQIVRDDTDHRLPPIARYTLTEIADQIERLTEKIVKLEKVIVSSVRQDDVARRLTSIPGVGPITAAAVRALVPDPAGFRTGRDFAAWVGLTPQANSSGGKQKLGSISKRGNPQLRSLLMVGAMAVLRTSKYGATMRPWVRANALWSPPQPIWLNMACPRSRATYGAITA

SEQ ID NO: 470161 - protein, 346 aa, unidentified
MLIIGCDFHPGFQQVAIFDNLTGEIQEKRLQHRAEAEQFYRGLAGQEVRVGMEACGHYPWFEQLLAELGFELWFGDAAKVRASVVRKQKTDRRDAEHLLDLLRENRFPQIWVPSLEVRDVRQLLVHSHKQVQARTRTKNQLQAMALSQGVQKKYKLWTKAGREELEQLPLLPYAAQRRKQLLQSLDGLEAEISELDRRVADEARQRPEAVRLMTHPGVGPVTALALVLTLGPSDRFESAKQVGSYFGLIPSEDSSGGKQRLGRISKQGSSFLRFLLVEAGQTAARLDPQLKRFYRRLAARKNRSVAKVAVARKLATRLYLMLREDWTYTQLCQAVMQVSPSHSVAG

SEQ ID NO: 470162 - protein, 353 aa, unidentified
MDKHTKPDFTGQTIYIGLDVHKSSWSVSIVSEHLSHKSFTQPPEVSKLVNYLHRNFPGATYQDVYEAGFSGFWLHDQLQHHGINCTVVNPADVPTNNKEKRRKSDKVDCRKLAKRLRSHELKAIYVPTQTQMEDRGLLRTRKSMVRKQTRCKNQIIAILFLYGITIPEMKRWSGRFIKELQQIRLQTAVGNMSLQMHLDELVHLRHAIASLNKAILSLSRTHQYRDNMRLLKTIPGISTITAMTLLTELIDIHRFKKFDHLCSFVGLVPDIMSSGDNENVLGLTTRQNKLLRSMLIQSAWVATRKDPAMMLAFNRLCQRMKKTKAIVRIARKLLSRVHFVLKSQQGYELSVAA

SEQ ID NO: 470163 - protein, 342 aa, unidentified
MYYIGLDVHKKTISYCVKDASGQVHQEGKVGATRRELDSWIKTLPQPRTMAMEATIFTGWIYDHLLPHAQQVKVAHPLMLRAIAAAKKKNDRIDAGKIADCLRCDFLPECHMASTQIRDRRRTLRYRHLLVRQMVQMKNRISGLLMETGVSYNKQRLHKVGYFRELLSTNEDVHESIRPLLKLSRDTVVRLQKTEYALVSSLQRDPLLADRVKRLRTVPGVGPITALAWALEIGDVARFRSIRQAISYCGLCGEEKSSADKVMRTPLSKQRNKHIQRVLGEAAKLAPRQDHDLALVYETAKQKGNANRATLAVARKMVAYLLAVDREERDFVPAENYQRAAA

SEQ ID NO: 470164 - protein, 348 aa, unidentified
MTIVERTCSLSAGVDTHADVHVAAVVDHLGGVLGIESFETTETGYQHLVKWLASHGEMRVVGVEGTGSYGAALAGHLQHAGMKVVEVDRPNRQVRRREGKSDSVDAVAAARAALSGQALGHPKRRDGDVEAIRVLTVARRSAASERIATLNQLRHLCFTADDQLRRRFTGLSVARLTEQAAALRPRPGDPVHYSTLLAIRTLARRVAYLDGELATLADVIKPLIDRTAPSLLTMHGVGYDVAAKLLIAAGDNPDRLRSEAAFAHLCGVAPLQASSGKTRRHRLNRGGDRQANNALYRIVITRMGSHRPTKDYVARRRAEGKSTAEIIRILKRYVAREAFKHLRPASTI

SEQ ID NO: 470165 - protein, 314 aa, unidentified
MSACAAGIDVGKNFFDVGLAPRGANFRLPNAPKGVAAVIDRLRQAKVQRVALEAIGPYAAALIAALRQHGFEVGVVNPRRIKGFREAEGRRAKTDRLDAGLMARFALSMTDVVRPLPSADQIALKALATRRRQVVEMIAMEKTRLKQAAEPLIIESHRAAIAALTAQRQKLEAEIEQRIAQDPALARRKEILVSLPGIGQQVATVLLTELPELGTIDRRAIASLAGLAPHPHQSGALSGRPQIAGGRPCVRTALYMAGLATCRANPLARRDYKAMRDAGKPAKVAIIAAARKLLVLANILVKNDQTFDPTRVAP

SEQ ID NO: 470166 - protein, 387 aa, unidentified
MLFVGIDIAKSKHDASIIDSEGNVILKHLTFKNDKQGFDKLHSKIMELVHTHESDVSIAFEDTGHYGLNLQTFLHKYYVNIYSYNPLLIKKFAEAQTLRKTKTDKKDALLIARKLLSDFAELEKPVVTDTLMTELKFATRNRNRLTQTRSEAKNHYTRILDMVFPELTSVIGKHNLSTYILLKKFPSAQAIANARPSSIAKINHISHNKAVKIKEVAGNSIGTHSKTLELELLLIIESIEHQNLQIQMIDNHIESLMIDIDSPITSVTGIGERLGAVILAEIRDINNFDSPSQLQSFAGLEPSVNQSGESDKTGKMVKRGSPHLRWAIIQAARLAAHYSPKLGEYLQKKLAEGKHYNCAVSHVAKKLIRILFYLLKNNQQFDENLIG

SEQ ID NO: 470167 - protein, 355 aa, unidentified
MNQEKYIGMDVHAATISAAVRNAEGKLLMECVLETKAATILEFIQGLRGTLALTFEEGTLATWLHDLLKPHVSRLVVCDPRKNALLRDGNQNDRVDARNLAELLRTNQVKPVYHEEHGIRTLKELGRSYSTLTQDSTRVMNRIKSVYRSWAIPCAGTSVYSRRHRAEWLAKLVEPGVRIRAEHLYQQLDSLEPVRQAARRELLRESGKHAAVKLLRQIPAIGPIRSALLVAILQTPHRFRTKRQLWAYSGFAVQTYDSGEYRVVRGKLQRNRERITVRGLNRNHNHDLKNLLKGAAVSAIERPGPLQDFYAALVEKGMRPSMASLTLARKIAAITLIIWKKGASFDPKQLQRQTA

SEQ ID NO: 470168 - protein, 347 aa, unidentified
MKIIGCDYHPSYQQIAMVDTETGELVEGRLEHEHGEARRFYESLAGPVRVGMEAIGNAQWFERMLAELGHELWIGDAAQIRRLVVRQQKTDRRDAQHLLQLLLDERFPRIWVPSPEMRDVRRLLRHRQKLVEMRTQVKNQLQHLALNQGVRRKRRLWSQEGRAVLERLPLEGWTARRRGDLLAMLDRLDAQVEELDQAVRAEAEKRPAVRLLMTHPGVGPVVGLAYVLTIGPVARFPRGKRVASYLGLIPREHSSGGRQKLGAISKQGNTMMRTLLVEAGQNAARYDEELRRDYSRLKARKHSALAKVMVARKLAVRMYWMLRENKAYTPHPVARMQGSPSHSVVVG

SEQ ID NO: 470169 - protein, 350 aa, unidentified
MTMVGGFDVHRQQITFDYVDDDGVVHWGQIHPATRKTLRAWLAEHCADGDGEFALEGCTGWRYVSEELAAAGVGVHLGDPAEIATLRGPKKRAKTDRADAKLLRTLLLEGRFPESWIPPTHVAEIRNLGRLYCTLMDQRRAWQQRIHAQVFHQGCPPVKALLSAAGREALAWAELSAAGRQYVDTALRRIDELTPEIDALRTQLVSFARRQPGCQALQRHYGIGWLCAAIMWAEIGDARRFSSSDQLVRFAGLDVTVHSSDAKRSPGQLSRQGSPQLRWAAFEAAKCAARRYSPDYAYYRKLAAKRDGHNGKNPALAVERKILRRCYHTLRELGDAALALPLPEGQEVAA

SEQ ID NO: 470170 - protein, 482 aa, unidentified
MQPKPQEKTTKDTCRTEPGHWHEMNRKQRRETMRKIQSDDLSLEVVHPDAAGIDIGNESHYVAVPPMRDSQPVRRFGCTTAELKAMAQWLKQCGIRTVAMQSTGVYWIAVYDILEAADLEVYLVNARERKNLPGRKSDVQESQWLMKLHTYGLLRNSFRPSQQIRMMRTYWRQRNDLVQAAGRHILRMQKALTQMNIQLANVLSDMSGMTGQAIINAILVGERDPHKLTEFRDPRVKASKHEIALSLEGNWQEDLLFVLKQEQDGYEFCQKQMLECDRQVEQYLQQREDRSKGTPLPEEKRKGRLKKKKGNAPQFDLRGELFRMSGVDLTQIDSIDVMTATTILSEVGWDMGKWETEDHFVSWLRLCPGNRISGDKIIGKGRLPTKNRVSISLKMAASTLRRSNTYLGAQFRRFRTKLGSPIAIKAMAAKLARLVYRMLRHGMKYVDQGAKFYETQHRNLQIKQLKWKAAKLGFQVVQAPAA

SEQ ID NO: 470171 - protein, 361 aa, unidentified
MAKGSTVVKAWTAADFIGLDLSDKTATYVALSAYGEVIEDGRLKLSQAGLKRALGARPPTQIAIEVGGHSPWVSRALADMGYDVTIANPRQVKLISHGQRKSDLLDAENLARLLRYDRTMLRPIRHRGASAQADLALLRSRDAVVKARTRLISSTRNMVKAAGGRLPKCSTESFHYKVRDHVPELLKPAIEPLLEVIAGLTEQIAAMTRHLDKLADERYPETKVLRQVKGVGTLTSLAFVLTLEEPQRFAKSRSVGAFLGLVPRQYDSGDSRPQLRITKAGDPLLRRLVVQSAQYILGRFGEDCDLRRWGLKLAGDGKNKIRRHKAVIAVARKLAVLMHRLWQTGEVYEPLYQASLSQEVA

SEQ ID NO: 470172 - protein, 322 aa, unidentified
MLPTLGIDISKDSFHVELSINHKLRHRRFTNRKEGFAELCGWLSKHKATPVHACLEATGPYSEALALYLHEQRHTVSVVNPAQIKAFGQSELLRNKDDRPDAALIRRFCEKQCPIAWTPPPAHFRELQALTRHLENLLETRQQQLNRLETTTTKNVVKSLRQLVTHLDAEIKRTEQQIENHVDRHPDLKQQCQLLESIPGIGKRTATRLLAEIENISQYKSARQVAAYAGLTPRNNRSGTMRGQSRLSKTGNARVRKALFLPALVAKQHNPVVRNFCQRLARHGKNKMQLVGAAMRKLIHIAFGVLKSGKVFDPNHELLLNS

SEQ ID NO: 470173 - protein, 419 aa, unidentified
MFRIHRKNCCGLDVHKTWIYACIGVTDSNGRTEYMEAHFSSFSRGLRELASRLAQHSCVEVCMDSSGKYWISVLNILEKTCLVTLAHPKYTKPQKGNKTDRKDAKWICDLFMCGMIKPSFIPPADIRQLRDLVRYRGKLTNCLTGEKNRAQNCQTVSNLKLDDVFSDVFGKSARSITEYILKHPGESFDVTQFVDRRCKHPASEIQATVDGAVSREQAVKLRECLNHIDELVAHRANIESEILTLTDRYCLVLDFLHTVPGFSANPMTAISTIAEIGADMSVFPTAKHLCSWAGCCPRNDQGGGKVKSTRISRAGAYIKPLLVQVANAVIRSKEHPEFRERYLRIKARRGHKKAIIAICRMLLTAIWSILTKLEPYSPDGFLSLRPADQSKSLTSSQALALLRLRGYCILDDPPAPSPA

SEQ ID NO: 470174 - protein, 401 aa, unidentified
MVSDFMKGRYNLMKIFVGIDIAKLNHFAAAISSDGEILIEPFKFTNDADGFQLLVSKLESFDKNSIIIGLESTAHYGDNLVRYLVAEFYQVCVLNPIKTCQMRKNNVRKTKTDKVDTFVIAKTLMMQDDLRFIPFFDLDMMNLKVLGRFRQKTIKQRTRLKIQLTPYVDQVFPEIQYFFKSGLHQNAVYALLKEAPSPKEIASMHMTHLANLLKVNSHGHFTKEQAKELRVLAQKSVGANDSAISIQITQTIQQIELLDSQLDKIEAEMTDIMKFNDSVIMTIPGIGYINGGMILGEIGDIHRFSNPNKLLAFAGLDPSVYQSGNFQAKTTRMSKRGSRVLRYALVNAAWNVVKNNATFKAYYDAKKAEGRSHYNALGHCAGKLVRVIWKMLTDEVEFNLE

SEQ ID NO: 470175 - protein, 457 aa, unidentified
MEKKGFFGIDVSKGYADFLLLDSNGDVMEESFQLTDCKQGRQKLKEIITGWQQQGLEELFCGVESTGGYENNWYSYLKAGFKDSKVYVCRINPRGVKSIGEASLKRTITDAVSAENIATYMISFPKKLDYGIDAAPANPAFKEGRQHVTYIRMLQKQKVQLSNQLEKLLYQYFGEVLVYCRHGSPIWLLSMLAKYPTAAMVIKAGVVKLSAIKNINEGKAKSILVKAKNNTQGVSQQTAHIIMATAKEILHKEIVIKEEKEYLTELHTESEEVRLLSSIPCIGLNSAVAIALEVEDITRFETSKKMCSFFGVHPTFKQSGDGIWGNHMSKKGRGEIRAVLYMAALTGIRHNPILKQIYARSRSKGMKHYQAMGVAMHKLLRIIYGVLKNKTAFHAETDDLNQQRSIEKQHQNEQKEKAEGIVKKQKKHRFQEVSTDAPISRRAEQKIRKQIASQAPK

SEQ ID NO: 470176 - protein, 319 aa, unidentified
MSSEMSFVGIDVSKDKFDIHIRPSDQSHSFVYDESGLQNLIVVLRSVEPKIECIVLEATGGFERRLVAVLLSQQLPVVVVNPHRVRHFAKATGQIAKTDSIDATVLSFFVQTLRPQCRPLPNESLEELRDLLARRRQVMDMIVSEKNRLASTSRPAIRRQILQHIQWLQKRVASIDEDLNRGIQSSPTWKAKDELLQSVPSIGQVSASMLLIQLPELGELNRHQIAALVGVAPINKDSGRFKGKRVTQGGRASVRCALYMCTLVATRRNPVIREFYQRLLKAGKPKMVALIASMRKLLTILNTMLKHNRPWDAAYAKIS

SEQ ID NO: 470177 - protein, 391 aa, unidentified
MSMYFIGIDISKYKHDCCIISAADQKVVSKVTIKNNKAGFNELLTIIHSLANPADIRIGFESTAHYALNLELFLENSLLTFMEVNPVLISEYKKSKTLRRTKTDSVDCESIARWLMTVEYKPHSKGFYHAYSLKSLTRLRDKLIRQRSFYLVKITNVLDHTFPEFKPFFNERLSKTALYLLENYGSAEKMARMNSASYEKLRSVSRGKFSPQQFLRLKELAANTVGVNNSIFDVELNSLLSLYKSLVKEINTIEKEINKLIEEVHPHYMSVPGIGPLSAAVIYSEYGDISNFTNPGQMLAFAGIEPGINESGTESHGGKMVKRGSSQLRYTLINCCLPLIRFDMTFATYYAKKRGEGKPHRVAITHVAKKLIRVIYALESQDIDFNAQELR

SEQ ID NO: 470178 - protein, 418 aa, unidentified
MNDLIRIGVDTSKSVFQLHGVNAAEQPVLRKKLRRRQVIEFFQKLPATRVGIEACGASHHWGRELSALGHEVVLLPPQRVKPYVERNKNDAADAEAICEAMSRPRMSFVPVKTAEQQAALMLVGVRDQLVGRRTQLSNAIRGYAAEFGLVAAKGTDKIEPLLIRIAGDENFPPLAKDLFATLGNEYVRLKPELRKIEARLMAWHRGNELSRRLAEIPSVGPIGATLSVMKVGNPHAFRSGRDFSAWLGMTPKDHSTAGKVRLGAITKAGDEALRSVLVAGATSVIQQVRKGRGRPSPWLVALVKRKPPKLAAVALANKTARIIWKLMVSGERYNPQRAPQRFVPPTDSLAPGTRRQGQAACGGDLRSALPARRHRRKRSYRPHSTSDGAQHDLQLIDLMTEFGTRLTPHAGGRACSSR

SEQ ID NO: 470179 - protein, 352 aa, unidentified
MDTSVNEIVVAVLRPGEEVPVVDRIPGDEESVRRLIGRFPDRRLLSACYEAGPGGYELHRLLTSMGVACDVVAPSLIPKGSSDRVKTDKRDSVRLALTHRAGLLTPVRVPSPAEEAVRDLVRARGDLLDDRKRMQQRLNAMLLRHGRVWRGGKKWSYAHRTWVDRQVFDEPALAEALALYRGGLEAREAELAAAEARLASWAGREPLAGPVATLGGYRGIARLTGLTLAAEVVDWHRFASARAFMGFAGLIPTEYSSGSRSRRGHITKAGPEGVRTALIEAAWAYRYRPAIGATLRRRQAGLPPETLARSWKAQQRLHAKYAKMTARGKPPGVAVVAVARELAGFVWAEMTS

SEQ ID NO: 470180 - protein, 331 aa, unidentified
MKKFSGIDLHSNNSVVVVSDEVDHIVYQRRLPNDALQIRAALAPHREELEGVVIEATYNWYWLVDALLADGYHVHLANPAAIRQYEGLKYSGDFTDAAHLAQLLRLGLLPEGYIYPADGRQVRDLARKRMQLVQCRTAQILAIGNLFARYTGSQLHGPQVKRLDGAQVSRFGFAPDVTHAIRANLAVLGTLQQQIEIIEKRLMQQVKLNPDYALLNTVPGIGPVLATTIMLETGTISRFATVGHFSSYCRCVDSRRESNSRKKGEGNTKNGNRYLAWAFVEAANFAIRTCPQARRFYERKKRMRNGIVAIKATSAQAGSRLVSHASGAQTI

SEQ ID NO: 470181 - protein, 339 aa, unidentified
MKKTDRPTYLGIDVSKESLDCCLYNGTEHKTRSFNSNKLSTVQKIITHFKISPDSCRVVLEATGVYHSAAFVEFVSRGFDVAVENPLRIHSFATMKNLLRTKTDPVDARTIAEYGFTNEPVSTKLKEAYQCEVQAKLKLIGFFKKHITQNRNYLEALNNNSFECNAPSLIAHVKNEINHLNVAIKEINRDIEKILTKHCPELYKQYKSIPGIGSAVAGAIICFYGDFSGFSDSNKAAAFAGLCPKVCKSGSSVDKSGSISKKGNSMLRTLFYMAALSASRCNDACQETYLRLRQAGKPAKVALIAVANKLLRQARALARKGESFTENYKEISLCRAKTT

SEQ ID NO: 470182 - protein, 352 aa, unidentified
MNIVAIDLGKFNSMICFYDTQSRTHRFQLAKTERDYLATLLQSEKIDLVVMEACTASGWVSDLCHELKLETLVCSTHEEAWRWRNVKRKTDKDDALKLARLAAVGQLKPTHVPSTTMREYRGLIKYRKQLVGQENRLKNSIRALFNRRGIVISRGEKTWWSGRAQLEAYRRPLAECSLDELWQGQLDQQLTQLDQTQKLLRIVEKKLDAIAKVDDRVQRVMQIPGVGRVTGEAIVTAIDDANRFNSGRQVSAYAGLVPRQYQSGETDRRGRITKRGSRLLRTLLVECAWCSLKYNPWARMTYERIHGGKQVRRKKAAVALARRILVVAWAMLRDQSNYDPKKLSLPEPAAAT

SEQ ID NO: 470183 - protein, 412 aa, unidentified
MRIVGLDVSRSVAEIAYLEDGVLHAGGHAGLRRDELERFAASLRSTDHVVLEATGNTAAIVNVLRPHVARVAIANPLLVRLIAEARVKTDRIDAAVLAQLYVSHFLPEVWMPDESTLALRRQVSRRSQLVRQRTRLKNEVHAVLAAHLIERCPVTDLFGRKGRVWLGAQPLPMDERLGVEQRLRELDRLGEDLLEVDKALAQASIGDERLRRLLTITGVNTTVAIGLLSAIGAVERFPNPEKLVSYFGLNPSVYQSGPTPARHGHITKRGRSYARALLVEAAWGAAQAPGPLRAFFLRVRDRRGQQIAIVATARKLAVIVWYVLTRNEPFAWDRPALTAHKLRALELQSGMPAQHGSRKGTAAAYSLKSVRDQERAVAEQAERTYQRLFSRWKQAQPKGREAPLPWPGTRNS

SEQ ID NO: 470184 - protein, 343 aa, unidentified
MEVKLIGIDLAKSVFQLCGINQAGKVVFNRQVRRDRLCDVLRTYPSTPIAMEACFSAHHWGRTFQAMGHPVRLIPPQHVKPFVRVNKSDACDALAICEAAQRPGLHGVAVKSVEQQDLQALHRLRQRYISQRTQAANQLRGLAAEYGVIFPKQLQQLRSQLPEALEDGDNGLSPVARETLALLGEELQGLDQKIQRTQTRLVELARHCESWKRLQSIPGYGPIVAAAVVAAAGSGQQFRNGREFAAWLGLVPRQSGTGGKVRLLGITKNGDRYLRALMIHGARAAVRWAPRRNDALGHWVQNLQHRRGHNKAVVALANKCARIAWAVLAGREEFDMTKAFARA

SEQ ID NO: 470185 - protein, 409 aa, unidentified
MEVLYARCAGLDVHQKSVVACVRIHGPDGRAQTSTRTFATDTAALLELSVWLEENQCSHVVMEATGVYWKPVWHILEESFALVLANASSVRNVPGRKSDVSDAAWLADLLAHGLVRASFVPERPTQELRDLTRTRKQMVKQRSQHVNRLHKVLEDANLKIGAYVTDITGVTGRAMLSALIRGETDPAKLADLRDPRLKTPRDELMKALRGKVTQHHRFMLRMHLDQIAATDEGIAQLDAQITELTSPLAEVVERLAAMPGMSQTSASVVLAEIGSDMSRFPAAGHLVSFAGLCPKMDRSAGKSRSTKLRKGSNWLKTVMVNCGWAAARSKNTYARAQFHRLKSRRGSKKAVIAVAASMLTAIYYMLRDSVPYRDLGAGYFDRRDSTKIANRLRRRLESLGFSVSMQPAA

SEQ ID NO: 470186 - protein, 341 aa, unidentified
MESITTIGLDLAKQVFHVHGADSSGAAVLSRKLSRAKLMSFFASQPRCVVAMEACGGSHHWGRELRRLGHEVRLIAPAYVKPFVKRQKNDAADAEAICEAAQRPSMRFVLVKSEEQQASAAVFRARDLLVRQRTQTINALRSLLAEYGWVAPKGLFHMAGLMARVEASDCPLPSSARGAFLMIADSIKQQDSRIRELEREIQQRAREDADARRLMTIPGIGPITATALLALAPPPETFARGRDFAAWLGLTPLQRSTGGKQKLGAISKMGERTLRRLLIIGSSAVVMQASRHGAPAGSWLAQMMARKPRMLVTVALANKTARIAWSLLAKGGTYRAPAAAA

SEQ ID NO: 470187 - protein, 350 aa, unidentified
MMKQMIAVLGIDLGKNSCSVAGLDAAGNVVMRRRLTRDGVVRLASAMPACVMVMEACCGAHHIGRTLAAQGHEIRLMPPEYLQPYVKAQKNDERDAEAIAEAATRPTMRFVELKSEAQLDMQILHRARTRLVAERTALINQLRALLLERGVVIAQGREHLEKHLALMLDDGAAAPAALSPRMLSLIEDMRLEWADLDRRIGALTAEFAARAREDQAARRLSTIPGFGVLNATALVAAIGSGEAFHRGRDLAAWLGLVPRQATTGGKPRLLGITKRGNTYLRTLLVHGARAALPSLAASLTPMGEWLRGLSVRAHKNKVIMALAGKLARIAWAVLRTGEGYKTSAAATTRA

SEQ ID NO: 470188 - protein, 404 aa, unidentified
MQVVCERCAGLDVHKKTVVASVITPEGQETRTFGTMTKDLLEMADWFVEKGVTHVAMESTGVYWKPVYNVLEEGFTVLVVNCPPLKAVPGRKTDVKDAEWIADLLRHGLVRGSFIPDRPQRELRELVRHRRSLIQQRAQVVNRIQKVLEGANIKLSSVATDVVGVSGRAMLERLIEGTDSPQQIAELAKGRMREKRGQLEQALQGLVGPHQRTLLGSHLRHLDFLDGEIDRADEEVAARMRPFQEALERVDGIPGVGRRVAEQVLAEIGMDMSRFPTAAHLASWARVCPGNNESAGKRLSGSTGHGNPWLRSALVEAAQAAAHTKGTYLAAQYHRLAGRRGGKRAIMAVAHTILVTIYHMLTRGTTYSDLGGNYFDERDRQATIRRAVRRIESLGYKVTLEEAA

SEQ ID NO: 470189 - protein, 559 aa, unidentified
MNTSNVYVWIPAGMAVNAGILLQLCSQHERRYSMTTHAQSQQHPYDEGRYSSDNLKNVTLDDGTRVVTSPQTDIKRPVCAGIDVHKSILMAAVCVTDKDTLKAVFYVRQFTSSNSDIRRMAQWLLGYKVQDVCMESTGKYWIPVYDILEQNGLHPTLTHPKYVKQAKGHKTDFRDAIHIANLFRMDLVVASFIPPADIRDLRELCRYRLKLTYIRTSEKNRYQNSMTISKVRLDSVFTDPFGKSATDIMSYLVSTDPENVSDDKILGFVRKGCKASPEEVLDSIHGYEFLGVQRDKLQIISIHLEDINKCIAMIDQKLEYFRLKYSNVIQHLTTMVGISVESALYILGEIGADMSVWRDSASLSSWAGLSPANNASARKNKSTKIGKGGHYLKPLLVQCALAAVKSTKKHPYFYNKYISLKKRRGHKKAIIAIARKMLVSIYHMIREDKGFQPIDFDKVVNRKQSSKELNLQNIIEFLGEHGVDANTIRIVEKQCSQGAVDQKKAATSATDKKVQKKKQPKTIAETTATEQKSAKRRGRPRKSPQTKDQPLDQHAVATA

SEQ ID NO: 470190 - protein, 393 aa, unidentified
MICVGIDVAKDKHDCFIMNSEGEVLADVFTVPNSREGFEFLLRQIRSCTSKSDKIKVGLEATGHYSYNILGFLLDNGMPIFVINPLHTNLYRKSLSLRQTKTDRVDARTIATMLMSDVDLKSYTDTAYHNEELKSLTRYRFDKVRERAKLKQSVSRLVNILFPELEKLVPSLHMASVYAMLSEFPGAKQIAQAHLTHLKAVLSDASNGRYDRDKTIAIRDSARRSIGSVMPAKSLELRHTIALIRELNAEIEQIEAEIQSLMETIQSPITTIPGIGFRMGAMIIAEVGDFSRFDSPDKLLAYAGLSPSTYQSGQLSMNGAYSHMEKRGSRYLRYALYNATKYVCHWEPSFAAYLAKKRAEGKHYNVALSHAAKKLVRLIYAMEKSGRAFQPVS

SEQ ID NO: 470191 - protein, 359 aa, unidentified
MRYVGIDYHKRYSVLCATDERGQELKQRRISGNSATGFAQFFSELGEESKVVMEACWNWGWLYDLLAKIDGIDEVMLAHPYKTRLIAEAQIKTDRLDAQMLAELLRGDLIAQSHAPSAATRARKHLLRQRLFWVRLRTMLRNRMHAILDRQQGLERPQLKNFFSRRGQTWLEEVQLPCAEDQPLLTQDLEVAELLEEKIKQLDRSIGQSQSEEEKLLESIPGIGPLFSSVIATEIDGVGRFNSATKLAAYAGVVPTTHASGGRVFNGRLLWQCNKWLRWALIEASWSAIQFSGYFGSIYRCARARGKNKNIAITMVAHRMIKIIWLLLAERRPYTETLPDRSEDGMTVVVRRKVLGLAS

SEQ ID NO: 470192 - protein, 387 aa, unidentified
MPKQFDSHHAATAFDHDSTLVVALELSGKSWEAGAVVPGVARRPRRRLQACDMAELLRSIARWTSEALAVGRAVQRVTLTYEAGRDGFWIARYLLARGIEVHVMHPASIPVERRNRRAKTDRIDLDMLLRTFLAWLRGEPRVCSMVRIPSEAEEDMRRPGRERERLVCERLQLENRMENLLCLHGVSNFRPRLKKAAERLEQVRNFTGAPLPPQTMAELRRLMVRHRLVSEQLRELEAARDRVTQVAEPDQAEQMIQILIRIVSLGEETATLLVRELFCRSFRDRRALANFVGLTGTPFKSGGMEREQGIGKNGNARVRRIIMQLAWRWLRFQPQSALSRWFDERTGGAKGRIRKVMIVALARKLLIALWRYVEAGEVPAGARILPA

SEQ ID NO: 470193 - protein, 406 aa, unidentified
MRSIGLDIHRDFCEVAIAEGGEVRSPGRIEMTPEALELFAGSLARTDQVALEVSGNAWEVARIIRPHVAKLVVVSPADTGIRAARAKTDRLDARALAKLLAAGSLQSVWVPDDHTRAMRRRLQRRRKLLVVRTKAKNEIHAALMRRLVRRPAVSDLFGKQGRRWLEALELPDEEQETVEGCLRQLDFCESEIAAIEKRIATEALASPEIRRLMTVPGVNVICAATFMAAVGDIHRFGDRRKLVGYLGLDPKVRQSGLSQTSRGRISKQGSSSGRHALVEASWSVVKAPGPMHSYYRRIRARRGAQVAIVATSRKLACLFWCLLTREEDYAYAQPSLTAKKLRRLELAAGAPKGAGGAGIWSTNKAMREAEQAVARQAEAAYERTVADWQRQQRRRKGADATTGRAI

SEQ ID NO: 470194 - protein, 429 aa, unidentified
MNYTQNDKIMQVTNETLVVGMDIGSEYHYARAFDNRGLEYSKAPLKIRNDHDGFNGLREWIENLKEKTKKAHVIVGMEPTGHYWFNLGDYLKESGIKLVLVNPHHVKKSKELDDGIQSKNDSKDPKVIAGLVSAGRYSNPYIPEGVYSELRILANTRLTNTDNLNRVKHRISRWLSIYFPEWKDVYCKTDTVSGFMLLSAAQMPKEIEALGVEGIQTIWRTAKLRGVGKKKAVKLYEAAKRSVGKKVVGDSASCELKYLLEDYYTLQAREAALLEKIEKLLPEIPYAENLLLIKGLGVKTVAGFIAEVGDIRRFSSPKQLQKLAGLAIVDNSSGKHRGKTKISKRGRKRLRHLLFEAALSLVGKNKAFKSLHQHYLMRAHNPLKKMQSLMAIACKVIRIFFVILKKGTQFDEEKMLSDIKRPEQRLIAA

SEQ ID NO: 470195 - protein, 325 aa, unidentified
MQTQTNYTGIDISKSFFDVAFLQAGCYTYNKFSNNTDGFKALLKVLTLDSWVVMEASGPYYLQLACFLIDAGISVSVINPLVIRRFSQMRMSRAKTDKKDARMIAEYGKMEQPVLWQKPEQHIITLQQTEALLTRMQTEYTALNNQLESFVSSGMLTNQLRKEIAKELIHKERLIKKLSKQMEQIAKEHYSDMLSDLESVPGLGRKTAMMLTVLSGGFTRFDDYRKLSSYIGICPRIFESGTSVKGKARICKMGMSRIRATLYVCAWSASRCNKACRDLYERLLAKGKAKKLALIAVANKLLKQAFAIATQKTKYNENYSNIICF

SEQ ID NO: 470196 - protein, 359 aa, unidentified
MQPEASWEVKLEVRFVGLDVGKWKCRAAIMNREGLILDEFWFTNNHEGIENLTSKLTLEDRVVMESTGSVWTNLYDRLDDRHIHVSLANPLKTKAIASAKIKSDKVDARILAHLLRSNLIAESYVPVKPLREIRALIRHRMAVVKIRTMVKNQIHAIVDKHGISCDYSDMFGKGGMEWLRGLQLPSLDKLILDNHLTHLESLNQQTDRVDEEIHRKACEDEDVRLLLSLTGVDVYTALLIRSEIGNIERFPDYKKLVSWAGLAPSLHQSGRVEYHGSITKQGSRMLRWIMVEAATVAVNHDPRMGGFYERVKHRRGAQKAIIAVANKMLKITWFMLTRKEPYESRNEKRYLKKLNSVAA

SEQ ID NO: 470197 - protein, 344 aa, unidentified
MKYSVIGMDIAKQVFQLHRVEVETGEVERIKLRRDDVLPYFARQAPAMVALEACGSAHWWARKLSALGHQVRLLHPKSVRPFVLRNKTDAADARAIWTAAQQPDARFVAAKTETQQAILALHRLRAQLLKFRIMQTNALRGLLYEFGEVLPDGHAALSKALPAALANLDTHLPAVLLDSLREQWTRVMSVDKEIAAIERRLATILRDTPSCQAVAEIPGVGLLTATAAVASIGEAKAFKSGREFAAWAGLVPRQRGTGGRVRQLGISKRGDVYLRTLLMHGARAVILRYRHVPWLDGLLKRRPYNVVVAAVANKLARTIWAVLAKGKPYNPDAFSAVVATQGGV

SEQ ID NO: 470198 - protein, 340 aa, unidentified
MGNVTTIGLDIAKNVFQVHGVDADGAVVVRQRLTRGRMLKFFAKLPRCLIGIEACATSHFWARELVALGHDVKLMPAQYVKPYVKRGKNDAADAEAICEAVTRPTMRFVGIKSPEQQSAMMLHRVRLILNRQRTQLSNAMRAHLAEFGIAAPIGRNGIEQLLDVIADPTDERVPADARFCLEMLAAQLRIVKEQILENDRRILASARETELGRRLMEIPGVGPLLASAIVATVPDPAIFRSGRNLAAWIGLVPRQNSSGGKERLGSITKAGHQYLRQMLIVGAMAVVRYAERNGAKRPWLVQLLARRKTKVAAVALANKNARTIWAMMASGERYREPQIA

SEQ ID NO: 470199 - protein, 399 aa, unidentified
MFYCPPSDVRVSVDVGCKFHQVAVGLSSGEILDEFSISHQPDGFRTFFAKLEKLERQYQCPIRVAMEGHNGYARPLDSMVLARGWQLYNINNLKLARFKEIFPGAAKTDAIDARRGLELFQLQDHLPMAKSVLQIVAEPAKEDKMLKRFSRRRRRLVNDRVRLINSFQADLQAVCPSLLSLTGDAGNLWFLRLLTSTDDLRKLQRMQLKTLRKIPGIGTKYAAQILQWQKQAQFSHEIEWVGEMIQDDATRILELNHQIKVLEAKMATVATDSQMAGLLTTIPGFGPVCTAELSGEIGNASRFAKEASLALYLGMAALDNSSGQYQGTKAPRQVNRRAKAAMMVAVDRHRKYVPASQRYYEKKRAEGKGHNQSVRALGRHLCRIIFKMFKEQRPYVPPN

SEQ ID NO: 470200 - protein, 415 aa, unidentified
MDWRLELLLVGDDWAEEHHDVELQDETGRRLGRAKLPEGVAGVARLHAMIGEHLGEHGEPAQVVIGIETDRGPWVQALIAAGYQIYAINPLQVARYRERHGVSGAKSDTGDAHTLADMVRTDRHQLRPVAGDSDLSEAAKVVTRAHKTLIWERTRHMLRLRSSLREFFPAALVAFDDLTAADALELLAKAPDPASAARLSSAKITAALKRARRHHVAAKAEAIAAALGDEHLGQPAVVTAAYAAAARAQVAILTTLNAEIETMQEQVEAHFGKHPDAEIYLSQPGLGLVLGARVLAEFGDDKTRYADARARKNYAGTSPITRQSGKKKVVLARYVHNDRLVDALGLQAFTSLRASPGARVYYDQLRARGIGHRAALRQLANRLVGVLHGCLKSSTNYDEATAWPNHAQQAEQAAA

SEQ ID NO: 470201 - protein, 388 aa, unidentified
MIYVGIDIAKLNHFASAISSEGEILIEPFKFTNDADGFHLLASKLESFDKASTIIGLESTAHYGDNLVRYLVAGLYKVCVLNPIKTSQMRKNNIRKTKTDKVDTYVIAKTLMMQDTLKFISFYDLDLMELKALGRFRQKAIKQRTRLKIQLKTYVDQVFPELQYFFKSGLHQKAVYAVLKEAPSPNRIASMHMTHLATLLKTTSHGHFTKEQAKELRVLAQKSVGANDSTLSIQITQSIEQIELLDSQLKKIEEEMTDIMKFNDSVIMTIPGIGYINGGMILGEIGDIHRFSNPNKLLAFAGLDPSVYQSGNFQARRTRMSKRGSRVLRYALVNAAWNVIRNNFTFKSYYETKMAEGRTHYNALGHCSGKLVRIIWKMLTDKVEFNLK

SEQ ID NO: 470202 - protein, 402 aa, unidentified
MNCVGIDVSKGKSMIAVMRPFGEVVVSPFEVRHTASELSELARLLKNLDGETRVVMESTGNYHAPVAWLLHGAGFYVSVVNAMLVHDYGNNSLRRGKTDKKDAVKLANYGLDHWLTLPRYVPEEDTRLMLKTCYRQYQQYSKVQTMLKNNLISLLDTAFPDANRLFTSPPRADGSEKWVDFVATFWHCECVCGLSKKAFTAKYQKWCRKHGYNFSQDKALDIYASACGRFGVMPKTNTAKLLVEQAISQLQTTSAALAALKQEMQSLAASLPEYPVVMEMFGVGPTLGPQLIAEIGDVRRFHSKKALVAFAGIDAPPYQSGQIDVRSRSISKRGSASLRRTLFLVMGVLLQCAPMDEPVYQFMNKKRSEGKPYRVYMMASANKFLRIYYASVKAYLDPLEHD

SEQ ID NO: 470203 - protein, 450 aa, unidentified
MRTTRLRYEVVAGIDVAKEPAVVCVRLPPAEGRKHRRPHLQAVPATVPAITDLAAELTALGVQMVSMEATSGYWRVWFAVLEEAGLAVQLVSSSQARNLPGRPKTDKEDARQLARMGEMGMLRSSFVPPPEIRALRVCTRHVFDLTADRTRYWQRREKLLEDALCKLSSVVSRLAGHQTARAVIEKMIEGERDPRVLAALGQGKMRNARLPALAQALTGMRFGPEHAHAAASLLRAIDLLEAGLRELQEQVTAHLAAIPASWGVDADGVTGPQAGRAAGAAALPAAERLDEIPGLGREAAAALIAGIGLDMSRFPTPQALVSRAGLTPTARQSGPVKGRGKKGRGSTCAKRIAVLAAYAAANTDTFLGERFRRLSARPGGGGRKKAGCAVARSVLIIVWHLLNDPAARYRDLGPGWHARHTDRSRRARNARRQLEALGYEVVITLREDAA

SEQ ID NO: 470204 - protein, 367 aa, unidentified
MADHSVAYVALDTSKLRNAVAIAEAGRDGEIRYLGEIDNAPAATAKLARRLAKQHATLTFAYEAGPTGYGLYRQLKSLGHDCIVVAPSLIPQKPGDRVKTNRRDALSLARQLRAGDLTAVWVPDPHHEAVRDLTRARGAAVREQRAKRQQVAALLLRLGLHYPGKTTWGRAHMAWLAGQKLAHLEQRIALEEMLHAVRQAGDRIARLEQAIRTAVPDWSLAPSVTALMALRGVEFIAATTLLAEIGDLTRFRTPRELMAWLGMVPSEHSTGERIRRGPITKSGNRRARSILVECAWSYRHPPRVGRDKLARLEAAPPAVRDIAWKAQSRLTARYRALRRAGKLDVVAITAVARELAAAVGSGRTPEV

SEQ ID NO: 470205 - protein, 319 aa, unidentified
MAQNESVVVGIDVAKDKVDACIRRVALRQTFPNTPQGHRQLVAWLRKHQVNKAVMEASGGYEREWAKVLRQAGTEVRIVDPKRVRSFALSAGRLAKNDTIDAEMIAWFAETFDEAPGQTHNAAREELAALVKARKNLIDVKTRLQSQNEHAVPGPVQKAHARVLKSVAAEIAKLEAAISARIKATPEFAERAEIIESVPGLAATTSAVLIAGASELGKVSDAIAAALIGIAPYDDDSGKRRGERHIKGGRRWVRNALFTPCLGAATQHNPVLKAHYERLIANGKEPKVALVACMRKLIIILNTMIARGEKWDPSRYALR

SEQ ID NO: 470206 - protein, 336 aa, unidentified
MSVASMSAASVCAVPPAAAQPVFVGADVSKARLDLCGVPGHTSLANDAAAVRKIVRSLSKTPPRLVVVEATGGYERLLVNGLLDAKVPVARVNPLRVRRFAQSRGVLAKTDAIDAAVLAEFARANADTLRPLQPLDDTARMLRQLTARRRQLVEQCTANKSQREHVTLKSVRSSIDRTIKHLCQEIAAVEAEIQALIDADARLAARHKKLLAVAGIGPRVSRVLISELPELGQIDRRKIAALVGVAPFNDDSGTHSGQRHIRGGRATVRAALYMATLVGVRHDPILRDHYQRLKANGKPKKVALVACMRKRLNYLTSLLSDKPPAPQSGPPGDGAR

SEQ ID NO: 470207 - protein, 392 aa, unidentified
MIYVGIDAAKRKHDCCILDPQGKPYPVFSFSNSHDGFQSFFQKLFSICSDKGQIKIGLEATGPYSENLFNALVDRSLPVLRINPLLVKNFKSSMSLRRTKTDKVDAQAIAQMVKEKGDSLQTYSTSLYHMEELKSLTRYRLKLVGEQSKLRVSVSRLVTILFPELESLVSSLHLASIQALLIEWPGHQQLANCSLKRLTNLLKKHSRGQFGKPKAIAIQQAARQSIGKVSPSKSLELRQTLKKVAYVQQDLDEVEAQIKEMVDSLHSPILDIPGIGYTTGAMILAEVGDFNRFANADKLLAFSGMSPSKYESGEFKGTTGKMEKRGSSYLRYALYTAAKLVSQFAPQFKSYYQKKQAEQKPYNVALSHVAKKLTRVLYKLGTTGEAYQPQVA

SEQ ID NO: 470208 - protein, 370 aa, unidentified
MPKPTPVFVGLDLHIETISVAYAAGGTTDPPQFVGQIGTRESDIDKLVRRLRTRSSQLVFAYEAGPCGYVLHRYLSGKGLACCVVAPSLIPKRPGDRVKNDRRDAVELARLLRSGDLTSVYVPSVEDEAIRDVCRARDATRVTLKAAKLRLKSYLLRLGFNYVGRADWNDAHRRYLAQVVCPTPAQQIVFQESLRAVDEQVERLARLEQQLLDLAPSWRLFPVVEALQALRGVQWLVALTVVAELGDLTRFDNPRQLAAFVGLTPSEHTSGENRRQGGITKTGNGRARRVLIEGAWAYRYPAKISAHIQRRIEKLPKIAQDIGWKAQVRLCKRYRRLIARGKHANIVTTAIARELLAFMWAIAKEVKISA

SEQ ID NO: 470209 - protein, 347 aa, unidentified
MEVFIGFDISLQSTHVCVVDGQGNIVREGVAASDIDALESWLRNNSKDWSIQRVVFETGQLSTHFYHGLRASWPVTCIDARHANGTLKAQRIKTDKNDARGLAQIARTGWYKATHVKSHEGQALRALVGGRKQLVELRLEVENHIRGTLKTFGIKLGAVTAVAFAAKVKTATSEKDALVQETFIALLNARDGILAQIKALDRRCGAIARKSPVTKRLMTVPGVGIVTALTFQAEIDDPLRFRKSRDVGVHVGLTPRRYASGEVDRSGGISKCGNGALRTLLFEASVTMLTRSGKWSRLKAWGVRLAQRNGFKSAATAMARKLAVVMHRMWVDETNFAYGDTPTAQAA

SEQ ID NO: 470210 - protein, 372 aa, unidentified
MTSIIYVGMDVHTTNYTLCCYSMEDDRFFAEVQVEPDVKNILKYLARIEKQQSRDCRIVCGYEAGCLGYSLYHQLHAHGIDCVILAPTTMMTKPGKRIKTDRRDARLISKCLAFHTYSPVYIPTEVDDAVKEYIRMRDDANSALARVKQQIIAFCIRHGKIHDGKSYWTNKHLEWLSSLDLGNKILSEVLQEYLIRYYQLREQVDMYDMRINELAQAEPYRQKVEKLGCFRGIAAHTALSFCVEVGDFRRFATAQQFASYLGLVPGECSSGDKQQYTGITKAGNSHLRKLLVETAQVFGRSATKSGKSVALKERQAKCDSLTVAYADKANARLKKKYFKIAMRSKVNIAKTAVAREMACFIWGMMTDNISCA

SEQ ID NO: 470211 - protein, 343 aa, unidentified
MDHFAGLDVSVKETSVCIVDGTGKIVREVKVASEPDALLAVLINPSYRFKRIGLEAGPLAQWLYSALAEAGLPVICVETRHMRAVLKAQINKTDRNDARGIAQMMRAGLYRPVHVKTLRSQKLRMLLTHRKLLQSKAIAIENDLRGTLRNFGLKVGMVGMARFETRIKELVENLPDLAVLVESLLVVRRVLREQLAILHRRLLAIVREDDVCRRLMTIPGVGPVVALTYRVTVDVPARFRNSKAVGAVFGLTCSKYQSGEINRTGAISKCGDEMMRMMLYEAAQVMLTRTNKWSWLKAWAMKIARHRGMKKAIVALARRLAVIMHRIWVDGTEFQWTREVAAA

SEQ ID NO: 470212 - protein, 443 aa, unidentified
MTETVKGNPAEPEFAAFVGIDWADQKHCWKLAVAGTQATESGELKQTPEELSNWAAALHHRFSGRPVAVALEQSSGALIYQLSQYPHLWLYPVHPATAAHYRQAFYPSGSKSDPTDTGLLLELIVHHRDRLRPLAPETPETRLLRMLVEQRRQLVDEKTRWNNRLKAALQIYFPQVLDWVDIDTIIGCDLLERWPTLQQLQRAHPGTLRKFFHEHNCRAEALMTERIQAIYQATPAVQDTALLEGETASAGSCVAQIRTLLASIAKLDGQIKSRSSEHPEASLFAEVPGAGAALQPRLIVAFGTQRDRYANAGELQAYSGIAPVTESSGHSRWVHVRWACPTFLRQTFHEFAGCSISRSEWARVFYDTKIAAGKSHHEAVRALAYKWIRVLFRCWKDGRPYDEQTYLRALAKRNSPLKPSAGSPTKVVWKTVGGFKKLSIENS

SEQ ID NO: 470213 - protein, 331 aa, unidentified
MNYSHFVGLDVGKKTFDASLMSADEKELSHKSFDNTPTGIQSLLDWIAGYHLSLSKLLFCAENMGSYVTELSVSSVSMGFSLALVCPLTIKKSIGLQRGKNDRIDAKRIANYAVLHYRKLELYKLPDKDLVRLRGWIIIRDNLVKQKVSSIKLLETFSQMAKLADVTESISFLEEQLKSIKEKILEVEKDMEQLIAASTSLYTNYLLLRSIKGIGIINAIVLLCVTDNFQRFDNPRKFACYCGVAPFEHTSGISIRGKTQTSSLANKEVKVYLTRAAITAISWDPQMKAYYKRKIAEGKHKASVINAVRAKIIARSFAVIRRQTPFVTLAV

SEQ ID NO: 470214 - protein, 323 aa, unidentified
MNKDTIYFGIDISKDVFDVTNSKECYYQFENNNKGFGKFLKLLDNTSHCVMEATAYYHYQLAYYLQENQIKVSVENPLSVKRFIQMKLSKIKTDKSDSKLICQYAEKVDLKLWKGHSKHQIECLQITRLLSVYTKQRTMINNKIHGESVLGNPSLFVVRSLKRSLKFIKKETDTLENKLLKLVRETHQNLLTRIETIPGIGRKTAIMLVVLTDGFERFNSASELCSYSGLTPMIRQSGSSVKGRPRISKIGNKKLRNLLFMCSFNACKYNTACRELYERIVAKGKSKKLALIAVSNKLLKQVFAIAKSGLIYDQNYRSILVKK

SEQ ID NO: 470215 - protein, 400 aa, unidentified
MSTSGRRIWVGVDAGKGHHWAVALDADGETLFSTKVINDETQILMLIETAREKADEVRWAVDISGRASTLLVGLLVGHGQQVVYVPGRTVNRMTGAYKGEGKTDAKDARVIADQARMRRDFAPLDTPPELVSNLRVLTNYRADLIADRVRLINRLRDLLVGICPALERAFDYSAAKGPVVMLTEYQTPAALRRIGVKRLTTWLERRKVRGADAVAAKAVEAAQSQQIALPGEKRAAKLVCDLAHQLLALDERIKDNDREIRETFRTDDRAEIIESMPGMGPILGAEFVAIVGDLSGYRDAGRLASHAGLAPVARDSGRRTGNYHRPKRYNRRLRHIFYMAAQTAMMRPGPSRDYYLKKRGEGLLHTQALLALARRRIDVLWAMLRDERLFTSAPPVTQAA

SEQ ID NO: 470216 - protein, 438 aa, unidentified
MRAKCNDDLSTVNFSTIGLDVHKNRLVACAVHVQHDAKGREVHEKEYFESTGTYSGRQRLTEWCSSQNADLILMESTGIFWKAPFRDLEKADLHPVLINPRIFNRGSDKRKTDKSDATWLANLARLGLYRASFIPTEPYRSLRLVQSQIKSLVAERQRLKNRLVKVLDDSGFRFTVAFADIGGASSQSLIAGILEDAPREELALMIDPLCKKSIEEILDAVSGELSQINKDIVQSILRLIETHTKENETLEQTVIRELKKCEKVKQNIRLMTTIPGVSEKSAQLLMSMIGPDFVENFSSPHAFARWLGVCPGNNESAGQIKSGRTPHGQRLIKKVLTECAQAACHTKGSHLAVLFGGWKHKGFCKAVMAVAHKLALLIHWVVVNQKPYIDKEFDYTGVFKQDGQRRPRWIRALRRYGLMTLADVEKEKAARGWIIAKA

SEQ ID NO: 470217 - protein, 356 aa, unidentified
MSEGSWVGLDVHARKIVAGVLDAGSGELRSLRAPTLPADTVDWLRQFPAPVRVAYEAGPTGYGLARACVAAGIACTVAAPSKLPRAPADKVKTDRRDAERLARLLRLGELVAVRVPEPHEEAARDLVRAREDARGELMRARHRLSKLLLRHGLVYDASAWTLAHDGWLRRQRFEHRPLAIAFDESYAAMLQAKTRRDALDRAIVELAAEPPFAEIVGRLCCLRGVSTLTALALTVELGDWTRFRPQSLGPFLGLTPSEDSTGERRRLGAITKTGNTHARRLLVEAAWHQRRPLRASATLERRRQGQPAAVRARADRSARRLHQRWQTLEDRGKRRTIVAVAVARELAGHCWALATM

SEQ ID NO: 470218 - protein, 479 aa, unidentified
MAVGRMNRKQRKELTRQLRSEDPGLDVVHPRAAGIDVGNGAHYVAVRPDQDREPVRRFECFTADLHRLADWLQACGVATVAMQSTGVYWIPLYEILEERGLEVYLVNARHTKNLPGRKSDVQESQWLLKLHTYGLLNNSFQPTAEIRTVRTYWRQRAEHVHAASTCIQRMQKVLTQMNVQLANVISDLSGLTGQTIVRTILAGERDPKKLAELSHPRIQASREEIAKSLEGNWRPELLFVLKQEVEMYDIYQQRIGECDRELKAHLKRFADNVHRKPAEAGPVSEEQKDKKVPAKLPRSGKRAQGNAPCFDLRSELYRISGVDLTRIDSINVVVAQTVISEVGLDMSRWNTEAHFASWLGLCPDNRISGDKVLSKGTRHVINRAATALRMAATTLLRSRSYLGAQYRRLRARLGAPKAITAMAHKLARLVYRMLKYGQDYVDKGMQYYEDRHRCQQIELLQKTAAKLGLHIVEIQAVGG

SEQ ID NO: 470219 - protein, 422 aa, unidentified
MLPENPSVVAWIGLDWADQQHEVRLQAVDSSQVESFSVPQTPEALDAWVCQLRRRFPLGFLAVALEQSRGALIYALMKYDFLLLYPVPPKMVADYRKAFSGSGAKSDPQDASLLLELLRCHRDHLRLWRPDDAQTRKLSLLVEHRRHFVDQRTRLTNPLTSLLKQSYPPALEWAGELGRPAAARFLERWPSLAAAQPADRFELRRFYQAEGRWDSAALEERLDQVRQATPLTTDSAVRESTTLMITLLAQQLLVLLSAITQVEKAIDELFPPHPDHLLWDSFPGAGKALAPRLLVACGADRKRFANAAEVQQFAGIAPVTESSGKIRRVHWRWACPKFLRQSLHEFAACSIPHSAWAKAYYEQQRGRGKSHHAAVRALAFKWIRILYRCWKDHAPYDEHRYLEALARHGSPLLARLAATTQA

SEQ ID NO: 470220 - protein, 373 aa, unidentified
MGNGIKFVGLDVHKETISVAVADLQGETRLVGTIRNRPAEVAAVMKRLGEAGRLFCTYEAGPCGYVLQRQLTELGISCLVAAPSLIPRRSGDRVKTDRRDALKLAGLLRAGELTPVWVPDEAHEALRDISRAREAAVQDLTRARHRVTKLLLKLGIHRPEGQNPWTKKHQAWLSGLRLAQAHHQVVLSEYLTALAEAEARVARMTKQVELAAGSCAQAGTIAALQALRGVGVVTAVTLVAELGELTRFSGARQAMGYVALTPREHSSGGRQWRGGITKTGNQHARFVLVESSWHYARANRPGVTIRQRRARLPEQVVRIAERAEQPLHRRLKRLEGRSKTRQQAAVAVARELVGFVWAIGQVADAYTPEQLAA

SEQ ID NO: 470221 - protein, 444 aa, unidentified
MSNELAPTAGQEKQWAAFVAIDWADKKHYWKLVAAGSQKEEQGELDNTPEAAAVWAADLHERFGGKPIAVCLEQSRGSLVYMLLKFPQLVLFPVNPKMAARFREAFHPSGSKGDPSDTAVLLTLLIRHRDQLRCLKPDTAETRLLQRLVEQRRLMVNEKTRQSNRLTACLKLHFPQILKWFEDVSSPLVGALLERWPNLEQLQRAHEGTLRKFFHQQNCRSAERIQERIDAIRQAVPATTDAAVLGAEAMSARGFIKLIAALRAHITELDERIAKEFAAHPEIALYDGLPGAGAVLAPRLLVAFGTDRERFANAHQMECYSGIAPVTVASGQSEWIHFRWACPKFLRQTFHEFASHSINKSKWARAYYDLQMDKGKSHHAAVRALAFKWIRVLFRCWKNRSPYDEQVYWQSLQKRNSPLKALLPGAGLAWKDVAGFQKPSENPS

SEQ ID NO: 470222 - protein, 504 aa, unidentified
MDWFEFVWRASEVSHRGKRKPVPVDKSAPEVIPDAEHELVIERVAAVDVAKAAGKVCVRLPGKAGRRFSRVWDVPARTGAITDLGEQLVESRIEKVTVESTSDYWRIWYYLLEAAGLSVQLVNARDVKNVPGRPKTDKLDAVWLAKLTEKGLLRPSFVPTTEIRRLRDYTRLREDLTHERTRYWQRLEKLLEDALIKVSVVASRLDTMSTRDMIEALIAGERDPQRLAELARGKMRAKRSELITALDGRFDDHHAELARLLLNQIDALAAQINTLTGRIEDLIAELPEAGAVDHGGSEDTDITAPGAADRSHAAPQPARGAHEPTGSAPCRVDPAIEAECARLGAIERLDEITGVGEHNAQVIIAETGLDMTRFPTPAHLVAWAKLCPRTIQSGPVTRGGRTGKGNPYLKGALGQAAAAAARTDTFLGQRYRRIVKRRGKLKALVAVARSILVIVWHLLADPLARFHDLGPDYHARRINIERRMRNHIAQLTALGYRVTLEPAA

SEQ ID NO: 470223 - protein, 351 aa, unidentified
MMIIGVDYHPSFQTIAFLMEETGECGDQELKHSDGQAEKFYRDLKQRGISVRVGMEATGYSRWFERLLAELGFEVWMGDPAEIKAKRVKKQKFDREDARLILRLMRENNFPQVWVPGPENRDLRQLLWHRHRLVQMRTRIMNQLHALAMNEGYRWKKKLFSEQGRAQLEKLTLAPWASRRRQELLELLDRMNPTIEELSAAVEREARKRPEAMRLMTHPGVGPLTALAYVLIIGTPTRFQRGKQIGTYVGMIPCEDSSARKQRLGHISKQGSSLLRFLLVEAAQAAARIHPDWRRRYMHLAMRRHKSIAKVAMGRRLAVRLYWMWRNGCEYSPSVEFGSYAGQLGTGDGVK

SEQ ID NO: 470224 - protein, 344 aa, unidentified
MNIHTIGIDLGKTSFHVVGLNERGEVVVRKRFSRAQLLCFTANRKVHVIGMEACGGSHFLGRALQEQGHEVRLIPAQYVKPYVKTNKSDYIDAEAIAEAVGRPTMRFVPIKSDEQLDLQSLHRVRERWVMRRTAVLNQIRGLLLERGITLRKGRRYVEEALPWILEDAEAKLSGALRLLLAQLKVEFEQLDTRVSEADAVIQKMVCENEACQRLVKIPGIGPVTATAVMAAIGNGAAFRKGREFAAWIGVVPREHSTGGKQKLLGISKRGNSYLRRLFVQCARAVLQQKAKQSPGLKAWLEQLTSRTHYNVAGVALANKLARMAWAVLATGEAYRPPQLAAACV

SEQ ID NO: 470225 - protein, 325 aa, unidentified
MSLPCLGIDVGKHKLYAALLCTADRKPKRKTLSNDASGHQALLQWLAYHRVERVHACVEATSTYAHPVARYLHEQGHVVTIANPKQVKAYGESLLVRTKTDRVDAAVIARFCLERKPRAWTPPAPEVEVLQTLARRLDALDKMISQERNRLETTSPELVEDIKAHLKFLKQQRKSLLEKINHHIERHDTLKQQRDLITSIPGLGDKTAAIILAEIGDIHFFKSARQLAAHAGLTPKAHESGSSIHKKPRLSKMGNARLRKALYMPALASINHNSVIAQFRERLLGAGKLKMQVVGAIMHKLIRWVFGVLHSGQPFDANKALAVYA

SEQ ID NO: 470226 - protein, 388 aa, unidentified
MTQARGALPTPTVLDYERTLILAIELSNTSWVLAAQIPGLPGVKAKRSIKPTPEALMTAIEGYRVRAENAGRNVDRVIAVYEAGWSGFWLVRWLARYGIETHVIQPSSVPVDRRARRAKSDGIDAELLLRTLLAWLRGEPRVCSMVPTPTEADEDARRCVRERSELVAERISLVNRIGAVLATLGAGEYNPLRRDRRQRLDELRTALGDSLPTHARAKIARMLDRLELLMAQITELEQSRDAVLENENPDRAAGMIQQLAKLRGLGVQSAAVLVREGFVREFANGKALGSYAGLTATPYSSGGIEREQGIGKAGNARLRTVMVELAWIWQRYQPDSAQVRWFRERISGTGRRVRKVMVVALARKLLIALWRFATQGVVPEGAVMKPAS

SEQ ID NO: 470227 - protein, 429 aa, unidentified
MRTESTPGARGPVFCGVDTHADSHWLCVLDWRGRKVLSRQFPADAAGYEALAGAIAAAGEPACVAMEGTSSYGAGLTRHLASLGMPVREALSPARTQRRRPGQGKCDEADAERAARAAMSGSKLGTPKSQDGWVDGVRCMLAARSGAVKARTSAINTARSLLTTAPEGLRSRFRGMAGPRLMEELPSVRAEGALGAALGALADLWAAARDAALDMERAIEASLEENCPALLAMYGCGPVSAAKLAVAAGDNPGRLRSEASFAAICGACPIPASSGKTVRHRLNRGGDRQANSALHEIARQRVMRDPETAEYAERARGRGKSDREVMRCLKRYVAREAYRALMHPHEIRRPEDASELVAARRAAKVSQVRAASILGTSEKYISMLERGQRELRPIRRAYEAWVEAGLPLDWDRRAFEAERKMDSKKHLAK

SEQ ID NO: 470228 - protein, 346 aa, unidentified
MSQDHFAGLDVSVKETSVCIVDDTSRIVREVKVASEPDALLPVLTNPAYHFKRIGLEAGPLSQWLFSALAEAGLPVICVETRHMRAVLKAQINKTDRNDARGMAQMMRAGLYRPVHVKTLRSQKLRMLLTHRKLLQSKAIAIDNDLRGTLRNFGLKVGVVGMVKFEARIRELVANFPDIAALVEPLLIVRRTLREQFCVLHRRLLAIVRDDEVCRRLMTTPGVGPVVSLTYRATVDVPARFHKSKSVGAVFGLTCAKYQSGEVEWSGRISRCGDEMMRVMLYEAAQSMLRSKKWSWLKAWAMQIARRRGMKKAIVALARRLAVIMHRLWVDGTEFRWTREQAAAAA

SEQ ID NO: 470229 - protein, 371 aa, unidentified
MKKYNTFVGMDVHKNSIEIAIAKKGRNAEVRSYGKIDGTLDALDKVVRKLVSRGGCLHFVYEAGPCGYGIYRHLTAKGYDCSVVAPSRVPKKSGDRIKNDRRDACILARLDRAGELTSVYVPCAEDEAIRDLTRSREDAKTDEKRSKQRLKSFLLRHDLRYGGKASWSKAHMRWLSDIKMEHPGQQIVLQEYIDTIDECSRRVERLTGQIRQLVAQWRMSPVVKALQALRGVSLIVAATTVAEIGDLNRFENPAELMSYLGLVPSEHSSGEKTRRGPITKSGNGHVRRVLTEAAWAYRLPARVSRALLKRQEELPEKVCDISWKAQVRLCSRYRLLWAKGKPKQVVVTAIARELCAFMWAIAGEIELPSTT

SEQ ID NO: 470230 - protein, 402 aa, unidentified
MQVDDIDVFIGIDVGKSEHWATALTTAGECLHDRPLPNDEARLREVYEHLGEHGRLLVVVDQPATIGALAVAVAQDMGITVGYLPGLSMRRIADLSPGSAKTDQRDAAVIASAARTMPHTLRSITSSDEDAAALSMLTGFDLDLARQVNQVSNRIRGLYTQIHPALEGVLGPWLEHDSVLEVIATWPTPAALRKAGRARIDAKLKANGCRRHAAWAQAIVEALSKQTVTVAGTDAAGVVLPHLARQLIALHTQRADIAAQVEALVEAHPLYPVLTSMPGVGVRTAAVFLAGTLGKTFTTGAHLASYAGLAPVTRRSGSSIRGEHVSHGGNKRLKRAMFLSAFASLRTDPVSRTYYERKRAQGKRHNQAILALAHRRILTLHAMIRNNTLYNPQPAQPLTTTA

SEQ ID NO: 470231 - protein, 321 aa, unidentified
MTRIICGVDICSSSLAARIGPAGTQTSFSNHTEGIAELASFCHAHQVELIAMEATGGYEQQAFAQLSAQGLPVAILNPRAVRQFAKSMGRLEKTDAIDAGMIAWYAEVKQSQPLCVAPRTQQHLRALVTRLRQLTEIRTAQLNQQRLIVEPVVKTSFDDLLALIARQIRDLEQRIATLIQADPLWSQLNQAFRTIKGVADRTVARIMAEMPEIGTLSNKTISKLAGLAPLANDSGKHHGKRAVRGGRATVRDILFLVGSVVARYEPDFVAFQQRLRAAGKPPKVVRIAVAHKLLVRLNAKARQVRQQSVNLQQICLASQQP

SEQ ID NO: 470232 - protein, 461 aa, unidentified
MAKKAKKVKTAKGAELRIVNPDAAGIDIADGIMQVCVPADRSKDNNRTFGAYTSDLHAISAWLRECGIKTVAMESTGVYWIPLFCRLQEDGLDVVLTNARDVKNITERKTDESDAEWLMLLHQYGLLKASFQPHNDAKRMRTLTRHRDTLSREASSIVLRMQKAMQQMNIKLTLVLSDITGKSGIRIIEAILAGERDPKRLAELADIQCKTPKEEITKALEGNWEEDLMFVLRQNYDTFKHYCIQLGECDAELEKLMENYRAEVAKVEGTSYSPAKKRRDYKKTRHTVGFDVERKAYEMWGVNVFEIPGISHLTALELMSELGHDFTRKFPSSKQFCCWCNISPNTKISGGKRISSHVPHRRNNVGLIFRSIASSLANAKNQLGNFYRRIRSRTGGKAAVIATVHKVAEIFFAMVANQTTYNPEKVGIDEKVLLEKRITRYKRELERITGTHIEIGNACVP

SEQ ID NO: 470233 - protein, 338 aa, unidentified
MALYCGIDLHSNNSYVAVLDGERRDVDCRRVRNELPAVLGFLEPYKEELEAIAVESTYNWYWLVDGLMRAGFDVRLMNPTRASVHSAMKYTDDRHDARWIACLLALGILPEGYIMPVEERGLRDLLRRRLYLVHKRTAHLLSLKAIFARSTGKQVSVGDIQQWDCEAIREVIDDPLVVESITVMLPVVRVLTAQIKAVEKRAVKIGKLRDEFGLLQTAPGIGQVLALTIMCETGDIRRFPGVGNYASYCRCVPSDRMSNFKRKGRGNRKNGNKYLSWAFSEAAHHAIRFEPLAKRYYDRKRARSHLMVASRALANKMARACYHVLRDQVPFDPARAFC

SEQ ID NO: 470234 - protein, 357 aa, unidentified
MSTRTAVGWDIHRKFSQLSVVAQSEQGEIRVVKRMRLEHVDRAAMREELSKLPPGTPIAMEGAFGWPWIADLVDELGLDPHLGHPPAIRVLAKNEAKADRMDADRLGRFWLRGIFPESYLSTPEVRQLRERMRYRTAVVQLRTGIKSRIQAILHRQGVLHDYSDLFGKGGRVFLSALELPVACRAALDGWLAQIDLLDAQLAEVEAWMKQRLEEDEITRLLQTIPGIGLILAHVIRAEIGQLTERFPSRRHLASYSGLAPLANDSADRHGHRHIAAACNHTLRWSFIEAAQCAINSKNCPANLRRLHQRLTHGGRTNKSQAKVAVARELCELVYVIWKKGEPYCEITSPVRSQRTKR

SEQ ID NO: 470235 - protein, 396 aa, unidentified
MTCTDRPLSTPTVARSQDSTVFVALELSRKSWLVGVSAPGDTKISKYTVAAGDGPGLLALLAKLQTKAAQRLGRPVAVVTIQEAGLDGFWLHRLLLSAGYDSQVVDPASIAVDRRQRRRKTDAIDVETLLRTLMAWARGERRVCSMVRAPSPEDEDRRRPSRERAALVAEKTRHTNRIKGLLAGQGIFDFEPLRLAQRERLETMRTGDGRPLPPQLTAEIRRHLVRLDAVVRDIAAVEAERDALLAAPAVAEPTAPTAADTLPAPAVLLLTLKGIGPEFASVLCLEAFYRTFANRRQIASYAGLTPSPWKSGRIDRDQGISKAGNPRLRTTMLELAWMWIRCQPSSAISRWFVERVGTTRGRVRRIAIVAVARKLLVALWRFVTQGLVPEGAVMKA

SEQ ID NO: 470236 - protein, 460 aa, unidentified
MCLAGLAVIDAPWGVCAGCVFFRAPVQGSAKIAVARVVRTGEEGVTNDKRWYAGVDWASESHHVFLTDDDGRKIGERVFRHGGEGLAEMAAWLMATSGAAEGPQIQIAIEVPHGPVVETLIEREFKVHAINPKQMDRFRDRFTLAGAKDDSRDAEVMASALRTDPRCFRLLAVADPIVIELREWSRIADDLAAERNRLTNRMREQLWRYFPAMLELEHDLGAEWFLDLWETVPTPDKAARIRRTTIAKLLKRNRIRRFDVAHVLAVLRKLPVKVAAGATEAASAHIATLVVRIRLVNRQLKQAHHQLDTLIARLIPTEEAGPGQRKQHDVEILASLPGVGRVVLATLLAEAFDALQRHDYAALRSLTGVAPVTKRSGKSCIVVRRQACHDRLANAMYHWARVAIQHDSRSRSKYSALRSRGHSHGRALRSVADRLLNVACAMLKSRTLFNPSLAAPKTTC

SEQ ID NO: 470237 - protein, 341 aa, unidentified
MDKELYFGVDVSKKTLDLAYYDGETIDWKNAHIQVSNDDAGFKKIGSWVAKVGKDFDTFLFCMEYTGLYNQNFRIWLESKEYIYGMVEPRKMHRFEPDLDDDQRSLDRIKTDELDAFRIAIYCEQNHKKILRNPSKLPSPVYFKLKRLLAERKQNTKQSTLYKQQLHDICAYDTDLSVERKKLLLKSMKENQKAIDREIDSYINEDASISKNYDLLTSIPGIGRIIALETIVLTENFTAISNPRKYACYIGIAPFKKESGTSVRKRTTVSKKGFSEAKADLSIAVLSAIRNNPSIRDYWIRKRKEKCGGIVLNAVKFKLVLRMFAVIKRGTPYVETDAYKN

SEQ ID NO: 470238 - protein, 416 aa, unidentified
MVSRGSGWKLLFVGDDWAEDHHDVCLQDAAGRVLAARRLPEGVAGITRLHELVAGHQDGDDPSQVVVAIETDRGPWVRALVAAGYRVYAVNPKQAARHREVVAVSGKKDDAFDAAALADMVRTRRHQLREVAADSDEAEAVKVVARAHQKLVWERTRQALRMRSALREYFPAALEAYAPLTLTGPDTLELLAKAPDPAAAARLTIAQISAALKRARRHDVAGKARQIRAALREQHLGQPEIVTEAYAAGVRASAAVITVLNEQVKVMEARVESLFRRHPDAGIYLSQPGIGVITGARMLGEFGDAPGRYADVKARRNYAATSPLTIASGKKKTVHARFIHNDHLVNAMHDQAFAAISASPGARAYYDELRSREIDHTDALRRVANRQAGILHGCLKTGTGYDEHTAWGHRSQPAAA

SEQ ID NO: 470239 - protein, 314 aa, unidentified
MQKIIVGIDVSKAALDYICLPGGSAQQVPNNPVGFAAITHDLLTKKIHLVVMEASGGYHTALVDALHKASIPVKVVNPRQIRDFARSLNRLAKTDKIDASILAEFARSRELQPDMPRDTTLVHIEKLLLRREQLLSMVIMEKGFRENTDEAIRLNIQEHIKMLEAQVRSFDKEILAAIKSSQQLEAKNALLQSVKGVGPVLAATLLACLPELGLLNRKEIAALVGLAPFNRDSGSMRGKRHIWSGRAKIRRVMYAAMRAAIIWNPIIKSWFEHFRNAGKPYKVAVIACMRKLLVILNSMVKTGTHWQPISYDYS

SEQ ID NO: 470240 - protein, 356 aa, unidentified
MTRIAQLEPTRVTVGVDTHRDVHVAVALDQLGRRLGEIELATTRAGYQRLLAWAERFGAVEAFGIEGTGCYGAGLARHLRARKVLVIEVMRPNRQTRRRKGKSDPTDAEAAARAVLSAEAAGSPKAGDDLVEMIRVLRVARQTAIKARTQAINALRSLLVTAPPELRDELRALSTSRLVGKAARLRPGPLDSTLTASKLALRHLARRYQALEAEITSLDTQLAQLTAAASPRLVEAFGVGADTAGALLVAAGDNPERLRSEAAFSMLCGSSPINASSGKTNRHRLNRGGNRQANAALHRIVLVRMRYHQPTRAYVDRRTSEGKSKREIMRCLKRYVAREVYTALTQPGEQKLARAA

SEQ ID NO: 470241 - protein, 386 aa, unidentified
MSKPGDLNRCLAPLDQDHTIIAVIEMSQSSWLVAGVVPGIARHPLKKLAPDQDALLKLLHRWRAEAGQAGREITRIAVAFEAGRDGFWLARWLRAHGIEAHVIHPTSVAVSREHRRAKTDRLDTALLKRVFLGWLRGEPDHCHMAAIPTLEEEDAKRPTRERESLVGERTRIVNRIKAALARLGVRGFKPTLRKALEHLDALRTPEGAALPPNTRAELHRDMARLRFVTEQIQQIEAARSERLKQAGAGPNAMVRLLAQVVGVGIETADMLVHEVLSRNLRDRRAVARYAGLTGAPDESGSRRREKGLAKAGNARVRRGMIQLAWRFLLHQRESALAQWYRARTADARGSTRKTLIVALARKLLIGLWRLVTTGEAPHGVALRPAA

SEQ ID NO: 470242 - protein, 453 aa, unidentified
MQEEKQIKMEVVNPYAAGIDIGSRSHFVAIGQKETDVKEFGVFNEDLFAIAKWLRDSQIKTVAMESTGTYWQALYAVLIAEDFQVILCNGKFTKNIKGKKTDVQDCQWIQKLHSIGLLTGSFLPDLQTEELRTYCRHRAGLIDTAASTSKKMQKYLRLLNLRLDVIVKDICGLTGLNIIEAICKGERDPLKLAALRNGNCKTSENEMAKALQTNGRKDYLFTLHQEYKMYNNLQEQIKLCDVEIEKLLNSQINNNDHKKQHHVEPKVHKRINKNTPKNIDLNLIGYQYFEGVDLLEIEGFSHQTLLTLMSEVGLEGIKKFETAKQFASWLRLTPNNKISGGKVLSSKVPKGSNRLKIALRNAANAIGNLKESTPLRDFFHRINFRKGRVSAISATARKLGVIIWNMVVKNIPYKNPEDYLFVDQKRKLAILQRVQKTINKFDLKTDIQGFVNA

SEQ ID NO: 470243 - protein, 316 aa, unidentified
MPSSPLFVGIDVAKATLDIALRPSEQLWQILYDDAQIEALVIQLSELSPTLIVVEATGGLERILVAALVAANLPVVVINPRLARDFAKAIGRLAKTDRIDAQVLAHYGEAIRPSRRPLPDADTQQLRALVDRRRQLMDMMSAEQSRLNTSSARIRDAIEYHLTWLRQQVARLDEALDGMLKASSLWREYEAILQSTPGVGPVLSRTLISQLPELGDLNRKEVAALVGVAPFNRDSGTWRGRRTIWGGRATVRAVLYMSTLVATRYNPVIREFYERLLVSGKVKKVALIACMRKLLTILNAMIKHQQQWQPRVAKNM

SEQ ID NO: 470244 - protein, 403 aa, unidentified
MNNVAGIDVSKGKSMVSVLRPFGEVVAKPFSIGHTGSELKELADYLKSLDGETRVVMEHTGRYYEPVARFLHDEGVFVSAVNPKLIKDYGNNTLRKVKTDKADSRKIARYGIDNWAELRQHTPMDTIRMQLKTLNRQQSLYTKTKTMMKNNLIALLDQTYPGVNALFDSPVREDGSQKWVDFATTFWHVDCVRNMSLTAFAERYRKWCKRHGYNFSQSKAVEVHAGAQDLIAMLPRDALTKTMVRQAIDALNAVSASLERLKAEMQALAAQLPEYPVVMAMHGVGDSLGPQLMAELGGVTRFTHRNAITAFAGVDPGADQSGTHEAKSTRVSKSGPPELRRALFLVMDCLLKTQPQDDPVYRFMDKKRAEGKPYLVYMTAGANKFLRIYYGRVKEYLASLEEN

SEQ ID NO: 470245 - protein, 376 aa, unidentified
MKILAIDLGKYNSMCCFFDTKTQNYSFLNAATTRSYLRSVLKNHTIELVVMEACGPCGWICDLCQEHGFQTLVCSTNEEAWRWANVKRKTDKDDALKLARLAMMRQIKAVHIPSRNMREYRTLVKYRKTLNSRTTRIKNSVRSLFANRGIEIASGSRTWHTGRELLDSYRKSLAECTIEELWQGQLDIELTQLDSLMGQLAKVEQRLEVLAQGDGRVRRLQTIPGVGRKTAEMLVTALDDVHRFANARQVSAYIGLVPRQYQSGQTDRNGRITKRGSRMLRAMLLECAWASLRYNSWARATYERINGGQQTRKKKAAVALARKIAVVAWAMLKHETDWDPKRLGINNNRHRQQDETEAAVPLTLEPIPKHKCADGS

SEQ ID NO: 470246 - protein, 343 aa, unidentified
MKIAVLGIDLGKNSCSVVGLDHAGTVVKRRRMRPESIPAFTRTMPTCTVAMEACCGAHHFGRLLRSQGHTVRLISPEYVRPYVKAQKNDDRDAEAIAEAATRPTMRFVELKSEEQLDMQTLHRVRDRLVGERTALINQLRAILLERGSAVPQGRRKLEQHLAAMPDPDNDTSLSPRVRRLIDDMRAEWLELDRRIATFDNEFAARARSDADARRLATIPGIGVLNATALVAAIGNGETFARGRDLAAWLGLVPRQVTTGGKPRLVGITKRGNKYLRKLIIHGARSALPVLASGPTPLGEWLRALMKRVHKNVAVVALANKLARITWAVLRRGEEFAATARAAT

SEQ ID NO: 470247 - protein, 340 aa, unidentified
MQIATIGLDIAKNVFQVHGIDAAENVVVRKQLRRGQVIAFFEALPPCLVGLEACATSHYWARELAKLGHEVRLMPAKDVKAYLKRNKNDAADAEAICEAVRRPTMRFVQVKSAEQQAQLMQHRARDLLMQQRTQLINAMRSHLAELGIIAPQGREGVKELLAIISDEDNKYLPNDARASLIVLAAQLQALQTTIGAIEKRIVKQHRANKESRRIQTVPGIGEIGASAIAATVTNPQIFRSGRDFAAWIGLVPRQMSTGGKPKLGPISKQGDRYLRKLLVVGAVSVLRRAKLHPERFPWVTQMMARRPFKVVAVALANKMARIAWALMMSGKTCRAAQFAA

SEQ ID NO: 470248 - protein, 373 aa, unidentified
MNYNTVYVGMDVHKESFTLRYYTRDMDEPSTAVKTQADYKQVLKYLDSVRRILGEECSFLCGYEAGCLGYTLYHQLQSHDIECVILAPTTIPETRGKKKVKNDKRDAGNIATCLANRSYRPVHIPSEQDEEIKEYIRMRSDHKTALKKVKQQILSFCLRHGYRYTDTKKTWTQAHIKWLKNLPAEGVYKEVMEEYMGTFTYLTDKIERLDRQIEEYAQKEEYQEPVKKLCCFMGIKTMTALTTLVEVGDFKRFPSPANFASYLGLMPGEDSSGPSEKRLGITKAGNAHVRRLLVEAAQSYGRGTAGYKSQALKKRQQGNPPAVIAYADRANERMRRKYYHMVLGNGKKPNVAKTAIARELSCFIWGMMTEHTD

SEQ ID NO: 470249 - protein, 316 aa, unidentified
MTDNSMICAGIDVGKSHLDIAIHPGDARLRVAYDAAGLKRLDAFLQEHDVTRVGFEASGGYEWRLMVHLRGKKRPAARLQPAQLRFFAKSRLQRAKNDRLDATLIAVFTASLKTLPALPDARFDRLSAELTYLEQIEQQIALVKTFSETAVPDIVKRRHAREIARLETCRNAHMLRLEKLVRSDPDLARRLDLLVSIKGIGVRSALCLVIRMPELGHAGRNEVAALAGVAPYDDDSGKHRGRRRIQGGRERLRKSLFMCAFTARRHNPDLAAFYKRLRGNGKEHLCAVIAVARKLVILANTILTRQTEWTPKYVKG

SEQ ID NO: 470250 - protein, 343 aa, unidentified
MTHTAGIDVSLETSCVCIVDASGRIVRELTAESEPEALATALVDTGLVFARVGLDAGPLSQWLHAGLTRAGLPALLIETRRLRAATKTMPVKTDRNDARAIAQVVRTGWFRAVHVKSVLSQEVRGLLGARKLLVGKVRDLDNAIRALLRGFGLKVGKVGERAFAERARDLVEGRAALEAVLTPLLKVRTALLTQRNHLHQLVLVAVRKQPICRRLMSVPGVGPVTALTFCSAVDDPSRFTRSRAVGAHFGLTPRRYQSGETDRTGHISKQGDVLARQALYEAANVLLTRTQRWSALKAWGMAVAKRAGMRRAKVAVARKLAVVLHRMWRDGTEFRWGREVAAA

SEQ ID NO: 470251 - protein, 425 aa, unidentified
MQFKWNEKINQVTENTLVVGMDIAKRVHYACFVDERGRVIEKAFAVHQSKEGFEHLYKKIRQIMKEAKKTEVIVGIEPTGHYWMNLANFLDNYGIPLVMVNPMHVKRSKELDDNLPTKNDKKDALVIARLLKDGRFSYPRLLKEVEAELRIGSTLRSKLTEDLASIKNRIIRWLDRYFPEFTQAFPAFGKMALATLEMTPLPQDIDGKSAEELVFLYRKVKGMRAPQLPKAKLLIEAATNSIGLTEGTQMARHEIATLLRQYRLLENEIESVNSQLSEMAQTTMEYELLASVPGLGDATIVDLLSEVGSFSLYENPRQLIKLAGLTLRENSSGQHKGQKHISKRGRKRLRYILFKVIVPLIRHNEGFKQLHEYYTTRQQNPLRGKQSMVVLCGKLLKVLHGICKKKVHFNEQNMMKDLYCLSEAA

SEQ ID NO: 470252 - protein, 373 aa, unidentified
MPKYSTAFGMDVHLRSTTVCALDADTGEAVTRRFPGNPWGEIAGWMDGFPGPSLAAYESGYLGFAPQRELAGLGVECVVAAVSKIPRSAADSASKNDRNDAARMAKAILAHDISPAWVPSPEVEGIRDLAGAYDGATARLATAKQRLLAFLAKRGFVYGGTTPAGNPRKYWTYDFLRWLDKVRPEDDGGVRTLAALRNEVEAAAEARADLLSEYRAAVDASPIAAEVAALQSIKGCAFALAAAFSAEVGDFTRFRSGRQVTAYFGLAPSQRSSGDSVRLGGISGAGNALVRKLAVEGSWCYAAARHQPKLMPRDTGVPLEIRMHGRKGSERLLRRREEMLARGMPAAKANAATAAELVRWLWALGMMCREGAE

SEQ ID NO: 470253 - protein, 353 aa, unidentified
MGDQSIQSEVILGVDTHLDTHVGAVISDTGKLLGTLAVSTDSAGYLKLLTWAKSLGRLRRAGVEGTGTYGAGLARVLHEHEIGVLEVNRPDRANRRFQGKSDPTDAESAARAVLAGSATAIPKAQSGAAEAMRAVSVARRSAVKAKTQAINQVRALLVCAPQEIRERLWKGKPSECIDGCARLRSLGTTPLLHTLAATLRMLAKRWLMLAEELKELDAMLEHLTGQHAKRLRQQFGVGPHTAAVLIAVAGDNPERLRSEAALAALCGASPLQASSGKTTRHRLNRGGDRSANNALWTIAMVRMRSDPRTPAYVARRTAEGMSHKEIHRCLKRYILRALYPLILADLADSARFT

SEQ ID NO: 470254 - protein, 316 aa, unidentified
MAPKERYVGIDVSKKVLDIAVRPGDEHWTVANDEDGIDELVTRLRSIGPRLVVLEATGGIELAATGRLAGAGLLVAVVNPRQVRDFARAIGKLAKTDRLDAQVIARFAEVVQPTPRPLRDAEAQALSALLSRRRQLVGMMTQEKNRLHAAQLSVQRDIRGHIVYMEKRLAKLDDDLGSTLRKSPLWRERDDLLRGVPGVGRVLSVTLLAELQKLGTLNRKQIAALVGVAPLNRDSGLLRGRRTVWGGRARVRETLYLATLTATRYNPVIRVFYERLCASGKAKKLALTACMRKLLTILNSMFRHHAAWQPDYALNA

SEQ ID NO: 470255 - protein, 342 aa, unidentified
MKQYVGLDVSQKETSVCVVDEVGQILFEGKAKSDPGALAALLRKRAPQAERIGFETGAMASWLWHELRRVDLPVVCIDARHAHAALSVRMNKSDQNDARGLAELVRVGWYREVKVKSKESQKIRAILVARSRLVSMRRDIENQVRSLIKEYGLLFPRAIGQQFRNLVSELLGDNHPLLSVISPLLLIHEHICHQQNKFDDEVRQLAKADETTRRLMTVPGVGVVTALTFRHTIDDPLRFRSALTVGAYLGLTPRRNQSGETDINGKISRWGDRLLRTYLFEAATVLLYRTKKWSSLKAWGMKLAKRIGMRKAKVAVARKIAVILHCIWVDGTSFDWGQPQPV

SEQ ID NO: 470256 - protein, 348 aa, unidentified
MKNKSFVGIDISKKVIDVSIFREDTNIKMFPHEVFNNTRKGFGDMCSWLKKSRVVLSQALFGMEFTGCYSLDLEKFLTSKNYSFCMLSTRIVKHHPMGTIDKRDKNDSAKIADFLYRYDGTECAKPYKLPSKAMQQLKQLVNERKFLVEQRTNFMNRMQMFETKEDSAMYESYIKKLNHDIEKIDQEECELMSKEEDVLDTFQNLLTIPGIGFVNATNIIAITRNFTAFDTARQYARYVGVAPCSHTSGTSVKWRARPSAHCNGQVKADLSMAALRAVEYDVEMQMFYNRKLGGRKDSDTKRKALNAVKFKLIRRMFAIGKQKRTWEVLNTSDDRKNLHIEKSKASEL

SEQ ID NO: 470257 - protein, 346 aa, unidentified
MKHFAGLDVSLDETTVCVVDEAGGIVREARVPSEPEALVAFFRGLGLAMERIGLEACSLAAWLHEGLTAAGLPAVCLETRRAKAAMGAMPNKTDRNDARGIAQIVRTGWFRAVHVKSPACRSWRALLAARRLVLNKMRDLENGVRALLREAGLKLGRPARKELAARVRELVGADAVLSASVEPLLAIVATMAHELAQLTRRVLAIVRDEPVCRRLMGVPGVGPLTALAFRATIDRPERFRRSRDVGAHLGLTPKRYQSGETDVQGGISRCGDELARTALYEAAHSLLVRSRKWSTLRAWGMQVARRRGMARARIAVARKLAAILHRMWADGTEFRWGKEGPMPAAA

SEQ ID NO: 470258 - protein, 411 aa, unidentified
MEVIYKRCCGLDVHKETVVACLLIREGGKVLKEIRTFLTMTVDLVVLHDWLKAHQVTHVAMESTGIYWRPVFNLLEEDFTVLLVNAAHIKTVPGRKTDVKDCEWIADLLSHGLLRGSFIPPEPIRDLRDLTRYRKSLTDERVREVNRLQKFLEAANIKLSSVATDVMGVSGKAMLEALTTGSTDPQVLSELAKGRLRKKLPELKKALQGRFRSHHRFMVAEILTHLDFLDESIERVSQEVSSRIVPFSRKVELMDLVPGINQRVAEGVLSEMGVEMSCFPTHRHAASWAGLCPGNNESAGKRKSGRIRKGNQWLRRYLIEASWAAVRKKGTYLSALYYRLVPRRGKKKAIVAVAHALLVMIYHILKDQVPYYELGSDHFNKLNAAYVQRHHVKRLERLGFKVILEPLAQAA

SEQ ID NO: 470259 - protein, 452 aa, unidentified
MLTISHIENIKNKLSSISSLDELEKEDKQLFELVSKHYTLSVGIDVSQDEFSINVKKASCETIYSDTFENHHAGFCKLYETLNYLNDKKEYKFQVAIESTGPYHKALVRFLQEKGIEVMLYNAQTAKHLAKAYLKEKKTDKIDANILALLKIDGKFPVSQTEKENEFIEIRSYSRRSSRYGEQVALAKTRLKDELIQASKGMLLVFPNQAVFNKAPMELLKKYPLPCDRLAAGILEVTRILREYSNNKYGEEEAEKLLSFDKENQPDTRLFSYFRQSILDYIDEIEYYDSKRHVYNKKIDELTAQKEKAQNLLSLTGCGPTLMPVILGEVGNIDRFTSAKHFAGFAGFVPVECESGPKKGEKHVKNGASARLSHACFMIANCIRRYDERLKGLYTRLKERHIKAGKTKGIAHFIANCAVAREVSILIYNILKYNRKYYKSKDDYKAYKASMA

SEQ ID NO: 470260 - protein, 343 aa, unidentified
MDHYVGLDVSLKQTSICVVSGTGSVVREGVVDSDPDAIAAFVRSKAPGAIRIGLETGPTTTWLWTELKRLGLPVICIDARHAKAVLKMQINRSDRNDAAGIARIMQTGWFKEVRVKDLDSHTVKALLASRALLVKIKRDLENQIRGLLKNFGLVIGRAKFNVFAVRAEELIEDRPELIAVVGPLLKARKAIEQQTGDLDRKVLTLARYDAQVRRFMTVPGVGPITALCFKATIDDPTRFKRSRSVGAYVGLTTRRHASGEIDWTGRISKCGDAMLRSYLFEAAGVLLTRVPKWSALKAWGLRLVKRNGPRKAKVAVARKLAVILHRMWIDGTEFNWSKKEVAA

SEQ ID NO: 470261 - protein, 412 aa, unidentified
MEIQIQRGCGLDVHQATIVACLLIVLADGKVKNQMRRFGTTTRELLALGDWLQAEGCTHVAMESTGVYWKPVYAILEGTFEIIVANAQRVKNVPGRKTDVKDAEWIADLLLHGLLKPSFVPPKPIRELRDLTRYRRKLVESRSDERNRLQKVLETANIKLASVASDVFGVSGTLMLEALAEGQDTPAEMAELAKGRLRDKIPQLEPALEGRMEEHHRYLLKLQLRRMRDLNKDLAELEAHIREKLQPYQKELELLKEIPGVDWTLAAVIIAELGVDMKVFASASQLASWAGVCPGNHESAGKRRNVRVTQGNLHLKTALVEAAHASTRVKGTYLRDKYYRLKARRGAKRAAVTIAHKILTAVYHMLKEDVSYNDLGDLYLDKLNKQHLKRNLVRRLERLGFRVTLEEQRPAA

SEQ ID NO: 470262 - protein, 458 aa, unidentified
MKLLYRRCAGLDVHKSSVTVCVRRRVSGSSQVEMEEAVFATFTQDLRRLGAWLKQHKVKHVAMESTGVYWIPVWNALEGRSLSLTLVNPATVRALQGRKTDRIDARRIAEYMQYGLLGGSFVPPRAVRQWRELTRMRVHVQQDRNRVINRIARQLETVNIKLSSVASNIVGKSGRAILAALAAGRSTPEQMANQALSRLRDKRAALVLALDGKPDAHFRWMLSRLLRKLESLDMELAEIDAQLDQQMSEQADLIERLSTIPGVDRTTAQAVIAELGTDMSVFPDAAHLASWAGLCPGNAESAGKRFSGRTRKGDRYLRRVLVQSAWAAARTRNCFLRALFFRIAGKRGLKKAAVAVAHRVLTIIWRIIRDGGAYEERGGDYFDQRDPQRTARKLTRRLEHIGFQVEIKRRSIDPVPNDQAVPASLCGKCHRWHLAHCIHHNPRPLRKRHPPKSFESQG

SEQ ID NO: 470263 - protein, 360 aa, unidentified
MIVQGTSVGLDVHALSIVAHAVDEETGKVARARLCPDHGEVLGWLHQLRAPVRVAYEAGPTGFGLARAIIEAGMECTVAAPSKLQRPAGDRVKTDARDAAHLARLLRLGEITAVRVPNREIEAVRDLVRAREDARADLMRVRHRLSKLLLRQGIVYSGGTPWTYAHEEWLRRHRFDDVHLKAAFDHGFDAVLAATAARDRLDEQIMVVAASPRFADPVNRLGCLRGISALTGLALTVEIGDWSRFTGSSIGAYVGLVPCEYSSGNSRAQGSITKAGNTHVRRLLIESAWHHRKSYSTSGPTLRARWAKVDPALRARGHAGNRRLNKRWRSFTERGKNPLVANVAIARELAGWCWSLATMQ

SEQ ID NO: 470264 - protein, 302 aa, unidentified
MASFKKLKHMNKAIVGVDVSKDDFHVCFKVREGSQKSIIKGSRKFKNSEKGFKELLEWINKRAGDTDVQVLMEATGVYHESLAYFLYEQGILVSIVLANKMKNYLKSLNIKTKTDRTDAASIAEYGTERHLVPWEPMSPQYKELRDMCRELLSQKKDLQKAKSQLHAYNSSFQKSPEIVDLKNEQIRLIEKLIASLEDLIQKTVNKDQDLLKKIRKIETVPGLGFITSVILVCETNGFRLFNSIRQIVSYAGLDVTFNQSGKFNGKSHISKKGNSRIRQALYMPALSATQYNQPIKAQYERI

SEQ ID NO: 470265 - protein, 412 aa, unidentified
MRNRSNMGKDTTNSLIIAIDIGSKAHFVYWCDVQGTEGKIESITNTRKGFEKLCRIIETAKKKTGLSRVMVGYEPTGPYYLPLLHFLSEKPVKLVQVNPFHTRRTKEIVDNSPLKSDKKDPRVIALLMKFGFFMDVVIPRGSAAMLRNLSSIRERACGDRTAATNRLHDLLFCIFPEFETILKLSTVTGRHLLQHYPTPQSLLDLGKEQLTAIMQKVSKKQFGVDDAERLLDAAAHTVGIPEGIPARLFELHHLLMTIKNLDTYIANVDKQMAAELKTMPESKILLSIKGVGRVTAAYILGEVVDFHAYPTQASILKMAGLTLYEVSSGDHRGSRHITRRGRALLRKALYLACLGMVKHNGIFYEPYQRLLHRGKIKSKALVVLMRKLLRIMFSLVRNGVFYNHQRAFGKAA

SEQ ID NO: 470266 - protein, 400 aa, unidentified
MLSIGIDVSKGKSTVCGMKPGGEIVYTPFEIQHTREGMSELVSLLRSSGEEVRAVLESTGSYHCPVVAALLENGIFVSVVNSLRMKRFCSQSIRKVKTDRIDAMQIALYGLAYWQELQPARLPEDTYRELQLLARQYYQMTSLLIKAKVDFNAICDQVLPGMQELMSDHAGRHKLSDFVLRYRHTTHILEMGETRFRKDYCKWAEKKGYRNCERMAALIFATAQNGIPVLPNAPSTQIVITEAIRVLHTVEASRDAILTQMQALAKTLPEYSLVREMPCIGDTLAPRLIAEIGDVRRFHSKRALIAYAGIDAPPYQSGKFCANNRHISKRGNRYLRKTGYEVMQSYVMHKPANDPIFTFIEKKRGEGKSGKLAMVAGLNKFLRVYYGKVTELYRSLPAIE

SEQ ID NO: 470267 - protein, 482 aa, unidentified
MKPRTAEKDKEVIADSSCGHWNQMNRQQRRHMMRKMQSDDLSLEVVHPDAAGIDIGNESHYVAVPPTRDSQPVRRFGCTTAELKAMADWLKQCGIQTVAMQSTGVYWIAVYDILEAAGLDVYLVNARDTKNLPGRKSDVQESQWLMKLHTYGLLRNSFRPSQEIRTMRTYWRQRNDLVQSASRHIHRIQKALTQMNLQLANVLSDVSGLTGQAIINAILAGERNPYKLAAFRDPRVQASEEQIARSLEGNWQEDLLFVLKQEQDGYEFCQKQMAECDRQLEQYFQRREDRSQGASLPEEKRKTRLKKKNGNKPQFGLRADLFRMTGTDLTQIDSIDVVTASTIVSEVGWDMSKWETEDHFVSWLRLCPDNRISGNKIIGKGRLPTNNRVSIALRMAASTLRVSNTYVGAQFRRFRAKLDARVAVKAMAAKLARLVYRMMRYGMKYVDQGAKFYETQHRNLQLKHLKWRAAKLGYQLVQAPST

SEQ ID NO: 470268 - protein, 426 aa, unidentified
MKVMHDRVAAIDVHKDMVKVAVRVPGERRGTRKTDVLEFRTFYGVLEEMGRELRRRGVTHVVMEASGVYTEPVYYALAGLDFTEVMVINPAHAKALKGHKTDARDAIRLLDLYECGLLSGSYIPAPDLKEVRDLTRYRIKTVQARASEIQRLQKTLETAGIKLSSVVSDVTGVSATAMIEALIDGERRGAVLAGLAQGRLRTAGKMADLSMALAGRFTDHHALMCRLHLDRLQGLGEAVAGLDATIAPLAARHAREAGLLKSLPGFGDVVVAGWLGEIGPAPHQHFATAQRLASWATVCPGNYMSAKKSKGGRTGDGGNYIKPLLVQAAWAAVRVPGRLQARFHRLVRRFGGARNKGAIKRAIMAIAHTLLKIAYQVLKTGTPYTDLGAGFYASRETPQAKQDYLIRQLQKLNPGCVITVTPAEAA

SEQ ID NO: 470269 - protein, 429 aa, unidentified
MTNPQSTPEAVVWVAIDVAKDRHEALIEVPGWKSRKKFRVQNTAEELRSFADFLHGLASKVRIGFEPTGNYHRALAYFLHSEGFQLELISSLALARTREAMHNSWDKNDPKDAQVILHLLKTGLTQHYHDPMVHNLNDLQELSKTHHQVSLEKTRTQHRLLTHYLPLYFPEIARYHSSARSEWLWNLLIEFPTPHSMRQLPKGEFVRRAWPLVGRKVSKERILTDVYLTAQTSVGLPVEENSEAVAMLRVVLRQLVMLCQLRDSIEDRADALLSSNEDYQRLRRIPGIGPIAALTILAEAGDLRRFSHHRQFLKFCGFDLATEQSGQFRGLSRLSKRGNARLRAVFWMAASVAVRMRENSFRAKFERYMRSDPDSADRKRKAYVAVAAKVARVAFTLIRSGADYRCFHEVAVPGGRTRSARAVEAIPTS

SEQ ID NO: 470270 - protein, 319 aa, unidentified
MTRNLGQFECYVGVDVSEGRLDVCLLPGGERAAFSRDRRGVARLVAWLASQARLLVVVEATGGLERVLTVALEQVGIAVAVVNPRQVRDFARAAGLLAKTDRLDAYALALYGERMCPVPRPPRSAAGHALAALVLRRRQLAQLVEAERNRARRSEEPAVLASIEALLGWLRTALAQLEDQIATHLARTPVWQERAALLASVPGVGRVTVSTLLALLPELGALDRRTVAALVGVAPFARDSGLMKGRRTIWGGRAPVRAVLYMAALVAVRHNPALRAFYDRLVAAGKAKKLALTAAMRKLLVILNAILRDRQPWRAPQPA

SEQ ID NO: 470271 - protein, 352 aa, unidentified
MDRYVGLDAHSQSCTLAVMGPSGKRLKSLVVETNGQALVEALRGIPGPIHLCLEEGTQSAWLHELLSPHVAELVVVMPPKSKGAKDDLRDAWTRADELRTGAIETRVYKAPQHLAALRSAVRAYGFAVRDVVRAKNRLKSVFLSRGLLTPASIYAATQRQPWLEKLKPPYRQLAEWLGRQLAQLEPLREEAEEWLLKETKTHPITRTLQTAPGMGPIRTAQLVAIAANPERFRRRQQFWSYCGLSIVTWSSSDWVRGKDNKWERSQVQQTRGLTRKRQPLLKSVFKGAATTVITQLPDHPLHKDYLRMLEAGIKPNLAKLTLARRIAATVLSMWKHKEVYDPKRQQGVTDKT

SEQ ID NO: 470272 - protein, 355 aa, unidentified
MKYYTSTTQFNCGIDLHAHQMYVCLMDREGHKLVHTNIKNNDFDYFLQRVAPYRHDLTVCCECMFGWYWLADACQSAGLTFVLAHALYLKAIHGGKNKNDRIDSEKIAHLLRTNLIPPAYVYPSDKRPLRALLRQRILYVWRRSELLARIQSHQLAHNRPPLRQTRPNRDPWEQQLLAQEDHPVRQLALQNDLALIRHYDAQITLLETNLQKLTQASAGRDYALLQTAPGIGEHLGLTILHEIGDIARFPTVKNFLSYCRLVKGTVASAGQIKGLRGAKLGNPYLRWAFGEAAVIAKRDHALIGPLAQRLEARMNGNKFKANTVLAIKLARAVYYMLRSHTVFDADRLVAALARN

SEQ ID NO: 470273 - protein, 430 aa, unidentified
MEEDKDQSLFVERIAALDLGKAVLEACVRLPHPTNPGRRVQEVRTYSTRTAHLLELADWLRCNQVTTVVMESTSDYWKGVYFLLEAEGFDCQVANAREVKNVPGRPKTDKIDSAWLCKVGERGMFRPSLVHPEPIRRLRDFTRYRRSLVRDRSREKQRVEKLLEDAQIKLSSVISDLFGVSGRAMLDALAAGQRDPRVLADLARTSMRGKTAILVEALTGFFTEHHAVLLTMMLDNIDRLTGQISVLEARIEELVAPFCRQMEQLAEVTGIGRIGAAELIGEIGVDMTRFPTAPHLVSWAKFAPAVHESAGTKKQKKRPKGNPWLAATLGNAAGALTRSHTFLGARYRRVARRRGKGKAMVAVGNSILTIVWHLLSDPDASFHDLGADYYETRINAERRARNLAAALEAVTGQKIIIRGGKAIVIDPEAA

SEQ ID NO: 470274 - protein, 343 aa, unidentified
MEYYAGIDVSLKESSVCVVDTAGKVVREVKVASEPEALVRYFDELGLPVSCIGLEAGPLSQWLHAGLMAAGRAAVLLETRHVKAALSAMTVKTDRKDARGIAQLLRMGWYRPVHAKSAACKDTRALLAGRKLLQAKLLDVELSIRGILRGYGLKVGEVSRGRFEARVRELTAGHAILETVIGAMLAARMALWNEFTRLHREMLKIARADRVCRRLMSAPGVGALVALTYRSAVDDPSRFEKSSAIGAYFGLTPKKYQSGETDRDGGVSKVGDGMVRTALFEAAHIMLTRAVRFSSLKRWALGVAQRRGMKRAKVALARKLGVVLHRMWVQATEFRWSNAVPAA

SEQ ID NO: 470275 - protein, 340 aa, unidentified
MDITTLGIDIAKSVFQFHGVDADGAVVVQKKLRRGAVLGFLGKVGPCLIGIEACATSHYWAREIAALGHEVRVIPPAYVKPYVKRQKNDAADAEAICEAVTRPSMRFVPVKTVGQQSVLVLHRARDLLICQRTMILNAIRGHLAEFGIIAAQGPRQVMGLIARLRDEGDASLPEIARSALLALGVHLETLAGEIHALEHQLMVWHRADATSQRLETIPGVGLITATALAASVPDPSVFKSGRQFAAFLGLVPRQNSSGGKDRLGRISKMGDRYLRKLLVVGATSVIRRAGSNPTKTGAWVRSLMERKPARVVTVAMANKTARIVWAVLTHGEVYRASPIA

SEQ ID NO: 470276 - protein, 368 aa, unidentified
MGRKSSKLFVGMDVHKESIDIALAEEGGEVRHYGGIGGEQSALIRTVRKLESLGKSLVFVYEAGPCGFWIYRLLQERGHPCWVVAPSNTPRRVRDRIKTDRRDSLKLAGLARAGELTPIYVPDAADEAMRDLVRAREDAVATQRQARHRLAALLLRNDIRYGGKTAWTEAHRRWIARLHLPGAAQRIAFEEYVLTVDEATASVQRLTRSMEQELGHWRWQPMVHALQACRGIQLIHAVRIVAEVGDLSRFTHPRQLMAYLGLIPSEDSSGERRRQGPITKAGNRSARRALVEAAWAYRHHAAVSPLIVRRQTGLAKPVLDIAWKAQLRLCARFRRLSARGINRNKIVVAVARELAGFVWAISQRVKLN

SEQ ID NO: 470277 - protein, 343 aa, unidentified
MQAITTVGLDIAKSVFQVHCVDAQGNVVLRRQLKRRHVLLFFQKLSPCLVGIEACATSHYWSRELQALGHKVRLMPPAYVKPYVKRQKNDATDAEAICEAVGRPNMRFVETKTPEQQGCLTLHRTRHLFIRQQTSVINAIRAHLAEFGIVAPVGRRGVDQLLTVVADKSDKRLPEVTRSCVAALGAQLQMLKAQILEFDRMIRAWHRSSETSKRLDAIPGVGPALATALVASVADPKAFRSGRDFSAWIGLVPKQNSSGGKDKLGSISKQGDRYLRSLFTAGALAVIRYAKIHGTRHRPWLAALLMRRPTKVAAIALANKLARMAWAMMARGERYREPVALAA

SEQ ID NO: 470278 - protein, 433 aa, unidentified
MSSTYALMVGLDWADQKHALCCKDTATGKTNTQMLEHSPERINEWVLDQLARHPGGRIAVCLEQKIGSVVYALMGYAEVDLFPVNPATLAKYREAFHPSGAKDDPSDAALLLDLLEKHPEAMGIWRPDTEETRLLQRLCQDRRKAVDMRTKCSNSLRSKLKEYYPQALQLVGESLETEMCCAFLGKWPRFQDVAAARPESLRKFYYKFNSRSETTIKARLDLIAASRPLTGDGAVIESAICWVRAMVRQIRDLNKTVEEYDRRIGELFKNHPDSGIFNSFPGAGRQLAPRLMTLFGTDRGRFKTALDVATFNGVAPVMERSGNQMWIHWRWHCPKFARQSLVEFAGHSLGGSAWAKAYYNAQIKRGKDHQAAVRALAFKWVRILFRCWQTRTPYDERAYLAALQRHGSWLCEAIEKESEGANEKDPEFKPKTA

SEQ ID NO: 470279 - protein, 463 aa, unidentified
MQERGEKSSQQNSEGEVEGLPVIRPHVAGIDLGSNEHWVCAPQVDGSGREVEKFGATTPELERMVEWLKQRRVESVAMESTGVYWIAPHEILERHGLEVVLVNTRELARVPGRKKTDRVDCKWIQRLHSCGLLTGSFRPAEQICILRTLVRDKGNLVAEAGDWVRRMQKSLDQMNVRVHRAVSDLDGATGMAILRAIVKGERDARQLAKLRDRRCQKSEEEIAEQLSGHWREDHLFSLQQALRMYDAVQERIADYEREILRKLAEMERDDCRGQRPPTSNHPQKAKAIRKRGEEPLRQALYRMSGVDLTAIDAIGVGTVEVVLSEYGADLSRFATEKQFVSHITLAPRQAVSGGKPVKKKKRGSASTRVAAALRMAALSLRHSQTALGAYYRQIARRIGGDVAVFATARKLATLIYRLLKWGQPYVDEGAQAYEKRYQEQRLKRLTAMARDLGYQLTPKAAQA

SEQ ID NO: 470280 - protein, 331 aa, unidentified
MEILDTVGIDMSKLNFDVRIHSTQSYAQFENSNKGFKQLLNWAYKNSSFSSENIFFVFEHTGLYSHKISVYLTEKKVAFALIPGLEIKRSLGLARGKNDKVDATNIAKYAYRLREEIKPYEMPSEQVQALKRLLSLRDRLVKQRAGFKASLKEQKRVLVKKENHILFTSQEKMIDCLTKQIGILEEEMMGIINSDEQLNEQFKSIISIKGVGKQTALFMIAYTHGFTKFKNWRKFASYCGIAPFPKLSGTSVRGKTKVSNLANKKIKSLLDLCAKSSIQYNLEMKNYYNKRVDGGKNKMSTINIIRNKLLSRIFAVVNRRTPYVDLMKYAA

SEQ ID NO: 470281 - protein, 428 aa, unidentified
MEVVNELGVVFERVAALDVGKASVTVCVRVPCPDRPGRRLQEVRDYPTFTAGLLALADWLRCERVQVVGMESTSDYWKPPFFLLEAESEAGGERRWETWLLNARHVKNVPGRAKTDKLDAMWLAKVLERGMCAPSLVHPRPIRQLRDLTRYRRTLVREQTREKQRLEKLLEDAQIKLSAVVSDLLGVSGRDMLEAMIAGERDPAVLARKARTRMRPKIGVLTEALTGHFEDHHAFLARRMLDRIDAVAADIAAVEERIEAQIAPFAHLVAKLDEITGVGVISAWELIAEIGVDMTRFATAGHLVSWAKFAPLDNRSAGKGKAGATGQGNPWLAGTLGEIVAGCARTHTFLGERYRRIRKRRGEGRAIVAVGNSILKIVWHLLSDPDARYHDLGPDFYQSKINTKRRERTLIHQLEALTGHKVTLHPVA

SEQ ID NO: 470282 - protein, 464 aa, unidentified
MTDKRPWRNRKEKKEWVRRLQSEDPGLEVVHPQAAGIDVGNGMHYVAVRPDRDPQPVRRFECFTADLHRLADWLQRCGVKTVVMQSTGVYWIPIYEILEERGMQVYLVNARHTKNLPGRKSDVQESQWLLKLHTYGLLNNSFQPPSEIRVLRTYWRQRGEHVRGAATCVQRMQKALTQMNVQLANVISDVSGLTGQTIVRSIVAGEHDPRKLAELTDPRIHASREEVAKSLEGNWRPELLFVLQQEVAMYDTYQQRIAECDRQLQEHLASFANIIPLKPTEQEPKRKKTKPAKNAPRFELRSELQRITGVDLTRIDGIDVMVAQTLVSEVGLDMSRWKTEAHFSSWLGLCPDNRTSGDKVLARGTRRVVNRAATALRMAAVTLMRSQTYLGAQYRRLRTKLGAPKAITAMAHRLARLVYRMLKYGQHYVDKGAEYYEHRYRRQQIEFLRKRATKLGLQITLAQT

SEQ ID NO: 470283 - protein, 455 aa, unidentified
MPKRTIGDHPELKPVNVSAAAIDIGSKMHMAAVNPACTDMPVRTFGTFTQELHDLADWFKACGVTSVAMESTGVYWIPVYEILEQRGFDVILVNARFAKNVPGRKTDVSDAAWLRQLHSYGLLRGSFRPDAEIATLRAYLRQRERLVEYAAAHIQHMQKALMEMNLQIHHVVCDITGATGMRIIRAIVAGERNPDVLATYRDVRCHSSTETIRAALVGNDRHEHVFALTQSLELYDVYQAKMLDCDRKLEVLIAALSNKGAKPVGKLSKPRIKTKQVNTPTFDVRTALYGVLGVDLTEIHGLGPSLALKLVGECGTDLRAWPSAKHFTSWLCLAPGNKISGGKVLSSRTRRSSSRAAALLRLAATTVGRSDTALGAFYRRLSSRAGKSKAVTATARKIAVLFYNTLRHGMSYSDPGADHYEQQYRSRVLANLQRRAKSLGFVLQAIPGDANPAVS

SEQ ID NO: 470284 - protein, 340 aa, unidentified
MHATIIGLDLAKNVFQLHAEDRSGKLLWKRRLRREELEAFLRQQPPALIGMEACGSAHHWARVITAVGHEVRLMHAKYVKAYVKRGKSDVRDAEAICEAVQRSSMRFVPIKSVEQQIDRSLERARDLLVKQRTQLMNATRALLAELGVVARAGLRGFTTLADKIAAGDAVIPRPSLTALKPLVEQWRALQASIDQLEARLVARAHSDERMRRLMKIPGVGPLTAHAVVTAIGDPKRFSTGRDFAAWAGLTPLTDSSAEKTRIGHISRQGDHSLRRLMVLGAVNMARHARAKPCEANAWLNGVIARRPVKVAMVAQAAKTARIAWALLCSGENYRGRTAAA

SEQ ID NO: 470285 - protein, 409 aa, unidentified
MPERKVYEMIDKETPVLAFDVSKGSSHCQAFYSFGKPSGRPIRVAHCKSGMAAVAEIAETLTTQTGKKPKVVMESTGVYSKPVARWAEMNGLEVYLISPLESAKVRKSRLRPTKTDALDCGVIAEVAYTRGVRKLTAASSLYSQLYSLSRRRSAVINRLTASKNQYRKSLDAVWPLLDEACDPFSGYAMWAVGRYGHPEALAKAREGSVEKALEKAEIRTGAISKAAIASKLSAYAKDAMSGCPADGGEADSLLSALDDVIRDMRALDEITGRLLGLAKGLPHFALIASVDGVGDALAALLCAEIGEPSRFASRNGIVAYAGLDPTILQSGRNDGLHYSITRKGNAFLRRYLYLAVENMVMHKADNAITRFYSKKKSSGLCHKAAATAACRKLLVSIWGMLRSGSCFER

SEQ ID NO: 470286 - protein, 418 aa, unidentified
MRYFVGIDVSKEFHVVNVIDEDEKRVLKNFKFLNSKDGFDFFKVKLSLLSKDKDSFVLGLEATGVYGENLYDFLSSNGYNIKLLNPFQTSRYRQNYTMKSVKNDNIDSLYIALLLKDDRFSSGYVASDEYMALRVLYRNRNSCLKESKEIQKRILSILTVTFPEFEKFINPFSVSGLTLLKKYPTAAHYKGVSANSILKLFRHIKGNNFSKEKATKLLELAKNSVYSGKAKKERAIALNSLIRLYEKYQEEIATLDKEIDSLLNSDSLSSDDKTAIKEAKQRAESIIKNLHTIPGVSTKTISAILSECGDLSRFPTISKLLGFIGLHPTQDSSGKKELFGHLSKRGNSTVKHALYLASVSCIRHNSELRKLYNDKRAAGKSKKEALIIVSRKLITIIYSIFKSNKPYNPSRVFSMVRQ

SEQ ID NO: 470287 - protein, 334 aa, unidentified
MNTNLQGGVANSIQRPTTAGVDVSKNHLGACWLVEQQRVVNASSGWDELIAKFKAAQVELVVIEATGGYERGLVLALQGAGITVARVNARQARDFAKAMGQLAKTDRVDARVLREFANVLALRADLHKFITLPVDAERVALAELTTRRRQLIEMRVAEANRLELVTNPRAIKSIKSVIRLLDKQIMEIDHDADDHLDRHFGTQRELLDSVKGVGPVTILTMTAVLPELGKLQRRQIGKLVGVVPLANDSGNRRGPRRTWGGRSEVRAVLYMATLAAIRHNPVIKVFHRRLIAAGKPPKVAFVACMRKLLTILNAMLRDGNRWDSARHVPPVQTA

SEQ ID NO: 470288 - protein, 408 aa, unidentified
MKRYYMGVDWGDRVHQVYVGDENGAKVREMKVQESPEGLAEFGRWLNESRAQGIELWAAIEKPQGRIVDFLLDHGVVVYPVNPKALDRARDRFRVSKSKSDSFDARVLAEFLRTDHGHLRALEPNSEQAQELKLLTRDQHRLGRQKARLLNQVGITLKEYYPRPVEVFSDLEAKIALDFLEQYPTPQALSELTRRRWNRFAKNEHHLGEARCNELWEKLNQPQLAVPEHVVRAKAQLLTVLLVQLKASLQAVESYSEKVKSFFGSMPAAKLVQTLPGTKTGTIVATLWAELGDAKNRWESFRHLQAEAGVVPVTKASGKSHVVHFRFSCNKVMRHASYWLAFVSLNHSEWANHYYRDQRAKGHSHPQALRALGAKWLKIIFVMWRDHKPYDENYHLANIARQKMRQAA

SEQ ID NO: 470289 - protein, 429 aa, unidentified
MKNNTARKLSQIPPGYLIMGIDPHKKIHVAVAMTQDTIIHTKFKFANSRQGYEQVMRSTSDQIVKTGSTGVIFAIETGGHYWRNLAYFLGEQGIPFRLINPFTLKRMRDGKDINRRKTDFRDAEMAAELLRNGEFVETKLPKGIYAELRATYSTYRRLVKERSRAKNLLKGLLDGLFPEFNQVFKNICGMTSLQVLSICPAPRTITSMKPEEFVAAIRRGFKGRAPKVRKLHTIYSLAQTSIGIETGADSVSIELSFLVQRLRLLIEQIGRTEDILVRLLYSIPDARYLLSIIGISYISVAGILAELGPLGAYRNAGQLIKMAGTNPIEWESAGKRGSHTPMSKKGRPGLRWCIWTAAMCLLRHNTDFRSWAKGRRERPAHLHPLKAREVFGAVANRLLRLAYALVREQTFYQIPKPKVAPELELVAAI

SEQ ID NO: 470290 - protein, 362 aa, unidentified
MDETTTHRLEEKLTVGVDLGDRSSQCCVLDAAGEVLEESTLPTTQAAFKRWFSGKERARVIIEAGTHSHWTSRLLNELGHEVIIANPRMLRFIYGSDSKNDKADAAYLARVGKLDPGLLKPVSHRSEAAQADLVLIRSRDALVHSRASLVTHARALVKVFGARLPRCSTDAFARKVESSVPDVLRPALLPVLTVISALSAEIRQLDRKIDALAKDAYPDTSLLSQVPSVGNLTALAYVLTLEDPSRFPKARVVGSYLGLRPRQKDSGDKQPQLRITKAGDQLLRGLLVECAQHTIGPLGADSDLRRWGLKLAERGGKNAKKRAAVAVARKLSVLLLHLWGTGEVYEPLRDAARRGEPVPTPS

SEQ ID NO: 470291 - protein, 353 aa, unidentified
MTDQRRAVVAGVDAHTDEHHLAVVDLQGRLLGAAAFPTTAEGYSRLIGWLRGQGEIERVGVESTGAYAAGLVRALLAERIRVVEVNQPHPHARQRLGKSDPIDAELAARAALSGQATALPKQTSGIVEAIRQLGVARAGALKARTAALQQLDDLLITAPEALRSELRRGRTLKARAALCLHLRPDSERLHEPAQAAKLALRSLARRARELEREIAELDQQLERLVTLAAPRTVQLFAVGTQSASQLLVTAGQNIERLRSEAAFARICGAAPIPASSGRTTRHRLDYGGDRQANRALHMIAVCRLRYCERTRAYARKRTADGLNRREILRCLKRYIARQTYYTLRADLEALNGA

SEQ ID NO: 470292 - protein, 321 aa, unidentified
MIKDREIYGIDISKDVFDVYSESLGHYQLKNDVSGFKALLKVLPKTALVVMEATGYYHYRLAQFLHKKGVLVSVVNPLSVKRFIQMKLAKVKTDKSDAKSICEYGKFNDVPLYNALTDVQAECLQLFRLLDSYTKKSTATKNKIHGEDTLGVPSKTVYSSLKRDLKHLKKEIAVLEHRLLELVKQDQQDQLTLLQTIPGIGLKTALFLIVVTDGFKKFETASQLCSHVGITPTIRQSGSSVRGRSRISKVGNKKLRNLLFLAAFSAYKYNKACKALFDRIVAKGKSKKLALIAVANKLLKQAFAIAKSGLPYDENFVSKLA

SEQ ID NO: 470293 - protein, 482 aa, unidentified
MKAKPPEKIQKATNPSTRGHWNEMNRKQRREMMRQIQSEDISLEVVHPDAAGIDIGNESHYVAVPPSRDNQPVRCFGCTTAELKAMADWLKQCGIRTVAMQSTGVYWIAVYDILEQAGLEVYLVNARETKNLPGRKSDVQESQWLMKLHTYGLLRNSFRPSQEIRTMRTYWRQRNDLVQSAGRHVQRMQKALTQMNIQLANVLSDVSGVTGQAIIKAILGGQRDPHKLAEFRHPRVRASEEEIARSLEGHWQEDLLFVLQQEQDGYEFCQKQMAECDRQLNHHLEQREDRSQGAPLPEEKRKGRRKKKSGNKPQFDLRTGLFRMSGTDLTRIDSIDVMTATTILSEVGWDMSKWETEDHFVSWLRLSPDNRISGNRVIGKGRLPTNNRVTIALKMAASSLRLSDTYLGAQFRRFRTRLGAPVAIKAMAAKLARLVYRMLRYGMKYVDKGVATYQAQHRQLQIKQLKWKAATLGYQLIGVPAA

SEQ ID NO: 470294 - protein, 344 aa, unidentified
MSQVTTIGLDIAKNVFHAHGADERGAMVFSRKLTRAKLLEFFAGQPVCIVALEACGGAHHWARQLQTMGHDVRLIPPSYVKPFVKRNKNDAIDAEAIAEAAQRPGMRFVAVKSEEQQAAGLVFRTRDLAVRQRTQLINAIRGHLAEYGWVAPRGTAHMTMLADLLEDEEMTSSLPAAARPMFKLMVDMLADLDKQVAVLDREIAQRAKEDEAARRLMTIPGIGPIAATAIIALAPPVETFRKGRDFAAWLGLAPRQHSTGGKQRLGSISKMGERTIRRLLIIGGSSMVRQACRFGAPAGSWLERMLERKPRMLVSVALAAKMARMVWALLTKNEDYRAPAAVAT

SEQ ID NO: 470295 - protein, 415 aa, unidentified
MSDQFAWFVGIDWGSQTHVLCLLDAAGELCGTRSVAHTADAVHEAIQWVLQQTAAAPAAIALGIETPRGALVDTFLEYGFPMFAVNPKQLDRFRDRFTVSGAKDDRRDARAVADGLRTDRRAFRRIHADDARVIQLREWSRIVEELQDEEQRLANRLRDQLYRVNAAWLTLNPAADDPWLWTILHETPHPGAWATLPRRRITPALRAHRIRRLTPDDVIAVLRQPRLHVAAGVADAVEARIASLIPQLRLVHDQRLMGERRIDRLLESLETDPLEPESREHRDVQILRSLPGVGRMVAATMLTEATGPLADRDYGTLRAQAGIAPVTKRSGKRALFVHMRYACKRRLREALYHWSRTSIQHDVAARAYYDALRARGRGHARALRSVGDRWLRILIAMLRTRSLYDASRFDPAAAI

SEQ ID NO: 470296 - protein, 390 aa, unidentified
MQDVADQSAAPTTIGADLCAIFVSLELSRSTWLATSLSPGRGEKMSKHSVSAGDIAALLARFSELRRKACTRTGKSFPIVVIQEAGLDGFWIHRVLLSEGIESHVVDAASIATSRRRRRAKTDRIDGETLLRALLAHKRGEPRVCSMVRAPTPEDEDRRRICRERKVLIMERVQHVNRIKGLLFSQGASGYEPLRRDRRARLDALQTGDGRRLPQHLKAQVCRELDRLELLLEQIKAVEAERDAPLDAEQTKASAPPPMLLGVRGVGPEFASVLWSEGLSRQFDNRRQVAAYAGLAPTPWQSGSVNREQGISQSGNPRLRTTMIQLAWLWLRHQPRSALTLWFKDRMERNGGRRRKTTIVALARKLLVALWKYVTAGVVIEGAMIRAARR

SEQ ID NO: 470297 - protein, 318 aa, unidentified
MTKEAKVFVGIDISKETLDLAIVGQEATWQLDRDETGISQLVDLVTPMNPQLIVMEATGGLEIDIVTRLAAAGLPISVVNPVRVREFAKAIGQYAKTDRIDAQLIAHFADKIRPAAISRKSQQEVLLSALVRRRKQVIGVITAEKNRLHTTWEPLRERVAAHIAWLEEELEALGKEIYDLIQADPVWREKSMILQSVPGIGPVTAATLLAELPELGTVSRQKVASLAGVAPFNRDSGRRQGKRRTFGGRGQVRRALYMAALTASRRNPIIKRFYQRLLDKGKVKKVALTACMRKLLSIVNTMLMRMEPWRQPLSMATA

SEQ ID NO: 470298 - protein, 369 aa, unidentified
MDHHSVAYVGFDTSKTKHAVAVAEGGREGEVRYLGEIEAAPAAVERLLRKLACKYKILHVCYEAGPTGYGLYRHIRALGHVCDVIAPSLVPTRPGDRVKTNRRDAVTLARLLRAGELTPVWVPDAVHEAVRDLVRAREAAARDLRHKRQQVLSFLLRHGRIFTGHRHWSRAHLRWLAGQAFDHPAQQIVFQDQVDVVADAQARLERLDRQLAELVPTWSMAPVVAACQAMRGVSFLVAVTFVAEIGDVRRFESPRQLMAFLGLVPCERSTGDTVRRGGLTLAGNRRVRRALVEGAWSYRHPARITETIRGRLEGLPKVVREIAWKAQVRLCSRYRRLMAAGKRAPVAVAAIAREMAAFLWAIGRVVEPT

SEQ ID NO: 470299 - protein, 315 aa, unidentified
MQIPLDLGADVSKDYVMVACAKQSFAPVRHTNKRAALLAWLKRLPAGSRIGMEATGSYHELLATLAHRLGLVVYVLNAKDVHHYAQATGQRGKTDRVDAALIARYVAKEYSHLHIWHPASSAQRQLQRLMRRRAKLTSARAALRSSLRSVPSLRSELRALLKHFDVLIAKLDTHAGELVKASHEREQAFQRLDAIPSVGNAVGIGLLAALERWPLPRADAFVAFVGLDPRPDDSGKKSGRRRLSKRGDPELRRLLYTAAMSASRTRVWAPLYQRTLARGLSRIQALVILARHIARTAWSIYTHKTQFDPARLQST

SEQ ID NO: 470300 - protein, 357 aa, unidentified
MQTQSNTLSFEGKNIYVGFDVHSKDWKVSIMVEKLYHKTFIQQPSAEGLHKYLCTNFPNGKYHSVYEAGFSGFSDHFKLQKLGVNSIVVNPADVPTTGKEMIQKTDKRDSMKLVKGLYSGELKGIYIPRPETINNRLLLRTRAQFVKDLTRNKNRIKSQLHFLGIKYPEEFFNNKSHWSSRFMKWLQQLELEYPNAKVSLNLLVDQVVYLRSTLLKITRQIRELSISERYKENYTLIKSIPGIGLISGMTILLEIEDILRFPNSISFFSYIGIIPSTHSSGEKDSTGKITPRGHPILRNLLIECAWISVRQDPSLLKKHLDNCQRMAANKSIIHIARNLASRIRFVLVNKEVYKKGL

SEQ ID NO: 470301 - protein, 404 aa, unidentified
MWYTGIDWADDHHDTVVIDEAGRQLASLRVTHTLEGLNQLTIFLQSITGPDAKEQMACIIETTHGLLIASLLEAGFAVYPVNPKTVDRRRKPAGAKTDAIDAYLLAKTGRSDLPDLRRLQPDAAQIQELKALTRDQDALIQSQTRLVNQLTACLKAYYPVALQWFTKVQQHSTLVFLQTYPTPDCAKAASLDEMTAVLKQAHHPNPTKVAQHIWHTLRQPYLQVDAITTRTKSRLALALVSQLLPLVEQITAYDKEITRLFLSHPDSEIFNSLPGAAKRLAPRRLSGWGDDRTRYRDAASVQALAGTSPVPFESGNYSKVHKRYACIKPLRNALHQFAWESTRQEAWALDYYRRKRKEGKSHSMAIRALANVWVRIIFAMWVKHESYETAKFLAARQTHGNLAA

SEQ ID NO: 470302 - protein, 338 aa, unidentified
MRYVGVDLHKQSISLCIVELAGRKRKIVERRRFACDQEDEMAEYFAKLGPYQLVVEATASYEWFVQLVEPTAARVVLAHPGHLRVIARSKKKTDKLDAQTLAEFLALDQIPEAWRPTPRTRQHRTLVRHRHYVQRRITSVKNKLRHILANYNADQKHLFTRAGRAYLASLRLSAADRFAADLLCEELDEHGDRLKRVDKQLKAFAKQAPAAEQEARAVLASIPCVGPVTIDVVLAEVGDVRRFGSQRKATAYAGLAPGIRQSAGKAKQLGITKEGSRLLRTMLIETAWRLVLKTRRWGSLYEKLKTRCGAKKAIVAIARRAWCVMVSMLRSGQKYQTA

SEQ ID NO: 470303 - protein, 366 aa, unidentified
MAKARTLVGLDVHAAKIVAAVLDAEAGELQMFGMSGDVGQAAGFCAGLPRPVRATYEAGPTGYGLARELACRGVDCVVAAPSKIPRASGDRVKTDRRDAEHLVRLLGAGKLHAVRVPGVEEEALRDLVRARDAVRQDLMRARHRLSKLLLRHGVRFDDGPAWSQRHRDWLATITLDWPAAQATMLDAQGAIDALAHRRDALEREIVALLPDSPWQLQAARLRCLRGIDTLSAVGLCAEIGDFERFARAEQLMSYVGLVPSESTTGQQRRLGAITKTGSGHARRLLVEAAWHYRKAPRIGKALTARHQDQPPEAVAVAWSAQRRLHRTWTRLEQRAKRRTIIAVAAARELAGFCWAITQIQEPPTQT

SEQ ID NO: 470304 - protein, 327 aa, unidentified
MRYLGMDVAKAKLDCLLLSEDGDKGKSKSVANNRSGIADFLTWIGKQHISPNELHVVMDATGVYHEQAALALADAGVTVSIVNPAQVKNFGRGLAVRTKTDGMDSYVLARYGALLKPVAWTPPAPEARTLQALLARCDAVAQDLHRECNRQEKAEATDTPALIRQSLSDSIAFLSRQLAQLQQDIDRHIDRHPGLKDDLALLQSIPAVGPQVGNNMLAVMRSHDFGSAEQLAAYLGLVPVERQSGSSVMGRAKLSKAGPARIRAVLYMAAVVGIRCNPHVKAVYDRLLARGKSKMSALGAAMRKLVHLCFGVLKTRKPYRRDYAKNS

SEQ ID NO: 470305 - protein, 368 aa, unidentified
MKQQTSAATETKIKGRNIIDFTGKTIYVGIDVHEKDYQVAKVFDGICLGNHRKAANHQMLIDHLNSRYPGATFKCVYESCAWGFTLQRALNSAGIECIVVHAADVSSSDKEKKRKTDKVDALKLARNLASGDLTGIHVPDEDLQKERNLIRFRKKLVGDLNRSKNRLKSLLKYQGIKIPEHLGKKNNWSYNFMNWVEQEANKDVLLKDTLLLMLEEIKLLRQLLLKTERALRKLMKERHNEKATLLMTAPGIGRTIAMQFVLEVGDIKRFHSFDALNDLIGFCPDTDSSGDMQRDRGITSRRHKQLRSALIEAAWTAIRIDPALMDAYQKLTKRMQGKYAIIRIARKLLRRMRTMLLTGQPYQIGVAA

SEQ ID NO: 470306 - protein, 309 aa, unidentified
MNTQNKNIVAIDIAKSSLQIQTEKKAFCVTNDSTGLKRLHLLIKKLDHPYVVCEASGGYERLLVRTLHQWAVPVSVVNPAMVRAFAKSEGIKAKTDPIDARILLKFGQTKELRQTPCPDPHIEELAALMDRRTQLSDSLAREKNRLDKEPIYTRKWIEQTIEFISQQIQELELRIEEILTMNERLSKRVTRMTELKGVGKTTAYTILAYLPDLETMTRGQLVSLVGLAPYNKESGKTKSKAHIHGGRAKIRKCLFMAAQSAAQHNEVIHQYVSNLIKAGQPKKSALVAAMRKILICLRSLLKNPNFSLA

SEQ ID NO: 470307 - protein, 424 aa, unidentified
MKVTFQTCCGVDVHKSFLVATIIKTSSGIEPSYQKRRFSTFNNSILEFKKWLLENECLYVCMESTGKYWIPVFNLLEDEINVTIANPKWVKAVKGNKDDTKDSKWIGDLFRLGLVIGSYIPCKKIRVLREFTRYRYKLVSCRSSEKNRYQNTLTVCNVALDSVVSDIFGKSSTSIIDYLLEQSGTSIDHEVIASKLLKHLKAKEDAVIESIEGYQMTDSQKYRMHLVRAHMDYITAATNDVDSEIESLIAFDPDYENAVELLCTIPGVKYDSAITIISEIGIDMSQFCSSKRLCCWAGLTPGSNESAGKKKSVRITRAGVYLKPALVQCAHAAVKSDKSPYYKKKYESLVKRRGKKRAIIAIARMILTAIFQMLTTGETWNPCDLYKIDMPEALLEKQKQKAIKQAQKLLIREGLLPPTEPIAS

SEQ ID NO: 470308 - protein, 370 aa, unidentified
MSQSSTLFIGMDVHKDTIAVAYVAQEHGAEVTYLGTIGTRQCDIDQLVRKMQSKAKHLIFVYEAGPCGYWLYRYLTKKGYDCWVVAPSLIPKKAGDRVKTDRRDAVQLARLARSGDLTVVYVPTVDDEAIRDLTRAREDALSDGKDAKFRLKAFLLRHDIRYTGRANWGPAHLRWLSEVVCPTPAQQIVFQEYVRAVTEHAERLQRLDQELQEHVRAWRVHAVVEALQALRGVQCTVAVTMVAEIGDLTRFDTPRELMKFLGLIPSEYSSGERRHQGAITKAGNTHARRALVEGAWAYRYPAKVSRHLQLRLEKQPKMIQDISWKAQVRLCKRYRHLVARGKHANIVTVAIARELAGFMWAIAKQLPVAA

SEQ ID NO: 470309 - protein, 410 aa, unidentified
MEIQIQRGCGLDVHQATVVACLLIVLANGKVKKQIRKFGTTTRELVALREWLQAEGCTHVAMESTGVYWKPVYAILEGAFEITVANAQRIKNVPGRKTDMKDAEWIADLLLHGLLKASFVPPQPIRELRDLTRYRRKLVESRGDERNRLQKVLETANIKLASVASDVFGVSGMLMLEALAEGQATPAEMAELAKGRLRDKIPQLEPALEGRMEEHHRYLLKLQLARMRALDKDLAQLDVRLQEKLQPYRPQWELLMEIPGVDWTLAAVIIAELGVDMKVFGSSSRAASWAGVCPGNNESAGKRKNCRTTPGNVHLKTALAEAAHAAARTKGTYLRDKFYRVKARRGAKRAVITVAHKILVAVYHMLDQQVSYNDLGDLYLDKLNKQHLTRNLVHRLERLGYQVTLQPVAA

SEQ ID NO: 470310 - protein, 398 aa, unidentified
MTESSDYESVQVFIGVDVGKDTHHAVAINRSGKRLFDKALPNDENKLRSLISDLKQHGQILLVVDQPATIGALPVAVARSEGVLVGYLPGLAMRRIADLHAGEAKTDARDAAIIAEAARTLPHALRTLKLADEQIAELSMLCGFDDDLAAQTTQASNRIRGLLTQIHPALERVLGPRLEHPAVLDLLQRYPSPEKLASLGEKKLAAQLCKLAPRLGKRLAADIAQALAEQTVVVPGTNAAAVVLPRLALQLITLRKQRDEVALEVEQRVLAHPLYPVLTSMPGVGVRTAARLLTEVACRAFASAAHLAAYAGLAPVTRRSGSSIRGEHPSRRGNKTLKRALFLSAFAALRDPLSRAYYTRKMSQGKRHNQALIALARRRCDVLFAMMRDGTFYTPQGS

SEQ ID NO: 470311 - protein, 455 aa, unidentified
MPKQKRTRNARTLPVARVLEPNAAGIDIAATEVYVAVPTGRDPQPVRRFSTFTDDLHRLADWLQACRVQSVAMESTGVFWIPLFQILEDHGFRVCLVNARHVKNVPGRKTDVSDCQWLQYLHSVGLLRASHRPTQTICAVRSIWRHRESLVQMAAVHIQHMQKALDQMNLQLHHVISDITGTTGLAIISAVLGGERNPENLATLRDPRIVASRETIARALVGDYRAEHLFTLRQSLQAYRQYQQWIAACDSEIERQLQVLPGNLPDDPKALSKPRDHHKPRRNEPRFDLRSQLYRIFGVDLTAVPGVSSLTAHTLLTEVGPDLRRFPNAAAFASWLGLCPDNRISGGRVLSVVTRKVKNRLTIALRMAAQSLHRSQSYLGQYFRRMRIRLGTPPAITAAAHKLARVLYHLITTRQPYEESTFAAMEERARQRQLLRLTKQAARFGFQLVPGRSVP

SEQ ID NO: 470312 - protein, 356 aa, unidentified
MNKRSKLNFSGQAIYLGLDVHKKSWSVSIFTKHGEYKTFSQPPEAETLIQYLQRHFPGARYHSVYEAGYCGFWIHDQLRERGIDNIVANPADIPTRDKERRSKRDRIDCRKLARGLRGGEIEGIYTPARWKLEDRSLIRTRLSMGRKQARCKNQIKSMLLFYGVTLPEQREMGHWSRRFIRWIEEIRMERSSGDVALELHLEELCHLRQIIAKLNRSILALARTEEYRLWVSLLKTIPGISTLTAMIVLTELYEITRFRSIDHLCSYVGLIPDTQGSGEKEHVGGITQRHHSSLRWLLIEASWIAVRKDPVMMEAFNDYCKRMQKTKAIIKIARKLLNRIRYVLKNQAEYVTGVIE

SEQ ID NO: 470313 - protein, 392 aa, unidentified
MFFVGIDIGKNNHVASMMDESSKVIFKAFSFPNTLDGGNALFSKLTSYSSNIDDFDIGMEATGHYWLSVYSFLFEKKFLLHVINPIQTDGWRRGTEIRKRKNDIIDSVLIADLIRYGQFVETRLADEDLFSLRSLTRFRTYLVESISDLKRKVVCVLDQVFPEYQSIFSDIFGKTSKEILLQFSSPIDFEAVSSQTLAELLAKLSRKQVGSAKAEQLKAAASCSFGVTFAKSSFTFQLKALIEQIAFIEKQVKETETEIAGIMEKLESPITTITGIGNVTGAAIISEIGDISKFDSPRKLVAFAGLDATVTQSGEFEAAHNVMSKRGSPYLRKAIFQAALVAAFKDPVLSAYYQKKRAEGKHHLICIGAVARKMCNIIYAVVKNNQPYVPKA

SEQ ID NO: 470314 - protein, 373 aa, unidentified
MDQDTTYVAFDTSKETLAVGIAKGGRRREVRFFGTIASRLEAVRKLVEKLAKQHHRLAFCYEAGPTGYGLYRQIRAMGYDCQVVAPSMVPVRPGGHIKTDRRDATTLAALFRAGELTAIWVPDAAHEAMRDLSRGRQAAMEGLRRARQQLLSFLLRHGRVYPTRSHWSRAHRRWLSEQRFDHAAQQIVFEELIQAVEQAQSRRDRLEQQMVALLPSWSLREVVAALQALHGVALLSAITLMAEIGDFRRFTNPRELMAWLGLVPREHSSGATTVRGAITKAGNRRARRVLVEGAWTYRLPARVGLELLRRNRALPQAIKDVAWKAQVRLCARYRRLLRAGKPTSVITVAIARELAAFVWAVATTVMPPLEPTA

SEQ ID NO: 470315 - protein, 366 aa, unidentified
MKKISTVQTFRNEMLKKQKLTIGMDLGDHWSCYCILDEAGEIILEQKVAMTPEAMKQTFSKIPRSLIAMETGTHSPWASRMLTELGYKVIVAHAQKVQLITKSNRKDDRHDARTLARLARIDPELLGPVRHRSAQAQIHLTVIRARAELVRARTAMVNAARGLVKSYGQRLPKCGTQQVSRELGVGLKAELREVLEPLLKEIESLNERIQEYEVRMEKIAKESYPHVELLKQVKGVGTQIALTYVLTLEDPHRFPKSREVGCFLGLRPGRRDSGESQPQMHISKEGDRYLRTMLVQGAHYILGPFGEDSDLRRWGLKLAARGGKSAKKRAVVAVARKLAVLLHRLWVSGEVYEPLHNSHKAMRAVA

SEQ ID NO: 470316 - protein, 418 aa, unidentified
MTDQITIPQKRFIGLDVHKHYLIALGVDAELNIVLPAQRVELFRLEAWMKKTLTKQDAVALEMTTNTWEIYDELSPCAHSVTVVHPPHVALITRSQVMNDKMAASILARLLAKGLLVSIWVPPVEVRELRALVAQRSKMTRLATQAKNRLHAILQRHHIVPPEGNLFHADQTEWWCALPVGKLEKINLQSDLDTLRFAETQLTRLASTMNELAVKDERVTRLIHLPGFGAVVALTVLAAIGEIARFEDAKHLVGYAGLGARIHDSGLTTRTGRITKAGRRDLRAALVEAAQVAANSHPHWKAELARLEPRLGRNKAIIAIARKLLVAVWFVLSKQTTDRFAQPEMVARKLMQFAYKVGKHNRPANQSAAQFIRQQMDALQIGADLSAIPWGTKNRSIPLPPSALLENKMSDVPNTQPC

SEQ ID NO: 470317 - protein, 347 aa, unidentified
MNFYTQQHKHYCGIDLHARAMYVCILDQHGTKLVHKNLPTTPEAFLRVIAPYRDDLVVAVECIFTWYWLADLCAKEGIAFVLGHALYMKAIHGGKAKNDKIDAHKIAVLLRGGMLPRAYVYPAEMRATRDLLRRRCHLVRKRAELLAHIHNTNSQYNLPEIGKKLAYKANREGVEEHFPDPSVRKTIEVDVSLIDHYDQLLGEVELYITRTAKAHDVQTFARLQSVPGIGQILALVLLYEIQDIARFPRVQDFVSYCRLVKCAKESNGKRLGTSGKKIGNVHLRWAFAEAAVLFLRHNQLGKAYFTKLEHKHGKAKALTVLAHKLARAVYYMLAREQAFDLRRFVSA

SEQ ID NO: 470318 - protein, 371 aa, unidentified
MSQYSTDTVWVGMDVHQDSVTAAILFGDDPKPQIERLPGDLNAVRRMFRRLSGHGTPRSCYEASGAGYVLQRCLEHDGFHCEVIAPSLVPKKPGDRRKTDRLDAIHLAKHYRAGNLTPVAVPSREQEEIRQLVRSRLAVQSHITRLKHRIVRVLATHGHRHTATKSNWTKKHRAWLRKLRRELTGPLQTVLAHHLEHLEYLEGQRYSLEAEIDRYARKGPYRRQVEALCCFRGVKTLTAMTILTELGDIRRFARPTGLMAFAGLVPSERSSGNVSRRGSITKSGSGELRRVLVEAAWHYRQQAAADVVLARRRMGQDPQVVAIAIKAQHRLRRTFWKIARRKHTCKAVTATARELCGFIWSALWAIGDHEA

SEQ ID NO: 470319 - protein, 367 aa, unidentified
MTVTIVDVARPVLGGVDAHLEVNVAPGLVTGGVDTHLDLNVAAALDGIGGLLAVAEFPATAAGHRELLGWLSGFGPVARVGVEGTGSYGAGLARFLRAAGVAVVEVDRPNRQARRRAGKSDPLDAVEAARAALSGRARGAAKSRDGNVEAIRALVVAKRSARSAKIQALNQIRHLSFTAPEQLRQRLAGVSRHQLAARAAALRPGSREAADPVVAATKTALRLLGRRVLALDEEKARIDALLAGLVTQTAPQLLALFGVGVDTAAALLVTAGDNPGRLRSEAAWAHLCGTAPIPASSGKVTRYRLNRGGDRQANRALWGIVITRLRNDPRTKAYMDRRLGEGRSKPEVIRILKRYVAREVYHHLPRT

SEQ ID NO: 470320 - protein, 418 aa, unidentified
MSLLLEQPFTAYVGIDWADTKHDICVQAAGDPRRESSCIAHRVAAIDEWANALHRRFGGPIAVALELAKGPIVAALQKYDFLVLFPINPATLAKYREAFQPSGAKNDPKDAELALDLLLHHPERFGSLRPQSAAMRTLVSLVERRRQLVGDQTRLTNRLCDTLKQYYPHALEWFDDRGTVLFCDFLDRWPTLRSVKQARTATLEAFFRAHHCRSARRISVRIGSIREAAPLTEDPAIIGPCRLHVLALAAQLRAVLAAIVQFEHEIAAVAPTLPDYTLFKNLPGAGAQLAPRLLAAFGEQRERFRSADELQKYVGIAPVTERSGKQSWVHWRLQCPKFLRQTFVEWAAQTIPRSSWAGAYYRQQRAKGSSHHVAVRALAFKWIRVLYRCWQNRTPYNETVYLNVLRKRGSLLAGKLSN

SEQ ID NO: 470321 - protein, 336 aa, unidentified
MEYVGIDLHKKGFTACIMDQEGSIVHLHKYQNAREDVEELVSICQNPSFVIEATQNWMWITRMLQEKGLPVTLAHPLRTKAIASARIKTDNLDAETLAHLLRASLVPMAYIPTIKEQEDRELSRARCQLVKQQTWVKNQIHSLLTKENLTPPVTDLFGTRGVIWLKEQDLSQSKQLILKQMLALLEDIKEKITVLDRQIEIRSKGNKRVRILKSIPGFGTITAFVLAAEIGNPKRFPSGKKLAAYLGLVPSLYQSGNTKRLGSITKLGNPYSRWVLVQAAHRLVRSDTNTKLFYQTLSARRGKKKAIVAVARKLAELSYRLLVDNRNYEVRMPKRE

SEQ ID NO: 470322 - protein, 409 aa, unidentified
MLFVGDDWAEAHHDVEIVDQTGRRLAHGRLPEGLAGISRFHELVADHLDLDAGPEQVLVGIETDRGPWVQALIAAGYTVYAINPFQASRYRDRHAASGAKSDPGDAHVLAEIVRLDRDHHRPVAGDSEVAEHVKAAARAHQSMIWSRQAQVNTLRSTLREFYPAALAAFPELASGDALAVLAVAPSPEAGRRLTQQRIETLLRKAGRQRNITSKATQIRAALASDQLPVRPGVVGAYAASVSALVAVITVMMAQTEVLAGQVEQGFGQHPDVEIYRSQPGLGTILGARVLAEFGDDPHRYTDAKARKNYSGMSPITRASGTKRVVLARHARNRRLGDALYQQAFCALTSSAGARAFYDRQRDRGATHHQALRALGNRLVGILHGCLRHHTLYDENTAWPALNHENEQAA

SEQ ID NO: 470323 - protein, 343 aa, unidentified
MEYFAGLDVSVKDTSVCIVEDTGKIIREVKVASEPDALLAVLRSPCYHFKRIGLEAGPLSQWLFSELAEADLPVICVETRHMRAVLKAQINKTDRNDARGIAQMMRVGLYRPVHVKTLRSQKLRMLLTHRKLLQSKAIAIENDLRATLRNFGLKVGMVGATKFEARIRELVENLPDLILLVEPLLVVRRTLREQLDLLHRRLLAVVRDDEVCRRLMTVPGVGPVVALTYRATVDVPARFRKSKSVGAVFGLTPARDQSGERDHPGAISRCGDEMMRTTLYEAAQIMLMHSAKWSWLKAWAMKIARHRGKKKAVVALARRLAVIMHRIWVDGTEFKWTREAAAA

SEQ ID NO: 470324 - protein, 360 aa, unidentified
MPRSIPTTTAEMITVGVDTHKDLHVAVALDGLGRRLGTLNVPTSLAGYKELVAWANGFGPLERAGVEGTGSFGCGLARFLRAKGIEVFEVIRPKRRDQYRSGKSDPIDAEAAARAVLAGTATGRPKGTDGEVEMIRALRAARRSAVKARAQAANQLKAMLITAPEGLKSELRALSTAKLVTKVSRFRPGTSPSDVETATKFALRSVARRYQRLSEEISELDEQLDRLVAEAAPELLVVEGVGTDTAASLLIAAGDNPERLKNEAYSDAHLCGVAPIPASSGKTVRHRLNRHGDRDANRALYVIALCRMSHEERTRTYVARRTKEGKTKKEIIRCLKRHIAREIYRILASVSLNNPPNSVP

SEQ ID NO: 470325 - protein, 411 aa, unidentified
MEEILCGIDWASDHHDVALIDVEGIKLGRRRISDDAAGLGELTGMFAEHGAGPGTVKIAIETERGLLVASLRAAGYDIYPVNPKAVDRYRDRHHLARGKSDAADAMVLAHILRTDAHLHRPLPADSPAARALEVLARAHQDLVWSRQHEVNRLRSLLAGYYPAALAAFGDLTTRTAMTVLAAAPTPAAAAQLTTSDLLDLLAAAGRGRRRADARRLAEVFAAPQMRQPAAVEQAMGDAATAVITTITAMNTAVTALAQRIDASFEQHPDAAIYHSMPALGPILSARVPGEFGDDRTRWPDPASRRAYAGSAPITRASGKKRVVLARSIRNRRLYDAAHWWAFAALSVSPGARAYYHQRRAAGDGHQAALRRLASKLIGQLHHCLQHRVPYDEATAWTRHQEQSQPAPPAAA

SEQ ID NO: 470326 - protein, 471 aa, unidentified
MNNHRRRPGKHRRHRPGKPRTSPSVLERINPNVAGIDCGSAEHFVAVPPDRDPCPVQSFRTFTGDLVRLADWLVACGVMSVAMEATGVYWIPVYDILEARGLNVLLVNARHIKNVPGRKSDVSDCEWLRELHSVGLLRGSFRPTATIVALRTYLRHRQTMIEDASTYIQRMQKALVQMNVQLPLVVTDITGVTGMSILRAIVGGQRDPERLAECRDPRCQASKAEIIEALTGHYQADHLFVLQQNLALYDACQQQIAACDRAIEAHVQILVATVEPPSTPLPPARARTGLKNEPAFEIRSPLHQLTGGVDLSQIEGIAPYSALKLLSEIGTDMSRWSTEKHFTAWLTLAPKNRISGGRLLSSKTQSSANRAAQILRMAAMSLGKTQTALGAFYRRLALRIGKPQAITATARKLAVLVYRALKGELVYRDPGADAYTAKQRTRIVRHLRQRAGSFGFDLVNRETGEIVSAVS

SEQ ID NO: 470327 - protein, 403 aa, unidentified
MNSVGIDISKGRSTVAVMRPFGEVVISPFEVRHTDSELSELARQLKSLDGETRVVMEATGNYHAPVAKLLHDAGLYVSVVNAKLVHGYGNNDLRRVKTDKKDAVKLANYGLDRWLTLPRYIPEEDTRLLLKNCYRQYRQYSKVQTVLKNNLISLLDTVFPNVNRLFSSPIRGDGSEKWVDFVAEFWHCRCVSEKSEKAFANKYQRWCKKHGYNFSVAKAHTIHAEASGHIGVMPKSETTKLLVEQAVAQLRATSVALTALKREMLTLAAQLPEYPVVMGMFGVGPTLGPQLIAEIGDVRRFYSKKALVAYAGLDAPPNDSGDVTGKHKSMSKIGASSLRRTLFLVMSVYLRSAPLEEPVYQFMDRKRAEGKPYHVYMMASANKFLRIYYATVKAYLESLEHTT

SEQ ID NO: 470328 - protein, 414 aa, unidentified
MSVNDTAGSMRACSAGVDWAKDDYAVCVVDSDGEPVARKTLPYTTSGLRRLVELLDRHGVDAVGIERPDGPIIDTLLAAGRTVLVIPPSQVKSLRRRYGSAGNKDDRFDAYVLADTVRTDRRRLTPLILDSEATVALRKLCRARKDLVAHRIAVANQLRSHLQTALPAVVDLFRDIDSAISRTFLTRFTTQDALDWLSPKRLAAWLSSIGYSGRTDPAVLHARISTAPRGAAGDHGRVLAAITHAYLFTLQTITTQIETLAQQIAEALTVHPDRDIFTTLPRAGTVRAARLLAEIGDARGRFPTPASLACLAGVAPSTRESGKARIVAFRWAVDKQLRDAVCDFAGDSRHKNLWAADLYNRARSRGHDHPHAVRILARAWIDIIWKCWTTNTGYDPDRHRALQQLLKQDQQAGG

SEQ ID NO: 470329 - protein, 335 aa, unidentified
MDNKKYIGMDVHQATISVAVRDAAGKLVMESIVETKAATILQFIQGIHGSLWVTFKEGTSAAWLYDLLQPHVAQVVVCDPRRNALLKAGNKNDRVDARKLSDLLRAGLLTPVYHGQSGVRTLRELARSYLTITKDGTRVMNRLKGLYRSWAIPCGGDKVYSVRHRNAWLEQLSQAGVRRRAEWLYQQLDILLDLRREARRELLTESQKHPAHQLLREIPRLGPIRVALIIALVQTPHRFRTKRQLWAYCGLALQTRSSGEYRVTEGRLEYTKRPPAVRGLNVNHNHDLKNVFKSAATQVSASGDPLGDFYQNLLAGGMRRRWRASPWRVRLRRLP

SEQ ID NO: 470330 - protein, 351 aa, unidentified
MTTMTSTDRFVTGGVDTHRDFHVVAALDRLGGVLGTAQFPTTPAGYRSLLGWLSGFGPVVTVGVEGTGSYGAALARHLAEADIPVIEVGRPNRQVRRRHGKTDVVDAIAAARAVQAGDATAIPKSHDGPVEALRALKMVQRSARKARTQALNQLHALVLTAPAELRGRLRGLNNRDLIGTCAAFRVRADDDSLAAVIRLSLRELAQRIQVLQDQQRTITTRMRRITTDLAPELVAKPGVGPDTATTLLITAGDNPERLGHEKSFAALVGASPIPVNSGQTQGRVRLNRGGDRDANSALWRIAIVRMATHQDTRDYIAKRQSEGKTKSEAIRCLKRYIAREVYNALPFQAIA

SEQ ID NO: 470331 - protein, 434 aa, unidentified
MNNLNVSRIEQFRQLKSTIRGNKNILIVGIDVSKRSSVACITDASGTIYMKKFKFLNSVAGANDIMKKALSIKQSLIKKDIVWALEPTGNYHKPLAAFLLRHACMVVGVSTVAAKENRKSLDGRWKKNDPKDAHNVADLVSQGKMFFYNDNPQAQTMKQLLKLRQRFAKELSATKARLRNNHFALFFPEIDGLYTDISHPEVLMLLRHYPTAEDIRAVSFEQFQSIFRHRKVSRVSQQRIYELWHRAQQSIALPKIPSVNIEIKSTLELIASLQQQITSIERHLEKICSLNPAYRRLLSLPGYGPIISATFLAAVGSIDCFSKASQLTKLAGLDLEYVHSGTFKGIAKVSKKGNSLLRYKLCSAAIYALNNPTIRSLQNAYLTRRENTSQNKAKFRIKLADKLLRTAFAILKHQHSFDMDTFLNPVNQSLRLST

SEQ ID NO: 470332 - protein, 371 aa, unidentified
MSKVRFVGLDVHAETIAVAVAEPDGAVRSVGVIPNRPESIRTLLKKLGPADQLRVCYEAGPTGYVVYWQLTGLGVKCDVVAPTLVPTKAGDRVKTDRRDALKLARSYRAGDLTAVWVPDAAHEALRDLVRAREAAKKDQLRARHRLGKFLLRHGRRPPTGMKAWTQAHLAWVKSAVRFEHAPQEATLLDYLHEVDHVAARLVRLEAAIDAAITTAPIRMRAVIEALQALRGIARLSAATIVSEVGDLSRFAKPRQLMGYSGAVAREDSSGARTRRGGITKTGNAHLRRIVVEAAWAYRHRPALGPALRHRQASVSAEVQAIAWKAQHRLHTRYRALTARGKCKQNVVTAIGRELLGFIWAIGVCVESTRVA

SEQ ID NO: 470333 - protein, 270 aa, unidentified
MREGVRGRLKTKKVKNDFKAVHIITEWLEHHNCSLSDAHIIMEATGVYHELLATGLHLAGVKVSLANPHRTREFARGMDILTKTDKVDAWMLTCYGALKQPDAWTPPSEEIRHLSALLKRRDLLVSDATREKNRLEKYRATHTPEAIIISAESMLTRLNDELAKIELMLKQHIEKHIALKEDYELLTSIKSVGPQLGLNMLVILRSHDFRTAEQVAAFLGVASVEKRSGTSVRGRSRMSKIGPPEIRAKLYLAALCTLRSEIQHSDEIYV

SEQ ID NO: 470334 - protein, 385 aa, unidentified
MANQNDLSRSLVAFEQDNTIIAVIEMSLNSWLVAGIVPGIERRPLKKLSCDEQMLLQLLYRWRDEAVKAGRMITRMVVAFEAGRDGFWLARWLRSRGIEAYVIHPTSVAVSREHRRAKTDRLDTELLKRAFLGWLRGEPDHCSMAAIPSLQEEDAKRPTRERENLVGERTRIVNRMKACLIRFGIRNFNPILRRATERLNALCTPEGVSLPPNTLAELRRDMARLRFVMDQINEIEAARLRRLEQAPAEEPHAKVRLLARVIGVGLETADMLVHEILSRKLRDRRAVARYAGLTGAPDESGSKRREKGLAKAGNARVRRGMIQLAWRFLLFQKNSALSQWYRTRTESAGKKRKTMIVALARKLLIALWRLVTTGEVLAGVVLRAV

SEQ ID NO: 470335 - protein, 446 aa, unidentified
MPHSPEAQARSRPNAEAAEFDWYVGIDCGGATHQVAVLDAHGHRVAERAVGHSGQELTAFVAWLHELAGPSLARVAVGLETPHGGPVALCLEHGAAVFAINPKQLERFRERASAAGAKDDRRDAVVAASALRTDRAAFHRLAPEAAALVQVRELSRVSDELREEAARLSNRLRAQLERYFPQLLTVVPAADEPWLWALLTLAPTPAAAARLSERRLTRLLRDYRIRRLSAADVRALLQAPALPVAPGTVEAVSAHVALLVPQLELVTRQHRACLTQLEAALTALAGPEDDPPAAPNADGAAGAGPTGAERLGPVVRLLCSLPGVGVGVAGVLLAEAAPALLAGDYHALRTHGGAAPVTKQSGKQRLVVMRYACNHRLRTALFHWARVSIQHDTAAHQYYAALRARGHSHARTLRSLADRWLRILTAMLTTGTAYEPSRFGVSAPTP

SEQ ID NO: 470336 - protein, 430 aa, unidentified
MSKAVLVRCKFNHWRSFMNAVGIDVSKKKSTVTIRQPGDVVLLPPRDYCYTQSSINELIATIKGLDGETKVCMEHTGRYYEPIASWLANAGIFVSAVNPKLIRDFGDESLRAPKTDKADSKKIARFALDRWTKLRQYSPMDESRNQLKIMNRQFSFYTDQKTAMKNNLIALLDQTFPGANGFFDSPARSDGSQKWVDFVYSYWHVDCVRSKSLSSFTEQYKSWCKRKGYNFSADKAEEIYRVATDLIAVFPKSDNTKMLIRQAASLLNTTSQMVESFRIKMDQVASALPEYSVVMAMNSVGSTLGPQLMAEIGDPTRFTHREALTAFAGVDPGSDQSGDHDRKSNRTSKKGSPYLRKTLFLIMDGLIKRSPVDNPVYAFMDKKRTQGKPYLVYMTAGANKFLRIYYGTVRDFLKQKDQWPDRESDEVTPV

SEQ ID NO: 470337 - protein, 386 aa, unidentified
MQKLKDLSRCLTPLEPDGTLIAVIEMSRSSWLVAGIVPGVERQPLKKLAVDESVLLKLLHRWREEAEKAGYMIKRIAVAFEAGRDGFWLARWLRARDIEVHVIHTSSVAVSREHRRAKTDRLDTELLKRAFLGWLRGERDHCKMVAIPTIMDEDGKRPNRERENLVGEQSRIINRIKATLVRLGIRGFNPKLKKAAERLQGLRTPEGEPIPPNTLSELRRNMERRRLVRDQIRQIESARRDRLEHAPGEGAHAMVRLLARVMGICIETADMLVQEVLSRNLRDRRAIARYAGLTGSPDESGRKRREKGLARSGNPRVRRGMIQLAWRFLMFQKDSALARWFRARTENARGTRKTMIVALARKLLIALWRLVRDGVVPDGFVLRPAQ

SEQ ID NO: 470338 - protein, 368 aa, unidentified
MKEGLPRSHAPRVLEETKGGPYMLYAGLDLSRKRLDFHLLDQVGVSVEVGAAPPDADGLRTLAARLARFGLPIRAAIESMNGARFVHDQLELHGWEVEIADAVKIKGLAPLACKTDRIDAWVLAELSRRELVPAIWLPDPAVRAERERARFRLHLVRHRSSLKQRVHATLLAHGKPCPLSDLFGAAGRALLARLELPEPWAGSVEASLYLIDELERQIRACERELRRLGADHRYVPLLTTVPGIAWVLAYTIAAEIGDIGRFPTPTKLTGYTGLCPRVYQSGDSDRRGPLAKQGPKYLRWALIEATTHACKHPTYNKRYQRTKTRLGKQRGPKVAQVDLARRLAEAIWHMLTRNQPFAPAGATSPLAA

SEQ ID NO: 470339 - protein, 348 aa, unidentified
MVVIGVDSHKRTHTVVATDATGRKLAERTVVATSAGHLELVRWAVRFDARTWALEDCRHLSRRLSADLLRAGERVIRVPPKLMAGARRSSREPGKSDPIDALAVARAALREDLPVATLDGPERDLRLLVDHREDLVVERTRAQNRLRWHLHELDPGNEPAALTLDRAVVLAALETRLADAPGTVARIARELVVRIRELTATINDLEREIARLVAALAPSLLALTGCGPLTAAKLIGETAGIGRFRSAAAFARHNGTAPIPVWSANDERHRLNRTGNRQLNVALHRIAITQMQREGLGKTYIEHRRAVGDTKTEAIRALRRRISDQVFRRMRDDEATTAAGPSALAAAA

SEQ ID NO: 470340 - protein, 399 aa, unidentified
MSLVVAKEIRVSVDVGAQRHRVAIGLSSGELLEEFDIEHNPEGFDHFFRRLCEHEKAHACGVSVAMEGFNGYARPLDRLVRAHNYRLYNINNLKLARFKEIFPGSAKTDAIDARKGLELFQLRDHLPLAKRALQEVVEVPEANDRLKRLTRRRRWLVGERGRVLNHLQGDLQAVCPGLLSMTKDAGNVWFLRFLTSAKTLPQLPRLRPKTLLKIKGVGATYASQIQVWQKQASFSDEVEWVGEMIQQDARRVLELDRQIKALEAKIESVMEGSSMARILASIPGYGLVCAAELAGEIGTIDRFKSDASLGLYVGMSPLDDSSGNTNSSKAPTQVNKRAKAAMMVAVDRHRKQVGKSQQYYDKKRAEGKKHNQAIRSLGRHLCRVIYQLLKKERVYEIRD

SEQ ID NO: 470341 - protein, 391 aa, unidentified
MIYVGIDVAKNKHDCCILGSDGTVLREAFTFSNDRKGFQELYSAIQEALHQEDADQIKAGLEATGHYSENLVAFLRSSGIQPIVFNPLQVNLFRKSQSLRRTKTDKVDAKCIAQLLMSAESTPVPASYQIQELKTLTRHRSRLVSQRTKLKQSISRLVDILFPELPSVCCSATQASIRTLLLELPSARQIAGCRIDRLTNLLYAASKGHYSREKALEIKQLAQQSIGANSPASELELRLTLQQLDFLLDQLKQLEKAIQTIVAALHSPILTIPGIGPTLAAIILAEIGDIHRFSSPDKLLAFAGLDPSTYQSGKFTAGHTPMVKHGSTYLRWALMQAARLASVYCDTFRHYMDTKLAQGKHYFVALGHVSKKLVRVIFRILTTNEAFVPQA

SEQ ID NO: 470342 - protein, 377 aa, unidentified
MNDSTKYVGMDVSKEKIAVAVADGNSRESARYWGEIPHRIEDIRKLMKRLGDVEQLQVCYEAGPTGYLLERQLASMGVACMVVAPSLIPKQPGNRVKTDRRDAQRLAELHRSAELKPVWVPGEEDEALRDLVRAREDAKEDLLRAKHRLGKFLMRRGIREPVGVRAWSAKYRVWLKGLQFDSSALQTTFDEYRLSIEEIERRIERLESEIHVQAQESKHGAVIKALQAFRGIQEIAAATMVAEVGSFLRFAKASQVMAYSGAVPSEHSSGAEVRRGKITKTGNSHLRRIAIECAWSYRYPAAMSATIKKRQEGLPASVQAIAWKAQIRLHKKYRHLILDKGKSPQIAITAVARELLGFVWAAACDVERQGLGQASAA

SEQ ID NO: 470343 - protein, 341 aa, unidentified
MKQDISVLGLDIAKRVFHAVGLDAMGKIVLRKPLSRHALMSFIAQLPPVLIGMEACGGAHYWARRFRAHGHEVKLMAPQFVKPYVKSNKNDARDAEAIGEAVTRPTMRFVPTKEVDQQDIQALHRVRERLMGARTALVNEVHGLLHEYGIVLPKGVAKFRQAVVGILESEKDKLTPLSREMFWKLVDEFAAVEEQLAYYQEKLETVATTHPECRRLMTIPGIGPLTATALLAAVSDASAFKNGRQFAAWLGLVPRQHSTGGKERLLGISKRGDGYLRKLFVHGARAVVRGVREKTDRRSGWIRGLIARRGFNRTTVAVANKNARIVWALLTSHQDYQPTTG

SEQ ID NO: 470344 - protein, 359 aa, unidentified
MLIIGCDFHPKFQQISMMDTTTGETKKRRLDHTAEAEAFYRSLRGQTVRIGLEATGSYGWFRRLLRECGHELWLGDPAAIHAANPRKQRNDKRDADCMLTLLHENRFPQVWMRPAEAEDLRQLLVHRIRMVQIRTKLKNQLDSMAKNEGLITGHAWRPNTRPQLEALSLPPWYDRRRRDLLDALDYFDQKIRPLTQAVEEAAQGDAQAALLMTHPWVGPNLSLAFVVVVGPWQRFANGRHLGSYLGLIPCEDTSADKRRLGHITKQGNVLLRWLLTEAAQHVHACEPAWHRLYGALLRRHQGKAGVAKVAVARKLAIRLYWMLRSGQGYEQIRATEPEQAQKGGKPGPKSGSERKQACA

SEQ ID NO: 470345 - protein, 413 aa, unidentified
MNRKARRCCGIDVHKASLSACIRLQGKGRKVSEEIRTFGTTGDELLALPDWLKEHEVSEVAMEATGVYWKPVYYVLEDGLRVILVNPAEIKRMPGRKTDVSDCAWLAQLLDHGMLRPSFIPPREIRELRDLVRYRVSLKHGHTRIANRLHKVLQDADLKLSSVMSDILGVSGRQILSQLAKGNCDPVALADLARANLRGKLPQLRQALSGRFNAHHAFLLSRLLADLDNTEEAMAQVAERIEAQLVPFAAELERLCTIPGVKQVAAAAILAEIGTDMSQFPSTADLDSWAGMAPGNNQSGGKRHRAKARKGNRWLRTILVESGNAAGRTRNTALSALYRRMIVRGGRKHAAFVVGRHILNIAYHFVNTGMKVHQHSEAKIHQFESRWLGGLVSGRGSARGINPLAAAKIKFGE

SEQ ID NO: 470346 - protein, 341 aa, unidentified
MELKRIAIDTSKHVFTLHGVDPQDRVVLRRELKRAQLEPFFRKLLPTEVVLEACGGSHHWGRFLSELGHTVKLIPPQYVKPFVKRGKNDRNDAEAINEAASRPTMRFVPVKSAVQQAGIMILKTRDLLVRQRTQLINAVRGHAGEFGVIAAKGTARVEALLERVAGDETLPEAARDMIALLGEQIKDLDIRITALETRMKQAHKANPVSQLLETIPGVGLIGALSLALTVDPGQFRSARHFAAWLGLTPRERSTGGKQRMGGISRAGDERLRHLLVTGATAVIRHVKPGSRNASAWLLSLLERRPRKVAAVALANKMARVAWAMMTSGEAYRGTPAVPASA

SEQ ID NO: 470347 - protein, 330 aa, unidentified
MTTVSKKQKWFNTIQLTKDDDLYVGIDTHKKSLHVALWLNDSPAIDFVMPPDSAKLIDILNRLRQALRMVVYEAGPTGYSLARTLQQADIPVSIVAPSKTPRQSAPDSKTDSLDARKLAEYAAKGLLRHIAIPTKYQETQRQLTRLRQQFVEKQTRVKLQIKSFLLQHGIDQPQGLSHWSGLAIEKLKSIRLSEPLRYCLDMLIEELYFIAKQLKSAEQKIKEVFSEKPICSTVKLLVTHPGVGQTIATQFAAEIFNPKRFRDKTQLAKYVGLAPSIRQSGQTLRDGPILKTGRPQLRCSLIQGAWIWIQNDRNAYKTFCRLIPQHRPQK

SEQ ID NO: 470348 - protein, 331 aa, unidentified
MNMAGIDVANETFDVQKRCGETITYRTFSNSPSGHQKVMEWLKLGSEQVRVCLEATGIYHLQLALALFRTPGIELMVLNPRAARRFAEAQMVRGKTDKVDALVLLHYLERMRFVPWHAPSEQHLILQSLTHRLSQLTKEQVRERSRLHAAERAGPHTHEAQNDIQVHLRFLQRRHRQLEAKAIALMQQQPVMAQELELVDTVPGFAQSSAMHVLAEVGVLPDHLEPQQWVAQAGLDPKPTESGTSVHSPRHISKQGNAKLRAALFFPAMVACRCDPNVRAFYEKLLARGKTKRSAQTAVMRKLLHSIWGILKYRQPWDGDKFYRMPASINA

SEQ ID NO: 470349 - protein, 337 aa, unidentified
MKKKLFIGIDVSKKTIDVSLLTSEQIKKLPHKQFDNSINGYKAMMKWINSMYKLSKDEMLFCMEHTGIYSLNLCCYLNENDIAFWLENPLQIKRSLGIKRGKNDKLDSKDIANYAYTHKHNAKLYQMPSKTLLTLKNLLAYRERLMKSKVCFQVSSNELEQCDKKIRASICFESNTIVKTFNKKIEKVEEQIKELIRSDKKLNHLYQLVTSVKGIGLIITAYMLVHTNAFTAFNNVRQFACYCGIAPFEYTSGISIKGKTKVSHLANKKLKSLFTMGVLNAIRYDFELGDFYEHKIKEGKSVMCVQNIIKNKLVGRIFAVVKRGTPYVELKGYRKAA

SEQ ID NO: 470350 - protein, 400 aa, unidentified
MLSIGIDVSKGKSTVCGMKPGGEIVYAPFEVQHTREGMSELVSLLHNSGEEVRAVLESTGSYHCPVVAALLENGIFVSVVNSLRMKRFCSQSIRKVKTDRIDAMQIALYGLAYWQELQPTKLPEDTYRELQLLARQYYQMTSILIKAKVDFNALCDQVLPGMQELMNDHAGRHKLSDFVLRYCHTTHILEMGETRFRKDYCKWAEKKGYRNCERMAVLIFATAQNGIPVLPNAPSTQIVITEAIRVLHTVEASRDAILTQMQALAKTLPEYSLVREMPCIGDTLAPRLIAEIGDVRRFHSKRALIAYAGIDAPPYQSGKFCANNRHISKRGNRYLRKTGYEVMQSYVMHKPANDPIFTFIEKKRGEGKSGKLAMVAGLNKFLRVYYGKVTELYRSLPAIE

SEQ ID NO: 470351 - protein, 366 aa, unidentified
MKKISTVQTFKSEIFREQKLTIGLDLGDRWSFYCVLDEAGKIILEQKVPTTPEAMKQTFSRIPQSRIALETGTHSPWVSRLLTELEHEVIVAHAQKVQLITKSNRKDGRHDARTLARLARIDPELLGPVRHRSVQAQIHLTVIRARAELVSARTALVNAARGLVKSYGQRLPKCGTQQVSRELAAKLSAELREVLEPLLKEIESLNECIQEYDERMEKIAKEVYPEVSLLKQVKGVGTQIALTYVLTIEDPHRFLKSREVGCFLGLKPGRRNSGESEPQKKISKAGDRYLRTMMVQGAHYILGPFGEDSDLRRWGRKLSERGGKNAKKRAVVAVARKLAILLHRLWVSGEVYEPLRNSQNAVRAVA

SEQ ID NO: 470352 - protein, 314 aa, unidentified
MVAQTVQDIGIDVAKRWLDVAVFQTQEQARFDNDKDGWAKLIKWLRSRTVRAIGMEPSGGYERGVAKALRKADLPARNVNPHKLRHYARALGRLAKNDRIDALLIARYTAELPTRPVRCDPIAEQLADLVVARRQLSDDKVSLANQLEQLREPTVKRIFTQRLRRIELDIALLAKRMAELVASQPPLAAKDRLIQSFHGAGPVLSHTLLALAPEIGQASRREIAALVGLAPYDFDTGTFKGRRIIWGGRHALRRVVYMAALTASRSNPVLKAFHQRLIANGKQPKVALIAVARKIITILSAMIRNNQPWNPAQP

SEQ ID NO: 470353 - protein, 344 aa, unidentified
MYHYAGIDVSLESSTICVVDGTGKILRETKVASEPEALIAWFRSSGLAFERIGLEAGPLSQWLYAALREAGFAVELLETRHVRDAFKSMPVKSDRNDARGIAQLMRLGWFRPVHCKSIEAQETRAVLTARKLLQSKLRDIENSLRGVLRGFGLKVGKTTECTFAARIGELVAGHPRLELVAKALLEAHAVLRREFNGLDKHTQKLARAHPPARLLMTTPSVGPIVALTYAAAIDDPKRFRSSKTTGAHFGLTPKKHQSGQKDYTGRISKIGDASVREALYQAAHVMLTKPIKGCSALKSWAMRISKRAGMRKAKVALARKLAVILHRMLADAKPFNPTAKAAAT

SEQ ID NO: 470354 - protein, 355 aa, unidentified
MTDVKYIGMDVHQASISIAVLDGGGALLMQSTIRTQACTLREFLRGLEGTLYVTFEEGTWSAWLYDLLSPHVTQAIACDPRHNAWLKSGNKSDKIDARRLAELLRAGMLKPVYHGQRNAHRLKELSRSYLTVVHDSPRVMNRIKAIYRSQGIRCAGQRVYSLRYRVNWLEQLREPGLRQRAALLYQQLDGVQTLRKQARRALLAASRKHPAHRLLLSVPGLGLIRVALLLALMQTPHRFRSKRQLWAYAGLALVTRTSADYRLVHGSLERSRKPIAIRGLNQNHNHDLKEIFKSAALRACRLPGPWRDSFTQRVEQGMKPELASLTMARKLAALTLVLWKKGEPYNPEKLIMQAA

SEQ ID NO: 470355 - protein, 418 aa, unidentified
MAFKIFRKNCCGLDVHKTWIYACIGITDANNRTEYKQARFSSFSKGLQELSSWLAKYSCTEVCMESSCKYWIPVFNILEKTCWVTLAHPKYTKPQKGNKTDRKDAKWICDLFMCDMIKPSFIPPPDIRHLRDLLRFRMKLTYQITGMKNRALNCLTVSNLKLDDVFTDVFGKSSRSIIQQILDHPVETFDVTPYIHKNCKHPVEEIQDAIDGAICPEQSTKLKICLDFMDEQERRIVELDTEIFHLAEPYTSVLEFMRTVPGFSKEPLTAIRLLSEIGPDMSVFPTSKNLVSWAGCCPRNDSSAQKVKSTRISRAGSYLKPLLVQIANALLKSKEHPEFKERYRRIKARRGHKKAIIALCRMLLTAIWNVLSKCEPYSVKGYLADKTTEHSVVISKAEGLALLRQRGYIFKDEVADFT

SEQ ID NO: 470356 - protein, 272 aa, unidentified
MENIALIGIDLGKNSFHIHCQDHRGKAVYRKKFTRPKLIEFLATCPATTIAMEACGGSHFMARKLEELGHFPKLISPQFVRPFVKSNKNDFVDAEAICEAASRPSMRFVQPRTESQQAMRALHRVRESLVQDKVKTTNQMHAFLLEFGISVPRGAAVISRLSTLLEDSSLPLYLSQLLLKLQQHYHYLVEQIKDLESQLKRKLDEDEVGQRLLSIPCVGTLTASTISTEIGNGKQYASSRDFAAATGLVPRQYSTGGRTTLLGISQRCNKKI

SEQ ID NO: 470357 - protein, 462 aa, unidentified
MKSKTPKPKKQKQKISIDQAWELINPHAAGIDIGLREHLVCAPPGASPNPVRSFGTFTADLEALADWLKECGVTSVAMEATGVYWIPVFQILEARGFQVLLVNARQTKNVAGRKSDVQDCQWIQRLHTFGLLQGSFRPKDPYCVLRTYLRYRDEEISARSTQCQHIQKALQQMNVQLTQVLSDVMGVSGTAIIEAILAGEREPAKLATLVDPRVRASQAEIKKALQGDYRPEHLFVLKEAFDLYGIYEAKIAACDEQIVRECGQLPEKIDPVRSPLPPRKAGRPASKDQMQGQDMRVVLFAKLGVDLTAIEGIGVTTALIILTEVGPDLDRFKTEKHFCSWLGLCPDNRISGGKVLSSHTRRVINRASDALRMAAVTLERSQSALGGFYRRMKGRLGAAEGITATAHKLARIIYRLIKHGEAYVTKGLEDYEKKYQDRKLSALKRTATLMGFELVAKQPATT

SEQ ID NO: 470358 - protein, 372 aa, unidentified
MSSPMIWIGMDVHKDTVMAAVYLGDAQEAEVVQQLPNDLRKLRRFFLRWQARGEVRACYEASGAGYVLHREITDWGLHCDVVAPSLTPVRPGNQRKHDRRDAIQLARLYRAGELVTIRIPTPAEERVRDLVRCRRCFQQEVHRSRHYISMFLQRRGFVFREASAWCRKHRRWLESLLHGQKLAPEDRAVFGEYLALLDYKISRRDDLDEQIAEIAFSPSYQPFVKRLCCFRGINILGAMTLVTEIGDWRRFERPGQLMAYLGLVPKEHSSGDRDRKGPITKAGNSRCRHVLVQAAWMYRHRPAIGVDLKKRQQGQPPAIIAHAWKAQHRLHKLYHRIAHRKANQIAVVAVARELVGFLWAAMQDLEEHKAAA

SEQ ID NO: 470359 - protein, 300 aa, unidentified
MIHVGVDLHQRFCYMTALEARGKIVQSGTVTNEKVALRKYFRQFRGQAVQVAVEACGFWPAFREVVEPEVKRLVLVHPQRVKAIASAKLKNDRVDSETLAHLLRCELLPESWKADRETQARRQQVRLRTTLVRQRTRLKNQVHAVLHQQGLRSEEIQRQNLQLSEKAKQDKRARWLQTIPGIGECSAMMLLAEIGDIGRFGSKEALCSYAGLVPRVRESAGKAGRGGITRQGSSWLRWIMVEAAQVATRCSPAAKRYYERLLRKKHKHVARVALARKLLIAVYALLHHGVVFEEENFAAR

SEQ ID NO: 470360 - protein, 408 aa, unidentified
MFYLGIDQHRKHLTVSLRDERGDVVLRRQVSTEWDRVMQFFEQLVELTHGDGGFLAIVEVCGFNGWLMEMLAEYGCRQTIVVQPEIRATKKTDRRDAGQLSQLLWVNRERLLAGKPVQGLRRVWLPSPEDAANRQLTALRKRLGDFRTRTLNKVQRLLLKHNLQQECPVKRIQTKAAREWLRELDLDGTDRLELNLLLRQWELWDEQMKSLEERIEQRQASNPVAQIVATVPGMQAYSSLAVASRMGSIDKFPRPGSLANYWGLTPGCRNSGDVTNRLGSITKQGSVLVRFILGQAILHVLRRDPQMKAWFLRIKKRRGAKIARVAAMRRLATILWHMVKHQQPYQIGRMMKSSLPARQNPTLPTAKPKGPGGDAAPEPPGFSQAWREQKNEKNTGGKAAPAARAARA

SEQ ID NO: 470361 - protein, 338 aa, unidentified
MYYTGIDLHKFSSFLTTVDSSGAIVKQENLKNVAHNFVHYFNSIPGEHQTTVESTMTWYWLNDLLTSINIPLVLAHAKYVKAIAYAKVKTDKVDSHTLAQLLRMDYIPAAHKISNDNRTLRDALRARLKIVQRHTSVTNSMHLLLAKYNYDSPTQLTGIPEFQYQQLSEVESLLDEQMLELEKQLYPYLIPNDDIQRLLWIPGIGKMNAFTILLEVDDINRFPDVKNFFSYCRLVPSARNSGGKSKQRSSKDGNKYLKVTFCDAAVHAVQYYPVIKKYHDSKLRKKKKQVAHAIIAKEIARIAFYVLKNKSDFNNKFKGTELEHKKSLQWPRVVSPDA

SEQ ID NO: 470362 - protein, 313 aa, unidentified
MDSSVTFVGIDVSKDRLDLAVRPSGQSWQCANNPRAFAALLVELNALHPTLLVMEATGALELPVAAALAAANLPLAIVNPRQVRDFAKATGHLAKTDRLDAAVLAHFAEALRPSVQTVPSAEQQHLSALLTRRRQVIEFLVAERNRLATAVPTLQERIQAHIAWLQTELDDLDLDLQHSIEASPAWRAAEDLLRSVPGVGPVTARTLVAALPELGHISSKGLAALVGVAPLNVDSGRFRGKRRIWGGRAQVRSALYMATVSGVRWNPVLRKFYQRLVKAGKPKKVALIAAMHKLLTILNAMMKQQTPWRVQAI

SEQ ID NO: 470363 - protein, 369 aa, unidentified
MGHHTDVFVGIDVAKSRNAIAIADNERGGEVRYFGEVDAAPDAMRRVVQRIADKHGRAHFCYEAGPTGYGLYRLITALGHPCDVVAPSLIPRKPGDRVKTNRRDAVGLAKLLRAGELTPVWVPDEGHEAMRDLVRARAAAVETQRVHRQQVSAFMLKHGRIFPRKKSWSMRYLRWLQEQCFEHPAHQIALQELVDAVRISKERIERIEAAIEEFLPSWSLAPIVRALQALRGVDLIVAVTFATEIGDVRRFDSPRQLMGYLGLVPSERSTGDAVRRGGITKAGNSRVRHMLVESAWTYRHPPRVGAKKLYRLEQTTPKVREIAWKAQSRLTARYRTLSARGKKTTIVCAAIARELVGFMWAVAREAQTT

SEQ ID NO: 470364 - protein, 426 aa, unidentified
MKVLHERVAGIDVHKDMIKVGIRSPGDKPWTRRSEVLEYRTFYGVLQQMAAGLRKRGVTHVVMEASGVYTEPVYYALAERDSGEVAVINPAHARALKGHKTDARDCLRVAELSGCGLLRGSYIPVAGLKEVRDLTRYRMKTVQARTPEIQRLGKALESAGIKLGSVASELTGKSATAMIEALTGGERRGRVLAGLAIGRMRTAGKLADLSQALTGRFTEHHALLCRLHLDRIATFDTAVAGLEDKIALKAARWQREQDLLRTIPGFGDAVACAWLAEIGPAPHTCFGSHEKLASWVTLCPGNHISAGKRKHGRTGDAGTYIKPMLVQAAWAAIRVRGRLQARYSRLVRRFGGEKNPAAKKKAITAIARTLLKIACQVLRSGKPYEDPGADFYTRRESPEQRQAYLMRQLQKLNPGCTITITPAEAA

SEQ ID NO: 470365 - protein, 464 aa, unidentified
MRTIGLDLAVTGEHKAIVLDDATTEYITPILRLRTSAGELSRLLERAREGVTDAPVRVVMEPTAMAWFPVSAFLRRQQVDVYLVNSQQVAALRRYYRHHAKSDRIDARILARLPLFNPEHLHPLVMPSPKLFACQRGCKRADRLTRQITAAQNRIRDLDRFLWPGLEGMVFSEPFAPTARWFRDQFYDPRRAVAAGADTIQKNWLASVLVGQDDGRWAEPLVTLAGQVLALYGAGGESVDFDLLQEDVRREQAMMADCEVALRELRNHTVRPLYRQLHPSRNLETIPGVGQDGAAVYVSFMVDPRRFDSQRRFRSWTGMIPKSSQTATSEAKGLHITQAGPNLVRKFAYMGADAARKRDPQIAQVYYTQMVQYGKHHSQALCTCATHLLDRIRVVLMEDRPYELRDVSGERITSEEAMHIIATRYTVSESVRKRNSKRARKERQERRAERQQMGKVTHVRKGQA

SEQ ID NO: 470366 - protein, 350 aa, unidentified
MMIIGCDYHPGFQQIAFVDTETGKCGERRLQHREEAEKFYRDLAAQEMKVRVGMEASGHARWLERLLGELQIELWIGDAAEIRAKRVRKQKTDRQDAQLILKLMLKDDFPQIWVASWENRDLRQLLWHRHRMVQARTRIMNQLQAVALNEGLGCKKRLWREAGREQLEAFPLAPWASRRRQDLLELLDRLNPTIADLTQTIEREVEKCPEAQRLRTHPGVGPLTAMAFVLIIGRADRFQCGKQIASYLGLVPLEESSGNRRRLGHITKQGNSLLRFLMVEAAQVTVRSIPEWRSKYFHLAMRRGRKIAKVAMARKLAVRLYWMWRQGWDYEQLKKFGPHAGQPENRDGVQ

SEQ ID NO: 470367 - protein, 346 aa, unidentified
MDNIGIDLHKRSSQICTLTAGGELFERRIETTRERFAAALGGRPRARILIEASTESEWAARCLEQLGHEVIVADPNYAPMYGQRSRKVKTDRRDARALAEACRLGAFRLAHRTSDAQRHVRTQVMVREALVQTRSRYISLVGALLRREGARLGSGGAAAFPMRVARLQLPETLQQEIAPLQVMLKILNTRIQYADAQLENLVASDPRAQRLCTVPGVGPVTAATFVATVDRVERFAGAHQLEAYLGLVPRERSSGEKQCRGRITKAGNGRARWLLVEAAWSILRYKKPETLALRLWADRIAARRGKFRAAVALARRLAGILYAMLRDGTVYQPERLGAGAERRPAA

SEQ ID NO: 470368 - protein, 351 aa, unidentified
MDIRSLKTVLERGSLHYLPSNPNGCKGIVARMLQDRVQEDVMETNVFVGVDVSKDSLDVAIGSQKEIITFSNDQKGVDALVKKLSQMDPALTVFESTGGYELLAASCLAEAGLPVVIVNPRQVRNFAKAAGILAKTDAIDARVIARFAEAVKPEVRPLKDRATSELTALVTRRRQIIEMIVAENNRLKLANKRNIKDIKDHIRWLEKRLDKIETDIGKTIQNSPIWRCKDNILRSVPGIGPVTSATLICDLPELGVLSSKKIAMLAGLAPLNCDSGKYKGRRRIWGGRSSVRSGLYMATLAAIRCNPAIKGFYQRLIAAGKCHKVAATACMRKLLIIVNAMLRDQTLWQQN

SEQ ID NO: 470369 - protein, 362 aa, unidentified
MKKDSTGKQVKGSKRVVTVAVGIDIGDKDCQVCGRDAAGRITFERKVRTTRAGLASALGKLRACRVLLEAGSQTRWIAEAIIKMGHRVKVVDPRRMRRIYESDSKSDVRDARELSEAALDRWERLPEVKLRSRESQRKLSVLRTRDALVRSRTALVNVVRSLLKQYGIKVSKCTTEAFPKKAAALVPEELSVAASPLLRQISELGLQIKGLDKWIESQAAGDANIRVLRQIQGVGPVTAAAFVWTLDDPERFKRSRSVGAYLGLRPKRDQSGEVDKQLPITKAGDRYVRALLVSCAHYILSKKGPDTALKRFGLRLAERGGKVAKKKAAVATARKLAVLLHHLWVAGEIYEAFPDTCKRRAA

SEQ ID NO: 470370 - protein, 315 aa, unidentified
MIVGIDISKASFDGAWEAEGQNRHRQFEYTDEGIEALLAQTPAEAHYVMEATGIYHTRLALKLHESGRRVSVINPLVIKRFAQMQLSRVKTDKADAELLCAYGRQHQLTPWSPAAEEIIELQQAHSWLDDLIRERTRLLNRQEAHTYHAKPSPFVAKQIAAQLRHVDKQIKDCERHLEVVVKKSSAELYARLLTIPSIGPKTAIELIVVTDGFRRFEEIKALCAYVGVSPTTLRSGTSVAGKGAIAKLGQGRLRQLLYLCSWTARRCNPACRQLYMRLSALGKPPKVINIAIAHKLLRQAFAVATNNRPFSEEYA

SEQ ID NO: 470371 - protein, 343 aa, unidentified
MAAKAKIIKLGIDVHADSFSVVRQIDNDTPPPAQKFTPEGFVKWVAKQLPAAEKVHRCYEAGPFGYSLHRQLLRMGVQNVVVRPQNWDELGRKVKTDRIDALALVQRLDRYVQGNRHALAVIAVPTPEQEQARGLGRHRQQLVQERQTHEAQGRSFLLYHGRRVQGQWWQPFAWEVLQQELEPWQCRILENFRAQILLADQQLAQVEKQVVAEAVSPAKGFGALTCQLLGREVLDWKRFANRRQVASLTGMCPSVHASGGHSWQGSITKHGNPRIRRLLVELAWRVVRFQPNYPPVQKWRPQLDNKRARGGRKKAAVAIGRHLAIDLWRMETGRSTAAQLHLT

SEQ ID NO: 470372 - protein, 322 aa, unidentified
MKYIGIDVSKATFVAAYSSDRCGETRTFNNTAAGIKKFIGTLSGIPDVHCVMEATGNYSAILLYLLGSAGITVSMENPLKIKNFARAMLSVVKTDVLDARLIALYGEKMNPAPFRIQSDAILRLKQKRTVMRQLHKQRTALSNLKGSIECLPVPDKGAVHAVDETLVCIDKRLARLQKELTELVGDEFGKQLALLTSIKGIGMTLATALIITTGGFTYFQNAKQVSRYLGLCPTYEQSGTSVNVRGHINRNGDAYTRGLLYVAAWPASRFNAQCRDTYTRLRKRGKPGKLAMVAVANKLVRQAFAVVSQQKEYVDGFVSTRH

SEQ ID NO: 470373 - protein, 428 aa, unidentified
MNTNTQNERIALLTEEWMLVGVDVGSEKHFARAFTNRKIEISKKPFEFSNTIEGFTSFSQWIADLLKSSGLKFVMVGMEPTGHYWFNLANYVKEHGMLVSHVNPAHVKKSKELDDTNPSKNDRKDPKTIAGLMADGRYSLPYMPENVYAKLRDLNNLRYRETEQEIRAKNLFARWISIHFPEYSSIYKDTLAVSGLMILKSAPLPEDILKLGAAGVDRIWREAKLRGSGMKRAEKFVEAAEKSIGHTSCAMTARFELQDILEDIERHMSRLEEIDQMINESLKEVPNADKLFAIPGVGVKTIVGFISEIGDVSRFEDAKEIQKLAGLAIVADCSGKHNGQSKISYRGRKHLRYTLYLGAISVIGHNKQFAEIYKYYRERKNNPLKKLQAVIAVACKIIRVFFAILSKGVVYDGEKMAADIKRLAAQGA

SEQ ID NO: 470374 - protein, 315 aa, unidentified
MRETQIFVGVDVSKARLDVAMRPSGDTVTVCHDEAGIAGLVTRLQAWQPAAVVLEATGDLESAVVSALAAAGLPVHVVNPRQVRDFARATGRLAKTDTLDAQILAQFGEVLRPVPRPLPDEATQALSAVLTRRRQLIEMLTAEKNRLSQARPSLRKRITAHIEWLTSELRRVEADLDTAIRHSPVWREQDDLLQSMPGVGPGLSRTMLAELPELGTLSSKQLAALVGVAPHNRDSGTLHGKRTIWGGRAVVRTALYMATLAATKWNPVIKAAYHQFLARGKAKKVALVACMHKLLIILNAMVKHRTPWRADAQQA

SEQ ID NO: 470375 - protein, 378 aa, unidentified
MPSENTVHIAIELSFSSWLVAARLTGAKKSRLHRIEGGDTGALLALIAELRSRALTELGGAAEVACCFEAGRDGFWLYRLLTAHGILVYVLEPTSILVNRRSRRAKTDRLDAEGMLRVLAAWLGGDRQVCSMVRVPTPEEEDGKRPHRERERLVQEKLRIENRIEALLFTQGIRARPSLRSWERELTELRTGDGRTLPPLLRAELDRLRRRLVLILELIRELEAERAAALAAAPDEAMAQKITSLQRVRGIGANFSAVLVREVLYRSFANRRQLASYVGVAPMPFQSGGMDRDRSISRAGNPRARTTLIQLAWLWLRYQPGSALATWFRARVGTLQGRTRRIAIVALARKLLIALWRYVEAGVLPAGVEIRTGTVPAA

SEQ ID NO: 470376 - protein, 426 aa, unidentified
MRFIGLDVHKDFCEVAVIEGDACWSGPRVRSTPEDLEVFGQSLGRKDQVVLEATGGALAIARILERYAGRVVIANPMAVRAIASAKAKTDRLDARTLAKLLAAGFVPGVWIGDERTRLLRRLVSRHAQLVCQRTRAKNEVHAVLQRTLAGRPPVSDLFGRRGRAWLGAQGLPADERETVEASLRHIDFLDGELRLVDGGVAEQLLDWPQVRRIMTIPGMGAMAAAGVMAAIGDVRRFPTSRHLVGYFGLDARVRQSGSGPARHGRISKQGSAEARHLLVEAAWAAMRTPGPLRAFGERIRARRGANIATVAVARKLAVLCWHLLTREEDYDFARPSLVREKIRRLELAAGAPNRNGYRNPVRVFATPEQRRLEREVGAQAEKAYRRFVKDFKATGRRGAGAATGARISVARKGQAARQEQAPDPAL

SEQ ID NO: 470377 - protein, 360 aa, unidentified
MVAVMIGIDPHKRSNTALVLDGRETVLTRRRFANDSAGYRDLKAFVRGWKQRTWAVEGARGVGLSLAQRLTMEGENVLDVPAVLSARVRALGGGSGRKTDEADAYAVAVAGLRGHGLQVVKPEDEVAVLKMLSDRRQQLVEQRIAAVNRLHDVLQDLLPGGASTRLTATKAHEILAGLSPSDPVGQARKQLAVEHADDVAELDVKIQAMAKRIAAAVAQRPSAVTDIKGIGAVGTALILGEVGDVRRFRSKHHFASYTGTAPIDVSSGDQNRHRLNRGGNRRLNYALHIAALVQIRFPGPGQDYYARKRVEGKKPLEAMRCLKRRLSDVVFHALQEDLRGRHPGGGPGRTLGGDSSIQRV

SEQ ID NO: 470378 - protein, 344 aa, unidentified
MEYGAIDLHLRRSQFRIEDATGAVVVEGRLDTSRADFTRVFGGRAPLRVLLESSTDSEWVAQVLESFGHEVIVAAPNYLPMYGTRDRKVKTDRRDTQALVTACRLGHYRPAHRVSAATRTRRQTLRVRRQLVQMRTRMISLVRALLRQEGLRLPSGAPNRVVTRLDRLVIPAALQTVLAPVRTWLTALQDLLDPLETTLEAQAAADPVAQRLMTAPGVGPIVALTFAATLDSPARFGGDAARVSAFLGLVPAEDSSAERRQRGHITKAGPRELRALLVQAAWVIWLGRGAAGAALRTWAHALAVRRGRRIAIVALARRLSRILLAMWRDAQDFRPPTVGEAVAA

SEQ ID NO: 470379 - protein, 321 aa, unidentified
MTTSNKDVSSLAVGIDVSKARLDVAFSDERPGLGVDNNPTGQAQIVEALKGASLSRIVLEATGGYERTVVAELAAAGLPVVVVNPRQVRDFAKATGRLAKTDAIDAKVLALFAVAIQPPLRPLNDKETQVFAELLTRRRQLIRMRVAESNRLAQARDRRVRKSIEGVIKLFDRQIAAIDDDIDHHIQNSPIWKEKQELLLAVEGVGPTTVRTLLAELPELGKASRQEIAALVGLAPFNRDSGQARGRRMISGGRASVRGVLYMATLTATRHNPVIRKHYQHLLAGGKRKKVALVACMRKLLTILNAILREKKPWRSHMVIP

SEQ ID NO: 470380 - protein, 347 aa, unidentified
MEKASQAEVQVFAGIDVSARELSVAVQCGIKEGIAITTFPNKAAGHQALLAYLLRAKGRARVCLEASGNYSLDLALTLQAHPQVEISVVNPRRARRFAESLGERSKTDPVDARVLCEYALRMPWVPWVPPSLAALRLRSITRAIEDLVAMQAQEKNRQHALLASDALPALLIRELEQHLRYLKLRITRLRREALRLIARNPELNRRFHLMLTTPGLGETSSLQILGELVVLPETLDARQWVAFSGLDPKQFSSGTSVEKKPRISRGGNRHLRRALYMPALVATRHEPFLRDFYQRLLRRGKAPLQGVVAVMRKLLHALFAMFRRDEAYDGSKLCPAEFARHTAVVCV

SEQ ID NO: 470381 - protein, 397 aa, unidentified
MIAVGIDISKAKSTVAVIDSDGTVLASPFTMAHTQPEMEAFVTYLKGLGEPTTILMEYTGHYHYPVLKKLQDEGFPVCIVNPYQMKKYGDVEIHKAKTDKKDALRIAAYALEKSYKLVPYSSMEQKYEDLKFLSRQYSQRITYVAKLKVQLIALLDQTMPGITRILPLNSRNPEKCALLLFIKRFKSFDEIQRIGKARFLASYDVLAKKASERSASSKGLSIYELAVDSITTRGEDPYIWLSQNQCVDLLSTTQNAADEIISQMRNIAETIPEYKVLRAMRGVGDRLGPIILAEIGDVHRFHSGKALNSYAGNDAPPYQSGQFESRNRHISKRGSSTLRKACYEVMQALKLTKPQDDPVYLFMLKKEQEGKPFNVAKMAGVNKFLRIYYARAMELYK

SEQ ID NO: 470382 - protein, 439 aa, unidentified
MAKTDEQEQTEFAAFIGIDWADRKHAWALQTESGQSIEQGELDHTPEAVEAWAAELARRFGGRRVAVALEQSRGSLVFMLSKYAHLVLFPINPAMSVNYRRGFRPSGAKSDPSDAGLLLDLLVRHREKLRRLDPDTEETRTLQFLVEARRTFVNDKTRYGNRLTAHLKMYFPQVLVWFSEVSSQIVGDFLDLWPTLAQLQRAKPQTVRKFLVQHHSCKSDKVDCRLEEIRQAVSATDDAAVITANVAAATAMVRMIRELREVIDSYDKQIETLVKQHPDFAIFDSLPGAGKALVPRLIAALGTQRDRYNSAAELQCYSGIAPVLVSSGKQTWIHWRWACPKFVRQTFHEWAAHSVAYSPWAKAYYEQQRANGKLRNAVIRSLAFKWIRILFRCWQARTPYQEQLYQQVLATRTAARTDKTVNVQWKTSGGFSKIAGFTA

SEQ ID NO: 470383 - protein, 390 aa, unidentified
MICVGIDAASTKHDVFIATDYGLVISDVFQIKNSKSDYDKLFKIVQKARMDLKDDEVRIGIESTGVYSFNLLDYFNKKEGIKVILINPSLTNMFQLSQSVHYAKTDKIDAKGICLYISRISEFLAYTPQSYHSSELKALYREIDNLNKEMNVLKNQLHSFLHKSFPEIFDFSVDIDSLYFLNMLVTHPSPEKIKGMHVGTLIKIKGKPFDEESAKAFKEAAKNTVGTYSEAESFIVSQLASLILMMEKQKQNLVKQIKPIIDKQYPYLLDIAGVSYISAAGFIGEIGEITNYRNADSLLAFAGLDLIVYQSGKYEGKQNRLSKRGSSYLRNAIHNATMIMVRCNPVFKDYFEKKMNEGKTYMAAIASSRKKLVRLLYTVLKNKKYIEPTM

SEQ ID NO: 470384 - protein, 381 aa, unidentified
MTVQAQFLPRNYDVFAGLDVDKKNMAVIFTDHQQLMQSLRLPYSAAQLLSYVRKHFGEQRVAFVYEAGPTGFGLYDELVAGGYPCLVVAPAMVPTAPGQRVKTNRLDARKLSENLRGGQLRSIHVPSSSYRELRHLVQLRDTHVSQLTATKCRIKALLLYEGMTFPGTGRWSARVLRELAALPCSAAVHFKLDHLIGTLQFHFNSAATVQKQIRTFCQNDPELLPAITLVKSIPGIGWIVAAHLVARLGDWREIENVRSIAGFLGLVSSEHSTGEKENRGPITRAGDSRLRNKLIQSAWVTIAKDPELRAFYRRIYARHPKKVAARKAIVAVARKLTTRIYAVLKEQRPFVVRPDSSTAPLTAEETAGPRERLDGQQSEQL

SEQ ID NO: 470385 - protein, 380 aa, unidentified
MKKGITTVQRFVGLDVHAETIAVAIAERDGGEVRTLGIIPNREQSVKKLISKLGPRETWKACYEAGPTGYPLYWQMVKLGCSCEVVAPTLIPVKAGDRVKTDRRDAQRLARALRAGDLTAVWVPDAAHEALRDLVRAREAAKRDQLRARHRLSKYLLRDGRRPTVKMKPWTQRYLDWIRKEVKFDQNPQQTTLEDYLEEVNHQAQRIARLEQSIDGAIEQAPEAMREVVAALQALRGIAKLTAVTIVSEVGQLSRFPTARQAMGYSGLVASEHSSGERTRRGGITKTGNSHLRRVLVEAAWAARFGPTLTRSLRIRQEGQSAEVVEIAQKARHRLHARYLRLLGRGKTKQQVVTAVARELMGFVWAIGKTVETRHRPMTA

SEQ ID NO: 470386 - protein, 313 aa, unidentified
MGEVHFIGIDLAKAVFHLHGAGRDGSIIFRKKLSRSRVLEFLSKWDKCTVAMEACATAHFWGREIAKLGHEVKLIPPVYVKPFVKRQKNDTNDAEAIAEAAVRPTMRFVAVKSADQQGLGTVFRSRDLLVRQRTQLMNSLRAHLAEFGIVSAKGTEAFKALIAAAHSAKTSLPDDVWEIMGLYVSGIAECTTKITVLEKKIKLRTRQDRLTKRLQTMPGVGPMTAAAIQAFAPSLDSFESGRDFASWLGLVPKQHSTGGKARLGRISKMGQQDIRRLLINGAMSLINATLDLESFETSDLRLFWIENPDLWRL

SEQ ID NO: 470387 - protein, 344 aa, unidentified
MVYIGMDVHQSSTTFCLFDPAVGDGGQYRTCTRPTAPESFREVLRPLGGQCQVAFEVGTQAQWIASMVRPLAGEVQVANPSRIPWLFRDGRKNDRLDARKLATLLYLKQLPTVHLPSTDVSAWRALINHRRTLVKRRTMVKNQIRTILRAYGHRCPYKRLWTHRGQVWLASLVFDEARTLMLTTLQDELTFFDQKIAAIEARLDAIAAAYPSVALLRTIPGIGPRTGEAVVAFADGIERFRDRRRFASYFGMTPTEDSSGLVERRGHISKRGPSVVRWVLVEAAHQAIKRCPAFRAFYDRLHRGKKDRAKKAIVAVGRKVLTIAYAMMRDQKPFCAEKVLGRAA

SEQ ID NO: 470388 - protein, 403 aa, unidentified
MALFGGCDWGGATHAVSVIDETGALRQKLQLTHDAEGLARLVRELAQLGPPAELPIAIERPTGLLVDTLVAAGHPVVPLHPNVVKACRPRYRAAGGKSDPGDSYLLADVLRTDGHRFARLQPQSDALKALRALVRTRDDLVAERVALANQLRSLLESCWPGAVEIFADIDSPIALAFVRRFPMAKSAASLGEKRLASFLAKHSYCGRRTPAELLARLREAAKPQLGELEAEAKGEVARALANVLDQLVAELQRLTSRIEHEIAQLPEGRIVMSLPRSGRVNAAQIVAELGDQRARFVSDEHLAAEAGVVPVTYASGKQHRVVFRWACNHRLRAAITTFAGNSRHASPWAEDVYRRARARGCDHPHATRILARAWIRVLYRLWQSNQLYHETKHAGASRVRATA

SEQ ID NO: 470389 - protein, 411 aa, unidentified
MDVVYPRCCGLDVHKETVVACVRVQEGKRAMKEVRTFGTMTGDLVVLSDWLAAHQVSHVAMESTGIYWKPIFNLLETGFQIILVNAAHIKNVPGRKTDVKDCEWIAELLAHGLLKGSFIPPEPIRDLRDLVRYRKSLIDERVRGVNRLQKILEASNIKLGSVASNVMGASGRAMLEALAKGTTDPGVLADLARGQLRRKLESLRQALEGRFRPHHQYMIGQMLSHLDFLDEAIEDLSREVASRISPFDPVLTLLKTIPGVNQRVGEAIISEIGVDMSRFPDHRHLASWAGLCPGNNESAGKRMSGKVRKGNRWLRRTLIETSWAVCRGGDNYLNAFYHRLCRRRGKKKAAVGVAHAVLVTAYHMMKTGLPFRDLGADYFVRLNEASVKRYSVRRLEALGYKVTLETAQSPA

SEQ ID NO: 470390 - protein, 433 aa, unidentified
MLKLNYMSTLFVGIDVSSKTNAVYAMDFEENKYISSSFGNNQPGADKLVNMIAECMHKHKNLDTVLIVLESTSVYSVHISNFLSTSEVLMPYKPYVFCVNPKATSNYRKSYIGMEKTDPTDAYLIADFGRVGRTKKLEPWRGGQFIALKRLTRHRMHLFECITREKTYMVSNLYLKFSELQLLEGDDKPFGSLYGATSSAVLTEFLSPQEIIDMPEEELLTFLAGKSRNRISDLSKTSELLRKAARDSYRLDKCMYEPLNVSLASSFNCIHAYQKEIKLIEQAIEKCINGMNPNALVILQSIPGIGPIWASGILSEIGDITVFHSSDALAKYAGLYWPKGDSGDFTSEDNKMSKAGNPYLRYYLGEAANSVRKHIPEYADFYARKYAEVTKHQHKRALALTSRKFVRLVFGLLAKNQLYTGEKLDAEYNIKSN

SEQ ID NO: 470391 - protein, 371 aa, unidentified
MNTIVYVGMDVHKESYTLCCYCYDTDLVEYRQTIPADYRLVLKYMEQVRTRYEGEVSFVCGYEAGCVGYSLYHQLTEHAVDCKILAPTTMAITNTNRVKTDRKDAANIARCLAFHTYSEVYVPDEQDNQVKEYIRMRDDQKLALKKIKQQILAFVLRQGKRFEGGKTYWTIAHRKWLYSLELKPLAKETLSEYLITYEYLVEKIERLDKRIEELASEDRYCEKVKKLGCFMGIRTHTALSMIVEVGDFERFAKARQFSGFLGIVPSEDSSADDINRYGITKAGNRHLRYLMVEAAQSYTRGSIGHKSIALKKRQEGCSPEVIAYADKANERLRRRFYTLTLRNGVNRNKAVTAIARELSCFIWGMMTENVA

SEQ ID NO: 470392 - protein, 315 aa, unidentified
MERCERSTKIGGIDVGKRLLDAAVHGGGEQFQTANDAAGWEALAAWLKERGVGRVGLEATAGYERGVRARLEAAGLEVVVHQPLEVRLFARLKRLRAKTDRIDAALIAAATAQVDTVRAAQDLRLIELAERMTAYEQISDLTAQLKTSMEHVTLPDLAASLDEQIESLKQLKARLAREIFTRIKAFEDLVARWRLLQSLPGVGPIVAASLVIRMPELGALQRGQPASLIGVAPFDRQSGQWRGQSFIGGGRSRPRRMLYLAAIAAKRFDPGFKAFADRLLAVGKPPKLAIVAVMRKLIEAANLVLARQQPWVRQA

SEQ ID NO: 470393 - protein, 410 aa, unidentified
MDVFLERCAGLDVHQASVVCCVLIGAPGRKPQKLLRSFGTTTRDLKALQAWLAEHGVTHVGMESTGVYWKPVYAVLEGHVDLTVGNAHHIKNVPGRKTDVKDAEWIAQLVRHGLVAKSFVPPPAIRDLREMVRHRRTLIETRTAVRNRVLKLLEGANIKLSGVASDVFGVSGMAMLEALAAGTNNAAEMAGLARGRMRRKHAALEAALDGRMREHQCFLLGMHLRNLKATDQDLEALDARIETQLEPYRVQHRLLMQIPGVDWVTAASIIAEIGTDMDVFASARRLAAWAGVAPGNYESAGKPKGAGTRRGNVFLKSALFAAASAAVRTKGSYYRDKYNRLRARRGPVRAIMAIAHKLLIATFHMLSTGEAFRDLGESYLDRVARKRSTTKLVQRLSNLGYDVMLVPKAA

SEQ ID NO: 470394 - protein, 411 aa, unidentified
MHNRQNYLYVGVDLHKEQHTAVIINCWQEKLGEIQFDNKPSAFSKFLLEVETYVSDGLSVVFGLEDVGGYGRALAKYLVDHEQVVKEVNPALSFLERKSQVMIQKNDSWDAECVARILVNKFNQLPDAKPNDLFWSIQQLVSRRNALVKAQSALKNQLHIQLNHHYPSYKKFFSELDGKTALAFWQQYPSPSCLEGVSIKQLTAFLLDVSNNTCSVKKASEILRLVKEDGQTMKEYQEMRNFLVRSIVREIEFKKKEMKYIERELKQLVNLLDYQLETMPGIELVTASALIAEIGDIRRFPNANKLARFAGIAPVYFGSGGKGKTHKSKQGNRALHALFYNLAVQQVQVAKGSKLPRNLVFHAYYQKKLKEGKTKGQALVCIMRRLVNIVYGMMKYKAAYELPVVEEKEVV

SEQ ID NO: 470395 - protein, 344 aa, unidentified
MQITTIGLDLAKSVFQIHGINSTGEVAVRKALRRSQMRRFFERLDPCLVGIEACGTSHYWAREITKLGHEVRLMPPAYVKPYVKRGKSDAGDAEAICEAVRRPTMRFVAIKSADQQAALALHRTRDLFVKQRTQLVNMIRGLLAEFGIEIRRGIEQALMLAKRMAADDMPDIPPLAAKVIAGLAGQVLDLQARLGEIERELLAWHRSNDIAKRLATIPGIGTVCATALAASVTDPHQFRSGRQFAAWLGLTPLQHSSGGKERLGRISKMGDKYLRRLLVVGMTSLIRRAKYKPEAVDPWLVDLLSRKPARLVTVALANKAARVAWAIMVRGGVYRRPAGVTTPV

SEQ ID NO: 470396 - protein, 338 aa, unidentified
MNIVFLGIDLAKNVFQLCGLNQAGKPVYTKRTGRKELLQTLANIPACLIGIEASTGAFYWQREFEKLGHKVKIISPQYVKPFVRGQKNDGNDAQAIAVALMQPTMQFVPPKSPEQQDIQALHRARQRIVNHRTATVCQIRGLLLDRGIPIGSAVSRARRAIPLILEDAENGLSSRMRRTIAELYDLFNALGRRIHFFDKEIETVFRQSEACQRIAKVKGIGPKTATAVVAAIGKGTEFKNGRHFAAWLGLVPRQHSSGDRQVLMNMTKKGDKHLRTLFIHGARAVVRVATNNNDGHMNQWVNQLKERRGFNKTTVAVANKNARIIWSMLRNETGYQVV

SEQ ID NO: 470397 - protein, 343 aa, unidentified
MQVSTIGVDLAKNVFQVHGVDSAGKVVITRQLRRKQVIDFFSKIPPCLVGMEACGTAHHWAREVSKLGHTVRLMPPSYVKGYVKRSKNDAADAAAICEAVTRPSMRFVPIKSADQQALLMLHRTRDLLIRQRTQLTNALRAHLAEFGLVAETGREGLAQLAAIITDESNREALPSAMKQALQAIVDQLAALELQIGTLDRAIHAHHRANDMSCRLETVPGIGVIGATAIASTVTDPSDFKSGRDFAAWIGLVPRQHSTGGKERLGGISKQGDRYLRRLLVIGATAVVRHARQCPQKHPWVMKLLGKKPAKLVAVAVANKMARIAWAIMAKGGYYRAPELAAAA

SEQ ID NO: 470398 - protein, 342 aa, unidentified
MNIPVRIGMDTSKSVFQLHGVDENEVVVVRRQFRRAEMIRYFERLPPVLVAIESCGSSHHWGRLLQSFGHEVKLIPPQYVKAYVKRGKNDAADAEALCEAVTRPSMRFVPVKSKERQAACMLMTVRERLVSVKSQLSNAFRSYAAEFGIVGPAGRQNVAALIKRVLEDDSLPEMARDLFRLQADEYAAVQTRLAKIEAKLMKWHREDDISRRIATIPGVGPIGSSMLSMKAPPPETFRSGRDFAAWLGLTPKDHSTGGRQRLGGITKAGDSILRSTLIVGATALLRHVRKGRHKPTPWLASLLERKPPKLVAVALANKFARIAWRLMISGGVYNQPVATMPT

SEQ ID NO: 470399 - protein, 364 aa, unidentified
MGYTGFLGPVPPGAGARCSSNKDGTQPLKGGAAMYVGVDYHKHYSVATKMDEQGRVLEQVRLRNDPDILVGYARRLPQGSKIALEATGSWYYFYELLEDTGSKIYLAHPLKTRAIASARIKTDKIDSTILAHLLRTNLLPTSYIAPRSIRDIREILRYRASLVSLRTSLKNKVHAILAKNGMAMPYTNVFGKKAIGYLKGLELRPCYRQGLDGYLRLATTLNTLIQEVTEMIEGMAQDDLRAQLLMTIPGISYYSALLIVSEIGDIDRFPSAKKLCSYAGLVPSVHASGGKIRYGSITKQGSKWLRWILVELSYHFIRGSERLKNLYTRVTKSHGKATARVAVAREMLKIIYYMLRDNRAFVRG

SEQ ID NO: 470400 - protein, 374 aa, unidentified
MLSRVRSTGVQKAELNGNVDSENNHGGSSWRVCNYIGLDVHKRTISYCVKDASGQVLQEGKIGATRGELDSWMKTLPQPWSVAMEATIFTGWIYDHLLPHAVQTKVAHPLMLRAIAAAKKKNDRIDAGKIADGLRCDFLPECHMAATEIRDRRRTLRYRHLLVRQMVQLKNRVSGLLMETGVSYCKQRLHKVGYFRELLSSNEDIHPNIRPLLKLSRDAIVRLQRMEYALVSSLQRDPLLADRIKRLRTVPGVGPITALTWALEMGEVSRFPSIKQAISYCGLCGDEKSSAEKVIRTPLSKQRNKHIQRVLVEAAKLAPRENHELALVYETEKQKGNANRATLAVARKMVAYLLAVDRGKRNFVPAEDHRGVAA

SEQ ID NO: 470401 - protein, 347 aa, unidentified
MLYLGLDVHSKWFTVNGFEKTTGECFKMKRVNNEPGAIKEAFASLPSPRCGALEAGTNALALHRVLAPYFEKLIIVSPNKVWDRRRDTSAKTDSRDAFALAVALAEDKLRGIYRPDEVLQIGRSLVRGRLQATRDKTRLTNQIYALIRSYGFLVEKKALTKKGRAWLGEIKLPKQTANILKLQLERLDTLQAHESQLEAEITQWANTDPICRRLQTIPNVGPFTALVLRVEIGDIRRFKSADALINYTGLVPQVYQSSERIRYGCLTKAGNSLLRYVAVLFATNVKRNRKDTPFKRKFNRLYHTHDSKELSIMLARDFLGVVHSMWSKETDWGYPRPATVRKTASVA

SEQ ID NO: 470402 - protein, 340 aa, unidentified
MAATEPNAATEPNAAAPPAAPPAAPAPVHVGIDVSKARLDVCALPSGRTLAAANDDAGVRRVIDLLAPLAPALVVVEATGRYHRRLAADLLDAGLRVAVVNPRHARDFARALGKLAKTDAIDARVLAQFAAVGHLRPCEKEPANRAALDERVTRRRQVVRMLVMEKNRLEGLRDRLTIGSVRKVIRVLEQQREDLDREIARLIEGDDDWRGRRAILTSVPGVGDATANLLVTDLPELGKVSREELAALVGVAPVNRDSGEHRGTRQCRGGRPHVRAALYMSIVSAIRFNPTIRAFSDRHAARGRPFKVVAVACMHKLLTILNVMVRDGTTWNPPAAAAAI

SEQ ID NO: 470403 - protein, 348 aa, unidentified
MYKQIAVDLAKSVYQVAESVRAGQVSQRKRLNREAFRRYIQEQTEPVEWLMEACGTAHYWGRFAQALGHRVTLLHARYVRPYRRRNKTDRNDCDAILEAARCADIHPVPVKTHEQQQVQQLHGLRETWKKSRTQRINLLRGIFREMGIEAPVATAAFLRAAHELVEHPEVAALRGQLQIVLAEINLYEQCMAECEQQLARWHADDAIVRKLDEVSGIGVLTASALKTAVGQPERFASGRQLSAWLGMTPREFSSGDRRKLGHISRQGNTYVRTLLIHGARAALLAAQRCQANTPERLTRLQRWAVETAARIGHNKAAVALANKLVRICWAVWCHERRFSGDWQSSKPA

SEQ ID NO: 470404 - protein, 416 aa, unidentified
MTDEFAAYVGIDWADQKHDIALLPAGRGKEEHRQLEQTPEAIDAWATELRQRFGGRPVAVCLEQSKGGLIYALMKYEFVVLYPINPKQLARFREALAPSGSKDDPTDAGLALQLLVKHRDQLRPWRPDDAQTRLIRILAEDRRGLVAQRTRLCNQMQDRLKQVFPLALEVLGSLTTDLAAEFLARYSSFQELRQAKADEIAALYRLHGLGQAKIQERLERITAAAPLTTDPALVKSGRLLVRSLATQLQALAEPLRQYDRQLADAMRLHPDAAIFQSFPGAGDALAPRLLAAFGGDRQRLDNAAQMQDLSGISPVTRRSGRTRCVLRRWACNKFLRQTFHEFAQHSLSGSIWAKAYYQLQRQRGKKHHAAVRALAFKWIRILFRCWKQRSSYDELIYCAQLLQRRSPLLAHLGASA

SEQ ID NO: 470405 - protein, 356 aa, unidentified
MSEITRVGVDLAKAVIQVNAVDACGKLVTNRQLNRDKFLPLCSQLPPGCLVAMEACGGAHHWARKLEAMGLNAKIIAAHLVAPYRLQGKAGKNDANDAAAVCEAASRPNMRFVPVKTTVQQGILSVHRLREGLKEERTASINRIRGMLTEFGLVASKSPEKLREKLTEMLEDASNDLSGLARLVIQEAYHQWNDLDKRIGWCDERISAHVKDDAQAKTAKELMGVGSVTASAVVATVGNFHQFKNGAQFGAWLGLTPRQNSSGGKTSLGGITKRGDMYLRMLLIQGAKSAVVTAHMRSDPISKWLYQLREKSGWQKAAVAMANKNARILWAMMTKGCHFDPLHMSVKPVGPETATT

SEQ ID NO: 470406 - protein, 372 aa, unidentified
MNYNTVYVGMDVHKESFTLCSCKYEDEKASHYQRTPASYKNVLRYLAFLRTIYGEDTRFVCGYEAGRLGYSLYHQLENFNVECVILAPTTMLEQRSKRRIKTDKRDAEIIARSLAQHNYSPVHIPTETDNQTKEFIRMRDDHKAELKKIKQQILSFCLRQGYQYDGSGNWTAKHVKWLRSLKPAGLYKEILDEYLLTYTILTDKLNRLDQRIEELASKEEYTESVSKLTCFLGIKTHTALSVIVEVGDFQRFVSARKFAGYLGLVPGQHSSGDDRNGLGITKAGNTHVRRLLVESAQSYTRGKIGYKSRVLRSRQAGNSPQVINYADRANERLRRRYYKMVLKDGKKYNIAKTAIARELACFIWGMMTDNIY

SEQ ID NO: 470407 - protein, 441 aa, unidentified
MSNIVNPNAAGIDISTKEHYAAVPEGRSKESVRCFQSFTRDLHELANWLKECKVETVAMESTGVYWYHLYTVLLDYGFEVYLVNAYHVKNVPGRKSDVSDARWLQQLHSFGLLKGCFQPDNLTRSLRNYVRQRKQLITQMSREVQRMQKALEQMNIKLNNVIRDIQGKTGMAIISSILDGERDPQVLAQYRDPRIKASKEKLIKSLEGNWREEQIFNLKQAYSHYFFLQGQLVECDEECERLVNDMSDEDIRKKELKSGPKQKNNPDFNVSQHLYNALGVDVTQIYGMKSITTLTVFSETGPGLKEKFPTEKQFLSWLNVVPDNKITGGKVISSKVKRKKNKAGLAFRDAANSLWKANNPLGEYLRRKKAISGGRQAVVATARKIASIYYKMVTEGVEFDPQVLKFKTQEYLNRRLRYLEKSLQKTKMLLADSKVVGEIVI

SEQ ID NO: 470408 - protein, 325 aa, unidentified
MSAIWVGVDVSKQRLDIAVRPTGELLTIDNDEAGIKKLVKLIAKWSPQLIVMEATGGHEYACAYSLMKAGFGVAVVNPRQVRAFARAVGRLAKTDPLDAKILAHFAEAVQPPARPVADQELQEIAQLVTRHRQLIEMIVAEGNRRMSLQGVAQRDVDVTIRFLRDRLDKIDGQMKALIAKHPEWSAKAEILDSVPGVGPVLISSLVVELPELGTLNRKQIAALVGVAPFNNDSGQWRGRRRIWGGRAHLRSVLYMSVVAGLRFNSTIRMFYKHLIAAGKAPKVALVACMRKLLVILNAMMKSQQPWRLTSDAELASAALTSSHGQ

SEQ ID NO: 470409 - protein, 307 aa, unidentified
MPRTLLGCDLARGWIDLHRLPDNAARRIDNAPQAILEALRDLPPDTLVVFEATSGCDGHLLAALEARGIAFARVNPRQAREFARATGVLAKTDRVDACVLAQMGARLELTLSAPRSPARVRLGDLLRRRKQLVEMRKAEKIRRHDAGGRDILAEINALIAIFDRRIDKLDRAIAALIATDPALCAQARLLRDVPGIGPTVLAVLLGELPELGRLDRRRIASLAGLAPHARESGLWRGARRIWGGRRRVREALYIAALTASRRIPALAALRKRMRDAGKAPKTALIAVARQLLVILNAMIKTGKPIRL

SEQ ID NO: 470410 - protein, 347 aa, unidentified
MRFYTRQHRHYCGVDLHARSMYVCVLDRDGNVLVSKNIASAPEPFVELIAPYREDLAVAAECMFTWYWLADLCVREGIVFVLGHALYMRAIHGGKAKNDRIDAHKIVGLLRGGMLPQAYVYPQAMRATRDLMRRRNYLMRQRAELLAHITNTNHQYNLPALGVRPARPAERSGLLEHFAEPQVRRSVALDLSFVEHYDRELPALERYLESNAQAHDPLALAIVRTVHGMGKVLGLSILYEIQDIGRFARVQQFLSYGRLVRPTKESGGKILGHSGRKIGNAHLKWAFSEAAVCFLRANKPAQALRARLMAKHGKGKSLAIIAAKLARAVYFMLKRGEPFDAERFFAH

SEQ ID NO: 470411 - protein, 356 aa, unidentified
MISQSGLPVPGIIVGVDTHKDEHVAVAINKLGARIGQRNLPTTSMGYINLESWANSLGEIDAFGIEGTGSYGAGLSRFLSDRGHRIIEVNRPNRSTRRRIGKSDPTDAEMAARAVLAGVAREEPKSGVDTVEMIRMIKTAKDSAMKGRTQSINQMKALVVTAPAELRSALRDLTTGQLIARCARWRPGKLLTVTSAAKYTLWSLARRHIHLTRELEALDVHLARLTAAVAPRLTQAFGIGPDIAAALLVTAGSNPERLKSEASFAALCGVNPIPASSGKTNRHRLNRGGDRRANAAIHRIVIVRLRYDERTRAYLKRRTEEGKTKTEAIRCLKRYVAREVFAILRDLTEPNIVQCA

SEQ ID NO: 470412 - protein, 447 aa, unidentified
MTHRIGPSRGDRRRNARKARLRGLIPREFAIVGVDLADRKQVFAVCDHDGGVHGRRSVNKRAWQLDETLGWAKAAAVEAGFAGVVVACEPTGHRWRVMLDQCDELGLTMVCAPPMLVHREREREDLTPDRSDAKDAVLIAGLAAQLRCYEPERPTAQWARMRHLGARRSELTTACGVVRQRMRSLLECVWPAALATAADPLASMTWRATMAVICARSVDGDPAAIRRMGWPRFQAAVRRELPRWGGHRVTWTIARELWDATTDPTGVIVHRHGALERVADALTDWQRLRVQRGAVEARMVHLLDELNLTSLVTTIPGLSAVGAAAILAETGDPHRFDSGRAVVKHAGLAPRDNESGTFKGTSRVSGRGRPELRLAVWRAVWGALPHNAVLSARHHHLRTREHNRLTDHQARVAVAGSLLRQLHAVIVGGVAWDARTAAGRQEVNAAA

SEQ ID NO: 470413 - protein, 523 aa, unidentified
MARAPKSKKRSAPAPQTIHKARGVISPRVQRVGPEHFGIVCVDCAKARSKWMLTDFYGRILVPPTEVEHTQACFASMIERLRTALEQAGIRDQIVVIERTGRYHRPVQRTFAKAGFEVRIIHPLTTKQHRQPANPGNKTDDTDLAAMQRGAVNGFGLLEPPADPLSIRLQLLARHRRDLVEKSVALRSQIHEHLYAIMPGYSKCFEDIYDARIPLWIARQFGSATAILQAGLPGLIVQLRRAEIRVHLPTLEKILAWARTAPAAEYESHLHLKILTALDDDRLSKVRGVRAIEAELAGLLVQTPYVLLMGIPGINVVSAAEFAGEMGPIERYATARAITGRAGLFPSRYQSDHVDYPDGQLVRCANRNLRRAIMMIADNLVKCNDHFRVLATGWRLQGRDARAVRVQVAGRFSRIAYQMVAGRKAYRHPCCQQRDYILKKLLVFHTDNEISYEQLMRNLDAAVAQLPRSEYREEAVPLADELDRVLKKRGKGPRPLSEILPVVLAKLGVKPVRSPKSGEAILT

SEQ ID NO: 470414 - protein, 417 aa, unidentified
MTEYAALLGIDWADKKHDVCLSDTTTGKREAATLPHSPHEIDHWASALRQRYAGHQIAVCLEQSRGPLIYALMKYDFITLYPVNPRTLSRYREAFSPSRHKDDPSDAAYLADLLVQHREQLRPWQPDDEQTRTLRLLVEHRRRLVGDRTRLSNRLTALLKGYFPQVLEWFRDIRTEMVCDFLLRWPSLEALKRVRRQTLLTFFREHNSVRRETVEKRLTALTQAVPLTTDKAVLHSSVAMTKALCAQMKATLSAIREFDRQIAEVCAGHENYELCKSLPGAGEVYASRLTAALGSDRRRWQSADELACLAGVAPVLERSGQSCWVRWRYFCPKFLRQTFHEYAGESIKHSFWARAYYESQRAKGKKHHAAVRSLAFKWVRIIYRCWQTKTAYDEVKYLESLRRKGSSLLNYAANNPA

SEQ ID NO: 470415 - protein, 424 aa, unidentified
MAVPPDRDDTPVREFPSFTVNLQEAADWLTACGVESVAMESTGVYWIPFFELLESRGFTVFLVNARNVKNVPGRKSDVLDCQWLQQLMTFGLLLGAYRPPDDICALRAISRQREMLLSYQARHIQHMQKALVQMNIQLGNVISDVVGETGQKILRAIIAGERDGKVLARFRNNHIRANEEEIAKSLVGNWREEHLFALKQAMALYDAYGERLVECDQELEMMLAHLGWYDGEPSKARRRSRAKNAPRFDARTYLFKMCGVDLTRIDSIEATTALKVIAEIGTDLARFPTVKHFTSWLGLCPGTKITGGKRLSGRTKRTANHATQALKMAAASLLKSQSALGAYYRRMCARLDKSKAITAAAHKLARLIYAMMTKGTEYVDRGQDYYEERYRERVLHHLKRKAEAMGFRLEPVADGGNNLAHSVT

SEQ ID NO: 470416 - protein, 422 aa, unidentified
MKNSTAKKLKQVPEGYLIIGVDPHKKKHAVVVMTQGAIVQTKFKFNNSRNGFEEVLQRARAEMLKTGSRGVIFAIETASHYWRNLAYFLDDHGIPFRLVNPFTLKRRREGEDINRRKNDFRDAEMAAELLRTGKFTETRLLYGVYAQLRATYNAYRRLVKERTRYTNLLKGLLDGLFPEFTQVFKNPCGKTALAVISLCAVPEFIAGMKLEDFVDNIRKEFKGRAPKVQKLHAIHSIAGTSIGIGAAAESVSVELSLLVQRIRLNTEQMERIEDILVKLVSSIGDSRYLLSIRGLSYITVAGLLAELGPLSFYQNAKQLIKMAGTNPTESESAGKRGSRTPMSKKGRPGLRWCIWTAALSLLRHNPDFHYWAEQRQERPVQSHPLKKREVIGATANRLLRLAYALVRKQVLYQVPQMTGVTA

SEQ ID NO: 470417 - protein, 365 aa, unidentified
MKKIAHLGIDYHLSFLMIGMMVEGNKEPDEMIRLRNDDKAIRKYMSKLSEKYEIRACYEASTNGYAFQRKMASWGYHCDVIAPSLIPKKPSDRRKNDFRDARDLVQNYAAGRLSIVHLPSEQEESVRSLVRCRYAFKEAAKRVKHQINSFLLGQGQCWKRAKWTQQHRQWLLKLEMPYAYLQEVLSEHLAHLEYLETRLDHLDEEIGKLAESDLYAPSVKKLRALKGIQTWAAMVLIAEITDFRRFSNPRALMAFLGLIPSEDTSGDKRKGGPITKAGNSRCRTILIEAAQHYANSPRISARMKEDLSQVDGPTNVIALKCVARLHKRFWALSRKGKLRPVAITAIARELVGFIWAIMQPQPVVA

SEQ ID NO: 470418 - protein, 393 aa, unidentified
MRIAIGIDIAKEAHWVTALTEHGDVVLDRRVANTPPELVTLLDDLVALGGDRTIGLDVVGGIASLVTAMLLDVGEPVVHVPGLAVNRARQGTTGGETKSDPRDAHVIAEQVRTRHDLRPLAVEEATTVELRLLVGRRRDLVAEQTRRLARLHDLLVTIHPGLEHRLDLTTKGALFLLTRYVTPAELRRVGRARLERFLRTCPHLPNRRALAAQAVEAAQEQHLALPGEAVAATLCRELAIEALRTRERLAELDQQLAEVLTRHPDGALILSLPGMGVTLSCEFLVEAGNLARFASPDALAAAAGLAPVLRQSGKVRFLRRPLGGNKVLKRVFYQSAFCSLHCPASRAFYERKRREGKRHHQALIALARRRINVLWAMLRDREPYQLRAARPAA

SEQ ID NO: 470419 - protein, 411 aa, unidentified
MELLHARCAALDIGKKDLKACVRLPPLAGRKARRQEIRTFATTTGALLELRDWLVDQQVSLVVMEATSDYWRSPFYLLEDALNVILVNAAHARGLPGRKTDVADAAWLCQLGECGLLKASFVPPEPIRHLRDLTRYRAALAAERTREANRLEKELEDAGIKLSTVASDILGASGRAMLQALIDGEQDVHVLAELAKTRMRTRIPDLVAALTGNFRGHRAFLCRIHLQRIDQITASILQLSARIEEAMRPFAAQLELLTTIPGIGRSGAEVIIAETGGDMTRFPTAGHLASWAGTTPGHHESAGKRKPARTRHGNRHLAATLGIAALSASRTKNTYLGARYRRLIGHTGKKKALVALQHSILIATWHMLTGNLAYHDLGADYFDQLNPDRAKHRAIAQLHRLGYQVELTPAA

SEQ ID NO: 470420 - protein, 321 aa, unidentified
MAQNDLVVVGIDVAKDKVDACIRLRSLRLTCLSRPEGYRKMVSWLRKHQVNKAVMEASGGYERGWAQVLREAGIEVRIVDPKRVRSFALSAGRLAKNDAIDAEMIAWFAETFSEAPSQAHDAAREELAALVKARIGLIELKTRLQNQSGHAAPGTVQKAHARVLKSLVVEIEKLEAAIAAKVAATADFAERAGIIESVPGFAETTAANLIAGMPELGKVSDKIAAALVGVAPYDDDSGKRRGERHIKGGRRWVRNAIFMPCVGAATQNNPVLKAYYQRLIAKGKASQGGARCLHAQADRHPQHLDCTTSEMGSQPLRAELR

SEQ ID NO: 470421 - protein, 477 aa, unidentified
MKHAKSSPCARAIPPRGGQLSRKERRELARQIQSDQVTLQIVHANAAGIDVGKNTHYVAVPPDRDAEPVRYFESCTDGLQQMVAWLKKCGITSVALQSTGVYWIALYDLLQEADFEVYLVNARYTKSLPGRKSDVQESQWLMKLHTYGLLPNSFRPPQEIRWLRSYWRQGQNHLRSAASCIHRMDKVLTEMNVRLSSAVTDLSGATGLAIIQAIVDGEQDPHKLAAHRDPRVKATQEEIARQRHGNWQADLVFRLKQELQAYRFYQTLIAECDRELAKLLRAFPDRSAGVELPAETRKGRRKKKRGNSPQFDLRQLLYLMSGVDLARIDSIDVITAMTVVAEAGYDMSPWPTADHFVSWLRLAPDNRISGDKIIGKGRTPTQNRLTQALKMAASSLKSSKTYLGAQYRRLRARRGPAVAVKAMAAKLARLVYNTLRHGMEYVDRGTEFYEQQQQQRRLHALAKNAAQLGFQLVPVVS

SEQ ID NO: 470422 - protein, 346 aa, unidentified
MEHYVGLDISLKLTAICIVDRTGKIQREGVVPSDPEAIAAFIESHSSNVARVGLEAGATSTWLWTELNKLGLPVICIDARHAKAVLKMQINKSDRNDAVGIARIMQCGWYKEVRVKDLDSHAVKALLVSRALLVKIKRDLENQIRGLLKNLGLVIGRAKMNVFAARAAELIQDRPELTAAVIPLLKTREVIERQIADLDRKVLRLARNNALVRRFMTVPGVGPITALCYLATIDDATRFKKSRSVGAYAGLTTRRYRSGEIDWTGRISKCGDAMLRTYLYEAANVLLTRIAKWSALKSWGMRIAKRSSLRKAKVAVARKLAVILHRMWVDGTEFNWSSKEVAAHGA

SEQ ID NO: 470423 - protein, 369 aa, unidentified
MNDITYVGLDVHKATVCVAIAESGRGGEVREVGIFENRPDVLRKMVARLGKQRHRLSFCYEAGPCGYGLHRLLTGLGHDCVVVAPSLIPMKAGDRVKTDRRDALMLARLHRAGELTPIWIPDAAHEAMRDLVRARATAVRALSKARQHLQGFLLRHDRICHEARAWTLAYRRWLTTVRFDHPAQQIVLQDYIHTVEDAECRRDRLTRQIEELMPTWSMAPVAAALQAMRGVALVVAVTVVAEVGDFRRFTNARQLMAYLGLVPSEHSSGSTVRRAGITKAGNALARRVLIEGAWTYRMSARVSRKLHDRLEPLSAAIRDIAWKAQVRLCARYRRLAATGKPKVVVTTAIAREMVGFIWAIACVAQPELT

SEQ ID NO: 470424 - protein, 375 aa, unidentified
MNNDSTVFVGMDVHKDSIVVAYSVGFGEVEVIGKIAPRVSDIDRLCKRMQSKASNVVFVYEAGPCGYGIHRQLTAKGYPCMVCAPSPIPRKPGERVKTDRRDAAKLVRALRAGDLSPVHLPTVEDEAFRDLVRAWGAARQDLKQARQRLKAFLLVHDVRYSGRADWGPAHRRWISGYSFNSPWQQLAFEEHRRTIEDRLAQCTRLETALREMAPQWRFYPTIQTLQALRGIQFTTAIGMLAELGDLSRFDHPRQLTAWLGLTPSEHSSGQRRRLGSITKAGNGHARHLLVEAAWSYRHPAKVSPAIQQRHDGLPKAIIDRAWDAQLRLCKRYRRLVARGKHPNVAVVAIARELAAFVWDIARMTRRPSEPQSHTH

SEQ ID NO: 470425 - protein, 314 aa, unidentified
MSTEYFVGIDVSKDTLDVCVYPTQDTYRVPNSPDSLDELIKRLKPIEPRLIVFEATGGYETLAVSTLAAAGLPVVVVNPRQIRDFAKSIGRLAKTDVIDAGVIARFASAVRPELRPMKDSPSQELTGLVTRRRQIVEMIVAETNRLTAATRRNRRDIQTHIRWLQKRQAQIDDEIKRDIQNGPLWRTTDQILQSTPGVGPATSAMLISCVPELGQLNRKKIACLIGVAPLNRDSGRYKGRRTIWGGRAQVRSVLYMSALSAIQFNPIIRQFYQRLREAGKCFKVAIVACMRKLLIILNAMVRNQTKWRHCEINR

SEQ ID NO: 470426 - protein, 347 aa, unidentified
MSVSAQYAGRHIVGMDLHRRRSVLVRMTETGEHLETVRISNDPEYLRQVMERAGEHPEVVLEATYGWYWAADTLAELGAHVHLAHPLGVKMFSLRRVKNDQRDAADLADLLRMGRLPEAWIAPPATRELRGWVRHRAKLVGLRSSVKCQIHAILAAAGVQVPMSDLFGASGRQLLAAARLAPESRARVDSLRRLIEALDFEIDLFATLVARRLREHPGYRALLQIPGVGPVLAAVFVAEIGDIDRFARPAQLASWAGLTPKHHESDTTVHRGRITKQGSRLVRWAAVEAVQRVPAHTRLGQIRDQVGGRRGRNIGVVAAARELTELVYFGLRDGDIRRLSTPPRPTA

SEQ ID NO: 470427 - protein, 360 aa, unidentified
MKVQRTSVGLDVHARSVVACGLDGDTGEVFSRRLTPDHAEVLAWLRSLPGRVAVTYEAGPTGFGLARFLAAAGVLCLVAAPSKLQRPSGDRVKTDARDAAHLARLLHLGQITEVVIPTVEQEAARDLARARDDCRVDLMGARQRVSKLLLRQGIVYYGGQAWTGKHEMWLHGQRFDNPALTLAYEAALDAMVACVHRRDRLDAAIAVMADDSEFTPVVRRLGTLRGISTLTAFGLAVEIGDWSRLSGRSIGAYLGLVPCEYSSGTTRVQGGVTKTGNGHARRLLVEAAWHHRPPYRPGRDLRRRWDQAPTGACERGHAANHRLHHRWASFDQRKKRPVVANAAIARELAGWCWSLAVMPD

SEQ ID NO: 470428 - protein, 314 aa, unidentified
MITEEVHVVGVDVSKATLELGSLSLTLPASIPNTPAGFKILLKSISKCITPVHIVCEATGPYHGPLVRFLHQAEIKVSVVNPRLTRDFARARGRLAKTDAIDALLLADYGRTMKPDPTTPPEEHVVLLDELVTRRAQLVEDRARERNRLEQAKSCPDVAASLRLHIRHLDEQIKKLLKRIAEVVEKHPSLKAKVSLLAQVHGIGTLTASVLLATLPELGTLSKNEVTALAGLAPFNRDSGAFRGKRSIHGGRIGVRCAIYMSALCASRGNPILKAFYQRLRAAGKPHKVALVAVMRKLLIYLNSLLKQHSLSPA

SEQ ID NO: 470429 - protein, 400 aa, unidentified
MLSIGIDVSKGKSTVCGMKPGGEIVYAPFEVQHTREGMLELVSLLRSSGEEVRVVLESTGSYHCPVVAALLENGIFVSVVNSLRMKRFCSQSIRKVKTDRIDAMQIALYGLAYWQELQPTKLPEDTYRELQLLARQYYQMTSMLIKAKVDFNAICDQVLPGMQELMNDHAGRHKLSDFVLRYRHTTHILEMGETRFRKDYCKWAEKKGYRNCERMAALIFATAQNGIPVLPNAPSTQIVITEAIRVLHTVEASRDAILTQMQALAKTLPEYSLVREMPCIGDTLAPRLIAEIGDVRRFHSKRALIAYAGIDAPPYQSGKFCANNRHISKRGNRYLRKTGYEVMQSYVMHKPANDPIFTFIEKKRGEGKSGKLAMVAGLNKFLRVYYGKVTELYRSLPAIE

SEQ ID NO: 470430 - protein, 348 aa, unidentified
MLADQLDYVVGVDPHRDSHALAVVHVVSGLVVFEATVVASSDGYAHALKLVDQHAPGRRAFAVEGTGSFGAGLTRFLTGRGEWVLEVGRLRRERRSGGKTDALDAVRAARSVLTSDRPATPRAGGERQALQALVAAREGAVNAKRAGLCQLRDLLITTPEPLRSQLRPLTRARLLQRLAATRPGGGRDPELRGSMLALRSIARRVLQLTAEERALAREIEALTRTLAPQLLDQPGVGPHAAAQLVLSWSHRGRIESEAAFARLAGAAPIPASSGQTIRYRLDRSGDRKLNRALHMILVTRKRSHPATIAYIERRLQEGKTRREANRCLKRYLARSLYRLLEHGAPLET

SEQ ID NO: 470431 - protein, 427 aa, unidentified
MKKADLLSTLFVGIDISSRSNVVAFLDFESQKPLQNFAVGNNQPGAVELANRIATYLRSRKDLSQLVVALESTSFYGVHVANFLSSCEVLAPFHTAVYCLNPKAIRNYKKSFIDLGKNDYVDAFVIADFARANRITTKPWRGSQFLALQRLTRHRLHLAKSLTREKAYMLSNIFLKFSEFSLLNVEEQPFSNSFGVTASSVLTDFLSTEEIIEMPTEDLIRYICEKGRNRFPDPEKTASLLQQAARNSYRLDKCLYEPLTVSIASSFTLISTYETEIKAVNKAIEKTLKGIDPTAYQCLLSIPGIGPVMAAGILSEIGYIEAFRNQEALAKYAGLVWRENQSGKFQADDTPLSKAGNAYLRYYLIEATSHVKNHCGEFAAFYQKKYDEVKTHQHKRALALTARKFVRLIFGLLANNQLYSSRVVKIQ

SEQ ID NO: 470432 - protein, 415 aa, unidentified
MEIRYPRVAAIDIGKKEIAVAVRTPGDRPGERTQQIRKYKTFYPVLRQMVAWLVEQGVTHVTMEATGVYWKPVFHALGEVDSLEVLLVNARHVKNLPGRKTDAKDAEWLAQLLECGLLRGSFIPPKDIAAIRELTRYRKKCIQARTRELQRLSKVLEDGGIKIDSVASSITTLSARDMVEALIAGQRDPKVLAEFARGVMRKKIPDLTMACAGRFGDHHALLARMHLDHIDQLTTMIDGLNTTIEEVVDPFSEQLRLLNTIPGIGDGAAQVIISEIGVDMSRFPTAAHLASWAGLCPGNNESAGKRKSGRTGKGNAEIRDILTECAWSASHTGTYVGAQFRRMHRRFGKKGGGKAAIAIAHTLIVITWHVLHDQVEYRDLGSDYFTRYDNPDAKKQRLIRELQALGHKVTVEPAA

SEQ ID NO: 470433 - protein, 335 aa, unidentified
MKHYAGLDLSMESTQVCIVDDNGRKVVSEKVESSPEAIAMMLERYGQIERAVIETGRMSPAICLGLRELGVPVVCIDARQAHQSLKAMKANKTDPHDAAGLAQLARTGFYKEVHVKSPAAHGVRSVITARSHLVEARVRLDNTIRGLCATFGYRPGAGQGKAFLERIMQAAHIPGLGDAIASLLSVRAELVEQIKEMDRRLRVIASQSQACEILMTIPGVGVQTSAAFAAAVDEAGRFRQSRNAGAYFGLVPRRHQSGELDWTGRITKQGDSTVRKLLYEAANSILTRSRETFALKTWAMKIAKRRGLKKARVALARRLAVIMHAMLRDGTLFQA

SEQ ID NO: 470434 - protein, 405 aa, unidentified
MQYIEGCAGVAGTEPHAWETGLMDTITYVGMDVHKATVSVALAEAGRGGEIRQFGVFENRPETLRKLAARLSKGRRRLSFCYEAGPCGYGLHRLLTGCGHDCVVVAPSLIPLKAGDRVKTDRRDAMMLAKLHRAGELTAIWIPDAAHEAMRDLVRARATAGRVLSKARQHLQGFLLRHGQIYRGVRAWTLAYRRWLTTVRFAHPAQQIVLQDYIHAVADAEARRDRLTRQIEELLPSWSMAPVVEALQAMRGVALVVAVTVVAEVGDFRRFANARQLMAYLGLVPSEHSSGSTIRRGGITKAGNALARRVLIEGAWTYRMKARVSRKLHDRLEPLPAEVRDIAWKAQVRLCARYRRLAALGKPSVVATTAVAREMVGFIWAIARLAQPAVEDQRTQRAHAEAPRC

SEQ ID NO: 470435 - protein, 423 aa, unidentified
MKNSTARKLRQVPKEYLVMGVDPHKKKHAAVAMTQDFTTHSKFKFNNSRQGFEVALERARAEMMRTGSRGVIFAIETGGHYWRNLVYFLDERGIPFHFINQFTLKRRREGKDLNRMKNDYRDSEVAAQLLCTGEFTDTKLQHGVYAELHAAYNAYRRLVKERTRITNLIKGLLDGIFPEFTQVFKDPCGLTALSVLSICPVPNIIAQMTEEEFVNAIRAKHQGRLLKKRLRALHYTARTSIGIQAGAWSVSSEISFLVEKLCLIRRQIRSIDETLARLVDETEEGKYLLSIIGLNYISVAGLLAELGSFRSYRSAKQLIKMAGSNPTESESGGKRSAHTPMSKKGRPVLRYCAWTAVIPMLRFNPDFRAWAKKLRERPVHANPLSGREVVGAALNKLLRLAFALVKKQTFYQVPQPEVAQVAI

SEQ ID NO: 470436 - protein, 315 aa, unidentified
MIQTTFVGIDVSKARLDVAILPGGETFAVANDRCGLEGLVGRLRGLSIGVAVMEATGGYEFDAWTALSEAGLPVAVLNPRQVREFARATGRLAKTDRIDAEVLARFAEAVKPEPRLLPDSATQALRELVRYRRQLVESLTQTKNRLRRAIITRDELMGQADFLQRAIRQADRRIATLIEHEPATKARAEALRSVPSVGPALASTLLAELPELGCLNRKQAAALVGVAPLNRDSGTLRGRRTVWGGRAAVRSTLYMAAVVGVRHNQTLRAFYTRLTERGKPPKLALTACMRKLLTILDAIARSGRAWSPSRAGLTS

SEQ ID NO: 470437 - protein, 375 aa, unidentified
MKAKVRFLGLDVHAETITVAVAEPEGEVRSLGTIPNRAESIRKLVRKLGPAEQLRACYEAGPTGYVLYWQLTQLGVACAVIAPTLVPVKAGDRVKTDRRDALKLARCHRAGDLTAVWVPDQGSEALRDLVRAREAAKQDQLRARHRLGKFLLRTGRRPALGVKAWTEKYMAWVRQLGYVQPAQTAALLDYVHEVEHMGERVRRLEQAIAEAVKQAPPVMQKVIQGLQALRGIAAISAVTIVSELGRISRFEGARQLMGYSGAVPGEDSSGKRTRRGPIAKTGNAHLRRIAVEAAWSYRLRPGIGPALRKRQEGVPEQIRQIAWKAQHRLHMRYLRLAAAGKDKRKIVTALARELLGFIWAIGVKTETTTTQQMAA

SEQ ID NO: 470438 - protein, 345 aa, unidentified
MQLHTIGIDLGKTVFHLVGLNQRGEVVVRKKFSRKQLLHFTANLQVELIGMEACGGSHFLGRALREQGHEVRLMPAQYVKPYVKTNKSDYIDAEAIAEAVERPKMRFVPIKSDDQPDLQSLHRVRERWVMRRTAVINQIRGLLLERGITLRQGRRHVDAALPGILEDACAKLSGAVRVLLMQLKLELDHLQIRIDEADAMINKAAAENDACRRLVAIPGIGPVTATVIIAAIGNGAAFKKGRGFSAWLGIVPGEYTTGGKQKLLGISKRGNSYLRRLLVQGARAVLQQRAKQSSGLNAWLAQLTTRTHSNVAAVALANKLARMAWAVLAKNETYRPPLLVGAVTP

SEQ ID NO: 470439 - protein, 325 aa, unidentified
MKSQNLICGVDISKDTLDLYYNDLTGKEYYLKLSNDTKGHCLLIQKLGIQRTYLMESSGPYYLKLAYTLKQKGADVRVENPIVLKRFIQMNLERNKNDRKDAMWLYRYAKERNASEWKLPAKEQLKCTQIMGSMDLFTRQLTMIQNQIHSLQQVPVICKEVIKSLEKIKQDIEKEIKKLEVQLHTLLQTWQGGQLKNLSSIPGLGKRAVALLIVYTDGFKKINNYRQLIALAGLAPREHTSGSSIKARKGICKMGNGYLRNVLYMCSLSAIKHNVACKDLYGRLKEKGKRGKVALIAVCNKLIKQAFAIATKGTTYQSNYKSSLA

SEQ ID NO: 470440 - protein, 333 aa, unidentified
MQYPTIGIDTAKDVFHLIVADPMGRPVKRFKLRRHKLSAFMANQPVSRVFLESCAGAHHWARKFSGQGHTVEQIAPQFVKRYRDGDKNDHNDAQACVEAGLRPTVRSVGTKSLEQQELQALQRARTLALGQRNAVGNQLRAMLAEFGIVIARSIGALRRRIPEVLEDGENELTDGMRQLVAEEFERWKALAERVETLKAQIGRATRTDATMRRLQDELIGVGPLSAAGLWTAVADPGAFVRGRQFAAYLGLVPRQHTTGDRPRLLGIRKGGQNELRALLIHGARSAIRHLGDKDDAQSRWLRAVIERRGKNRAAVALANKNARQAWAILSQAT

SEQ ID NO: 470441 - protein, 369 aa, unidentified
MGKYSEAFVAFDVAKKKHAVAVAEGGRTGEVRFLGDVENSPLPIERTIKRLTERYDRLHVCFEAGPTGYGLYRQVQALGHDCMVVAPALIPKRSGERIKTTRRDAVTLARLHRAGELTGVWAPEEAHEAVRDLVRAREAAADELRRKRQQLLSFLLRHSRIYSGGGHWTLAHRRWLANQKFEHAAQQIVFQEGVDAIEDALQRLRRLEKQLTLIVPEWSMAPVVEAYQAMRGASFLVAVTFAAEIGDVRRFDTPRQLMAFLGLVPAESSTGETIRRKGLTLAGNRRARRALVEAAWTYRYPARVSDTLRARLEGLPKPVRDIAWKAQVRLCARYRRLCATGKKLPIVVAAIAREMAAFLWAIGREVAPR

SEQ ID NO: 470442 - protein, 411 aa, unidentified
MNPVVGLDVAKGESQVQMFLDKKMPYKNSVKVAHTVDGLKELHSYLLDLERETGMKPPVVLESTGHYHSPIVQFLEAKEYIVIIVNPLVSYRAKSSNLRKTKTDVIDAYHLGEMYYKEDLEPQKKRGIQLLNLRHLTRQHENMTGVMVQTKLQFQAVLDQVFPEYKGVFGSLYADISLKTLQNFPTSESVLEASVEEITQFINEHCKARSLKWAHQKAEELIEAAVRNPFQSTLYHSLLVSLNMYIDLLQAYHQQLSTLEREIDELAVQLKEYELLQTIPGVGEKIAATIISEIGEIERFSHPKKLVAFAGLDPSVFESGRFKGTKNHITKRGSARLRRMLFTAVRCSIRDNRKQKTTDETIARNKRLRAFYDLKREEGKPYKVAIIACANKLLHWIYAMLKTKTSFQETI

SEQ ID NO: 470443 - protein, 331 aa, unidentified
MMSAPIEIQPVLEKKLQMIGVDVAKQKLDISVDDNTTLTIDNDEASFKKLLKSLPDRGQFCVVMEATGGYERKLVAFLQAREIAVAVVNPKRIRDYAKAMGAYAKNDRIDADMIRHYAQTAYDKNRLQLSETLSEAARRRDNLLRRRNQLVGQRAIEKQHLESATDKDTVRSIKRIIKQLDKEIDKIEALIKADIDADDGLKKSMKQLMQVPGVGDVTVLTLLIHLPELGKLSNKEIAALVGVAPYARDSGKKTGRRAILGGRMQIRSTLYMATLSATRFNKPIRIFYQRLLAQGKLKKVALVACMRKLLTMLNSMAKTGDEWNPDFAKQA

SEQ ID NO: 470444 - protein, 450 aa, unidentified
MEQIHDRIVGLDVHRDQVTACVRIPGPRGGARTEKGRFGTTTGGLNALAEWLSGHAVTLAAMEATGVYWKPVYYVLEDRFQVWLCNAHHVKNVPGRKTDMSDAEWLADVAAHGMVRPSFVPPPPVRELRELTRYRKTQVDARAAEIARVEKVLQDAGVKLTSVASKVLTQSGRAMIEALIAGERDPAALAGLAKGKLRPKIPQLTEALDGHFGAHHAIVAARILTHLDSLDDAIAVLDGQIAARVAGRYQSAARLLADVPGLERRSIEVIIAETGADMSCFPSPAHLASWAGLCPGNHESAGKRRRVATTPGNQWLRRTLIESARAAARTRDSYFGAQYRQIARRRGPNKAAVAGRPQHARRDLAHAHHRRGFHRPRRGLFHQPPGQGAPDPAPGQAAGETRLHRAARRGHRIAPPETPQARAPPRPAAARPLASAFHPRSSTGCSATSP

SEQ ID NO: 470445 - protein, 400 aa, unidentified
MLSIGIDVSKGKSTVCGMKPGGEIVYAPFEVQHTREGMSELVLLLHNSGEEVRAVLESTGSYHCPVVAALLENGIFVSVVNSLRMKRFCSQSIRKVKTDRIDAMQIALYGLAYWQELQPTKLPEDTYRELQLLARQYYQMTSLLIKAKVDFNAICDQVLPGMQELMNDHAGRHKLSDFVLRYRHTTHILEMGETRFRKDYCKWAEKKGYRNCERMAVLIFATAQNGIPVLPNAPSTQIVITEAIRVLHTVEASRDAILTQMQALAKTLPEYSLVREMPCIGDTLAPRLIAEIGDVRRFHSKRALIAYAGIDAPPYQSGKFCANNRHISKRGNRYLRKTGYEVMQSYVMHKPANDPIFTFIEKKRGEGKSGKLAMVAGLNKFLRIYYGKVTELYRSLPAIE

SEQ ID NO: 470446 - protein, 393 aa, unidentified
MICVGIDVAKDKHDCVILNSEGKALTGVFTIPNNADGFDTLLQKIHGCTSPDDKIKVGLEATGHYSYNILGFLLNQGLPTYVINPLHTNLFRKSMSLRKTKTDRVDAKTIAAMLMSNVDLKSYTDTAYHNEELKSLTRYRFVKVSERAQLKQSVSRLVTILFPELEKLVPTLHMSSIYALLIEFPGAKQITEAHLTHLKSLLKDASKGRYGRDMATEIRDAAKHSIGSVMPAKSLELRHTIRLIRELDSAIEDIESAIEAIMDEIQSPITTIPGMGFRMGAMILAEIGDFSRFDSPSKILAYAGMSPSTYQSGQLSLAGTYSHMEKRGSRYLRYALYNATKYVCHWDPGFAAYLAKKRAEGKHYNVALSHAAKKLVRLIYAMEKSRQPYKRAA

SEQ ID NO: 470447 - protein, 319 aa, unidentified
MAQNDLVVVGIDIAKDKVDGCIRSLSLRQTLPSTAEGRRKLISWLRKHKVTKAVMEASGGYERDWAKALREADIEVRVVDPKRVRSFARSAGRLAKNDAIDAEMIAWFAETFGEAKGQACDAAREKLVQIVHARQGLLDLQTSLQNRGEHAAPEVVQKMQGRLLKKIALELAGLEAAIAAMIEATPHFAERAAIIESVPGLGEITSAGLIAAMPELGQVSNKIAAALLGAAPYDDDSGRRRGERHIKGGRRRVRNLFYMACLGAATRHNPMLKAFYQRLLDKGKEKKVALVACMRKLIVILNTMIARGEKWDATRCAPS

SEQ ID NO: 470448 - protein, 372 aa, unidentified
MPQRSRVFVGLDTSKLKISVALAEEGRQGEVRFLGEIDNTPEAVRRLVGKLASRYSEVLFCYEAGPTGYGLQRQIAALGHECDVIAPSLIPKRPGERVKTNRRDALTLARLHRAGELTAIWVPDPGHEAVRELVRARDAAMADLRAKRQHLQSFLLRHGRLFPGRKPWTRAHARWLSELAFEHPAQYLVLREYRQGLEDAQARLERLTQQIAEVLTTWSMAPVVEAYQALRGVALVTAVTFVAEIGDVRRFESPRQLMAYLGLVPCESSTGERVRRGSITKAGNTRVRRVLIEGAWTYRFPARMSRLLQERQANLPQIVRTIAWKAQVRLCARYRRLMAAGKRQTVVTTAIAREMAAFLWAIGHAIEPRSAA

SEQ ID NO: 470449 - protein, 452 aa, unidentified
MKKAEVIRENLTASTWRELETNGKFGKNEKLSFVSDDMLILGCDVGSDTHYVRAIDTRGRELSKSAFPFSNTLEGFQSLMDWATKIAASNDKKQIILGLEPTGHYWFCLATWLIGNGISVVQVNPYAVKQTKEVEDNSQLKDDRKDPKLIANLVKDGNFGMPYLPEKLYADIRRLSMLRDQINEDRIRDLNRLHREMKIYFPEYKDAFGKIDGTFCLEVLKVAPFPEELVTLGVEGIRQIWHEAKLRGRGYVNATSIFENAKKSIGIQDGAESGKLAVKWFVHRMMESNEQLAEIESRLHQMCMEIPYAENILEISGIGENTLSGILAEMGDISRFDDVKEIQKLSGLGLVACSSGKHKGETKISHRGRKRLRYWLFQAAKSAVAHANEFKELHAYYTTRKDNPLKKKQSLVVIACKILRVIFAILTKGTPYDPKKMLGDIVRPNEQSVQVA

SEQ ID NO: 470450 - protein, 309 aa, unidentified
MDKIVGIDVSKDRLDVAVMPQTEAFAVGNDHAGIDELIGRLKTIGADAIALEATGGYETLAVAGLSSAGLTVLVVNPAQVRAYANAIGRRAKTDPIDAAVIAAFVLATKPEIRPLRDAETQALSELVARRRQIVQMIVAEENRLRQALAKQAQKSIKRLLAALRRELESLDADLDGHIRKSPIWRVRETLLVSVPGVGPTTARTLLAELPELGSLDRRQIASLAGLAPWTRQSGKWKGKSFIGGGRGKVRAVLFMAALVASRHNPSLKAFRDRLVASGKPKIVAIVATMRKLLTILNAIIRDARPWQNA

SEQ ID NO: 470451 - protein, 409 aa, unidentified
MNSILYVGIDVSKESNQVHAMNYDQKRLLYKSFPNSESGANDLEDALLKLLHKHELSSIQIVLETTGVYSAHIATYLSASDKLMPFNALVYLINPKISRNYRRSFSDMDKTDPKDAFVLADLARVDRLKLVKPFRGAQRLALSRLTRHRFHYAELLAREKTYVLNNVFLKFSDFTKVFSDNFGATAVEVLLEFKTTEEIINTSLEDLTEFLISTSKNRFNDPELIAKELKAAARNSYRLDKMAYDSINISIASSMNLISFYQSEIKALEKQILNLIKGLNNTYYNILKSIPGIGPVYAAGLLAEIGEIDQFPNDGALAKYAGLTWRKSESGNFKAQETRMTKTGNTYLRYFLIQAANTIRKSNAEFNLYYNKKFNEVTKYQHKRALVLTARKLVRLIHSLLRDNRLFQE

SEQ ID NO: 470452 - protein, 429 aa, unidentified
MTRISVGVDVSKNRSTVCIMDQDGKVIMRPFLVWHSTEELDFLADTLKRLNGEVRVIMESTSIYQYPIALHLKEKGIFISIVNAYKVKKFANTDFRGGKTDKKDSRTIASYGISYWDKLVEWQIPKDTYFNLDLLNRTYMNAKKHRQIILQELQHYIDCAMPGMDKELHSLNLSTKKDFMLDFVEKFWHRDEIVNMTEAEFTEVFTAWAKKKGYRPVEGKAAKIYAIAKSCIPYYPANPTVKTILQCIVDKLSGVNRTLVTIVTQMIEEAKKLPEYQIVREMPGVGDPLAARFFGSAGDIRRFKNSKALVAYAGIDSPPDESGDFSSTHRHITKKGSKVFRDTGYEIMMALRAQKRTWEKVRKNPEVYDYMLRKEAEEKPRKVAKIAALNKFLRIVYARIKELYDNMALAERAKAKTKSKTKAKTKATA

SEQ ID NO: 470453 - protein, 319 aa, unidentified
MVKMTQHTSIVAGIDVSKAHLDVYLHPDGSHRRFANDKTGWRALHKWLPATSLQSIVYEATGPYHKGVERYLAAHGLPIARLDPRRARRFAEALGVNAKTDPVDARVLAQFGALLEPAVRSLPGPALEQLKELVAARRGLVKQRTRIANKSKTATVPLLKRQFRNAREHTARQIEQIDAQCHQIVRIDPALAPRFDILMSIPAIGIVTAMTLLADMPELGSLNDKQAASLMGVAPIAQDSGAFKGKRHIRGGRALVRQAVYMAALVATRFNPDMKRKYKTLIEKGKPPKLALTAIMRKLIILANALIRDNRTWTEIRPC

SEQ ID NO: 470454 - protein, 394 aa, unidentified
MKLVGIDIGKHKHFVSIVDKLTGEIILQPVAFSNNAQGFEFLISQIALYPVDSVLIGMEDTGHYHFALLRFLLQKNYNVALINPKTTDLNRRMDGGITKNDKLDTLNICDILSSNKLKKPYRLTSSKKFDLYEQKQLTRLHHSLKEQINVLSNRLQKCIDLVFPEYNALFKSKYGKVYMSILKQFGSAKAIAQADIRTLRKCFDITGRGNRISLTAEKLKESAKTSVGISSLADEMQIKHLIAHIELLNDQLKEIDKKIEEFSTDLNSPIISVPGISHFSGTSILAEYGDIFNYSKPSKIIKAAGVAPFHYESSQYEAKHSAITKQGSSYLRKTLYQVIVPVIRFNKVFKDYYDLKRSQGKSHRCAQGHCIRKLLRVIYHLVTTNQQFDASLLR

SEQ ID NO: 470455 - protein, 331 aa, unidentified
MNHAGIDVSNETFDIQKRCGEVLSQREFSNSNAGHRQAIVWLQRGAEGARVCLEATGIYHLQLALALDRAPGIEVMVINPRAGRRFAEAQMVRAKTDKVDAAILLQYVERMPFTVWTAPSEQQLELQSLARRLAQLKKEQVRERSRLHAAQRAGTHTRLAQRDIREHLRYLKRHVERIQAAAIALMKQHDVLAEDLQLLDSVPGIAELSAMKLSAELGLLADGLLPTQWVAQAGLDPRPQESGTSLRSPRRISKQGNAQLRAALFMPALAAIRKDPNVNAFYNALLARGKQKMQAITAVMRKLLHAIWGILHHRQKWDGRKFYRIETVNIA

SEQ ID NO: 470456 - protein, 343 aa, unidentified
MEYYVGLDVSLKQTSICVVDQSGSVVREGVVDSDPEAISVYVRSKAPGAVRIGLETGPTSTWLWIELKRLGLPVICIDARHAKAVLKMQINKSDRNDAIGIARIMQTGWFKEVHVKDIDSHMVRALLASRALLVKIKRDLENHVRGLLKNLGLVIGRAKFNVFAARVEELIEGRPELIAAIRPLLEARNAVEQQVSELDRKVMKLARHDAQVRRFMTVPGVGPITGLAFKATIDDPARFARSRSVGAYVGLTCRRHASGEVDWSGRISKCGDAMLRSYLFEAAGVLLTRVPKWSAVKAWGVKLVKRNGLRKAKVAVARKLAVILHRMWVDGTEFNWSKKEIAT

SEQ ID NO: 470457 - protein, 352 aa, unidentified
MEQFIGCDAHKEYSVFVAVNEKGNAGEALRVEHDRQLYRKFLARLPPGSKIAVEASGHYSWLVDEMERSGHHPKLCNALEAKRRMGLTNKTDKLDARGLAILLRNGTLPEVWIPPSELRDQRELLRMRIFLVHLKTRVKNRIHGTLARHNVVVPGADLFGVASRLRLEARLPELPLHCREAVERELATLDFLETQIESAEHELEGIMKVSAEADLLKTLPCVGKILSMVLMLEIGRVDRFPTAAHLASYAGLVPRVHSSGGHTRMGQVCGNVNRNLKWAFVETGNLIVVNQRGLAGTHVVRLYQRIKRKKNHQKAVVAVARHLAEAAWWVLTKQEVYRDPRVARQALSSTHG

SEQ ID NO: 470458 - protein, 360 aa, unidentified
MTIVAHTHPYVVGVDTHARTHTFAILVAATGELVATEQFPSTRAGMDRAIAWAARRTGGDLATLWVIEGVATYGARLAATVSRAGYDVVEAARMDARAHRGTGKSDPLDARRIAAAVLSLEPTQLRQPRSDDGIRAALRILLASREHMTTERTATINALTALLRVVDLGIDARTAPTSKQVNEVARWRARVEDLATITARAEAIRLAKRVVDLDRELAANQAQMIDLIRSSKAAVLLDKTGIGPVTVAVVLATWSHAGRVRSEAAFAALAGVNPIPASSGNTTRHRLNRGGDRRLNRALHMAVVTRMTHHPQTRAYVERRRAEGRTTKEIRRCLKRYLARQLYRTLNALHDQPETGPQTT

SEQ ID NO: 470459 - protein, 342 aa, unidentified
MYYIGLDVHKKTISYCVKDARGRVQQEGKVGSTRRELDCWMAGLPQPWTVGMEATIFSGWIYDHLLPHAVEIKVAHPLMLRAIAAAKKKNDTIDAAKIADCLRCDFLPECHMMPRAIRDRRRTLRYRHLLVKQMVQMKNRVSGLLMETGVEHTKSRLHKVGYFHEMLSKNAEIDASIRPLLKLSRETIERCQKTEYALVSSLQRDPLLADRIRRLRTVPGVGPITALTWALEMGDVARFRTIRQAISYCGLCGDERSSADKVMRMPLSKQRNKHIQRVLVEAAKLAPRLSPELAMVHEKEKQKGNSNRATLAVARKMVAYLLAVDRQQREFIPAEQRGSRAA

SEQ ID NO: 470460 - protein, 359 aa, unidentified
MGLERTFVGLDVHARSVVGCALDTVTGEVSQRRLGTSAEEIRRWLAELHGPVAVTYEAGPTGFGLARDLRLHRISCVVAAPSKITRAAGDRVKTDGRDALLLARLLKLDEIVEVTVPSVAAEAARDLVRAREDCRADLMRERHRLSKLLLRNGVVFSGGQAWSGAHDAWLRRQSFDQPARQVAFESAYEAVVLTTGRRGRLDAAIEAMAADSEFTSVVTRLGCLRGVSTLTAFGLAVEIGDWHRFTGSSIGAFVGLTPTESSSGQSRSLGSITKTGNTHARRLLVEAAWHHRRRYVVGATMTRRWERADAEARSRGHQGNQRLHARWRTFDARSKRPSVANVAIARELAGWCWSLAVMT

SEQ ID NO: 470461 - protein, 359 aa, unidentified
MKKLIKEEMVTAQPTGNTVGLDLGDRWSRYCLLDANGSIVKEDRVRTTVDGIREQFGRMPGTRIILEAGTHSPWVSRELQNQGHEVTIANARKVRLIYESDRKNDRMDARMLARLGRVDTELLSPIQHRSAEAQADLAVIRGRDALVAARTQLVNATRGIVKSMGGRLPSSTTAAFARKVAASIPAALKSALNPLLESIRDLSEQIRQCDRRIEELAEKKYPETKLLQQVKGVGPLISLAYVLTLEDPKRFPKSRTVGSYLGLRPKQSESGDSAPQLGISKAGNGYLRRLLVQSAQYILSSLAPDSRLRRWGLELATRGGKNGKKRAVIAVARKLAVLLHRLWSTAEVYNPLYGLEPAA

SEQ ID NO: 470462 - protein, 355 aa, unidentified
MRRLENTDEFVAGKVVFAGLDVHKKHWVACIMCDGEVLEHLTIAGQYGHLQKLLERYRAAARIHVVYEAGFMGSWLYRRLHSDGYDAMITPSAKIPRDGSRVKTDRIDAEKLCRYLSAGLLKRVYVLPESVENDRFLIRRRRQVVRNQTRIKNQIHSLLFLSGLARPAHITRNWSKAHLLWLEQIPFRHSGQRISLDLLLAEYESVAHQLRLIKRHLQELSKHPAYRDDYRRLTSVRGVGLITAMSFLLEIYDFDRFANEKHFGSYLGLTPSQHSSGSHVRLGHISRQGNSYLRGLLIESAWTVIRYDDHLAAKYQRIKARGTNGKKAIVAVARSLAIRLRRCLLDESDYQLQTG

SEQ ID NO: 470463 - protein, 351 aa, unidentified
MPRTSTVHAVTAIGIDMGKNTLHMIGLDARGAIVLREKVSRGRIALRFANMPSCLIGIEAGLATHYVARELAALGHDVKQVPPAYAKPFRQVHKNDFRDAHAVAEAVQRPTTRFVPAKTDEQLDLQALHRVRSRLVSDRTAAINQIRGFLLERGIIVRQGLRFLRQALPDILAKRTDVLSPRMVRIVADLASDWRQLDERIEAVTDEIETLAKSDDGCRRVMTVPGIGPIISSAMIAAIGSGGAFARGRDYSAWLGLVPKQMSTGDRTILGRISKRGNGYLRMLFMQAARVILMRPASWPKHGFGTWLARAAQRLHPNVLAAALANKLARIAWTVLTQERSYEARVTMTAA

SEQ ID NO: 470464 - protein, 388 aa, unidentified
MPYRIAGIDVHKRMLAVVVADVEVEGEYQFERRLFGSNPEQLRLLAEWLIEQPVEEVVMESTAQYWKPVWGVLERYWKPIRQKREDASPMSGTLHLAQALSNRGRRGRKNDFRDAERLLKRLVAQELTLSFVPYAEQRLWRTVMRGKYQLTRDHARLRNRVESMLEEAHIKLSSLVSDLLGVSACTELNPVYRRLLKMALEELQFLEQQIGKLEQEMASLLSQHHEAVQRLAEVPGLGVDSAQQIIAEVGATAATFPSDKQLSSWVGACPGDEESAGVSKNHRSPKGNRHMRRVLNQCANAAVRVNGSIFEIVYRRLVPRLGHNQTIGAIAHRLCRLIWMILHQGIRYEERGRAVHERSKRVRTARMIRELRRFGYRVEPLTVQLNPA

SEQ ID NO: 470465 - protein, 465 aa, unidentified
MKHHRRQPSSKPRTSPSAFERLHPHAAGIDCGSAEHFVAVPPDRDPTSVRAFATFTGDLHRLADWLMGCRVTHVAMEATGVYWIPVFEILEARGFQVILVNARHVKHVPGRKSDVSDCEWLRDLHMLGLLRGSFRPADGIVALRGYLRHRATLIECAGALIQRMQKALVQMNIQLSLVVTDITGVTGLRILRDIVAGQRDPVHLAQHRDYRCRASEAEIAKALTGNYRAEHLFVLQQNLELFDVYQQQLASCDTAIEAHLAQLTATVTAPPTPLPAQRPRHKPRINEPRFDLRAPLHHLTGADLSQIDGIGPYNALRLLSEIGTDMTRWPTEKHFTSWLALAPTNKISGGRLLSSRTQPSANRAATMFRLAAVNVGRTQTALGAFYRRLAFRIGKAKAVTATARKLAVLVYRSLKHGLVYADPGAEAYDARHRAHVLRRLRQRAQNLGFGLIDLSTGEVVQRTVS

SEQ ID NO: 470466 - protein, 427 aa, unidentified
MNYNQNHKLSQITPKTLIVGIDIAMDKHVARAQDDRGFEFGKRLVFDNRIHGFEQLVDWISRLKKENNKSEVIVGAEPTGHYWLSLAYYLRAKDINYVLVNPMHVKKSKELDDNSPTKNDTKDARVIAQLVKDGRYSVPNLLDGIYAELREAIKLRDQLTKQLMIIEGRVQNNIQRYFPEFNDVFKEWDGKTALFTLRAFPFPSDIRAMTPEEVLAQWKTVVKRGVGIKRATHLVEKAKKSVGIEIGLRFAKKELHSLLDQYELHHQQLEELDEEIEELMQDVPGAKEMTAIKGLGPITVATFFSEVGDIMKYTHPQQIVNMAGLSLREHSSGKFKGQTRITKRGRKKLRKALYLAIRPLVAKNPTFKALHKYYTTRSTNPLKKQQSLIALCGRLARVLFAIGQKQCEFDGSKLLKGLPQIESLQAA

SEQ ID NO: 470467 - protein, 347 aa, unidentified
MHAGIDTHKDTLAVAVIDGAGRPVVVTELANTEAGFDALEKLLANHDVQRVGIEGSGNYGRGAAVHLVLTGPVEVVEVPPSLTSRERSARPGAGKTDPTDAVAIARITAREPGLPPVRLAIGRAADLRALADYRAQLVAERTALANRTHAELHGLLPGYQVKIPRLTAPTFITKATELLTGQTNVRAVLTRRRLTRLAELTVEIREVADLITAAVAEVDTGLTELYGLGKVGAATILGQVADVRRYRSRHAFAAANGTAPIPASSGRTSRHRLNRSGNRTLNRVLYTMAITQIRADTEGRAYYLRKRAEGKTGREALRCLKRRLSDVVYKTLHDDLSAGRAPTAAGR

SEQ ID NO: 470468 - protein, 345 aa, unidentified
MQYDAGIDVSLEQSSVCVVDAAGKIVKEAKVATDPHVLVTFFKGLGFPVTRIGLEAGPLSHWLYAGLTQAGFVVVLLETRHVKAALSAMVVKTDRKDARGIAQLIRMGWFRAVHAKSASSQEIRALLTARRLLLDKLRDVELSLRGILRGFGLKLGKVTQRGFETRVRELVANHPMLQQITRSMLLARATLQREHNTLHKALLKIVRRDRVCQQFMTVPSVGPIVAITYKTAVDDPHRIKKSKGAGPLFGLTPTRYQSGETDVIGGISRIGDAMVRAMLYEAANVLLSRTMRFSALKRWGLAVAKRRGMKRAKVAVARKIAVVLHRTWIDGTSFRWSNQKAAAYA

SEQ ID NO: 470469 - protein, 343 aa, unidentified
MQTIATIGLDIAKSVFQVHGVDAAGQVVIRRQLKRRYVLAFFQKVSPCLVGVEACASSHHWSRELQALGHTVRLIPPAYVKPYVKRQKNDATDAEAICEAVTRANMRFVPTKTPEQQSGLVLHRARHLFIRQQTAVINAIRAHLAEFGIVAPVGRHGVEELLNVVADPSDKRVPEIARACLSAFGAQLRRIKEQVLEFDRLIRAWHQSNEMSMRLDEAPGVGPVLATAVVATVADPKSFRSGRNFSAWIGIVPKQHSSGGKNRLGNISKQGDRYLRGLFVAGALAVIRYAKIHGTKHRPWLTALLARRPTKVAAIALANKLARMVWAMMVKGERYREPVALAA

SEQ ID NO: 470470 - protein, 388 aa, unidentified
MTQTPVSLPHPAAPDHNNTLVLAIELSNKSWVLAAQVPGLTRVKAKQTIEPTAEALLAALQGYRERAKAAGRHVERVIAIYEAGWSGFWLARLLATHGVEPYVVQPSSVLVDRRARRAKSDGIDAELLLRTLLAWLRGEPRVCSMVPIPAESDEDARRSVRERTELVAERVALVNRIGAVLATMGCGDYDPLLRNRRQRLGELRTALGTSLPPHAHAKINRMLDRLDLVRTQIAELEQDRDAVLQEEIPDKAGEMIQQLAKLRGIGAQSATVLVREAFVREFANGKALGSYAGLCATPYSSGGTDREQGISKAGNRRLRTVMIELAWLWQRYQPGSAEVNWFRARVSGAGARMRKVMVVALARKLLIALWRFATQGVIPGGAVMKPAS

SEQ ID NO: 470471 - protein, 433 aa, unidentified
MACRYTGIDWATQKHDVVVEDQAGVEVLAGTFTHDERGLLSLCRVLVRLDVGLVAVERPDGLLVERLLDGGLPVLPLHPNKVAASRDRFRVAGGKSDRFDAFVLCELARTDSHRFRVLEPDCDRTKAIRAMTRAREDLVKTRTAVMNQLRAELDRFWPGPLSLFSHIDAEILLAFLERYPSPRDARGLGVARLHAFLVKQRYSGGQDPTALMAKLRSAPQGRVGELELTTRRQVVLGYVAMIRTLNSQIKDLERQIRDHMRAHPDGRIFLSLFKSPASVITAAELLAEIGDCRQRYPNRDALAADAGQAAVAVESGKWKTAGFRRACNKRLRVAFCRLADSSRHWHHWAQDLYLQARQRGHEHPRAIRAVGRAWCRIVWQLWRNHTTNDPTRHRALQRHLTVTIPSPSGQVIDHATSLRMAGPGLWRPDLTTT

SEQ ID NO: 470472 - protein, 322 aa, unidentified
MERLSGMEREVFVGIDVAKAHLDVAFNGEADCARYTNDDAGISKLVEHLKSRQVALVVLEATGGYQRQALSELLAAGLPGVAVNPRQVRDFAKALGRLEKTDAIDAKVLALFAASIRPPSRPVVDDTTQEFQALLARRRQLMEMLVAEKNRLHQRSTKAVRKSIEAHVDWLKKQLRDTDKDLEDRLRDSPAWNPRVEVLESEPGVGRITSMTLLSELPELGTLNRKQIAKLSGLAPLNRDSGTRRGQRSIWGGRATVRTTLYMATLVATRFNPTIKSFYTRLLGRGKAKKVALIAAMRKLLTILNAKLRDHARGTNRNLLPT

SEQ ID NO: 470473 - protein, 357 aa, unidentified
MKQDTQLNFTGQNLYVGIDVHKLSWSVTIILNGMKVKKLSMNPEPKELFSYLTKHYPEGEYYSVYEAGFSGFWADRELRALGINNIVVNPADVPTKSKERRRKTDRVDSGKLARELSVGHLDGIYIPEEKAEALRVLVRLRRQLVTDQTRQKNRIKSLLLFLGQRVPEDVEEKHWSKKYISALRSLPIKEEESKRALVELLNNLESTRNQIASVVKQLRSYVAKDKEISNIINLLITIPGIGFVLSIILYSEIIDIKRFGRLDELAAYVGFSPAVYSSGEKEITLGLSKQKNKYIRNFLIEASWVAIRRDSALQMAYGKLCERMPGNKAVIRISKKLLNRIRYVWSKQQPYIFSVVK

SEQ ID NO: 470474 - protein, 331 aa, unidentified
MTKNSAESFVGIDISKMYLDVAVWERPESWQYRNDGEGIAQLIIRLQGLPQPLIAVEATGGLEVPMVTELNRAGFRVAVINPTRIRHFARAVGQLAKTDKLDAQIIARYAHTVNPEVRPLRTDELERLNALVTRRKQLVDMLTMEKNRKATTRGQMQARLQTHIDWLKAELASLNKDIDDVIQNHPVWNKKGQWIRSAPGVGPVTTSVLLAQLPELGTLNRQKIAALVGVAPLNKDSGPKRGKRRVFGGRVLVRNTLYMAALCATRCNPVIRHFYQNLIARGKEPKVALTACMRKLLVILNAMVRQQQCWQPKPVPAYSLVSEPIPAYSLL

SEQ ID NO: 470475 - protein, 322 aa, unidentified
MINQTESQWVGIDVSQAKLDIALRPSSITGQVSNQESGWKELIEQLKVQTIELIVIESTGGMERGVVQKLQKEGFKVAVINPKRARDFAKASGRLAKTDRIDAEALAHFGQALQPAPKPLASESEEALSDLVNRRGQLVEMLNSEQKRLHSVRNSSAKADIQTNIEWLKQRMKGMDEQIDQLRKESEDWNKQYELLTSVPGVGRVTAVTLLSMLPELGKLPFKKLSSLVGIAPMNCDSGKMRGKRRIMGGRAMVRSVLYMSALVAVQHNPVIQDFYQRLLKAGKVKKVALIACAHKLLGFLHAIVKNQTPWLNPKDVAAISP

SEQ ID NO: 470476 - protein, 308 aa, unidentified
MSYVGIDVSKDRLDVHVAPAGEDWQVSRDAAGLDELVARLTGVMPECIGVEATGGYETVVAATLAAAGLPVVVLNPAQVRHFANALGKRAKTDPIDAAVIALFIKATTPAIRPLPDEATCTLADLVTRRRQIIAMIVAERLRLKRASSKRLIKSITRLLAALQKELSDLESGIDEAIKASPVWKDKEDLLASIPGIGPATARTLIAELPELGSLDRRQIAALVGLAPWTRQSGKWRGKSVIGGGRAQVRSALYMAALVASRYNSVLKTVYQRLLSAGKAKKVALIAVARKLLITCNAIIRTQKTWQST

SEQ ID NO: 470477 - protein, 350 aa, unidentified
MKRTRVHWIGLDVHCHSCDVAVLDPAGRLVRRDRCPTSIPALVEAIEAVPRPRHVVLEEGPLADWLCRNLGSHADEVVASDPRRNRLIAEEGDKDDPLDAERLAGLGQGGYVKAVHQAGTLARSVFKQHVALYHDRVRHRVGEAHRVTGLLRRHGVMAREKDMAGREERDGLLARLPASALLRSDVVLLWRGYDAAVEQEEQTRRQLVRLAREDEAARRFETLPGIGWVRAATLLAFLDTPWRFRSKQALWRYLGIGLERRKSGNGPERLRVPLRTNRLLKTTILGAARSAVLQGENPFADQHRRWTGEGLSPRLARRNVARSLAAVLWGVWKSGNAYRPDWVGRATVPA

SEQ ID NO: 470478 - protein, 308 aa, unidentified
MTSNIQYIAIDIAKQTLQVQSDLKSLSLNYDEVGLKQLRAFIKQHERPMIIAEATGGYERPLMSMLFKYDITVALINPRLARAFAVSEGIKAKTDPIDAEMLLRFAKEKNPRPTEYIGAEREELGALMDRRSQLTEHIAKEKNRLDKSPKSICGSIKKMIRLLDKELALIEARITKLIDSNEQMKAQSKLMQEVCGVGTNTAWSILAYLSEITSLNRNQLVALAGLAPYNRDSGKYKGKRSIQGGRAKVRATLYMAATSASQHNAVIKDYYQGLKARGKPSKMALVAVMRKLLIHLQSILKKQQLVLD

SEQ ID NO: 470479 - protein, 397 aa, unidentified
MYIVGIDIAKRKHEAAVIDGEGAVIIKPFSFTNNCSGYNRLLAMLAKAKLPLDEVSFAMEATGHYWLALFTRLQKEGFRVQVINPVQTNSIRSFYIRQAKTDPRDALLIAEVIRFGHFSESTLHPENIYELRELCRGRHAIVSMQADVKRKVVALLDQVFPEYETAFTNMFSDTSMAILQTCPTPKELSEIPLEELCHLIEVSSHKRFRMAKAQELQALARNSFGFAMAGDVFSTMIQLYAKHLVFLKQQVREMDRKIAEIMETLDTPITTITGIGPTLGAYILSEIGDISRFSSAAKLAAYAGIDPTMRQSGEYNGVRNRMSKRGSPYLRHAIWLAASSAVLHDPALKLYFQKKRDEGKPYMASVGHACRKMVSIIYAVMRGNKAYTPCIPNEISA

SEQ ID NO: 470480 - protein, 319 aa, unidentified
MAQNDLIVVGIDVAKDKVDACIRRFTLRQTFPNTAQGHRKLVAWLRKYKVGKAVMEASGGYEREWRNVLHKAGIEVRIVDPRRVRSFAQSAGRLAKNDPIDAEMIAWFAETFSQAPGQIPDAAREELAALAKARKALVDVKIRLQAQNEHAAPEPARKACARVLKSLAAEIDKLEAAISAKVKATPEFAERAEIIESVPGLAQATSAILIAGMPELGQVSDKIAAALIGVAPYDDDSGKRRGERYIKGGRRWVRNAIYMPCLGAATQCNPVLKAFYQRLLAKGKEPKVALVACMRKLIIILNTMLARRQKWNPGGHAMG

SEQ ID NO: 470481 - protein, 371 aa, unidentified
MNEKVIYIGLDVDDQNFHGASIIAATGEIIEFKCRPNAKGLINQLQKLKIKFPELKIKTCYEATYIGFTLQRDLAAQGFACDVIAPNSIPRMHGNQIKTDRLDAIKLAQLYASGLLTIITPPEVEMEKDRDLMRSRQFILHQLSEVRTHIQSLLRRNNLHYKSETGSLSHWTRNHLSWLEKKGEESSGSLKANLKLLIQQMKWLTHTRSEYDNAIDELAATEKYKKQVSSLVCYKGIKNIFALVMITEIGNIKRFKHPRQLVSWMGMDIREYSSGGKSNRLGITKHGNRYLRTAFIESNQRIFRAKSIGADLKQRRKDIDPELIQIADRCMIRLAKKGSRLLYAGKHTNKVKVACAREMVGFVWESLNKVA

SEQ ID NO: 470482 - protein, 326 aa, unidentified
MDPVSIGIDVSKATLVIAVAPTGETWSSETSPRALEAVVQRLIALTPSVVVVEATGGYERAIVAAAAAAGLPITVVNPRQVRAYAQAVGRAAKTDPIDAAVLADFGARIQPAVRPLADAETQALAALVTRRRQLLEMLGMERNRLAQAPPTGAVTRDLRTHIRWLERRLADVDDDLGTAIQASPLWRVHEDLLRSVPGIGPVTARTLLAELPELGRLDRRAIAALVGVAPFNCDSGQHRGQRHIWGGRAPVRATLYMAALVAVRRNPVLAAFYRRLLALGKPKKVALVAAMRKLLTIVNALLKHHTPWQVASTPGSPADRARAATV

SEQ ID NO: 470483 - protein, 332 aa, unidentified
MVNTERLPGPRARIICKAGETMEPVYVGVDVSKDRLDVALSNGENFSFDNSSGGFKLLGKKLRAKKPLCIVLEATGGYEAKAFQWLLAHSFQACCVNPRQVRDFAKACGKLAKTDKVDAGILALFGEKMDPVSRPLPPDTVQELAALVKRREQLHEMLTAEKNRLRLAPVSVRPSILRIVATIESELNDTDKRARDVVENCPVLKEKVEVLESIPGVGFITAITLLSLMPELGSLDRKKISSLGGLAPFNRDSGKFRGKRSVWGGRAKARRGLYMGALVGSRYNPVLKATYLRLQEAGKPKKVALVACMRKLLVICNAMIRDMRHWEPQMAM

SEQ ID NO: 470484 - protein, 422 aa, unidentified
MAGLSTGLEWLNRSSSVALRQRIWIGIDVGKVGHHVCVVDEAGKVCWSGKLANDQRGIEAVINRAHQTGLELRWAIDLTSPLAALLITVLLTAGEPVVYVPGRMVATMTGIFRGEGKTDAKDARVIADTARMRSDLQAVTAPDDLVAELTQLSSYRTDLMGDWVRGVNQLRAMLASIFPALEAAFDYSARSPLILVAGLCTPAEIRAAGIDGVTAHLTDNGAWRKGIAAMVPAAVAAAGTQDVAVPGEATTAALIKRLAGKLLDLDREIKDLDKQITARFREHPHAAIIESLPGMGPHLGTEFLVSTGGDALTEFGTPGRLASYAGLVPVPRDSGRISGNLHRPKRYNRRLRRVFFMAALSSIKNEGPSRTFYQRKRTERQVHTQALLALARRLVDVLWALLRDNRPFGINPPNVGELTAAA

SEQ ID NO: 470485 - protein, 329 aa, unidentified
MLERWRDEAARAGRAISRIAVAFEAGRDGFWLARWLRERGIEAHVIHPTSIPVSREHRRAKTDRLDTNLLKRAFLGWLRGEADHCSMAAIPTLAEEDAKRPNREREHLVGERTRIVNRMKSTLARLGIRGFKPTLRRAPARLATLVTPEGVPLPANTCAELAREMTRLHLVREQIAAVEAARVARLEAAPAEGPHAMVRLLARVLGIGIETADMLVHEVLSRRLRDRRAVARYAGLTGAPDESGSKRREKGLARAGNARVRRGMIQLAWRFLRFQKESALAQWYRARTDAAAGSRKTMIVALARKLLIALWRMTTTGEIPEGVVLRPAT

SEQ ID NO: 470486 - protein, 355 aa, unidentified
MSGLKHQMEKRSMEHFVGLDISVKETSVCIVDDAGKIVRETRVASEPEALLQVLSKQAYRFKRIGLEAGPLSQWIYSILAEADLPVICVETRHMRALLKAQINKTDRNDARGIAQMMRVGLYRPVHVKTVRSQQLRMLLTHRKLLQSKAIAIENDLRATLRNFGLKVGMVGTAKFEARIKQLIENLPDLAVLVEPLLIVRRTLREQTAILHRRVLSIVRDDDVCRRLMTAPGVGPVVALTYRATVDVPARFRNSKAVGAVLGLTPSKYQSGEIDRTGRISKCGDEMMRVMLYEAAQIILFRSEKWSWLKAWAMKIARHRGMKKAVVALARRLAVIMHRMWVDGTEFRWTREVQPA

SEQ ID NO: 470487 - protein, 341 aa, unidentified
MDYYAGIDVSLEQSSVCIVDANGKIIREGKVASEPQALIDWLGSFGMVLARIGLEAGPLSQWLYAGMKKAGLAVELLETRHVRDAFKAMPVKTDRNDARNIAQLMRLGWFRPVHCKSIPAQEVRAMLTARKLVQSKLYDLEMSLRGTLRGFGLKVGMTTSTRFAARIRELVVENATLQVIAESLLAVHAVLLREFKSFEKRLRITARSNVEAQLLMSTPGVGAIVSLTVASAIDDPARFKSSKQVGAHFGMTPKKYQSGETDITGRISKIGDKGVRTALYQAAHIVLTRPVKGSALKSWAMRLAKRVGMKKAKVALARKLGVIMHRMLVDGKPFNFAAAAA

SEQ ID NO: 470488 - protein, 340 aa, unidentified
MSLYGGIDLHANNSVIVLLNEQDEVSYQKRLPNDLTTILGQLAPYRTEIKGLVVESTYNWYWLVDGLMAADYRVHLANPAAIQQYNGLKYTDDLSDARWLAHLLRLGVVPEGYIYPKAARAVRDVLRKRAHLVRQHTANVLSVQNIMTRNTGARFSGKRMQELTKQDLTTLLTDETQVCAVTSSLVVLDCLRQQIKTLEKIVHKRLHYTPSYEQLLTVPGIGTILAQTITLETGAISRFPTVGNYASYCRCVDSQKISNGKRKGTGNVKNGNPYLAWASMEAAQFALRFQPAAQRFYQRKLAKSRNNSVLARKAVAHKLARACYYMMRDLVPFEERKAFG

SEQ ID NO: 470489 - protein, 309 aa, unidentified
MKQSVVYIGIDVAKAHLDVAWAETFRRLPNERSGHAVLVRWIKQSATPVQLICEASGGYEQGLLESLEKSEVKVTLVQAVRVRQYARAAGILAKTDQMDAKVLAAFGSAMQPPPTPPLCAEQKRLRQYEAQRRHLSRVLVAEQNRLAQLSCAELRTLSRGLISKIKKQIETIDTRIGDLIAQDQTLREKAQKLTAIRGVGVRTAALLLAQMPELGQLNRRQAAALAGVAPFNHDSGSIRGKRAIFGGRRALRSGLYMAALSAARFNPILSRFYRRLRAKGKPHKLALTAVMRKLLLALNQTLKPIPSLA

SEQ ID NO: 470490 - protein, 260 aa, unidentified
MSVEKSPVSYTLFVGVDIAATTATVSWMRAGEQACRPITIEQTPDGYASLERKLRATGMAPAEVLVVMEATGSYWITLATQLVHAGLQVSVINPAQAHHFSKALLKRAKTDAIDAQTLAQLAMLLQPAPWTPPPRIYYELQERLAQRDALLDLRQQVRNQLHALDQLPEVIETVRQRYEQLLSTFAAQLAAVEAEITQAWQHNAAWALAAERLQSIKGIGWVTAAWTLVTTLNFTTCETVEALTAYAGLAPMPRQSGTSV

SEQ ID NO: 470491 - protein, 426 aa, unidentified
MNCTQNYKIDQVTEQTPVVGIDIAKRTHYACFVDDRGRVLRKSFPIFQSKEGFQQLYKAIQGAMQAFGKSEVIVAVEPTGHYWLNLAYFLEEHGIPLVMVNPAHVCRSKELDDNLPTKHDAKDALVIARLAKDGRFLVPRLLHEIEADLRVGSTLKEKLRKEQTAVKNAIVRWTDRYFPEFWTVFRDLGKTALSVLEWTPLPADMAGRTVEELLEVYRQSEGMKCPQKAKIQALINTAKDSIGVTEGTAMARFEIAALVRRYRQLEAEIAALDAELKALVQTTMEYQWLKTVDGLGDATIIDLLAEIGSFAHYRDPRQLVKLAGLTLKENSSGQRKGQKHISKRGRKRLRSVLFRAMIPLIRHNEAFRELHEYYTTRSVNPLTGKQSIVALCRKLLNVLFAICTKKQAFDAERMKQDVLSQVQRAA

SEQ ID NO: 470492 - protein, 411 aa, unidentified
MELLVARCAGLDVAEDELVACVRVPDGHGGRGQEVRTFSTFTGGLEALADWLAAEAVTQVVMEATGQYWKPIWYVLEEAGFELLLVNARHVKILPGRKTDVCDAAWLAELLEHGLLRGSFVPPGPIRELRDLTRYRKRLIQAHASEGQRIQKTLEDAGIKLDSVATDVLGASGRAMLAALVAGERDPQVLAELAKGRLRAKLPQLRQALRGRFRTHHALLVRLALAHLEQLETSIAELDTHIDRVLAPFAQARDRLDTITGVGKRAAETIIAEIGVDMTVFPTAAHLASWAGRCPGNNLTGGKRRSGKPTKGNRWLGEVLIECAWAAARSRDTYLSAQYWRLARRIGKKKAAVAVGHSILVIAWHLLTEDCDYQDLGGDYFVRRDTDRQRQRAVAQLQALGYRVVLEPVAA

SEQ ID NO: 470493 - protein, 449 aa, unidentified
MPRTKKQPVSLPVIESSAAGIDIGATQIFVAVPADRDPEPVQSFPTFTVDLERLADWLVRCQIQTVAMESTGVYWIPLFQILEKRKIEVRLVNAHHVKNVPGRKTDVEDCQWLQHLHAVGLLRGSFRPDDEICAIRSLWRHRDNLIQLATIHLQHMQKALDQMNLQIHHVISDLAGTTGLAIVDAILAGERDPGKMAHLRDPRIRASEETIMKSLVGDYREEHMFALRQSLKSYRHYQEQIQEVDLQVKQMLQQLPPKVAEGEKPPQGDKTRKVPWRNEPPQLRDDLYRAFGVDLTAVPGINSLTAQVLLTEVGPDLFRFPNAAAFCSWLRLCPNPKISGGQVLSSRTRPTKNRAALALRMATQGLCRSNTFLGDHFRRMKARMGTPKAMTATAHKLARIVYHMITTQQEYDATVFQQQEQRRQHQKAARLHMQARDLGFQLVPLNSVP

SEQ ID NO: 470494 - protein, 284 aa, unidentified
MDNNATGWDELVERLHALPIAAVGIEPSGGYERGIIRALLAAGLSVRRINPSKLRQFARARGILAKNDRLDAQLIAEYVSIIPTRAVQRAATAERLAEVVTMRRQLCDEHVTIENQAAHVEDAILRRLNKRRLARLKADIHLLDKRMAEIVAADAILAQRYELLTSMRGVGPTLAFTLIALLPELGQMSRKQIAALVGVAPYDFDSGKLKGHRCIYGGRMPVRNILYMAALSAARYNPALKVFHNRLAAANKKPKVIIVAVMRKMITTLNAMVRDKAAWQPRAA

SEQ ID NO: 470495 - protein, 343 aa, unidentified
MKYFTGIDVSLRSVSICVVDEAGAVRYENKVAAEVDLIVASLRRFSAEVRQIGLEAGTLTQYLTYGLQKAGFEVICLEARQTAATLAAMRNKTDRNDARGLAQILRSGWYRTVHVKSLESHQVRALLASRKAILTKCVDLENELRGLLKIFGVRLASRVGHGSFDEAVRGVIAAEPLLARALMPLLDARTVLYKTYLKLDNAVKAVVRTDPVCQRLMTVPGVGPVTSLTFKAGVDDAGRFRSSRTVAAHFGLTPRRYQSGETDNPGRISKAGDRDVRMALYTAAHALMTRSDAWSTLKAWGLRLAKVRGHRRAVVAVARKLAVILHRMWVDGTDFRAARLQGA

SEQ ID NO: 470496 - protein, 417 aa, unidentified
MPALKELTLKKKGAAMHYLGIDVSKASHQCVILDAEGEALGKSFAIQSSKGDFANLVKKLSDLNIPKSDITAGLEATGNLWENLYVYLKERGFNIVLLNPFQTSKFHQAMLKKAKTDSIDALVIAGLLRSGCAAGSYIPDEEIQSLRDLIRLKDGYLKDTKNYKRKAYSLLNLVFPEFLNLIKDPFNISCTEILSKYQTAADFKKIKPKDLLKVARGHQGNNYDEAWAGKVIQAARDSIYSGKASKARGIVVKSLVLNIKNLKERMSELDTEIQNILKSDDGSSNNDIDNLLTIPGVGPKTIAVFIAEVGDITRFASCKDFIGFVGLYPKIEQSGSSLNRAKLTTKGSRLLKHALYMASVASLIHNPYLKSVYNDKISQGKCAKQALIVVSRKIACIMYSMLKNNTAYNPGRVAIAV

SEQ ID NO: 470497 - protein, 434 aa, unidentified
MSKLQKVHGAAAGIDVGSCKFFVGTEESEVQNFDTFTSGCHELVEYLQQKNITSVAMEATGVYWITLHDMLRSAGIEVFVVNGRHVKHVPGRKTDVQDCLWIKELHSYGLLRKSFIPAQEVLQLRHYMRIREKDIENKVSAVQRMDKALVMMNIRLSSVVSAVQLVSVMRIIKAILSGERDAKKLVALCDKQILKNKEAEILKSLEGFYKEEQLYGLQHAYDEYKFYADKINECDIKMGAILKTTVKDKNEPRSKPTGKRVYHHRPAVDDLDKMVMQLYEGKDLTILPGLTCYSVLKFYSVVGSDFSNWKSEKAFTAYLGLAPSKYQTGKTRKYRKFKCNTEGGQILKECVQPLLRSKYNALGAFGKRITGRRGASVAIKAMARKLAEWIYRIVMKGMNFVSNGLEQYEEKLKRQKIKWLEKQAKELNLILSLR

SEQ ID NO: 470498 - protein, 341 aa, unidentified
MSTVTLIGIDLGKHSFHLHGQDSAGRMVFRKKCSRQQVFTLLGNSPCSTVVMEACAGAHWMARRIQALGHQPKLISPQFVRPFVQGNKNDFADAQAICEAASRPSMRFVCVRNEAQQTVSALHRVRESLVRERTGVINQVHAFLLEFGISLPRGQAILRRLPAVLAEHELPPRLAALLERLQAHFKYLDEQIGEIERDLCQQLREDERSQRLLEIPGIGPITASALMTELGDAQQFGSARQFAASVGLVPRQYSTGGTPKLLGISKRGDKNLRRLLVQGARAIMQRVERRTDRLGVWVRELLARRHSNVVACALANKLARIAWAILANGTNYRSEQAVSAT

SEQ ID NO: 470499 - protein, 311 aa, unidentified
MTDHTIGVDISKSHLDAFRLEDGAAQRFENSAAGFRALSKWLGKAPVARIVFEPTGPYHKAFEAALGENFPLVKVNPLQARRFAEAHGTRAKTDAVDARMLARMGAAFDLAPQESNSREARILRDLHVARTGLIKDRTRLRNRAQTQDIAVLKRQTRARLAQVERQIAELDAEIAALIEAQETTARSRDILCSMPGIGAVTAAAMLILLPEIGTLERKQVASLAGLAPITRQSGQWQGKAFIGGGRKPLRDALYMPALVAVRHNPDLKAKYDNMRTAGKPAKVALVAVMRKLIEMANALVKADRKWTPKTA

SEQ ID NO: 470500 - protein, 351 aa, unidentified
MPRASTVHAVIAIGIDLGKNTLHMIGLDSSGAIVLREKVSRGRIASRLANLPPCLIGIEAGMATHYVTRELTALGHDVKQVPATYAKPFRQGHKNDFRDAHAVAEAVQRPTTRFVPAKTDEQLDLQALHRVRSRLVSERTAVINQIRGFLLERGVIVRQGLRFLRHLLPDILAKRTDVLSPRMVRIVTELAGDWRRLDERIETVTDEIEALAKSDDSCRRVMTVPGIGPIISSAMVAAIGNGVAFARGRDFSAWLGLVPKQMSTGDRTILGRISKRGNGYLRMLFMQAARVILLRPANWPKHSFGAWLARAAQRLHPNVLAAALANKLARIAWTVLAQERSYESRVKKAAA

SEQ ID NO: 470501 - protein, 412 aa, unidentified
MDVILERCAGLDVHQATVTACIRSPGPGGERTQVIQTFGATTPDLLTLRDWLAAHRVTHVAMESTGVYWKPVSSALEEGFTLLLVNAAHLAQVPGRKTDVADCAWIAQLLECGLLRGSFVPPPPIRELRDLTRYRKALIQDRTREANRLHKVLEDAGVKLATVASDILGVSGRAMLTALVEGTTDPTVLAELARGKLRQKLPALRHALTGRFRGHHAFLVSQLLAHLDYLDETIGTLSEQIEAHLAPFAAAAARVATIPGVKQRSVENLLAEIGVDMARFPTPGHLVSWAGVCPGNNASAGKRRRGRTRKGDRWLKITLIEAALAAIRVKGSALGARYRRICRHRGHKIAIVAVARAILEIVWHLLAQGTTYHELGADYIDRRDKQQSTRRYVRLLEKLGHRVTLEPAPLAA

SEQ ID NO: 470502 - protein, 344 aa, unidentified
MGKSTTIAVDLAKSVFEVAVSDRPGRVGERQRLNRPALLPYFAQREPATVLLEACGTAHFWARELEGLGHRVRLLPAQHVRRYRQGNKTDRADAKALLEAFRSEEIRPVPVKTPAQQELTVLHRLRAAWHGTRTARINTLRGLLREQGIAIPAGASRFVSRALELAGDVNSPLGESLRFAAFELVTEIRELERRIAEIERRLEALGRRNPLVQRLRSVPGIGLLTSTAIAGFVGDLRRFPSGRHFASYLGLTPRERSTGGTRRLGAITKRGDVYLRMMLIHGARAVLAAAAQQREPDSVRSWALEASQRLGHNKATVALANKLARFAWATATQERNFETRSKAA

SEQ ID NO: 470503 - protein, 358 aa, unidentified
MDVTTAVEQELTIVGVDLAKRRFELALQEPARRTLTSKCLSPEAFRLFFANRSRCHIVMEACGTAQHWARVLTAQGHQVSLLPAQHVRAYVRRNKTDAADAAALIEASRCAGIRPVPIKTVDQQLVLQLHRVREQLKATRVARINGLRGMLREFGFSIAQGATQGLRQVHEALEDAENGLPDALRPVIGGVLEEIASLQQRMDDLERQIQQLSDEDLVVARLRTIPGIGVLGASALRAVVGRIERFRSGRHLGSYLGLTAREHSSGELRRLGRITKQGDVYLRTLLVHGARAVLAAAVCAERRGKPLDRLRAWALATARRIGYNKATVALANKLARLAWVTWTRGEPYRGGAAHAVAA

SEQ ID NO: 470504 - protein, 315 aa, unidentified
MLIRYIDIAKRNFVIAVSSLSKTKTETNNPKGIAHTIEYLKKHKVALVVTESTGGLEIPAAKAIRRAGIAVIIANPRQTHQFAQSQPLTKTDAKDAKMPAFFTQMMTQKEDWQTMPYQPPTEAEEVLEALVNRRNQSADMRTAEKNRLHQVHETQVESVKQLIARFDRLIDELDKQIDDHTHTHFDGKAQVAEQIKGIGSITTATLMAMLPELGRLSHKRIASLAGIAPHPRDSGETKFKSRCFGGRSAVRKALYMATVAATRFEPLIRDFYQRLPSEGKPYKVAVTACMRKLLTISNARMRDYFAENDTAENGI

SEQ ID NO: 470505 - protein, 358 aa, unidentified
MRKGNFVGLDIAKNVFQVFTADDKLREISNKKLSRNAMVCYFAQLPPSTIGIEACGMAHYWVRTLAAYGHTVKLISTQRVKAFLGHRNKTDVADAKAICEALTHPGTRFIRAKSAEEQDTDHLLARRERLVQARTQIINQTRSFLSERGIVIPQGSHHFMKNIAQIISEAWDTFGGDFQAVLTDNYADYEEHDAKIKKLDTLIAERAKRIEPSQRLMRICGIGPQAAVALVAHIGDAKQFNNGRQLSAYLGLTPRECSSGGKQRLLGITKRGNGRLRTLLVLGAHAVMQGIGRRKRGEDGQPCRLTSLDKWVLALKARIGTCKTAVALANKIARMAWVILAKGEEFNPLKACPIKEPA

SEQ ID NO: 470506 - protein, 402 aa, unidentified
MNSVGIDVSKGKSMIAVMRPFGEVVCSPFEVPHTSSELSALARQLKSLDGETRVVMEATGNYHLPIAVALHEAGIYVSVVNAMLVHDYGNNSLRRGKTDKKDAIKLANYGLDRWLTLPEFSPEAEIRMQLKTCYRQYQQYSKVQTMLSNNLISLLDTVFPGVNRLFSSPVRADGSEKWVDFVETFWHCECVSGLSQKVFEKKYQKWCQKHGYYFREAKALEIYTAACGAVGVMPKTETTHLLITQAVSQLRATSTALAELKKEMLRLAELLPEFPVVQKMYGTGPTLGPQLMAEIGDVRRFHSKKALVAFAGIDAPPNDSGQISGNHKAMSKIGSSALRRTLFLIMGVYLQNAPVDEPVYQFMDKKRAEGKPYRVYMMASANKFLRIYYASVKAYLDALETA

SEQ ID NO: 470507 - protein, 289 aa, unidentified
MAIAIGIDVHKKTSTFFAYGEDGEPLEEFNKRFKRVSSNRDGYTEVLVWLGNTDCDFLMENSTKTHDVYWILQGLGYKNLYVAHSVDLKRITKSSKKTDHFDAEKLATYMRVKQQNIDQFRTCYICTPEDMRIRRLCRIAKQELFDMGRIRRRIRSHLLLTGREWMGGLNTKWECEALMNEDDPGLRHLGRQLNECRLRRDAAEEAVVKAIKGNEKMFPIYEKLKEIPNFGDITAAYLAAVIVDIDRFENPKKLAAYLGIVPRMRDSGETENHCGLTRSGDPAARWLLI

SEQ ID NO: 470508 - protein, 399 aa, unidentified
MFYGLDVHKQFIQVCELDDKGANPKEYRIGGSSEEIDRWAQDLGPRDQVVLETTFHTWAIHAIVSQYAGRVAVANALQVKAIAHAKIKTDKVDAYTLARLLQADFLPSVELPDEKTWALRQLVSHRRLLVKQRVAIKNTVLAVFHRCLISTPEGNAFTARGRRWMRSVKLATAQHFLVHNALDLLEAVEARIEATDQELLKTAALEEQAQLLMTIPGVGVTVAMGLLAAIGDIRRFPSPGQLASYFGLVPRVSQSAGRCHHGRITKAGPGNARSLAIEAAQALARSPSPIATTFYRVRHKKGYNVAVTALARKLIVLVWYMLQNSEPYRYAPVESTRRKLRSLVPKHERPRALRPPRSVDEVYREAGLTLPSPASKAERRAAANNRRTRTRLSRSQAKT

SEQ ID NO: 470509 - protein, 458 aa, unidentified
MRKQNRRSPKVAVTPTLRRHNPAAAGLDIGAEEIWACVPAERDPQPVRAFGTFTPDLLALADWLVQCEVTSVAMESTGVYWIPIYEVLEARGLEVYLVNARHLKHVPGRKSDVQDCQWIQQLHSYGLLTASFRPAEDMRVLRAYLRQRAMLVEHRAGHIQHMQKALQQMNLQLTQVLSDITGTTGLQIIRAIVAGERDPQVLARLRHGRCQHSEAEIAKALSGHYRPEHVFALKQALALYDFYTAQVQECDTYLEQHYAAIKPTYDERTPPPPLGPDPKPNSHAKNAPAFDVRACLYRILGIDLTATDGLEASSAQVLLSEVGTDMSKWPTEKHFASWLGLAPHNDISGGKVLRSKPLKGNRRAAQALRLAAQTLGRTQTALGSYYRRLRARKGPTPAITATAHKLARMLYHVLKHRTPYQPQSQETYDQHLRQRAIRHLKRSATRLGFTLVPQPVAA

SEQ ID NO: 470510 - protein, 370 aa, unidentified
MAQSTPLFVGLDVHKDSIAVAHAAGGSPEPPVFVGAIGSRQADLDHLLRRLQGKASALTFAYEAGPCGYGLHRYLTGKGLACQVVAPSLIPKKPGDKVKTDRRDAVELARLLRSGDLTAVHVPSVEDEAIRDLCRARDAARVTGKDAKLRLKAFLLRLGRHYVGRATWNDAHRRYLAEVVCPTPAQQIVFQESVRAIDEQIDRLQRLEAELLERAPEWRLYPVVQALQALRGVQFLVAITVVAELGDLTRFTSPRQLAAFVGLIPSEYSSGGTRRQGGITKAGNGRARRALIEAAWAYRHPAKVSLHIQQRIDRLPKSLQDLGWKARWRRAKRFRRLVARGKHPNVAVTAVARELIAFMWAIAKEVPLAA

SEQ ID NO: 470511 - protein, 341 aa, unidentified
MKRWIGVDLHKNQFTVCYLGKKGEHQLQVFKVMAKDIEAFKQTVTKIDVVAVESTGNTGHFVRQIQNSVKEVKIINPTQFKIISTSVKKTDEHDALVIAKYLSKGLIPEVRMRSKEQSQIASLIGTRDKFVKLRSCLKNKIHNILNANGIVTKREVFGSVKGLERILSIDIEDSYRFELKIIVEQIRSLNKSIDEINEEITGRGKNLEGHKNLTSITGIGDISATILLNTIGNVSDFADDSKLAAYFGIVPRVAVSNETSHYGKITKMGNKIARTTLVQSTLIAIKYNPYLRKFYFRLKAKKGSGKAIIATARKLLTIIYRTLKNNWVFEDFNQFKLAVTV

SEQ ID NO: 470512 - protein, 359 aa, unidentified
MSTQRKEFSFKGQKIFVGLDVHLKSWTVTVLSEQSVLKKFTQDPSPAALYKFLSNTYPGAEYYSVYEAGFCGFWIHWELHNLGINNIVVNPADVPTMGGERLRKTDAVDSGKLARSLRAGELRGIYVPDSITTEIRSLIRLRDSLTKDQTRHKNRIKAHLRYLGVDIPEEFCRPGNTWTNRFVLWLKDLKMETDYGKKTLDLLIAQYEDLRVQRLNMMKELRALSKTERFAEPLRLLMTVPGIGQVSGLTILSEIDDIARFKDASHLASYVGIVPMCYSSGEHDGTGNLTVRRHAQLRWLIVESAWIAVRKDPVLSAAYVEYCRKMKPSKAIIKVARRIINRIYFVMKHQHPYVNCFVS

SEQ ID NO: 470513 - protein, 370 aa, unidentified
MGNRSMFVGLDVHKETIDVSIAEGDRHGEVRHYGVIKSDLEPLDKVVRALRAPDRRLHFVYEAGPCGFGIHRHLTSRGEDCVVVSPSMIPKRSGDRVKTDRRDSQMLARLHRAGELRAIYIPDATDEAMRDLVRARADAVGVGTQAKSRLKAFLLRQGRRYPGREGWTLPYRRWLTDLSFPSAAQHIALQEYRDAIGETEQRIARLTEQLRHLAPTWRWAPVVDAFQALRGVSFITAVGLVAELGDLTRFRHPRELMAYLGLVPSEHTTGPRVRRGAITKAGNPHARHLLAEAAWAYQGIPRIGRQHAYRQEALPKVVCDIAWKAQLRLTTRFRRLVAKGKAKPKVATAIARELSGFIWAIAQEVSPAPQ

SEQ ID NO: 470514 - protein, 389 aa, unidentified
MFYVGLDVASEKHDCCILNEKKKVLQSFSISNSSIGFDSLLAALAELPSDEIKIGLEATGIYSENLSVFLRRKGFDVTTINPLLLKKHQCATTLRKTKTDKADAKGIALFIAEEGFQPDLPISYHIQELKSLTRARFSVVQDRSALKNKVKRLVVLLFPELLGEFTDIFGSSATALLKQYPSAAKLAACHCDTLAALLRKTSRGRFGRAKAEHLRQLAQNSVGNHSTARAMELRMLLKRIDLLSEQIAEYDTEIKVIMDKIDLPILSIPGISYTLSAIIVAEIGDISRFSSPAKLLAFAGLEPSIYQSGKFVPTSGKMVKRGSPFLRWALLQAAGYVPTYSSTFALYRAKKVTEGKPAAVVRSHVAKKLVRIIYSLLTHSTAFSDQLSA

SEQ ID NO: 470515 - protein, 348 aa, unidentified
MTLVGCDLHSRKQQVAVLDTTTGEILEQELVHEGDAVERFYRALRPPVTIGIETTGYTQWFHALMHRLGHTVLVGEAAKIRAMVVRKTKTDRRDARHLLDLLRHDRFPTVWVPDPDTRDLRALVAHRVRLVRMRTMVKNGLQAIALNHRLALRSKLWTERGRAALNGLLLPRHTTRRRDDNLELLIWLTAKIDELDAQIAQAAAADPHAALLLTHPGVGPLTALATVLVLGPIARFPDSKHVVSYIGLAPAINASADKQHLGKITKQGNALLRWVLAQAAPLAARADEELRRRYFAVLSRRGRPKAKVALARKLLVRLYVMLRDRVDYDEFCRRGQLRRTARVPVAAM

SEQ ID NO: 470516 - protein, 337 aa, unidentified
MEIATIGLDLAKSVFQAHGVDAQGSTVLVKRLHRRQMIPFFGKLPPCLIGVKACATAHHWARTLSAMGHEVRLMPSSCVKGRVKRGKSDALDAEAICEAVRRPSMRFVPIKTVEQQGVLMAHRTRSLLVRQRTMAANALRAHLAEFGLVANPGIANLAKLADKALGEDQPLPAYAHRALESLLRRVMELTDEIAALDQELRAWHAQNEASRRLAEIPGVTATAIAATVTDPGQFRSARQFAAWLGLTPQQNSTGGKTRLGGISKQGDRYLRRLLVVGATAVMRHAKDQPTPLAAWIRELLAKKPFRVVSVALANKLARIAWVVLTRGETYRPWRPTT

SEQ ID NO: 470517 - protein, 340 aa, unidentified
MTIATIGIDLAKNVFAVHGVDHNGKTVLVKSRVTRAALPELIAGLPPCVIGMEACSGAHYWARLFRQYGHEPRLMAAKFVSPYRMAGKSGKNDAADAQAICEAVRRPHMRFVPVKDESQQAMQCLHRTRQGFIEEKTAIYNRLRGLISEFGVIAPQSTDALRRIVSEQKSYLPFQVQQCVDDLLEHIDRIEDKVSEYDRTLSCMAKTDHRSQRLMELKGIGPTTACALVASIGNAHDFKNGRQLAAWLGLTPSQYSSGGKSKLGRITKAGDSYLRTLLVQGARSVLIGADKRTDSFSRWVCSLVERRGYWRAVVAIAAKNARLCWASLHYGDDFRLYSAS

SEQ ID NO: 470518 - protein, 339 aa, unidentified
MTVLIGIDPHKGSHTAVAIDRDETKLAELRLRASKQQCARLLDWAAVFPERRWAIESAGGLGYLLAQQLVAAGEDVVDVPPTLSARVRVLGSGKAQKNDPNDALSTAIAALRGRPLRHVELDDHVAIIRMLANRHHNVVALHTQAVCRLHAQLANLTPGGVSGHLSPARAQRLLAGVRAVNGVIAERKHQARDLLDDVVRLHRALVEVKARIAVAVAASKTSVTDVYGVGPVGAAIIIGHAGDARRFTSRDHFASYNATAPIEASSGPTKRHRLNPRGNRQLNHAMHIAAITQIGKDTPGRAYYQRKIAEGKSNKEALRALKRKISDAVYRPLVLDAAR

SEQ ID NO: 470519 - protein, 402 aa, unidentified
MNAVGIDVSKGKSMVAIMRPFGEIVSTPFEIKHTASDIRSLVELINSVEGESRIVMEHTGRYYEVLAHQLSEANLFVSAINPKLIKDFDNDSLRKVKSDKADAVKIARYALDKWQNLKQYNVMDELRNQLKTMNRQFGFYMKHKTAMKNNLIGILDQTYPGVNTYFDSPARSDGSQKWVDFASTYWHVDCVRKMSLNAFIDHYQNWCKRKKYNFSQSKAEEIYGKAKELVPVLPKDAITKLIIKQAVDQLNSASTTVESLRTLMNETASKLPEYPVVMAMKGVGTSLGPQLMAEIGDVSRFTHKSAITAFAGVDPGVNESETYEQKSVPTSKRGSADLRKTLFQVMDVLIKTHPQDDPVYQFLDKKRAQGKPYYVYMTAGANKFLRIYYGRVKEYLSSLPES

SEQ ID NO: 470520 - protein, 346 aa, unidentified
MRILALDLGKYKSVACDYEAKTGRHRFSTILTNPKVLHDLIVDREPDRVVIEICSIAGWVSDLVRALGIEIQIANPNDERWQWRKVKTKNDRADALKLAQLSAMNQLRLVHVPQSEIRQWRALIAYRQHLVQRRTKIKNHIRDLLLREGQLLPRYRSAWTQEGITNLEAMSKPFSEVTLDELWRGELGVELAQFKAVQAQLAEVVAKLDELGAANHGVQLLRTISGVGPRLAEAVVTMFDDPHRFRRGSQVSSYIGMVPKQFDSGETQRAGRITRHGNRLVRSLLVEVAWCALRHNPWARATYQRISGGKQSRKKIAIVAVGRKLLVRCWAMLRKQEPWRYEFSAT

SEQ ID NO: 470521 - protein, 397 aa, unidentified
MNKIVHYIGLDVHKDSIAVAIAPQNSIEVRRYGIIGGSLNDVDKLLKRLAQPNIELRLVYEAGPCGFVLWRHLRSKGIHCDLVCPSLIPKKASDRVKTDRRDADQLARLYRAGELSPIHVPDQEDEAIRDLIRARTAAVRDQRQARNRLKGFLLRLGFRYTGKSSWNDAHKRYLSGLLMPRPVQQIVFQEFVHAIDDATDRAARLTQAVEDALPGWKWEPVVRALMSLRGMQVLSGMTVVAEVGDLSRFENPKSLMHFLGLTPSEHTSGDKRVLGGITKCGNAHCRRVLTEAAWHYRLKPLVSEAMQKRQERQCKAVRLIAWKAQQRLHKRFRQLAVRKKSVVAATAIARELVGFVWAIACQVKPAQRPPAPEIIRTCRGKVYLLDPEKKMPKTKAK

SEQ ID NO: 470522 - protein, 459 aa, unidentified
MVKAKQSRQEQGGAMAPIHPHAAAVDVGATLHVAAVGPGADAEPVRSFGTFTADLNRMADWLERCGTRTVAMESTGVYWIPAYEILEQRGFEVVLVNARDAKHVPGRKTDVSDAQWLQRLHEYGLLRGSFRPQGEIAALRAYLRQRERLLDYAASHIQHMQKALTQMNLQLHHVVSDITGVTGMRILRAIVAGERDPAVLASLRDVRCKASDETIRQALVGNCREEHLFALAQAMELYDAYQAKVAACDVRIEAALIRLREMAAKPVGQLPPPRHTTRQANAVAFDVRAALHAIVGVDLTQIHGLGPYLALKLVGECGTNLTAWPNAKHFTSWLALAPHNKISGGKVLSSRTRRTGNRAAALLRLAAVTVGRTDTALGAFYRRLSGRVGKAKAVTATARKIAVLFYNTLRHGMAYADPGASYYEERYRQRVLANLQRRAKAMGLVLQPAQPDAAQAGVS

SEQ ID NO: 470523 - protein, 313 aa, unidentified
MIISSRCVGIDVSKHHLDIFDEALGVSERIANAPQAITQLVARWRCDALVVFEATGIYDLELREALRQAGIRFARINPARARDFARASGQLAKTDPIDARMLAAFARAMRPATEQVISPARNTLARLAKRRDQLVHMRAQEKNRRSEAEDRAMVERIARLIEILDREIAEIEVDIGALINAEPELADDAQLMRSMPGVGPVACMQLIAQMPELGRIGPKQAAALAGLAPFNVDSGAYRGKRKIGGGRKRVRDALYMAALNAVRRADHFKTFYARLRNAGKPAKLALIAVARKLLTVLNAMMRDRKAYLPVRST

SEQ ID NO: 470524 - protein, 343 aa, unidentified
MKYKTITIDLAKNVFQVCGVNEHIKPQFNKKLKRNELLEFMRQQSPTTVVMEACYSSHYWGRELAKLGHDTKLIPAQHVTPFVRGNKNDHNDAFAIAEASQRAHIRFVPVKSEHQQEISCLHRIRERLVKNKTAMSNQARGLLSEFGVVFPCGHKALLSGLSSVIDNPQYSHRLQDMVIDMLSEYNVTLKRLKSIEKQLGEFVDGSESGKILSSIPGIGVINASALLAAIDKGQAFNSPKEFAVWLGLTPKQHASGNISKMGGITKRGDRYLRKQLIHGARAFVSRAAKSTDPLALWATKLRLTKPFNKVAVAVAHRLARLIWILLTRQEHYRVMPTSLEVNA

SEQ ID NO: 470525 - protein, 348 aa, unidentified
MNTTTIGLDIAKAVFQVHGVDACGQTTLQRRLRRGQLIPFFANLPASRVGIEACASAHHWARELRKLGHEVKLMPPQFVKPYVKTNKNDARDAEAICEAVARPNMRFVAVKTVAQQELLMLHRARQRLVQARTAQANQLRGLLAEFGIVLPQGLARLEREVPEILADAENGLSDRLRERFHCLLSQLRELDESVRDWERQIVAWHRENPLSCRLEKIPGIGPITASAFVASIGDARMFKSGRQVAAWLGLVPRQASSGGKTRLLGISKRGDRYLRSLLILGSRSVLRRLKCNPAHRLNAWLARLTARCHPNVVAVALANKLARIMWALLAHDREYRVNFRDRPASMMA

SEQ ID NO: 470526 - protein, 354 aa, unidentified
MLIIGCDHHPSFQQIAFVDTDTGELQERRLEHCEEAEKFYRGLGVQGMKVRLGMEASGHGRWFERLLAELNFELWIGDATEIARKRERKQKTDRQDAQHILKLMLKDDFPRIWVPSWENRDLRQLLWHRHRMVQARTRIMNQLQAVALNEGLRSKKRLWREHGREQLESFRLAPWASRRRHDLLELLDRLNPTIAELSQAIEQEVEKCPEAQRLMTHPGVGPLTALAFVLIIERADRFQCGKQIASYLGLVPLEDSSGNRRRLGHITKQGNSLLRFLLVEAAQVTVRSLPEWRSKYIHLTMRRGRKIAKVAMARKLAVRLYWMMRKEWDYEQVKKFGSHAGQPGNRYGVKSNIE

SEQ ID NO: 470527 - protein, 366 aa, unidentified
MRKITTMRATRRENFNRQQLTIGLDLGDRSSFYYVLDEAGEVILEQKLPTTPEAMRRAFEKMPRSRMALETGTHSPWVSRLLTALGHEVIVAHARNVRLIGESSRKDDQLDARTLARLARIDPGLLGPVQHRSAKAQIHLTVIRARAALVSTRTALVNAARGLTKSYGERLRKCGTGQMNRGVAKELTPELRDALEPLLAEIESLNERIGEYDRRIEQIAKEARPEVALLKQVNGVGTLIALTYVLTLDNPHRFRRSRDAGCFLGLRPGRRNSGMSEPQMHISKEGDRYLRTLIVQGAHYILGPFGEDSDLRRWGLKLAERGGKNAKKRAVVAVARKLAVLLHKLWVSGEVYEPLRNNHRVASAVA

SEQ ID NO: 470528 - protein, 355 aa, unidentified
MSITTTATQPQIVVAGVDTHADTHNVTVLGLDGRWLGNNQFDTTPDGYRAALDWVASFGIVDRVGIELTGSYGASLTRYLIERGVQVIDVDIPHPTVRAKKGKDDRIDSEEAARKVLSGQATTIPKDTTGVVEAIRNLKVARDSAVKSRTIALQNIRDLLVTAPAELRQSVMALKTLQAKAKHFATARPDTTRLADPLQACKAALKALGRRVVFLNTEIAQADHTMAALVQITAPTLLGLDRIGTQHAAQLLITAGSTPNRIRSEAAFARLCGVAPVPASSGKTTRTRLHRGGDRQANRTLYLIAINRLGGHQPSIDYLARRTTEGLSKRDVIRCLKRYLIREVFKALKTDLHWT

SEQ ID NO: 470529 - protein, 394 aa, unidentified
MFFVGIDVAKRKHEAVVIDDKGCIVQKSFSFPNSLSGYNSLISCVKRITSTRKDIVFGMESTSHYWLALYSHLIKDGYTAHVINPIQSDAFRGLFIRQTKTDPIDAVIIAEVIRFGKYTSTHFPQHKILALREMCRNRLYMVDAISDLKRKTIALIDQVFPEYDQMFSDTFLVSSVEVLYRYPTPKKLLHIRKDTLTNLLIKCSGGHFGSAKADEIIHAAKNTFGIDDPYDVYADLIKTFIKQIKFIQKNVSEIDQKITAIMDEIASPITSIPGIGVTLGAVILSEIGDISRFKSSDKLAAFAGIDPSLKQSGDYSSIRNHMSKRGSPYLRRALWMACIPATQVDPMFRAYYLKKRSEGKSHMKTMGHVAKKMICVIYAVLRDNKEYQPILTAA

SEQ ID NO: 470530 - protein, 337 aa, unidentified
MQITTVGVDLAKHVFQVHGIDDEGQVVLRRRLRRAEVIPFFAGLTPCLVGMEACATSHHWARELMSLGHTVKMMPPSYVKPYVRRGKNDATDAQAICEAVTRPSMRFVPVKSAEQQSVLMLHRVRALLIRQRTMLVNALRAHLAEFGVVVAQGVKRIRELIAMLTGENAPVPALARTSLAPLVEQLMDLDLRIKELEAELLAWHRSSEESRRLETIPGVGVITATALAATVTDPSHFRSGREFAAWLGLTPRQNSSGGKERLGRISKMGDGYLRSLLVVGATAVMRYAREKPSWVSGLLARKPARLVSVALANKMARIAWALLARKQTYQTQSSAVA

SEQ ID NO: 470531 - protein, 331 aa, unidentified
MDGVKRFVGIDVAKAALEVFIGSAGAAFSVANDEVGIRELLRQLVPADFVILEATGGLEVPVASALATAGIAVAIVNPRQVRDFARATGRLAKTDRLDAEMLARFGEAVRPAARSLANEQAQALEALVTRRRQLVEMMTAEKNRRASAPKVSHRSIDEHIRWLEKRLSGFDVELAELIRDTPLWRERDELLRSVPGVGKVLSSTLLAHLPELGMLNRKQIAALAGLAPFNRDSGKLRGSRCIWGGRAQVRRVLYMATVAGVRSNPVIKNFYSQLRARGKYPKSALTACMRKLLVILNAMLHHQTPWQTPALTLSTSPLSPLLGAVPEHGCC

SEQ ID NO: 470532 - protein, 367 aa, unidentified
MDGPRTISVCQDEVVEDLKRRKPSMERVIRIGMDTSKHVFQLHGVNAAEEPVLRKTLRRKELIKFFEKLPPTVIGIEACGGAHYWGRLLQSFGHDVKLLPPQYVKPYVKRSKNDASDAEALCEAMSRPTMRFVPVKTADQQAALMLVGLRERLIRYRTQLANAIRSYAAEFGLSAAQGVCRIEPLLDRIATDKSLPALARDLLAVQGKEYAQLQTQLEGVEARLLAWHRADSCSRRLAQIPGVGPIGASMLVMKTPAPDRFRSARHFAAWLGLTPRDHSTAGKVRLGGITRAGDEALRSVLVLGATAVLRQVRNGRGFASPWLIQMLKRKPPKLVAVALANKMARIAWKLMVTGEVYRREPVLSAMG

SEQ ID NO: 470533 - protein, 347 aa, unidentified
MRFYTKQHKHHCGIDLHARSMYLCIMDQNGKVLLHRNMRATPEAFLKAVAPYREDLVVAVECMFTWYWLADLCAVEGIAFVLGHALYMKAIHGGKAKNDRIDALKIATLLRGGMLPQAYVYPAKMRATRDLLRRRLHFTRKRAELLAHIQNTNSQYNLPAFEKKLTYLSNRGEACGRFSDPGVQRSIDVDLGLIAYYDGMLRELENFILRTAKHHDANTLYRLRTVPGIGKILSLVMLYEIHDIERFKRPQELASYSRLVKCARESAGKVSGSGGGKIGNVHLKWAFSEAAVSFIRKNPEGKSYHDRLVRKYGKGKALTVLAHKLARAVYYIWLRDTVFDQEKFLAN

SEQ ID NO: 470534 - protein, 391 aa, unidentified
MIFVGIDVSKDKHDCFILNSEGTVLADVFTIANNRIGFETLLSRIQSCSQGESKIKVGLEATGHYSYNLLGFLLDSGLTTYVINPLHTNLYRKSLSLRRTKTDRIDARTIAMMLMSDVDLKSYSNTAYHNEELKSLTRYRFDKVKERAKLKSSVARLVNILFPELEKLVSSLHIAVVYALLSNYPGASYIANANTEELAETLCTASKGRYTKSKTAEIQVAAGVSIGSKMPAKSMELKHTIALIRELDKEISEVESAIDKITSQMDSPIFTIPGIGRHMGAMILAEVGDFSNFASADKLLAYAGLSPSTYQSGQLQNCYAHMEKRGSRYLRYALFNAAKYVCLWCPTFSAYLEKKRSEGKHYNVAISHAAKKLVRLIFAMQRSGKAFLADY

SEQ ID NO: 470535 - protein, 397 aa, unidentified
MKNIRHIGLDVHANTIAAAIAEPGAKGEVRFVGMFPNREESVRKFIKKLGDPKLLKVCYEAGPTGYVLYWQLTALGVECEVIAPSLIPRKPGDKVKTDRRDALKLAQCYRAGDLTPCWVPDAEHEALRDLIRARESARRDQHRAKRRLSTFLLRHGMHRPDSMKTAWSTHHMKWIKTKVHFDQQALEDTLADYIYEVEHVAQRLERLETAIRHAVDHAPPRMKAVIDALQSMRGIKQLGAVTIAVEVGEMSRFPSAKQLMGYSGMVPGEYSSGRHRMQFGITKTGNAHLRRILVEAAWSYQYRPWLGGDLLKRQSLAPPDVKDIAWKAQNRLHHRYRALLTLGKNKPKIVTAIGREMLGFIWEIGTTVEARYDERAKTEVKKRTTRAAKIAAGITAP

SEQ ID NO: 470536 - protein, 381 aa, unidentified
MHEKQKHIYVGVDLHKHQHVAVIINCWQEKLDEIKVENKPSAFSTFLLDIDKHTEEGLTPVFGLEDVGGYGRALAQYLTDHGQVVKEVNPALSYAERKSHVTVQKSDSWDAECVARILVRQLSHLPDAKPHDLYWSIQQLVTRRNALVKAQGALKNQLHIQLSHHYPSYKKFFSEVDGKTALAFWERYPSPSCLEGVSVKQLTTFLLEVSNNTCSVKKANEILKLVKEDGNTTKEHQETRNFLVESIVRHILFGKQEIRKVGRELKELMSLLDFQLDSMPGIDLVTASALIAEIGDVRRFPNANKLARFAGVAPVYFGSGGKGKEQKSKQGNRALHALYNLAVQQVQVAKGSKLPRNPVFYAYYQRKLKEGKTKGQAWFAL

SEQ ID NO: 470537 - protein, 385 aa, unidentified
MSENITWVGIDDDKKNLTVAVLRSPGQEAEVSRIANEDGALRRWVRRLERESAGCEIRMCYEAGPNGFALMRRLESLGAVVVEVVAPSLTPRRSGRRVKTDPIDAAHLAHLYRAGELRVIAVPGTDAESSRDLVRTYHRVGEEATRKQHHILKFLVRRGRIYRDGRHWTGKHRKWLREQKFESWKDTMTFAELRSGLEELEERRDRLVDALAKLGQEESRALAVSVLRCFRGIDTVQAVSLVTEIFDAERFPHPRGLMSYVGLTPSVHQSAEREVRGGITKAGNRYARWTLGQVAKQYRNPPHVGPKLKRRREKQPAWAIEIADRAQRRLHRRYQGLLARGVPRARVTTAVARELVAFVWEALRTTDRMAREKSARKPDQEVCAV

SEQ ID NO: 470538 - protein, 350 aa, unidentified
MSQYIGVDIHSKFSQVCVMEKDGQVVREVRLEHDDPVGVEEFFGDVAEGSQVTMEATCGWMWLSDVLEELGHQVHLAHPAGVALIAQSRLKTDKVDARALAQLLRTGFLPEAYRAPGAVRDQRLLLRYRQALVAIRTGLKNRVHALLMRYNVHMEQSDIFGAKGTPLLRGLDLPGAGRRVLDGYLDCIEFLNEKIAQHERHLGEVLESDARVELLRSLPGVGRLTAYFLVAEIGEIGRFPSAKKLVSYCGLCPSTRASARMLMHGRTGPAGRSLLKWSLVEAAHTAVKRDSYFAKVFHRVARKRGNQKAYVAVARKMAEMIWRMMVEQRPYEAKRKQSRVGPAVAVVVRS

SEQ ID NO: 470539 - protein, 354 aa, unidentified
MLSVGLDLQKKYSQVEALEEGGERRAAARLINEFEQIDGFFRGLREPCRVVLEAGWNWGAMYDWLERIENVVEVQLAHPYGVRAIAAAQVKTDRIDARMLGQLLRVGLIPRAHIPGRETRQLREGVRQRLFLVRLRTMVKNRIHALLDRYHVVPPPVSDLFGKRGRDYLAKVELPGLAQDLLRQDLRLLQALSVEVRETETLLARTLKGDRRVELLQTIPGLGVLLATVVALEIDRIDRFVSPSKLVSYAGLVPTTYSSGGKTSHGGLMKMSNKWLRWALVEASWIAVRHDPYFRHQYGLRQRTKGPKTAIIAVARRLAEVIWHVLSEDRAYEVRQPASKKREYALTPAALLHD

SEQ ID NO: 470540 - protein, 476 aa, unidentified
MPGNPASRPDLMALPRLSHDTLYVGVDVGKRAHVAGFLSATLLTRHQRFEHCPALAFDNSREGFRSLVERIQTYVPLTQVQALLEVTGHYHRALLQYLQELDIPVYIIHVQKRQEGLLKTDKRDALGLANLLYNQLEKGIQVGDPLQAVRKLAPPTQAAAQLHGMVRHHYELVVESTQRKNKLTSICDELFPEFTRLLRNPNLPTALALRSRFPTPAQLALASFEELREARGRTCSVSDAKLVELQRLAAQSIGTKEPTRVRGLVFEQKQLMAELKLLGEHLEQLESEIVQVVENSREGTILTSIPGIGPQAAATLIATIGTIANFERPAQLKSYFGWVPKVAQSGSGLDWTRLSPRGVRQMKHTMYLIVWRAIQWDSDWKDIYDRLIARKCRSDERTRRLVGREKVIGRLAGQMTSVIYALLKKDQELLSHLAPGAKPPEPTLYDPALHRQHRLGQYQSSRSAGKLRQELQLPMN

SEQ ID NO: 470541 - protein, 349 aa, unidentified
MKIIACDFHPSYQQIVMWDKATGEMLERALSHERKEEVRAFYAGLQGPVRVGIEASGQSQWFEPLLAELGHEVWIGDAAKIRASCERKQKTDRRDAELLVKLLDEERFPRIWVPTPAERDARQLLLHGHKLVRMRTQLKNQLQALALNQGVQRKRKRWSEAGRKQLEALPLLPWASRRRAELLVLLDQLEASIGELDGAAAEQANTRPAVRRVMTHPGVGPITALAFVLTMGPAQRFRRGKQVASYLGLIPTEHSSGGRGQRLGPISKQGNPFLRGLLVEAAQSAVRHEPEMRRAYQRLAQRKCRALAKVAMARKLAVRLYWMLRTEVDYAQLIQGSHAGQLESFRGRV

SEQ ID NO: 470542 - protein, 392 aa, unidentified
MRFYNQPHRFYAGIDLHARTMHVCILDTASTVVYDRNLPCDFDTLLEAITPFRDGLVIGVECMFGWYWLADRCAEHQIPFVLGHALYMKAIHGGKAKNDRIDANKIAHLLKGGNFPLAYAYPKGMRETRDLLRRRSYLVHKRAELITHLEILNAQNNLPPFGKKLSYAANREELHIPERFAAPSVQLSATVDLELIDRLDELIAKVELHLTRTAKVDDVQTYHRLRTIPGVGRLLALVLLYEMHGVGRFDRVGQFLSYARLVRCLHESAGKKLGSGGKKIGNAHLRWAFAEAACLFLRGSERARQWKQKQEKKYGSAKVLGILAARLARAVYHMLRKQEAFDEERFWNGAPPAAPPPAGQSKPAAGPTKPAAGKTKPAAATTTKAKARAKVR

SEQ ID NO: 470543 - protein, 341 aa, unidentified
MARYIGVDLHKNCFTVCYMSKREHSLSEFRVNPEGIKRFKDSLKKSDEVAVESTGNTGYFAREIKAVVKVVRVINPTQFKIISQSVKKTDEHDAVTIARYLSKGLIPEVRMRSKEQARISSLIGTRDKFIKLRTAMKNKVHNILNANGIVTKKEMFSSEKALDKVCQMDLDREYIFELEIVVRQIKSLNKSIDEINKELNDRGRKLKGHENLKSIKGIGDTNATILLSTIGNVEDFADDKKLAAYLGIVPRVSISNETNHYGRITKMGNKIARTALVQSTLIAIRYNPYLRSFYERLKTKKGSGKAIIATSRKLLTIIYRTLKNDWVFEDFSNYKLAASNS

SEQ ID NO: 470544 - protein, 414 aa, unidentified
MAETSPPMPTPAPLAYAVGIDIGMESCMMCCLTMEKRQVIKPSQFSNDAAGFEWLFAHLGSLQVAPQQILVGLEATSRYGENLYYALLNRGYRICLLHPGQVHAFAQQRGLRAKTDRLDCTTIARVLLSGEARFGYVPSEQVVTYRELVRLHQQLTEEIVRYKNEIHALLVVLFPEFSQVFADPSKPTALAVLKAYPSAQLMGKAKPEDVYHLLHELNPRHYGHKTAAMLVQLAQTSVSSGQAGAARSSSMRILCDQLEHTQNNLRRLEEEIEHLLDQDPKIKGVLSIPEVGSMTVAVLRAELGDLDRFARLDQVVAYAGMDLQVRQSGKWKGQSKLSKRGSGRLRRMLYLAALRSIRLPTSPFGIYYHRLVGRGMKKGMAVVAVMRKLLIVAAHLIQTQEDYDAGKVGGAVVS

SEQ ID NO: 470545 - protein, 367 aa, unidentified
MFQLLTRQEESEMNATTVAVDLAKNVFELALADGNGRVIERHRLTRTQFERWFDNRKVDRVVMEACGSAHHWGRWLEARGIAVKLLPAQYVRAYVKRNKTDAADAAALLEAARAADIKPVAVKSIEQQALQGLHRLRSGWMATRTRRINTLRGFCREFGLEIRVGAVQGLAAIARLIADDRSAIPALLRTPMRLALEEIRLMEARIERLERELAQLARQSPACEALTSVPGIGLLTSTAMVAAVRDPRSFDSGRRYASFFGLTPREYSSGQHRYLGRISKRGDRYIRMLLTHGARSVLRAATAAQRQGRKLDRLRTWALQVQARTNHNKATCALANKLARIAWAVWVKHEKFQSTPAHPSMAAEVAT

SEQ ID NO: 470546 - protein, 410 aa, unidentified
MELLHPHCAGLDIHKETVVACVRHLRSGKVTTGIKTFKTTTEELIALSDWLATEGCTHIVMEATGVYWKPVWHILSDGEFELVLANAGHVKNVPGRKTDVNDAVWLAELMAHGLVKASFVPDQPTQQMRDLLRTRKQFVRERSSHIQRIQKTLEDANIKLDSVVTDVLGLSGRRILQALIAGQTAPQALAALADRRIHATTAQLEAALRGRVTDHHRFMLKLHLDQIDAQDAAIARIDKEVDGNVEPFRVALEMLNGIPGVSSLSAEVIIAEIGVDMSRFETAGHLISWAGLCPRNDESAGKRRSSRMKKGAPWLKTTLVQCAWAAARTKDSYFHAQYLRLRSRRGPKKAIGAVASSLLTTAYHMLKSGTFYQDLGANHFNHRAKDKQALHLIHRLKNLGFNVQITPSPA

SEQ ID NO: 470547 - protein, 311 aa, unidentified
MEHSLFVGIDVAKDRLDVHLRPTGETFSIGHDAAGLVALTERLVPCAPAIVVLEATGGYEVTVAAALASARLPIAVVNPRQIRDFARATGQLAKTDALDARVIALFAEAVRPVARPLPDAQAQVLGEFVARRRQLVEMLGAETNRRRLVRDPQLQRRIAVHIRWLERALRELETDLHDTIRSSPVWREAEDLLRSVPGIGPVTAFTLIADLPELGRLTRRKIAARVGVAPFNRDSGTLRGRRMVTGGRAPVRRVLYMATITAIRRNPAIAAFYQRLRAAGRPAKVALTAAMRKLLTILNAILRDHRSWQRA

SEQ ID NO: 470548 - protein, 347 aa, unidentified
MPAVIGCDAHKHFSVFVAIDRKGKTAAPVRVEHDRQEYIDFLRTLPPGSEIAVESTGHWYWMVDEMEKAGHRPHLANPSEAKKRMGGSNKTDALDAKGLAILLHNGTLPESWIPPGELRDRRELLRTRMALRDLRSSLKHRIHAAIDRYGLQATGISDLFRVKGRVYLDRTLDKLPCDTAAMVRIQLTSLDQLEAQVEEIEERIAVALKPSPEVQLLRTVPGVGEILAPLVWLEIGDVDRFPRAENLASYAGLVPRIIASGGRIRHGGVCRNVNQYLKWGFVEAATCAVRLKKYRDSHIGQLYNRLAPGKGHGRATVAVARHLAEASYWVLRKQQPYKAPGPRSIVA

SEQ ID NO: 470549 - protein, 345 aa, unidentified
MKVTTAGIDLAKNVFQVHGVDEHGKTVLRKQLKREQVAPFFANLQTCLIGMEACGSAHHWARKLQALDHTVRLVAPQFVKPYVKTNKNDAADAEAICEAVARPNMRFVPVKNIEQQAVLALHRVRQGFIKARTAQANQIRGLLAEFGLIVPQGIGNIAARVPELIEDASNELPGSFRMLVDQLVDHLKVLDTHVLNLEAKIKAWHRESEISRKLEQIPGIGPVTASALVATIGDAKAFENARQLAAWMGLVPRQHSTGGKAKLLGISKRGDTYLRTLLIHGARSAILAAQRKATKEDSWLGKLLLRRTPNVAAVALANKNARVVWALLAKDRTYRSDRATMAAGA

SEQ ID NO: 470550 - protein, 346 aa, unidentified
MYRNKDIILAVDYHAENTEVRWLNCHTGEERRMNIPTARTSILRLVEKAVAEAAPVGGKVVWIMESTTGWARVKELIGSRARFVMANVLQMPLPPKAYRRKSDKIDTGRMLREFLNGSLPQSYQPAAWWRQVRRLVDSRQDLIERQTAVKNWISHFLHHETWYDRAGLWTQKGMKRLRALRLSASDRMLLDLKIQELEQLSDRREQMEAAMQAVYDQWPQAQWLDEVRGIGMVTAVSILAHIGAIERFPTPEDLISYAGLAPGHRQSDDTRHNGKIGGGGTDSHLRYLLIESMQWVCQIPRYHDTFERAVAKHGKNIARIIVARMLLRSIYKMLHDGVRFNQVPAA

SEQ ID NO: 470551 - protein, 349 aa, unidentified
MVLIGIDPHKATHTAVAVDETENSLGVLTVKADRTQIERLLKWAIDFPERVWAIESANGLGYLLSQQLLAAGEDVVDVPPTLAARVRVLGSGKSQKNDPNDALSTAIAALRATRLRTVARDDHRAILRMLGDHHHELGALRTQAICRLHSLIRCLVPGGTGIRLSADRASGVLRKVKPATSAEAERRRLALGFVADVRRLDAEIADSKARIIKAVRASGTSVVELNGVGPIVAAFLIGHSGDMQRFKNRDHYASYNGTAPIGASSGPKTRGHQDPHRGPIRLRSRAPGLDRRSSRSNCGWVLHDDLCCSAPLVRRHPTGGPGRSGGRRSRRRCRSRCIPGHSRCQPGAF

SEQ ID NO: 470552 - protein, 351 aa, unidentified
MPRTSAVQVVTTIGIDMGKNTLHMIGLDTRGGIVLREKVPRGRITSRLANLPPCLIGIEAGMATHYVARELAALGHDVKQVPPTYAKPFRQGHKNDFRDAQAVAEAVQRPTTRFVPAKTNEQLDLQALHRVRSRLVSERTAVINQIRGFLLERSIIVRQGLRFLRQALPDILAKRTDVLSPRMARIVADLASDWRQLDERIEAVTDEIKTLAKSDDSCRRVMTVPGIGPIISSAMVAAIGSGAAFARGRDFSAWIGLVPKQMSTGDRTILGRISKRGNSYLRTLFMQAARVILLRRASWPKHGFGIWLAHAAQRLHPNVLAAALANKLARIAWTVLAQQRGYEARITKAAA

SEQ ID NO: 470553 - protein, 372 aa, unidentified
MSMYFIGIDISKYKHDCCIISAADQKVVSKVTIKNNKAGFNELLTIIHSLANPADIRIGFESTAHYALNLELFLENSLLTFMEVNPVLISEYKKSKTLRRTKTDSVDCESIARWLMTVEYKPHSKGFYHAYSLKSLTRLRDKLIRQRSFYLIKITNVLDHTFPEFKPFFNERLSKTALYLLENYGSAEKMARMNSVSYEKLRSISRGKFSPQQFIRLKELAANTVGVNNSIFDVELNSLLSLYKSLVKEINTIEKEINKLIEEVHPHYMSVPGIGPLSAAVIYSEYGDISNFTNPGQMLAFAGIEPGINESGTESHGGKMVKRGSSQLRYTLINCCLPLIRFDMTFATYYAKKRGEGKPHRVAITHMVKRLI

SEQ ID NO: 470554 - protein, 322 aa, unidentified
MPKNTATVYAGLDIAKASLQLHFQDRQYALTNSPAGHKKLLELLEPCPEVQVVCEATGGYERPVVAALHAADRHVSILNPGHVRHFALSQGKRAKSDPLDCALLTAYGQAHKPVPTPKPNAALMRMRALVDWRAQLKDQRARAHQQGEHTTDVFLLKQQAKLGKHLDAQIETVEKELAKLVAESALHQEQVQVLDQMPGIGFVTAITVLCHMPELGQLNRQQAAALAGLAPWIRQSGPWQGQRHIGGGRAVVRHALYMSAVVLARMKQTTLGKFYHHLRKQGKPAKVALTAVMRKLLVHMNQILKEHFLKKTNTPIIFSPCF

SEQ ID NO: 470555 - protein, 370 aa, unidentified
MSVRRILAKTINTDLEYEAIGIDLAKNCVSAALLTTDGEVVCIDRLDYSELEKSAQALSSTTFAMEPCTEMNYLVQKLEAWGHRCLVIGGKNVQNYVENHYSGQKTDLNDAQALAFLAQDTQLRTIKAKDMEQRKYASLTTLREQYIKQYRQTIVSLKGICQAWGLNISKGISGKARLKDLIENHAAFPEELKESLVDMVTHAQTAQKALNKITKTLEELAKNDKLCQLIRTIPGLGLICSCRLRATIGDIKRFKNPKDFPAYYGLVPRSIATGHNEKKGRITHRGDKTMRSLMVQGAGSVINMATRGKLKSKQLTKWILKKQKEKMPWGKLVCAVAAKLLRIVRAVLISSKPYNPQIAGVAKCSLPKGT

SEQ ID NO: 470556 - protein, 313 aa, unidentified
MDISKDTIDVTLITAKGEIDYIKIGNSHEGFEKLIAWIKTKRVRKIAISMEATGVYYEKAAEYLSVVYTVYVINPLKIKDYAKSQLSHTKTDKADSKLIADYTKRHLDKLKSFRPSENPTLYKLINLLKQLKQQKHESQNRLHAAKDPFIRSTHESIILLLSKKIEETSKRIDGMIKQQKSLNDEYKNLQTIPAIGKDTAAILLRHLTDKTFETANQFVSFAGLSPKIEQSGSSVNKKGRLSRYGHRQLKRALFMPALVAYRINAFPQLVKNLEAAKKPKMVIIVALMRKLAKIAYYIHRTQKPFDKARHQTV

SEQ ID NO: 470557 - protein, 314 aa, unidentified
MSSSSCYLGVDVSKDALAVAGQSRRWQFANTKEGHRKFIAQIQKLSASGHVVCESTGSYHLPMCLALQEAGIAFTIANAARIHYFGLSEGIIAKNDPIDAELIERFANTKRPPADPPLCREQLALSESVTHRQQLVGMIKALRTHRQQVLNAALVKEINKSIDALEKRLEALDRKLRAQIDAHPLWKAKFALLTATKGVGFVTALGLLAKMPELGTLNRGQCAALAGLAPYDDDSGKHAGKRTIRGGRQEVRTALYMAAVSAATHNPILKTFYQRLLAQKKLFKVAITAVMRKLLLHLNTLLKPATTTPQTTAA

SEQ ID NO: 470558 - protein, 389 aa, unidentified
MEHPMLHANDLSRSLNCLEQDRTIIAVIEMSQSNWLVAGIVPGIERHPLKKLAPNEEDLLRLLIRWRAEATKKGRTIVRIAVAFEAGRDGFWLARWLCARDIEAYVIHPTSVAVSREHRRAKTDRLDTGLLKRVFIGWLRGEPDHCHMAAIPTLEEEDAKRPNREREGLVRERTRIVNRIKSCLVRFGIRNFKPTLRKAPERLSMLCTPEGVPLPPNTLFELRRDMARLRFVIEQIKEIEETRAQRLEQAPQENSHAMVRLIARVIGVGVETADMLVHEVLARNLRDRRAVARYAGLTGSPDESGSRRREKGLAKVGNARVRRGMIQLAWRFLLFQKDSALAQWYRARTEIDGRKRKTMIVALARKLLIALWRLVTTGETPAGVVLRAA

SEQ ID NO: 470559 - protein, 367 aa, unidentified
MKKVSTVAAKVPKNFSQPKLTIGLDLGDRSSWYCVLDDSGSVLLEQRLSTTPKAMREVFGSMPRSRIALETGMHSPWISRLLTELGHETIVAHARNVRLIGESRKKDDRLDARTLARLARIDPQLLSPVKHRSAQAQADLTVIRARAGLVRARTALINMARGVTKSYGERLRGCNARNVNPEKAKGLSPELQAALEPLLAAVESLSEQIREYNQRIEQLAQQSYPQVALLKQVKGVGTLIALTYLLTLEDPHRFRKSRDVGCYLGLQPGRRNSGQSEPQLHISKEGDPYLRTLLVQGAHHILGPFGADSDLRRWGLKLAERGGKNGKKRAVIATARKLAVLLHRLWVSGEAYEPLRNSHPITMPAAA

SEQ ID NO: 470560 - protein, 349 aa, unidentified
MSIIGGLDVHRAQITFDWVDRDSGEVHRGRIAPATRAGLRVWLGELPRVEGAFAVEGCTGWRFVVEELQAAGLVAKLAEPAETSSLRGPKRRAKTDRTDARLLRELLEQGRLPSSWIPPAWILDLRSTVRLRKTLVDQRTAWQQRIHAALFHHGLPRPTQELLSQGTRGWLEQVPLPPASRQALQVALRQIDGLDAELDPIDQWLRTLARRQPGCRALIAGHYGIGAITAPTILAELGDARRFAGGDQVVRATGLDITVYASDGKRSPGHLSRQGPEVLRWALFEAAKAAARPSSPDYAYYQQVKARQGGNRATLAVARKLARRVRHTLASLGDAALAPVEDLPVAEAA

SEQ ID NO: 470561 - protein, 348 aa, unidentified
MTLTIVETRAITGGVDTHADAHVAAALDGIGGLLGVQEFPTTPAGYARLLAWLAGFGPVCLVGVEGTGSYGAGLARYLAAAGIRVVEVDRADRQDRRRQGKSDPLDAVSAARAAQSGRASGAPRGRDGQVEAIRALMVAKRTARAQRTQTINQARALIITGPDDIRGRFTGQGPAELVAELSGLRPRPGSMVRYHTLLSLRELGRRAHYLDAQLERLDELIIPLVTARAPSLLKLYGVSPDTAAVLLIAAGDHPGRLRSEAAWAHLCAAAPIPASSGKVTRHRLNPGGDRQANHALWRIVLTRMGSHPPTRAYVARRAKEGLSKKEIIRCLKRYVAREVYPHLRPPSG

SEQ ID NO: 470562 - protein, 421 aa, unidentified
MGKLIERCAGIDIGKRFLVCCVMTGAAHEEPRSETRRFDTTVPGLKRLRNWLHEERVTDVVMESTGSYWIPVFNLLEGHVTVVLANPEEVKNRKGHKTDRKDAGHLADLLRHNHVKSSYIPAEPVRQLRDLTRRRVQLTQDATRERNRVQKLLEQVNVKIGSVLTDVFGVSGLHMLLALLDGRAAPEEIAGLARGSAKRKTPQLIEAIEGNRMSDHVRFLIRGCLRHLACLEEEVEELDTEILRRMQLFTFQKAFTLLQTIPGVSQLSAATILAETGPDLDAFPTIEQMASWAGLCPGNRESAGIQKGPQTTHGNPYLCTALVQCAWAATRKRDSVFRSRFQRLAPRRGEKRAIIAVAHHMLIILYCMLKRGVPFLGAEHAPKQRRRERRAHHHLRCLRRLGFSVEIRLSSESTPPDTISR

SEQ ID NO: 470563 - protein, 338 aa, unidentified
MIKPLKQVAGIDVAKNELVVSLGRMNPDTSIEVFANKCFANTLKGFSDLLAWVAKMMSGNTKVTFVMEATGVYHEAFAYYLFEKNQQLSIVLPNKISSYARTLDIKTVTDKSASQAITRFGLERQLEQWQPPQKVFRELKQLTRERDQLVVERTLLKNQLHAEQTEAHSNERSISRLVERINLITRQEQEIKSEIAEIIKSDAELSRRIELLTSIPGIGKLTAVIIMAETNGFELIRNKKQLVSYAGLDVREKTSGISVKGKPRISKRGNRHVRKAMHLPALAAIRTDERFKAIFARLIAKHGIKMKAAVAIQRKILELTFTVWKNKKTYDKDYLKTL

SEQ ID NO: 470564 - protein, 336 aa, unidentified
MVQIYGIDLGMSSFDVSFLSESGSVRHLSGVKNTVHGISKFLLSLPSSAVLCAEHTGVYGDLLLRLCTLNRTCLCFVPGYQIKHSLGLQRGKSDPLDACRIREYAERFYDLLRPCFYPGEEMSELQELYRTRSLLVESRKRLDTLNIGDNCKSSVSLAADHARRAVLAELNTQISGLDHEIEALIQNSSEFSRNYQILTSIVGVGPVTSCELIIKTENFRKLDTAKKCAAYAGIAPYPKESGKMKCGHKISPMGDKQLKTLLFLCARSAKEHNKEIRLYFLKKHKVEKKHFFVAMNNIANKLLRLIYSLIQKQQTYDRDYIQRDPRCVVISDTHKC

SEQ ID NO: 470565 - protein, 452 aa, unidentified
MAKLQKNEDIGKLKVQHSRCGGIDVGATLMQVCISVEDREHGSNRSFGTDTQSLRDIVNWLLGHGITHVAMEATGVYWIPLFNMLVKNGIEAVLLNAADVKNYTARKTDVNDAAWLMTLMSYDLVKPSFQIDELSRALRNCTRHRMSLVSTCSDCIRRMQKTMELMNIKLTEVISDIAGPTGIRIIEAILAGNTSPRDLAALASDRCKSSKEDIAGALEGTWDDELIFILGQHYRQYLLYREQTMQLDSVIEGKLKLLVERILKMNGGEVRTVIRSKKGTPHMKNRISFDIEALSVQIWGVNLMRIEGVSGITVLSLMGELGCNFVSSFKDAAHFCSWCNLSPCHKITGGKIISSKMKKRVNPVGLTLRNCAQTLANSKSPLGDYYRRMRSKGGGKYAVCATAHKIAAIIYTMVRNQQEYDPSKVSVNDRQWLEKRIKHHEKLLKKLKSMAS

SEQ ID NO: 470566 - protein, 427 aa, unidentified
MSEVEAVRQEPEFAAFVGIDWADKKHVWCLRAVGLEKRESGELEHTPEAVEAWVGQLCQRFANRPIAVAVEQSRGALVFMLSKYEPLHLFPVPSTMSASMREALYPSGAKDDPRDADLLLDLLLQHRDKLRRLSPDTEATRRVQNLVEARRKLVDEKTAQTNRLVDHLKIYFPQMLDWFERLDTELVCAFLERWPTLEELQRVPATKLRTFFQKYHCRDQKLIERRIVAIRHAVPAIRDRAVMEANSMLVTVIVQVIRSLVAGIANLEEKIEEAAAAHPDFFIFDSLPGAGAALAPRLLAAFGSQRERYSTAREVQSYSGIAPVMERSGKKQWVHFRVACPKFLRQSFHEWAGHSIAQSVWARSYYQQLRSRGKGHHAAVRALAFKWIRVVFRCWKDGVAYDESRYLASLARRGSPLSAIVAAGKTL

SEQ ID NO: 470567 - protein, 384 aa, unidentified
MSENILYVGMDTDKNHVDVAVAEPLPGGEVRYWGKVANVPAALDRVIKRLRRDGRQLQVCYEAGPCGYGIYRRLNGKPNVSCQVVAPSLTPRRPGVRVKTNRRDCLTLAKLLRAEELTAIWVPDAAHEAMRDLIRAGGVAAQDLARSRQRIGSFLLRQEIRYVGKPWNKKHRAWLGRLEFAAPAHRLMFGELLEALDQAVARRDRLNDHIAELVPSWSLAWLVEALQALRGYQLINAVSLVAEIGDPRRFANPRQLMGHLGIVPSEHSSGDKVLRGPLTKTGNRRARKVLIEAAWTYARTAKRPAARALAQPPAVRAIAEKARHRLSGRYRRLTARGKLRVVAIAAVARESLGFIWAIAQAAAPATIIQPCRPANGTGRGSGSR

SEQ ID NO: 470568 - protein, 314 aa, unidentified
MSSKVIVGIDVSKARLDCFGLPMQEAWSCDNGPEGIERLVHRLRELDCELALMEATGGYETQAATALAAAGLRVAVVNPRQVRHFAKALNKLAKTDRIDARVLAEFAHSVNPQVRPLPDEHTRELSELLARRAQLVGMRTQEKNRLGQAAGRLREGIKTHIKWLDVEITKLEADLSAKLHASEAWCDKRDLLLSAPGVGPTTTFALLAELPELGQLNRQRIAALVGVAPLNDDSGKHQGRRFTWGGRASIRSVLYMAAVSAMRHNPLIRVFYQRLREKGKPFKVAIVACMRKLLTILNAMVKHNKPWQSLPQTA

SEQ ID NO: 470569 - protein, 350 aa, unidentified
MIIIGCDYHPGFQQIAYVNTDTGELSETRLGHKEQAEQFYRELSQRGVTVRVGMEASGHARWFERLLNELQFELWIGDAAAIRTKRVRKQKTDRQDAQLLLRLLLEDRFPRIWVPDAENRDLRQLLWHRHRLVQMRTRVMNQLHVVALNEGLRRKKALWRPAGRVELEGLSLAPWASRRRQDLLDLLDRLTPKIHELNGKLEQIVELRPVTRQLSTHPGVGPLTALAFELVIGTPERFACAKQIASYVGLVPVEESSGDRRRLGHISKQGNTLLRFLLVEAAQVTVRSDPQWRSQFFHLAMRRGRKIAKVAMARKLAVELYWMWRRGWEYDEMQQLGSHAGEPGNRHGVQ

SEQ ID NO: 470570 - protein, 318 aa, unidentified
MSQPNQHCIGIDVAKLSLDIAGTAEFSPFSSSNDEDGFMAILKALKEWNISLILMEATGGLEASVACCLQAPGYEVVVINPRQARDFARSMGYLAKTDKLDAAMLAQLAQIIDRHPDRSRYIRALPDEARAVLTAMVVRRRQLNNMLVAERNRRYPSHPQSRKSIDNIINALESELDHISQEMKQHVKVFFMEQAELIGSVKGVGEVTVASLIAELPELGKLNRREISALTGVAPLNRDSGKMRGRRTTFGGRAGVRATLYMAALVATQFNPAIKMFYQRLLTVGKPKKLALVAYMRKLITILNTMVRKGEKWDASFR

SEQ ID NO: 470571 - protein, 361 aa, unidentified
MKKVSKSTQRMEATHGKPSMTVGLDMGDRYSHYCLLNEDGNVVEEGRTQSTEAALRRHFASEPRMRIALECGTHSPWVSRLLTELGHQVIVANARKIPAITGSESKNDRNDAEKLARFAAYDPKLLSPLEHRRPGRQLDLNLIHARSTLVRARTMIVNALRGLVKSAGGRLPACSTESLPARAPAAIPPALIEVATPLVEQIALLNAQIDGMDKQVEKLAVKYPEIRLLRTAPGVGPIVAAAYVLTLDRPDTASNRAAGAFLGLRPGQSQSGDADPQRRISKTGDRCLRSLLVQSAQYVLGRFGPDSELRRWGLKLAATGGKRGKKRAIVAVARKLAVILHSMWRSGQPFQPFPQPALAAA

SEQ ID NO: 470572 - protein, 465 aa, unidentified
MARKSKNVKSKDHKRLPRSLKTIYANAAGIDLGSREHWVCGPPREDGTPNVERFGTTTPELFRLAYWLKEQGVNTVAMESTGVYWIPLFEILDSRGLEVLLVNARHISNVPGRKTDMLDCQWIQLLHACGLLRGSFRPSDDICWLRALIRERNTMVEQRSDWVRRMQKALDQMNVCVHHAVSDITGVTGMAIIRAIVEGERDPLALARLRDARCRKSEKQIAEELTGNRRPEHLFNLRQALKMYHQLCAVIEDYDAEILTYITKHQPKDAASHPAPAHSSKSKARALAKRGQEPLRQALYGFSGFDLTTIDGIGVDTASVILSELGLDFSMFPDESHFVSYLRLAPNLSISAGKKVPSKFKPTTCTRVSTALRMAALTLRHSKSALGGLYRRIAWRKGASVAIFATARKLAQLIYRLVRYGQAYLDTATEAYDARFNQRRLRFYTKALKEMGYTLQPLTENALTT

SEQ ID NO: 470573 - protein, 392 aa, unidentified
MIYIGIDVAKSKHDCCILNEKGETLSSFTFINDRQGFEKLLCEIGMYSSCSDLSDARIGLESTGHYSINLQNYLLQKRLCVRIYNPLQVNLLRKAQSLRKTKTDKSDCKFLATLLFSDENKSYSQTVLPVSELRNLTRNRHRLVGIRSKLKLSLSRLITVLFPELPGIVWSANQKSSYALLSEFPTAKDIASANIIRLTNVLSANSHGKYGREKAEQIRNLARNSIGLDSRAVGFELQQTIRLIQNLQSEIDLLDKEIKKIMREINSPVLSIPGVGYVLGAILVSEIGSIENFANPAKLLAFAGLEPAIYQSGQYNSNFTPTVKRGSTYLRWALMQAARLVAYRDETFSSYLEKKRAEGKHFFVAITHVAKKLVRVVFHLLKTDQNFVPQFG

SEQ ID NO: 470574 - protein, 422 aa, unidentified
MQNTAARKVRQVPEGYLVIGIDPHKSKHAAVAITQDFTIRDKFKFENAMEGFELLLRRVRTEMVRADCRGVMFAIETGGHYWRNIAYYLDAKGIPFRFINQYTLKRRREGKDLNHRKNDYRDSEVAAQLLCTGEFVESGLPQGVYADLRSSHNAYRRLVKERTRITNLIKGLLDGVFPEFVHVFKDPCAVTAQGVLSCCLTPWDVAGMDIENFIAKVEANYHGHRLMRRKLADLHEAAKMTIGISSGARSVVSEMGFLVEKLELIKKHIKEIDQTLTRLVDQTEEGKYLLSITGLSYIAVAGLIAELGCFKAYRTAKQMIKMAGSNPTESESAGKKSAHTPMSKQGRPVLRYCAWTSVIPMLRFNADFREWAKKRRERPIHENPLCGREIVGAALNKLLRLAFSMVKNQTFYGSPQLVSVAS

SEQ ID NO: 470575 - protein, 408 aa, unidentified
MKTLHKRCAGLDVHKAEVVACLRIISKRRVEREVRRFPTTTQGLLALAEWLESAGCTDVAMEATGVYWKPVWHILEGRFALILANAAHVRNVPGRKSDVNDATWLADLLAHGLIRSSFVPPPAIQELRDLTRTRRQLTREIVQHVQRIQAVLEEANIKLCSVITDIMGASGRRMLKAMIAGETDAEKLAALGHERLGCTRAELVEVLTGRVREHHRFLLGQHLRTIEQLKDSVAAFDARIEAALSPFHDIVERLEEVPGLAATSTETVIAEIGTDMSLFPTAGHLLSWAGFAPRLDESAGKHRSTRIRKGAPWLKPVLVQAAWGAARKKNSYFQAQFLRLKARHGAKKAAIAVAASILTTVYHMLRDGTCYQDLGPEYFTRRNPAQAAARLANRIRNLGYHVEIRAAA

SEQ ID NO: 470576 - protein, 332 aa, unidentified
MEHCAIDLGGRKSQLCIRDANGTILLERRVETLDIPGLLSEMPPSRVVMETAAEAFRLADLARQAGHELRVVPASLVRTLGVGARRTKTDRRDAQVLSEVSCRIDLPTVHIPSGRSREWKAICGMHDALVSSRTKLINNLRGWLRGQGYRIRTGATASFARRVAELPHLPSYVQAQVEMIEVLAEQIAASTARLETLAEQDEICRRLMTVPGVGPSVAIRFVAALDQVDRFASAHKVEAYLGLAPGESSSSERQQRTGITKAGPSTVRWVLIQAAWVLRTRCRDPQARALQLWAAETEKRRGKRIATVALARKLAGILYALWRDGSSFTARD

SEQ ID NO: 470577 - protein, 356 aa, unidentified
MNYIAFDSHKRYTLASVESSTGQLLQEKRIEHAPGNLRKFLSQYEKGSPVAVETIGNWYWIVDEIEQADMVPKLVNARKAKSMIGSINKTDSLDARGLNKLQRVGVLPNVWIPPADLRDKRDLPRTRMLLTNERTRLKNRIQANLTKYRLNLTGISDTFGVKSADKLNESISALPAYTRYCTERLLERLYFTEKQIGVFEKYIKEAFKNSIELKHIMTLPGVGYILGVVILLEIGDVGRFAGAPQLASYAGCTPRVHASGDKIRLGQLRSDVNHYLKWAFTEAANVISTHKKHWAYRHSVRLYNRIAAKKNHQKAVGAVARHLAEATYWMLRKDEDYKEPKVIGEVIEGEISAMPA

SEQ ID NO: 470578 - protein, 348 aa, unidentified
MAHFVGLDVSVKETSVCVVDDAGKVILEQKVLTEPDAIIALLSSLGATYRRIGIEAGPLSQWLVNALTAAELPVICVETRHMKALLTAQQINKTDRNDARGIAQMMRVGLFKPVHVKTLVAQEQRMLLTSRKLLQRKLLDVESDLRGTLRNFGLKVGVVGGSRYEARVRELVEGFPRLAAIVEPLLSVRRVMRQQFAVLHKMLLDTVRDDPVCRRLMTAPGVGAVVALTYRATVDQPQRFAHSRAVGAHVGLTPKRYQSGEIDYDGGVSKCGDALLRTMLYEAAHSLLIQSRKWSWLKAWGVRVAQRRGMRRAIVAVARRLAVVLHRMWVDGSEFRWSKDSTAVPAVA

SEQ ID NO: 470579 - protein, 413 aa, unidentified
MRRVIGMDIHRTFAQVAVWEEGRLHQAGRVEMTRTALEGFGKTLEPTDEVVVEATGNAMAVVRVLSPFVARVIIANPLQVKAIAPAQVKTDKIDAGVLASLHAAGYLPEVWTPDAATERLHRLVTRRDQVVRHRTRIKNEVHAILHAHLIPRCPHADLFNQRGRAWLSRQPLPDDEKAAIERHVRELDRLGEDLVLLDREVAQSVIADPAVARLTTVTGINVVVAAGLVAAIGDIRRFASPQKLVSYVGLNPRVRQSGLGLAQHGRISKVGRSHARAMLVEAAWTAAKAPGPLHAFFVRIRARRGHQVAAVAVARKLVVLRWHLLTKQVDYLWARRPALVAAKKRGLELKAGQPVRKGNQPGPAHAYNVKALRDQEMAIATQAERAYEQFVAHWQPRGPGHGVRERLKPARYE

SEQ ID NO: 470580 - protein, 342 aa, unidentified
MFYAALDVSLRSVAVCIIDGDGKVRLERSVPSDVPDLVRCLNEFGEPIHQVGLEAGTLTQHLTYGLREAGFEVVCMEARQVAAALSAMRNKTDKHDARGIAQILRSGWYSRVHVKSVESHHLRALLTCRKVMQRKCIDLENEIRGLLKIFGVKLPMRLSRGAFDVAVRDTIESDPALSHALLPMLHARQVLFASFMELDRRVRKAAHEDEICTRFMGVPGVGEITALSFKAAVDDPARFKSSRTVGAHFGLTPRRFQSGEKDNPGRISHAGDADVRATLYAAANAMLMRSIKWSSLKAWGMRLMKTKGRRRAIVAVARKIAVVLHRMWVDGTDFRLGSEATA

SEQ ID NO: 470581 - protein, 354 aa, unidentified
MIIIGCDYHPGFQQIAFVDTETGELNELRLEHREEAEKFYHELTAREMKVRVGMEASGHARWFERLLAELHFELWMGDAAEIRTKRIRKQKTDRQDAQLLLRLLLEDRFPRIWVASGENRDLRQLLWHRHRMVQTRTRLMNQLQAVALNEGLRCKKRLWGESGREQLEGFRLAPWASRRRRDLLGLLDRLNPMIVELSQAIEQEVERCPEAQRLMTHPGVGPLTALAFVLIIGTPERFGSGKPIASYLGLVPSEESSGDRRRLGHITKQGNSLLRFLLVEAAQVTVRSDPGWRSKFFHLAMRRGRKIAKVAMARRLAVRLYWMWRKGWDYEQLKKFGSHAGQPENRRGVQLNTE

SEQ ID NO: 470582 - protein, 427 aa, unidentified
MVAAARNFRRGKRMNRQQWYAGIDWATESHHVFLTDGSGRKIGEKIFKHSGAGLAEMAAWLMAASQAKEPGHIQIAIEVTHGPVVETLIERGFTVHAINPKQMDRFRDRFTLAGAKDDSRDAEVMASALRTDPRCFRLLAAPDPVIAELREWSRIAEDLSAERNRLTNRFRQQLWRYFPAMLELESDLGAEWFLDLWEAAPTPCKAARIRETAAAKILKRHRIRRFAAGHVVAVLRTAPVQVAAGTVKAACAHTETLIARIRLVNAQIKEAQRHLDALTARLIPTEDSEAGQQKQHDVEILASLPGVGRIVLATLLAEAWDALLRRDYAALRSLTGVAPVTKRSGKSCIVIRRQACHDRLANAMYHWARIAVQYDAKSKAKYTALRGRGHSHGRALRSVADRLLNVACAMLKAGTLFDPSLKTQNAP

SEQ ID NO: 470583 - protein, 373 aa, unidentified
MDQDTTYVAFDTSKETLAVGIARGGRRREVRFFGTIASRPEAVRKLVEKLAKQHHRLAFCYEAGPTGYGLYRQIRAMGYDCQVVAPSMVPVRPGGHIKTDRRDATTLAALFRAGELTAIWVPDAAHEAMRDLSRGRQAAMEGLRRARQQLLSFLLRHGRVYPTRSHWSRAHRRWLSEQRFDHAAQQIVFEELIQAVEQAQSRRDRLEQQMAALPPSWSLREVVAALQALRGVALLSAITLMAEIGDFRRFTNPRELMAWLGLVPREHSSGATTVRGAITKAGNRRARRVLVEGAWTYRLPARVGLELLRRNRALPQAIKDVAWKAQVRLCARYRRLLRAGKPTSVITVAIARELAAFVWAVATTVMPPLEPTA

SEQ ID NO: 470584 - protein, 381 aa, unidentified
MAKQKKSTFERLRSGTMNRQQRRDLGRRLAGNDPGLTIVHPNAGGIDVGNESHFVAVPPDRDPNPVQEFGCWTADLKRMAAWLSACRIDTVAMQATGVYSIPLYDILTGHGIRVVLVNAQHTKNVPGRKSDVQECQWLMKLHTYGLLRDSFRLEEKMEGVRTIWRLRDRHLKDASRAVQHMQKALTKMNIQLANVISDITGVSGQAIITEILKGERDPWKLADLKHELVRASREEVARSLEGNWRADLLFELRQAVDSYRFAHQQMRECDRKLKSFLASLPTRSLERPNRSGEASATAPREKKTLKKPKPKRNEPTIDLKAELKRICGVDLTSIDGINVITAQTILSEVGTDMSGFPTENHFTSWLGLTPSKDISGGKSSD

SEQ ID NO: 470585 - protein, 407 aa, unidentified
MEVIIENACGMDVHKDSITACAITPKGKEIETFSTKTIYLIELVDWVKKHNCTHVAMESTSVYWKPIVNLLEAEGIEFLVVNAQHIKAVPGRKTDVKDAEWIAKLLRHGLLKASYIPDRNQRELRELVRYRRSIIEERARQYNRIQKVLEGANIKLGSVVSDIMGVSSRDMLRSIAEGNEDLEELTNFARGRMKNKKDELKLALQGYIQEHQRFMIKTIMDHIDFLTEQIDKLDKEIEKRMEDDQEDIDRLDSIPGIGRKMAEQMLAEIGPNIKEQFPTAPQLCSWAGLVPGNNQSAGKRKSSKTMKGNKYLKSALIEAAHSVRGSKNYLGALYRRTASRKGKKRAAVVVAHAMLRISYYLLTRKEMYVDLGEDYFDKQRQQSIVRHSLRRLENLGYTVTLVEPKVS

SEQ ID NO: 470586 - protein, 485 aa, unidentified
MTTVYLGIDVSKGYADFVAMNEAGSELGGWGRFDDTRAGHDQVQARMAAVWARAPETQVVVGVESTGGYERNWLGLCHRLRRAGWALTAYRLNPLVVKRYHERQLHRTVTDRISAAGIAAYLRTGRRRQDQLWVAGELEGALTLYRTVRRLVRLQADLQNQLQALLSRCHPELVAYLRGGLRQWVLALLRQYPTAAALAQADPAVVARIPYVTPAAATRLVAAAAASVADQTDPATGRAVMVLVDEIAHLRLQVRRLQTELAEQLRADPGVQIIDSIPGFGIWSAICLRLELGDIHRFPRPAELVAFAGLDPQHHQSGDTTINRGISHRGQAGVRAILYPVVRAAIRCNPAVGALYTRLRARGKTDAQAVVAGMRKLLHLVFACWVQGVAFDPSRWEQVAGKAQEMAQRAAMAPTSAAAVPLATCLAAPVSKREAKRRKAAHSPQGPCGVAPQKRPEFERPPSALIIPIRTPSCQGDHAPDFSSC

SEQ ID NO: 470587 - protein, 345 aa, unidentified
MSNNIHFSCICGIDIAKKVMQVFKVTSDGVVTNTSVSRKDFLEHFRNIPPALIGMEACATSQPWGRELQGLGHTVKLLSPKAVKPYVKGLKNDRNDAEGIYRALIMGVREVSIKSTAVRDLSLLQTMRAKRQRDKVATINHIRGILAEYGLVMGKSVRAFLSNAGTLIARLKESETTSQLVISELEKLLKEVKEIVSRIEELESSIKKIASENKNYDLFRSAPGVGPITAAMMVVLLCNPTVFKNGRDFAAYLGLAPMSFGSGGRSQVTGIPSKYRCHNEARSLLVQCAHSITRLKYKSDWVASILSRKPKKVAIIAIANKLARQLWVMAKKGDKFEKRLVLAAV

SEQ ID NO: 470588 - protein, 358 aa, unidentified
MKKVSTAAQKLTIGLDLGDRSSWYCVLSETGEVVLEQRLGTTRKAIEEVFGGIPRSRVALETGMHSPWVSRLLSEFGHEVIVAHARNVRLIGESQKKDDRLDAQTLARLARIDPQLLCPVKHRSAQAQADLMVIRARAGLVRARTALVNTVRGLAKSYGERLRGCNVRNMNREKADALSPELQSALQPLLAGIESLSERIREYNERIEQLAETSYPQVALLKQVKGVGTLIALTFLLTLEDPHRFGKSRDVGCYLGLQPGRRNSGQSQPQMHISKEGDPYLRTLLVQGAQHILGPFGQDCDLRRWGLKLAERGGRSGKKRAIIATARKLAVLLHRLWVSGEVYEPLHNSRSLTLPAAA

SEQ ID NO: 470589 - protein, 362 aa, unidentified
MRLMQTYSKKLDFSEYDVYVGLDVHKKSWTVSIMVDDILHKRYSQDANPLILANYLSKNFPHGRFHSVYEAGFCGYWIQRELEELGIDSKVFSPADVPTTDKERKQKDDGRDSLKLAKALKNGDMEAIHIPKEKTIQDRMLIRTREALVKDLTRSKNRVKSMLYFNGIRIPECFESRNGYWSNKFLAWVEQLNMPEESGTIALQTHLNQVRNNRTQVLYLTKSILQLAKTNRYSDLVTLLRTIPGIGLLTAMKILTELETILRFKNIDKLCAYIGLIPMTKSSGQKEVVGDITVRGHHILREAFIESAWTAIRKDPALLLKYKELVNRMEKNQAIVRIAKKLVIRTAYVLRHNEPYKMSLVN

SEQ ID NO: 470590 - protein, 316 aa, unidentified
MERFIGIDVSKSCLDVHVLPEGDAFQFARNADGIDELVRRLAALAPWIVAVEATGGFETVVAAGLAAAKLPVAVVNPAQVRAFAQALGKRAKTDPIDAEVIARFVAATKPALRPLPDEETQQLADLVTRRRQIVQMLTAERNRERRATHRKTAKSCQRLIKALERELADSDGEIDQAVRQSPVWREKQDLLQSMPCIGPVVSRTLLAELPELGTLDRRRIAALCGLAPWTRQSGQWRGKSFIGGGRGSVRAALFMAALGATKRNPVFAAFDQRLLAKGKAKLAARIAVARKILVALNAMLQTGQRWDETKHAQPQT

SEQ ID NO: 470591 - protein, 345 aa, unidentified
MLTIGVDPHKRTHSAVAVDQVGTDVSAARDGFGALLRWSRSLPDPKRVWVIEDCRHVSGRFERFLLDRGETTVRLPPRLMANAREAVRERGKSDPIDALAIARTALREGIENLPAARLAGSELEIRQLAVHRERLIDARTRLINELRWQLHDLWPEWEIPKRVLVGPGWQARVARRLQRAEPTVRVRVARDEIRRIRDLTRTINELRQELAILVDQVAPQLLAERGLGVITAAKLIGEIAGIHRFNSDAQLARVAGCAPIPVSSGRTDRYRLDRGGNRQLNHAIHMLAVCKIRLDPQTAVYIARQRERGKTNREAIRCLKRHLIRRVYNLLHDPNSAALAIHCTP

SEQ ID NO: 470592 - protein, 384 aa, unidentified
MEKSITLHVGLDVHKDSIDIATAELGRDGEVRHVGSIGGDLASLDKALRKLIAKGHRLHVVYEAGPCGFVIWRHLNALGHSCDVVAPSSIPKRSGERIKTDRRDAMNLARLDRSGDLTAVRVPGATDEAVRDLVRAREDSVRECRNARHRLKALLLRNGIAYTGKSSWTAAHLRWLATLKMEHAAQQIGFQEYLHSITEATHRIERLEQAMRETLPDWSLKPLVQALMALRGVQLIAAMTLVAELQDFMRFASPRKLMAFVGLVPGEHSSGPKRRQGSITKAGNSAARRMLVEIAWHYQHSPRVSPVIATRHDRLPQAVTDIAWAAQLRLHAKFKRLLARRVMKNKCVVAVARELAGFVWAIGCEVQTSGWQGVPLESAAIVAA

SEQ ID NO: 470593 - protein, 344 aa, unidentified
MKVTTIGLDIAKSVFQIHGVDEAGEVVLTRRFTRRKILPFFAKLPSCLIGIEACATAHHWARELAALGHEVKLMPPAYVKAYVKRVKNDAADAEAICEAVARPSMRFVPVKSPEQQSILMVHRTRALVVRQRTMAANAMRAHLAEFGLVANPGIRNLMKLVDRTFDETEPDERLPEMARTALAILVRRLVELQDELQALDRTLHDWHQQNALSQRLAAVPGIGIITATAIVATVSDIHAFRSGRQFAAWLGLVPKQNSSGEKIRLGGISKQGDRYLRRLLVVGATAVIRHSRHKNTPLACWLSAMLDKKPVRVVSVALANKTARIVWALLAHNRSYHPYHVAEQ

SEQ ID NO: 470594 - protein, 414 aa, unidentified
MNRMTDPPVHVTGGVDTHADVHVAAAVCTTSHRLLGTAEFETTPVGYVQLLAWLLSFGLLDAVGIEGTGSYGAGLARFLTAEGVALVEVDRPDRAARRLHGKSDPVDAEAAARAVLSGRASGTPKSRDGIIEAIRVLQVVYRSAVRDRTAATNRFQALVVSAPAGIRADLQQLPPKQRFARARRWRDRDGDGVAARATRQALRELARRIHLLDEQAMRIEVELDVLTDQAAPALRDLIGVGVHTAARLLVAAGDNPERIHSEAAFAHLCGVAPIRASSGKTNRHRLNRGGDRSANHALWRIVLVRRLHDERTRAYFARRTAEGLSDREITRCLKRYVAREVHRALTHPLELAPRGAELRRLRTAAGLPLRIVAEQFNIPIPRISRIERGLTREPDLQTRIHAWLTEQGITQIAA

SEQ ID NO: 470595 - protein, 354 aa, unidentified
MEIHMAAVYVGIDVSKDQLDCASTRGEEFEFDNTESGIALLVAKLQSLDPKLVVMESTGYFHREAAHALHVGSVPVVVENARHIRSFAKALGVLAKTDKIDPPLIARFAEKVAPTLRPEPPLEVRVLAGLVRRRAQLVVIRTQERNRRLSASKEWEVVCVDIKESIEALATRIAAIEMATADHVKKHPTLRTKAKLLRTVPGIGPVITHSLLGCLPELGTINRGRIAALAGLAPFNCDSGRMRGRRRIWGGRSEVRTALYMGAVAATRHSPVIRAFYERLVAAGKAPKAALIACSHKLLLILNQMMKEQKPWSPRVPVAAPALPGVVPPAAVPTPAGCTRKAKPSKSCATRTRR

SEQ ID NO: 470596 - protein, 298 aa, unidentified
MHYVGIDVSKRSLDVCLLAEGSKGSRKTKTLSNGQDSAQNLAKWLILQKCELSQTHVIMEATGIYHEYLACGLHQMGILTSVINPCRSREFAKAMGIFTKTDAVDAYVLAFYGCLKQPEAWTPPEEEVRKLRALLQHRDSLLNDKLRIDNRLNTLKSTEAVQEVMDSLSLVNQYLKSEVARIERLISSHIAQHPGLKRDLKLLMSIDGIGKQIGWNMLAVLRGNNFKSAEQLAAYLGVVPVERRSGTSVHGRARLSKIGSSNIRAKLYMGALTAISKNSHIKALYERLLAKVLPTVRK

SEQ ID NO: 470597 - protein, 341 aa, unidentified
MTEVSTVGIDLAKSVFQIHGSDCSGALLIRKKLRRDQLLPFMATLPRSVVAMEACSSAHYWAREIAAVGHDTKLIPTAYVKPFVKRQKNDMADAEAICEAAQRPTMRFVQGKSAQAQASAVVFRTRDLLVRQRTQLINAVRGHLTEFGYVVRKGAGHVGKLVEIIADPQSDIPVEARPVLAIVAQGLEALQAQIALLDREIASRAKADPVAQRLMTIPGVGPVIATVLVALAPAAGTFRRGRDFAAWLGLVPRQHSSGGKERLGRTTKMGERSLRRLLILGASSATKVAARNPEKASAWLVGTLARKPRMLVTVALANKMARIVWALMAHGGTYRAPAAAA

SEQ ID NO: 470598 - protein, 386 aa, unidentified
MTQVSTAIAEAHREDGTISVALELSKARGLVGIALPRSSKISRYGVTGGDTAGLLKLLQAARAKAAQLGFAEARVVSCYEAGYDGFWLDRWLKQHGVDNRVLDPASIEVDRRARRAKTDRIDLDKLMRVQWALDRGEPRACSVVGVPSVAEEDAKRPHRERQFRVRERVRHVNRIKGLLSKEGVRGLDPGRPDFVRRLSAATTPDGRALPPHLLAELRREHQSLRLAIAQIAELEAEERARIAAPKGDPNTAKIANLIGLRGIGLASAVPLVREAFYRAFDNRRQVGCYFGLTGTPYCSGATAREQGISKAGNPRARGIAIELAWLWLTHQPDSELSRWYRVRVAGQQGGARKSALVALARKLMIGLWRYLETGLVPTAAVLRPVR

SEQ ID NO: 470599 - protein, 408 aa, unidentified
MEQVLERVCGLDVHKASVAACVRIPNSQGTSTHEVRTFGTTTGDLLALRDWLTAHGVTHVALESTGVFWKPVFYLLEDQFHCLLVNPTHIKQVPGRKTDVQDCAWLAQLLAHGLLRGSFVPPAPIRDLRDLTRYRTALLQERTREANRVHKLLQDAGIKLSSVATDILGVSGRAMLNALLEGTTDPQALAELARGKLRRKLPALRAALAGHFRPHHAFLLAQLLTHLDRLDELIAGVSARIDELLAPFAEARAHLDTIPGVGPRTADILLAETGGDMRPFPTEHHLASWAGLCPGNNESAGKRKSGRTRKGNRWLRSALTEAALAAIGTHGSALAARYRRLRHRGHRKAVVAIAHAILRAAYHVLAHHTPYADPGSDYFARRDAERAVRRAVQTLERQGYRVVLDRAA

SEQ ID NO: 470600 - protein, 330 aa, unidentified
MNKSEVICVGIDVSARELVAAVGGRESEQRFANTRVGHQALVSWLRRQGGRVRVCVEASGNYSLDLSLALSQQPGVALQVVNPRLARRFAESLGRRSKTDPVDAHMLAEFAARMPFAVWQAPSATALQLRSLVRTVAALTRIAVQEKNRHHAAEASLLLAPMIARELQRHTRYLQQRIAKLRQKAQRIVQRDSHLQRRWQHLLSVPGIAEVSALQILGELAVLPATLDARQWVAQCGLDPKHLESGSSVQATPRISKAGNRYLRAALYMPALVAVRYDAAAAAFYQRLQQRGKAKLSALTAVMRKLLHGIYAMFRRDQDYNGLELFPARH

SEQ ID NO: 470601 - protein, 297 aa, unidentified
MKKVSTAALKQSRNFSQPQLTIGLDLGDRSSCYCVLDETGRIVMEQKVATTPKALQAALGAMPRSRIARETGMHSPWVSRLLAELGHEGIVAHARNVRLIGESRKKDDRLDAQTLARLARIDPGLLSPVKHRSAQAQADLTVIRARAGLVRARTARVNTARGLAKSYGERLRGCNVRHRNPEKAEGLSPELRSALEPLLAGIESLSERIHECTERIENLAREKYPQAARLQPIKGVGTLIALTYMLTLQDPHRFRKSRDVGGYLGLQPGRRNSGQSEPQMHISRVENPAPRPHAGLS

SEQ ID NO: 470602 - protein, 389 aa, unidentified
MPSVSERPEAPTAIQTHLAASFVSLELSRSIWLITSLSPGSGEKMSKHSVRAGDVAALLARFLELKRKASERIGKSFPIVVIQEAGLDGFWLHRVLQSEGVESHVVDPSSIATSRRRRRAKTDRIDGEALLRALLAYKRGEPRVCAMVKAPTPEEEDRRRLCRERKVLIAERVKHVNRVKGLLFSQGISGYEPLRRDRRQRLDELTTGDGRPLPVHLKTQIRRELDRLELLLDQIKEAEAERDALLAAPQPAAPAPAGRMLLEFKGIGAELAAVLWLEALFRHFDNRRQLASYAGLAPTPWQSGSVDHEQGVSKAGNPRLRTSLIQLAWLWLRHQPQSALTLWFKERVSGNGGHFKKSTIVALARKLLVALWKYVTAGVVIDGAVMKDA

SEQ ID NO: 470603 - protein, 429 aa, unidentified
MNYTQNEKIEQVTDSTMVVGVDIGSQIHYARAFDNRGRELTKRIFSFHNDLEGFNSFNLWAETLKTENEKTAVLIGCEPTGHYWFAFAKYVNDHQKRLVMVNPFSVKKIKELDDNSPKKTDSKDPKTIAKLVVDGRYSIPYMPEGIYAEIRDLVYSRDRIMKQHNISANRIQRWLAIYFPEYLGLYTRFDAISGLAVLEKAPLPKDVIALGVNGIRKIWHDKKMRGRGVTEDRAKTLVEAAHNSVGLDGGIGTKSELYMLLEEHRLWTSQLEAVNKVLEEMILKVPHVEKLLAIKGVGSITIAGFIAEVGDIRRFDSPKQIQKYAGLELVENSSGKHKGRTRISKRGRRKLRKILYQVMVPLLARNKEFRGIYDYYVTRVKNPLKRRQAMVAVSCKLIRVFYAVLTKGVEYDRFKMMSDIHRKSDIIAA

SEQ ID NO: 470604 - protein, 343 aa, unidentified
MTAVMIGVDPHKGSHTAVVISAAEEPLGEIRVRASAAQAGKLTGWAAAWPERTWAAGGAAGLGRLLAQQLVAAGERVLDVQPKLASRVRLLQAGGTNKNDPNDALSVAVAALRSRTCREVAAEDHPAVLKVWSRRHRDLARLRNQVACRLHAVLCDLVPGGIAKEISAAQAARIPGQVTPSGAVGLARAELAAEFPGDMRRLDAQLRGTRKKLAAAVKFSGTTLTEVFGVGPVIAGIIIGDIADVSRFPGRGHFASCNGTAPVEVSSGNRKIHRLSLRGNRRINHAIHMAAITQIRHKHSDGRACYEKKLAEGKTHKEALRSLKRKISDAIFARLLADARRAG

SEQ ID NO: 470605 - protein, 528 aa, unidentified
MNKVSRRLRKGKGTVSLQRKDEALSTRIRQVGPERFGLLLVDSGKRNFAVRLTNFFGDCLWEPEPVRSQRMALESMIAEVHRQMATHGLSELVVGIERTGRWHCPLKQMVEKKWPVKMIHPFTTKQLRQPASLGIKTDAVDLTAMQRAMICGYGTEDLELPAPWLEFRLVSRARADLVAKRACLKMQCAGRMEALLPGYTELFDDVWKTPAPAALIAAYPSARKLLGADRERILQRLSGMGVPCQRSTVDRARAWAAQAAPADAGAAVNQRVLRDHLALIRHLTVQIDRYETDLLGLLVITPVVLLLSITGLNVVSACDYGSEMGPDEHYIGAKNVTGRAGLFPSRYQSDQTDRADGPVVAGRNARLRQAILDIGHNLLSCNPYFRAWRRLPGHKDMQTKEARVAVGNRYVRISFHMLRHRTVFNHPLAGRQDSVLCKLLAFGRGKRVPADRLYEICRLALRQLPDDALPFERQALLDDGWNGSANGPRPRTAAARRTTKKPDYVLKLIADVEQRLPATQGGQPATSV

SEQ ID NO: 470606 - protein, 416 aa, unidentified
MSRKFMRTNTCGKLSQLLIIFERWFLHMYSYFVGIDIAKNTHWASCLSSDGEIILEPFSFSNDSSGFQKFISKLESLDKTKILIGLESTAHYGENIISYLFNLDYNIGLINPIQTANLRRSNIRKTKNDKVDTKIIIKALTLGNYSLITSRDINNLKLKGLCRSRRNLVTMRSKAKIQLVSYLDQIFPELAQFFKGNLHLNVSYQLLKEYSSPKQISSLHLTKLSNILHDNSHGRYNKQDAIRLRELAKNSVGIDNPSLSLQIKHAILQIELYNEQIAEVEALYKQILDEMNTPILSIPGMSYNQAAVIIGCIGDINRFEHSCQLLAYAGLDPSVIQSGNFQARSTRMSKRGSGMLRYSLVYSAHNVVKNNKTFRYYYELKRSQGKSHYCALGHVAHKLVRIIFKMLKDNVAFNLD

SEQ ID NO: 470607 - protein, 351 aa, unidentified
MVHVGMDLHHRSSVVRALSDETGELYPARRIHHDRIDELWQYLDSFGAEPIRVVFEAISNARWMYRLLGQRPNVEPVAVTPHKVKIIADTIGKTDKIDAGKLAWLSSVNMLPRAWLPDERVERLREMTRHRTDLLGIQTKCKNQITSGLVRLGMQRPYDNIFGSLGRRWLAEVPLPEVMRLQVEHWLTLLDATAQRMLRMDRKIHGIIQDDRIWARAAALLKTIPGVGKVTISTILAELGDWKRFRRRSEVASFAGLVPVSKRSANTKRYGHITKRGSKELRRVLTEIAQGVARKVPRYRRVYARIAEQKCANVAKTAVARRLIEDAWTLLMKDEPFRLMPVQAESLARVG

SEQ ID NO: 470608 - protein, 342 aa, unidentified
MQIAVLGIDLGKNSCSVVGLDAGGRVILRRRLQRDGVIKLAAELPSCMMAMEACCGAHYLGHKLRTQGHQVRLMSPEYVRPYVKAQKNDDRDAEAIAEAATRPTMRFVELKSEAQLDMQSLHRARDRLVGERTALINQLRAFLLERGIIVPQGRRKLELHLETLLAAEQVSLSPRTRLLIEDQRAEWRELDRRILAFDDEFAREARTDEAARLLTTIPGIGPLNATALVAAIGKAETFGRGRDLAAWMGLVPKQMTTGGKPKLLGISKRGNVYLRKMLIHGARAALPTLSKSETPLGGWLRDLAARAHVNTVVVALAAKLARTICAVLRTGQRFEMRAATVS

SEQ ID NO: 470609 - protein, 419 aa, unidentified
MTVYDITASTPVLAAIDVSKERHEVLIEAPDKSRRRRVSLLNNLDEFNRLITLLRSYQRPVRVAFEATRNYHRALAYQLGSAGFEVKLISSIALARTREALHNSWDKTDPKDAQVILHMMTIGAEQFYHDPLMRGTNDIQELSKTHDMVSRSKTELWHRILTHYLPLYFPEADRFHRSSRSDWFFAFLELFPSPHFIAAMSKEAFIEAAWDVVGRKVGKERLLADIYATSTRSIGLPVAPDSDAIYMFRMVLAQGKSLIAHRNQIEERAVAMLKDNPDYQLLCTIPGIGPINALTILAEAGDLRRFQHHRQFLKFCGMDLSTIQLGMFRGQTKLSKYGNARLRRTLWMAAQVAIWQRANSFRDKFERYITKDRHNPHLRRKASTAIAAKMARTVHAVVKNSEPYRPFFEGTIHSGRTLL

SEQ ID NO: 470610 - protein, 318 aa, unidentified
MNTKTNQNINVGVDTGKYQLDIYIRPLDIYFTVPNDDKGIKEAVKTIKKYKPERIVIEATGRLEMPFILACANANLPFTIANPIHVKRFAGAIGQRAKTDKLDAQLIAHYSEAIKPKLSQLKPDTMQAMSDLVTRRNQLLTMQTMEKNRLQIMPKALAMTIKPVLTLFNNQIKKIEEKIVKLIESCPEYQAKNTILQSMTGIGKIAAASIISNLPELGYINSKQASSLIGVAPMNRESGRYKGHRKIQGGRPQVRTVLYMAMMSAMQSNPVFKVTYQRLLAAGKPKKVAIIACIRKMIVILNSMLRDGVMWEAPKVNN

SEQ ID NO: 470611 - protein, 313 aa, unidentified
MVLIGCDFHPSWQQVSWLDQETGETGDVKLAHETATVEKFYRQFPAGARMGMEATGNCQWFLELLAKLGHEAWIGDAARIRASDARQQKHDKRDARLILQLLAENRFPRIWVPSREQKDLRQLLIHRYKLVRIRAQVKNGMQHLAMNQGLLRKRKLWSVAGQQELRGLALAPWGSRRREDLFRMMNELDGKIILLDEAVGAAAEQDGRARLLMTQPGVGPITSLAFVLTMGDVARFKRGKQVASYLGLIPREYSSGGHQRLGSISKQGNRFLRMLLVEAAQSVVRHDESFRNEYLHRCHGKPKAWPKWRWQES

SEQ ID NO: 470612 - protein, 344 aa, unidentified
MKNPITVIGLDLAKSVFQVHGINAEGEIVCRRKLSRSRVLAYFTKLEPCLVGMEACATAHHWAREISALGHEVKLMPPQYVKPYVKTQKNDMADAEAICEAVTRPTMRFVSIKSTNQQALLVLHGVREQWVRMSTRIINSIRGHLAEFGIVGAKGRLGVDAVIVMLRDNRDRRIPDLARQCLIPLVDELKRVKREILETDRRIAEVHKTNALSKRLETIPGVGPITATRVIAEVADPASFKSGRAFSAWVGLVPKQHSSGGRDRLGRITKTGNPALRRLLVAGAMSMIIRARQLGFTSHPWLVRLLERKPTKVAAVAMVNTIARMICALMMTKERFNPRKLMPA

SEQ ID NO: 470613 - protein, 436 aa, unidentified
MTNPRAAGIDVHDGVHWVAVPPDCDPQPVRRFGTFTADLEALADWLTACGVDTVAMESTGVYWIPLFELLERRGFRVYLVDARAVAKVDGRPKSDIHDCQWIQRLHAYGLLEKAFRPEDDIVVLRGLVRQRQMLISYASQHIQHMQKALVEMNLKLTLVVSDIVGKTGTAIIKAILAGQRDPVELAKLRDERCKRTQEEIAKALVGNWREEHLLALRQAVELYEFYHSKITECDQAIDVYLSRLPNRAGDKPLEKRPPKHKNKANEPMFDARKRLYEMLGVDLTAIDGISVCVALTIASELGYDVSAFRNEKAFSNWLGLAPNHKITGGKIKSRKTRPGANRIATALRMAAASLLRTPTALGAFGRRLRSRVGSPKAITAIAHKLAKLVYRMLKYGEDYVKLGAEEYEAQYQERRIAGLRRSAAALGFRLEPQTAQ

SEQ ID NO: 470614 - protein, 373 aa, unidentified
MGYATILGLDLGKFKSVCCVMDAITGRHAFETLASTPATIHDLLTRHAMAANGQELLLVIETCDAAGWVHDVACVTPGVAVTVVHTQGDERWRWCKVKRKTDRDDALKLARLARLGELPQPPVHVPSPQRRQWRRLIIHRRSVVNRRTKSRNAIRSIYLQQGLTLARGNKQWTRAGIAQLAQDARSIQDCAIQDLWRGRLHVELTLMAAVDAQLKLIDAKLDELAKTESRIALLQSVRGVGPRLSEAVVLHIGQDPRRFKSGEQLANYAGLVPKQLASGQTTRLGHITGRGPALLRSLLVESAWMVWRLNDWAQAFVNKVSRGGRGRRKLAIVALARKLLILLWGMLKSNRPFRAPAPREATPPAAAAALVIA

SEQ ID NO: 470615 - protein, 351 aa, unidentified
MRKIAYLAMDVHSKHCVLGDMDYKGNFKGTQTFPTSEKNMMKALKAVKARNKYLTLEEGNLAYWAAQVAAPYVTEVIPCDPKENALIYRGPQKNDKVDTRKLCRLLRLGELKRVYHPETDERAIFKAAAQHYMDLRDQQIALKQKIKAMYHHWGVIDVAGEAVYSTAKRNDYLRQIKHLDIRNQVSRLYYVMDQTESMQERALKAMKQLGRKYPEIKQFKKIPGIGDILAHFFDAFIQTPHRFANKHRLWRYCRLGVTDRTSDGKPLGFKRLDRSGVSELKSLSYRAWMSALRGDNEVRRFYTTSLQRTFSRVHARLNTQRKIIATMYGMWKREEPYNPKLFLDSPQSGAA

SEQ ID NO: 470616 - protein, 430 aa, unidentified
MTTHSYSTSPRAIVASLNKTINQNNAEPAVSVNINSSRTITLIDGLKPMGIDLAARKYQICYQDSMGRLINREVCKSELRQFLINAEDKYLICIEACSGASYWSRFAQAYGHTVKVVSGKMTRALSLHRNKDDFTDAYSLYQLLFMPGLTSCQIRTEEELALSALISEKEALLKNLNEQTNKTRSFLLETGEYDDVIRGGPSAVYAIDRYLNNHQSDYSEHRYSIRCFEVLKETIVFISKRIDEINELICEYAQHNEKAKLLMTIPGIGAETAVPIAIGAKDISRFDSARQFQAFFGYHTCHSGSGGKVVMGKMASNGDRAVKRNLYESALSVYHQGKSNNEPRSEWIVSKAEQNKASFKKGMICIGSKILRTSYGVLKSGKPYNPAVDNSLGRMKSRLHRRSNPKYREQELDAVLQSQYEQELSLTALD

SEQ ID NO: 470617 - protein, 365 aa, unidentified
MPTVNRLQTLFVGIDVHKDTHTAVAISPFGEKVFEMKIGNEAEDFISLIEKTKVEASRAGLIPSFGLEDVHSWGERLSSFLVEEGLPVRAVAPILVDHRRSKTTHPEKNDSLDAQGVAEVMIQKIDTLPVYTLSESAQKAKQIRELSLEREWLVKERARLKNQLHVLLHRIHNTGYRAKFKDPFSKKALRYWMRSTPKDTDAILIQRTKRALRRLLDLREEIQEIEEELTALMTASGQTLATASGCGVVIAAEIIGEVSDVNRFHSPGALAKYAGCAPREHSSGKTIRWRKTRSGNRRLNRAFHRMALSQISRSGNDAARAYFQRKVSEGKTKAQALVCLRRQLVNVVWMMLKHKTEYAYPQKNL

SEQ ID NO: 470618 - protein, 405 aa, unidentified
MEIIIERGCGLDVHKETVVGCIMGTGIKKEVRTYTAMTNDLLRLKGWLHEAGVTHVAMESTGVYWKPVFNILEDNFEVILVNARHVKNVAGRKTDVQDSEWLCRLLRSGLLKGSFIPPRGIRELRDLTRYKRKLIQTIVAEKQRVEKVLEDANIKLSSIASDTFGASGKKIIEELMRGKLEPEEMAELSKGRLRQKRGDLKEALVGEVREHHKFMIRASLKHVRAMEKILLGIERKIREKIERDYKKEDELLQTIPGVKENASTVIAEIGVDMDIFPNEMHLSSWAGMSPGNNESAGKRKPGSTTYGNKCLKAILTEFAWVASRMKDTYLRSKYHSLVGRRGKKRTLVALGHKILIMCYHILKYRCAYKELGGNYLDERRKERITKSYIKRLNHLGYEVILREAA

SEQ ID NO: 470619 - protein, 375 aa, unidentified
MTATTRPEMSVSEPTLYVAFELGKKEWKLAMTSRFGVEPWVRTVPGGDLGAVDRLLRQGRQRFALPAHARVVSCYEAGRDGFWVHRALTALGLANRVVDSASIEVSRRKRRAKTDRLDARKLVTMLVRVCCGEQRVWSEVRVPTVAVEAARQMSRERTALTQDQTRLTNQMRGWLASWGCAFPRHRPDAWWTTVRDWAGAPLPGEVQTRLARAAARMAVLEEQIAALDAQQQAVVTAAPATSAIRQLVRLKGIATTGASVLLDEGLVWRAFRNRRQIGGLLGFAPTPYDSGETQREQGISRAGNNRLQGVSIQLAWSWVRWQPGSALTLWYRAQFGTGKRARRIGIVAVARKLVIALWRYVTTGVVPAGAILKGA

SEQ ID NO: 470620 - protein, 437 aa, unidentified
MTYVGVDWSDNFHVVYVTDETGDSLAAFKVDHTPEGIESLFLKVKEHAQNPAEVLFALETPKGLLSSAILEAGFTLYPINPKAVDRYRDRYKVSGKKDDYFDAMVLANILRTDRQNHRALVPDSLLTRELRAYTDGYQALVKTQTRLTNQITSCLKNYYPVALDIFGKIDQSITLSFLSRFPTPDSFRRGSKAKIENLLKKNHYPGAREKMLEIYALSKKPQFEIEEPIARANSLLLLSLARQTKETLSSLKEFELKIAELLEQHPDTDVFSSLPGAGKITTAKLISNFGDNRERYGKVSCVQADAGTCPVTIGSGKSLRVSFRYSCRKPFRAAITQFAFTSLQKSEWAKQRYDKYRHNNSKDHNLALRCLGNAWLEVIFPMWRDRKPYDVEKHLIGVFKEQGIFSKDVKMPVFASEPMIARNYRGSSPQVSTIGLT

SEQ ID NO: 470621 - protein, 361 aa, unidentified
MTHVQSRIPNLTIGVDLGDRLSRVAQVDAEGNEVRSEAIATTPQAVRTYFEAIPSARVVMEAGTHSPWVSREIAALGHEVIVGNPSEMYGKVGRRGKRRRCKKRNDKLDASFLARQGRADVSLLYPIRHRSAKTQADLELLRGRDQLVQVRTKLVNHVRGAVKSYGFRLVRSSTPAFPRRALENIPEALRPALEPVTQLIADLTKRVDAFDEIVQQRINEYPEAKQVQQIKGVGPITALAFVLLVDDPRRFTDSRDVGAYFGLVPQLDESSDSQPQLGITKAGDELGRRLLVSAAHYILGPFGPECDLRRHGLAICARGGPNAKKRAAVAVARKLAVLMHRLWVDNTAYEPDRQAKRQRPA

SEQ ID NO: 470622 - protein, 315 aa, unidentified
MLYDGIKGRIKTRNIQNNRHSVENILRWLRLQHCGPEDVHVVMEATGVYHERLATELHDAGFRVSLANPHRSREFARGMGIMTKTDKVDAYMLACYAFLKKPHRWEPPAPEIRYLGALLRRRDVLLGDALREENWLEKYLSTDTPADIISSCRRMAQLLREEVSNIERQIKAHIKACPALRRDYTLLTSIKSVGPQLGMHMLVVLRSHNFASAEQAAAFLGVVPIEKRSGTSVRSRPRMSKIGPPQLRAKLYMSALCGKIYNKRMRNIYDEMCLRGKPKMVAIGALMRKLVHWCYGVLKTGTVFNDESLKQVLST

SEQ ID NO: 470623 - protein, 316 aa, unidentified
MAKKKTFIGIDVCKAVLAVAVHQRDIRLVVANKESAFPELLVELISLRPKRIVLEATGGLEIPVVSALYAAGLPVVVVNPRQIRDFAKATGQLAKTDRLDATVLAHFAAAIQPELRRVKNAAELELDALVTRRRQLVEMLAAEKTRLSATATAAMRAEVHTHIEWLAQRLADIDEQLRKRITSSPVWRVKDDLLRGVPGIGPVTSLALVADVPELGQLNRHQVAKLVGVAPLNRDSGKLRGQRHIFGGRQAVRNTLYMAIQSAVRHNPVIKEFYQRLLANHKPKKVALVACMRKLLTIVNVMIKTNTTWQLAQKSA

SEQ ID NO: 470624 - protein, 474 aa, unidentified
MKRNNKSKKWNESNSGNNQPPESEAKQLGGTGLPRIRPMVAGIDVGSKEHWVCAPTGKGGTEMRVFGANTPELVAMADWFQRLGVESVAMESTGVYWIPLFELLESRGIEVILTDTRHLTRVPGRKTDFEDCQWIQLLHSCGLLQGCFRPGEAICQLRSLVRNKAVLVAERSDWLRRMQKCLDQMNVRVHRAVSDIDGTTGMAILRAIVAGERDAVKLAKHRDPRCRKSEASIARELTGNWRWDHLFNLEQGLKMYELIEERIGDYQREIQKQMQALRCKQADGNPLQAVKNKEKAKAIKRRGQEPMREVLHGLAGADLTTIDTIGVETAEVVLSEYGADLSRFPTEKQFVKHLRLAPRQSITGGKPMRKGKGGKGATRTGNALRMAATVAHHSRTAIGAYYRRLAARKGSDVAVFATARKLASLIYRMLRWGQPYVDEGVAEYEKRYQAARIRHLQAQANQLGFQLAPQTTTA

SEQ ID NO: 470625 - protein, 340 aa, unidentified
MKLTAVGVDVAKRVFQLHWVEAETGEIISKQIKRAAFLEHFVNRAPCLIGMEACGGAQHWARRLIEMGHQVRLMPGKAVKAFVSGNKNDVADARAIWTAVQQSSVKSVAVKSEAQQAVLALHRMRQQLIKFRTMQSNGLRGLLTEYGEVMAVGRAALNKAMTDVLARLSERLPAALVDTLREQWSRLGDLDEQIAEIERRLSAWMKQDRSCRKIAEIPGVGLLTATAAVATMGDAKAFKSGREFAAWLGLVPGQVGTGGKVRFLGISKRGDTYLRTLLIHGARAVLTHAKEPGPWVEQISKRRPPNVVTVALANKMARTIWALLAHDRSYERSYVSVKPA

SEQ ID NO: 470626 - protein, 323 aa, unidentified
MATLGADGKMIKKKLKRSELLAFFANYPASTIGIEACGGAHHWARELTKLGHEVVLLNARYVKSFVVGNKNDFNDAVAIYDAVSRPNKRVVAIKTIEQQDIQLIHSLRQELIDKRTALVNQLRGLLNERGIIINQGIKQVRQQLPLILEDAENGLTALSRELFAEQYERLKSLDDEIKAQDQRVNRLCNANELSKRFLDIPGIGPLTATIVAADMGDNGKGYQSSRDYAASLGVVPKQHSSGDKPVYLGISKRGNRYIRTLLIHGARAVLKSCTQKTDKLSLWLQALVARRGFNKAAVALANKNARILWAMATSGKDYQVLAA

SEQ ID NO: 470627 - protein, 310 aa, unidentified
MDAIVIGIDVSKDKLDVHVLPAAQAFAVARNGAGIEELAARLAALAPAVVAIEATGGFETIVAAGLAGAGLPVVVVNPAQIRAYAKAIKQRAKTDPIDAAVIAKFARATRPDVRPLPDEATRQLADLVARRRQIVEMMAAEGQRGRRVDHKRVARSIARVKKTLEAELAELDQEIGDQVRGSPLWREKEDLLVSVPGVGPVVARTLLAELPELGRLERREIAALAGLAPFTRQSGRWRGRSFIGGGRATVRTVLFLAAMTAARHNPTLKAFRDRLVAAGKPKMVALIATARKLLTTLNAIIRDNRPWQNA

SEQ ID NO: 470628 - protein, 407 aa, unidentified
MSTSTDVFVGLDWAVHTHAVCIIDASGAVRDRFEIAHDRQGLAELMRRLARFGASLRIAIERPSGLIVDALVEAGHQVFPIHPNAVKASRPRYRSHGAKSDASDAYLLADLLRTDGHRWAALSPQSDSIRALRALVRSRDDLVATRVALGNQLHSTLDAFWPGAACIFADITSPIGLAFLRRYPSPASAARLSEAQLLRFCRAQHYSGRRSPAELLARLRAAAQALPGKLTNESMVHVVRSLVAVLNPLVAQISGLTRRIEHFVESLPDGQIIMSFPRAGRVCAAQILAELGDVRERFSTLDQLAAEAGAVPVTYQSGKTRSVTFRWACNHRLRLAITCLADNSRHANAWAHSIYAAARARGCDHPHAIRILARAWLRVIWRAWTDRKPYDPKLHLGALKLASDTGG

SEQ ID NO: 470629 - protein, 418 aa, unidentified
MNEARKESSYLKEGGLEVKGPIISIDVSKGSSHIKCFIEKNKAFGKVHKINHDVGGFHFLLDCIKRLEEKTNEEVHVVYEATGVYTKPLIRFLNKKGIKHYMINLLQAAKMRKTDIHSKKTDKNDPNSIASVYYDKELYEYVDEETIYHSLRVMNRNYEDQLDHLRKFKVTFQNILNIVFPGYGELFKDPCCDIALAILKKYPHPDMMKNKKPETVAKYLEKHSNHHSSACSKWARKVIESANKTYPGCDKEDIEVAELLRIIKELETCMESCNNQLNEMIRLAEELPNYFLILSIDGIGPNLACRILAEIGDIHRFDKVKQLISYAGVDPYINQSGDVDGLHLSISKKGNKRLRCLLYLAVTCNLRLKKESDPIQKFYQKKKQQSVPLKPKAARIACTNKLLRIIYGMCKNGCLYLN

SEQ ID NO: 470630 - protein, 330 aa, unidentified
MKKWDFTLGVDVSKLTLDIHCSELNLHIKIINGPAGYKQFLKWCKEVKINLNSCFIAMEYTGGYEYKFIQFCEAKNIPYCRIPGLSIKNSLGIVRGKNDKADSRRIAQYANEKHEHLKAAGPVNTAIVELRQYLSFRKRLVRESAGYKATLKERKVMYVVKNDDPLIKIMTKKIKDNDKQIKKIEGLIRTLVQADQKLLMTYKIINSIKGIGEINALMTIAFTENFTCFKNARSYAVYVGVVPFDHSSGTSIQGRKKISQLANKELKQELNQAAKAAITWNSDLKSYAERKLKEKPYKVVLNNVKFKLILRMFSLVKRGEFYVDKYQNAA

SEQ ID NO: 470631 - protein, 309 aa, unidentified
MSAYAGIDVSKATLQVALFPKADELCVPNTEEGLASIAEYLSAHQVERVLVEATGGYEKLSVRLLANAGFKIQRINPVRSRQFALAMGKRAKTDPIDAQMLAMFASSLEAKGFAKPDEEREVLLELVNLRNNLLQQRDDNRRRIKQAILPSVVDIYLALEASLKVQIKAVDQLVDAQARKVDSELLQRLHAVKGVGPVTIASLFCYLPELGDLSRGQIAALAGVAPYNNDSGSKAGKRQIYGGRTKLRRATYMCALVMVRYNADFKERYARLRAKGKCAKVALVACMRVLLIRLNAMVRDGTPWRDHAV

SEQ ID NO: 470632 - protein, 427 aa, unidentified
MEEITEEPVQVVARVCAIDIGKAGLVACVRVPHVSRPDRRVQEVREYATVTPALLALADWLRVEQVELVAMEATSDYWKPVFYLLEAEGFTCWLLNAKHVKNVPGRPKTDRLDAVWLAKVVERGMCRPSLVHPKPVRQLRDVTRYRRSLVREQTREKQRLEKTLEDAQIKLDSVISDLHGVSGRQMLQAMVDGQRDPKVLAELARTSMRRKIPQLREALTGHFNDHHAFICATMLRRIDALAADIAELDVRIEQMIAPFAQAVDKLDEITGVGVRSAQEIVAELGVDMSVFPTAAHLVSWAKFSPIDAKSAGRKKGNSTGKGNPWLAGALGEVVAGLARTDTFLGQRYRRLVRRRGKKRAIVAVGNSVLTIVWHLLSDPNARYQDLGPGYYESRISKQRRQRDLIRQLEQLTGQKVNLQPQPELPAA

SEQ ID NO: 470633 - protein, 462 aa, unidentified
MPGRDDIETCENKRRQLQGLPVIRRNVAGIDLGSERHWVCAPTLDGSGREIASFGATTPQLIDLTKWLKERQVESVAIESTGVYWIAPHEVLEGQGLQVLLVDTRQLARVPGRDKKTDPTDCEWIQRLHSCGLLRGSFRPEEAVCLLRTLVRDKANLVAESGDWLRRMQKSLDQMNVRVHRAVSDIDGVTGMAILRAIAGGERDALKLAKLRDPRCSKTEQEIAEQLSGHWRQDHLFSLRQALKMDDAVQERMAAYDKEILRRLGEMEREEQRGQTAPPLENSNKAKAIKKRGQEVKRQALYRMSGVDLTHIDAIGVETVEVVLSEYGPDLSRFPTEKRFVSHVTLAPHVPKSGGKPVKKKKRNSTSTRVAAALRMAALSMRHSQTALGAYYRKIAQRRGGDIAVFATARKLATLIYRLLRWAQPYVDEGAAAYENRYLQQRIKSLTTKAKELGYQLTPAGT

SEQ ID NO: 470634 - protein, 347 aa, unidentified
MAFIGVDLHTNSFTICRLHDDGSEAFETFTLSASALQAFCMSLDADDEIAIEATGNTAWFCDEIRACVGRIVVVNPRQFQVIRKSVNKTDKNDARSLAFFLSKDMLPETRLKSTAEAELGSLVATRDVFVKQRTMLLNKIHAMFVRRGTKLKKEGLASKKRLRELDMSQFSALEQVELNALRNQALSLTETLAELDKAIEAAGAKLPGHEGISSIKGIGSRSAAILLSGIGNIEDFESADKLAAYVGIVPKVSQSNDTDNRGRITKRGNKLMRTTLVQCTLIATRYSGYLNAFYQRIKERRGAGKAIIATARKLLSIIYDTLKNGWVFEDFTEFKIKQNQCPTGQPS

SEQ ID NO: 470635 - protein, 330 aa, unidentified
MVPPFTVPNDRFGAEQAIQTLHQTLSTHAYTHLVVGMEATSFFWLPFYRAIEQSPLLSPFHPRLVLFNPKLVAHFRKGLDLRTEKTDDHDARAIAERLRFGHLPTATVPDDFWQALRRLTRYRYHLIHDLVREKLRFLSYLFLKLSAWQQVRPTSDPLGAASIALLTEFTAEDLAQMPLTALADLIAQRGRHAFDDLVATARRVQEVLRRSYPVASELDEATTFSLAAMRDHIHFLERLLRRLDQEIARRIEKVPNPLLTVVGLGPVISAGILAEIGDIQRFPGHPPLAAYAGLAWKRSQSGSFAAEDTRLVSVGNRYLRLAEVPGDASA

SEQ ID NO: 470636 - protein, 504 aa, unidentified
MRRVGVDIALRAAHKAAVYEDGERLGRPFSVAQTKEGVDELVRRATDGTSEPVEFVMEPTGLAWLPLAAELSRRGHRVYLPKPAKTHALRKFLAQHTKTDAIDACTAALVRHVDKRATELRVPSAAQTTLRLMVKQRSRLVVDAAKEKSRIFTWLLLANPHVGRALGQDPTSRIADAFLRRRLDPFEVVGQGKRALRRFLQTHCHGPLKDTQLEAVWNACEQSCALFEAMRESGKLPFHYADLQILISQGLDHIAFLEAQIGELDGRIAEVYKQLDPTRLLEREVPGFGATIASAVEAFAGDVDRFGSVKRYAAFFGLVPRTKQTGMAGEKPRQALTKGGQNLLKKYMYLAAETARRHDPELAATYERAIARGKHHYSAVIIVAHKLVRHVYALLSARAKGVTDVHYQRRGPDGKAVTRDEARAIIAEKFPTKAAKDARKRAPQTARQTGTMSQGTGSSEDATKAVVAAMPTSSLPDLDLERKIVAIPLDQPSRQAEQKLLDRS

SEQ ID NO: 470637 - protein, 334 aa, unidentified
MNNVSLIGIDLGKHSFHVHCQDKAGNKLLRKKFTKAKLFEYLSNCPASTVVMEACAGAHFMARRISDMGHEAKLISPQFVRPFVKTNKNDFVDAEAICEAASRPSMRFVQPRTEAQQAMRAQHRVRESLIRDKVKTTNQMHAFLLEFGISMPTGIAVIKRLSTVLAENEFPSYLVQLLMRLHSHYLYLVEQIHEIETALEQELNQDETGQRLQTIPGIGPITASVLSSLLGDGNQYSCSRDFAASTGLVPRQYSTGGKSKLLGISKRGDKNLRRLLVQCARVFILNLKHQSGYLAEWVKNQLTKKHSCVVACALANKFARIAWAITTKQTVFQA

SEQ ID NO: 470638 - protein, 351 aa, unidentified
MAMLADTADAVIGIDTHTDAHTACLLDRLGRQLAMITIPADPAGFQTLLAWAQRTAPGPQLAWAIEGARSHGLGVTRYLLGHGQLVIEAGRPARASKRTGGKSDPADAARAAREALSAPRLAQPRRDGPREAMRILLTARAQATTARTSAVSTLKALLLGAPDELRHQLRGLSTPRQASRCRHLRVRHSQPIAEQILRAELRRLATHIGHWDRELRANKTQLRQLVQQVMPALLDQPGVGPMSAAQLLVSWSHRGRCRSEAAFAALAGVSPLEASSGKITRHRLNPFGDRQLNRALHVIVNWRMLNDPRTHAYLTRRAAEKTNPELRRCLKRYAARQLFRLMEAQPGLDNS

SEQ ID NO: 470639 - protein, 338 aa, unidentified
MEQIATIGLDLAKNVFQVHGVDAAGKVLVHKQLRRAEVLRFFALLPPCLVGMEACGTAHHWARELTKLGHTVRLMPPAYVKPYVKRGKTDAADATAIAEAVTRPTMRFVAVKTVDQQSVLMLHKVRDLLVRQRTMLINALRGHLAEFGIVAARGPGGVTAAIMTLHEAQDDLPDLARQVLHGLIGQMRVIGAEITQAEKRIMAWHRASGASRRLAKIPGIGPITASAIAAAVPDATLFRSGRQFAAWLGLTPRAHSSGGKPRLGGISKQGDGYIRRLLVIGATAVIRFARQDNASKTWAARLLERKPARLVSVALANKTARIAWAVLARNQSYTAAAL

SEQ ID NO: 470640 - protein, 274 aa, unidentified
MSLFIGIDISAKSFDLVVRKQNKPSKPKCFEQSVDGHQRCLKMLKKLKPTLIVMEATGVYYLDLAIMLYKANLPIAVINPASFKRFAELMLTQSKTDSIDAALLAEFAQRMEPRLWVAPTSQCIDLKDLGRQKQRLTSDKVRAKNRLHAFQFKRATHTVLVQDMLESIEHYEKRIALLTDAALEIIHQDDTLSRQFQSLVSAKGIGQTSAIAILAEFSILSKDMKAKQVSRYAGFDVKLSQSGTSVNGASRISKAGNAYLRAALFYVCYVGSPT

SEQ ID NO: 470641 - protein, 417 aa, unidentified
MIRKVMEVIHQCVGGLDVHKKTVMACRRRLLEDGQVESEVREFGTSTLQLCALSKWLSEWGSTQVAMESTGVLWIPVWNVLEADFKLLLTNAQQLKKVPGRKRDVGDAEWIAQLMQCGLLKPSFVPNREVRHWRTLTRQRMKLIDQHTGVVNRLHKVLQQGNIKLSSVATDVLGVSGRAMILAMIEGESDPERLAKLAKGRLKSKHEQLVESLEGSLNQDDRWVMKELWEQMEYLEEEVARYDEEIKEKMSHNEESLRRLMTIDLIERRSAENILAEIGPDMSFFPSDDNLVSWAGLCPGSDESAKKNRSGKTPKGNQWLRRALVEPSWGAARRKDGYLGAMYRGIAARRGEKRAVIAVARTILQAAWHVLSKGVEYKERGGDYFDRMNSEQTKIKLIRRLERLGYEVDLKPKQATV

SEQ ID NO: 470642 - protein, 316 aa, unidentified
MSESTVENFVGVDVSKATLDICITPPGQAMHVTYDDAGVSQIIALLKETCPTLIVLEATGGLEVRLASELAAVNLPVAIINPRQARDFAKATGRLAKTDEVDAAMLADFARAIRPQVHPLKDADTRALDDMVNRRRQLIAMRVQETLRLGTAASKALQKSLKKHIVWLDKQIVEVDGDLNQRLRESDVWRAKDDLLRAIPGVGTVTSLTMLAKCPELGALNRREIAALTGVAPLANDSGKHRGKRFIWGGRADVRAVLYMATLSAIRSNDTIKTFADRLKQAGKPAKVVIVACMRKLLTIMNAMLKNNAAWNPKKA

SEQ ID NO: 470643 - protein, 395 aa, unidentified
MFIVGIDIAKRSHEAIIIAEDGQVVRKAFSFRNNCTGYNLLLEQVRRLTLVKSQIVFAMESTAHYWLALYARLLKDGYAVMVLNPIQSHSLRELYIRKAKTDARDSLIIADLVRFGRCKASNVPQDKILALRELCRSRAYLVDMAADLKRKLIALLDRIFPEYESLFDSVFSKASIAVLSKYSTPQKVKNANLRKLTDILMESSNGHFGEWKAHQLKEAACSSFGIDDSGGVYSTLLGMFLEQILSLTAQADPLEKQISVFFQEFNNPLTSIPGVGTVLAATILSEIGDITRFSSADKLLAYAGLDPSVKQSGEFKSNQNRMSKRGSPYLRRAILLASTVAVHRDPMFQTYYEKKISEGLHYMNVIGHVSRKMTAVIFAVLRDGQPYQLILQSAG

SEQ ID NO: 470644 - protein, 314 aa, unidentified
MSTSNCFIGIDVSKNQLDVAVRPTNESMSFANADEGIDMLIKSLRPLQPDLILMEATGSYHQLVLGRLLACGFAAIAINPRQARDFARAIGRLAKTDRIDARVLAEFAEKIRPELRPIADEATQQLDAICTRRRQLVGMIAAEKNRHHSGPASIRAQIKKHIVWLERQITEIENDLDKLIRSTPAWREKDDLLRSCKGIGPTTSHTMLACLPELGSLSRHRIAALVGIAPFNRDTGQHRGPRHIQGGRVDVRCVLYMATLAAIRSNAVIRTFHQKLIAAGKAKKVAITACMRKLLTILNAMLRTKTRWSPDFVA

SEQ ID NO: 470645 - protein, 392 aa, unidentified
MPNNNYERVVIGIDPHKASWTAAAVNSALQPVATIRVPVSRAGYRTLRKFAAQWPTATWAIEGVSGLGAPLNTWLASDQVVAVDVPAKLAARVRILSTGHGRKTDDADATSVGIAALTAVGLRTAGVDEAITVLRALIEHRDDVIKTRTQTVNRLHVLLTRLLPGGAPRDLDADTAAQLLRPIRPRGTGLRTLRQLAVELVAEIRHLDRRITGVNTKITEAVQQSGSTLTDLVGVGTLTAGKILARVGDVHRFRTPAAFASYTGTAPIEASSGDVVRHRLSRAGDRQLNCCLHIAAITQIRLDGPGRTYYQRKRADGKSHKEALRCLKRRLSDIVYRQLLKDAGNRQTADLGGHQGATTTSSAAGTTPTPTLRTSHFPGPPMPTLQPLTPAT

SEQ ID NO: 470646 - protein, 402 aa, unidentified
MNCVGIDVSKGKSMIAVMRPFGEVVVSPFEVRHTASELSELARLLKNLDGETRVVMESTGNYHAPVAWLLHDAGLYVSVVNAMLVHDYGNNSLRRGKTDKKDAVKLANYGLDHWLTLPRYAPEEDTRLMLKTCYRQYQQYSKVQTMLKNNLISLLDTAFPDANRLFTSPPRADGSEKWVDFVAAFWHCECVCNLSEKAFTAKYHKWCRKHRYKFCEDKTLDIYSSACGHFGVIPKTDTSKLLVEQAVFQIRATSTTLAALKQEMQSLAASLPEYPVVMEMFGVGPTLGPQLIAEIGDVRRFHSKKALVAFAGIDAPPYQSGQIDVRSRSISKRGSASLRRTLFLVMGVLLQCAPMDEPVYQFMNKKRSEGKPYRVYMMASANKFLRIYYASVKAYLDSLEHD

SEQ ID NO: 470647 - protein, 310 aa, unidentified
MDVIIDKGCGLDVHKETVVACVMGSGIKKEIRTFSTMTGDLFQLKSWLSEKGITHVAMESTGPYWKPVFNVLDDSFDVILANARHIKNVPGRKTDVKDSEWICKLLRSGLLAASFVPPKAIRELRDLTRYRRKLTQSISAEKNRVQKVLEDANVKISSVVSDTFGVSASRMIEAILAGDLNPEAISDLAVGKLKGKKEELKKALVGNFQEHHRFMIQASLDHIESLEKIIAGLDQEINRKLKDYHQEYELLQTIPGVKEQGAAAIIAEIGADMGRFPSEGHLSAWAGMSPGNNESAGKKKAERRPTAIRI

SEQ ID NO: 470648 - protein, 401 aa, unidentified
MTSVGIDISKEKSMVCIMRPYGEVFASPYEIQHTSSGLKELCTQILAIDDEVKVVMEATSAYHFPVATRLHQSGIFVCVSNPLVMKKYVSTALRKGKTDKLDSIRIANYGLDHWFKLAQYKPLDETYEELRLLGRQYAHYITIKVESKLALDNLLDRTMPGIKHLLQGKRSDEPTKDKLSDFVQEYWHFDNITASHEDAFVEDYCRWAKEKGYHRSQAKAKAIYQMACDSIPTLPSSTPSTKMLLLEAVRILHETNRTLQTILSQMQSIATSLPEYSIVRAMPGVGDVLSVRLIAEIGDIRRFHSGSALVAYSGIDAPPFQSGAFIGSRRKISKRGSSLLRKTGYEVMKCLKSSKPTADSAVYDFMLKKEAEGKPKKVAKIAALNKFLRIYYARTMEVYQT

SEQ ID NO: 470649 - protein, 361 aa, unidentified
MQSTTIIAFDQHAATTMAAVLLPGQRTPALHPLTSDSATILRFVDRLRRQGAVACCYEAGPCGFELQRALTGHDIPCDVIAPALIPRRPGDRIKTDRRDAGQLAVLYRAEALTAIHVPTEHEEAARDLLRCREDIRADLLRARHRLSKFLLRHGRRFTGTKKAWTKRHDDWLRTQTWPIAALDQTHRAYLRAVDEAVARLRAVEGDLRDLLTLDPLRERVARLRCFRGINDLTALTIAAELGDPRRFATAPRTMAFVGLVPSEHSSGTKQARGRITKTGNAHLRRVLVEAAWHYRHRPFVGATLRARQRGAPATVIARAWTAQPRLHRRYHRLAARGKPNQHVITAVARELTGFVWAALTQ

SEQ ID NO: 470650 - protein, 352 aa, unidentified
MLIIGCDFHPGFQQVAIFDNLTGEIEEKRLQHRVEAEEFYRSLAGQEVRVGMEACGHYPWFERWLAELGFELWFGDAARVRASVVRKQKTDRRDAEHLLHLLIENRFPRIWVPSLEVRDVRQLLVHRHKQVQARTRTKNQLQAMALSHGVQKKYKLWTQAGRAELEQLPLLPYAAERRQKLLEELDGLETEIRQLDRRVAEEAGQRPEAVRLMTHPGVGPVTALAMVLTLGPAERFESAKQVGSYFGLIPSEASSGGKQRLGKISKQGSSFLRFLLVEAGQTAARYDPQLKRFYKRLAMRKNRGVAKVAVARKLATRLYLMLREDWTYAQLNQAVLSASPSHSVVEQQKPTA

SEQ ID NO: 470651 - protein, 586 aa, unidentified
MLSQPTSVPPSARRCGVGIDTSRYGHYAAFLRDDLQPAADELQFAESAAGYRQLRQRLERIAQRHGPVQFVVRLDAAGQYADNLLHFLHGLSTPVADATRLAVTVSCGDPQRNKNYRAALFGAQKSDPVEARAAARYALAEKPPSVTPLSLELRTVRQVAGRLQAVVRQRTRLINQLHHLLALAFPELALLVHDLATGWALELLHRYPTAALLAQATDDDLAAIPYLPAAQRTPVLDHARTSIASLAGTTVAELVRDQVRQLRDAGARQKRLENLLVAAYRALPTPNHLDTIPGIGAVTAAVLTAFVLDIERFDTPGRLVAYFGVLPMEVASGVDRDGQARAPRRYIMSRRGNDLVRRYLWMAALSAIRFNPAVRALYARVVAKHPQHKAVAVGHAMRKLLHLAFALWKTGRPFDPEHSAWDQSAHVVDGGAADARDPAPSCEVRAAGLKPVEPARTEVTATRPDTVADTPAPGESRALDFAHLKRQLPIARVLDQLGLSARLRGIGPQRRCACPIHRGDARGRTFSVNLDDNVYQCFDALCQSKGDVIDLWAAVRGLPLRAAALDLVHTFGLEPPPCHGTEKRNG

SEQ ID NO: 470652 - protein, 354 aa, unidentified
MTTVAISTLPASRSYTRTGAWAFARMQSGVWTKSQTMEEFAVPDKLFVGIDVAKDWIDIAIYDSGPTRRIANTRQAIEAWVNGLDHERIGLIAFEPTGGYERVLRLSLRQAGLPFARVHPNQLTAFRTRRGIKAKTDRLDAGLLAAFAAVELATRGLAPIVEADDVLREMVARRRQLVDTLQAERCRAAMAQVPAVKQTLARVIKALEASLDGLEAGIAGHIAANAELAAAARRMQTVIGVGPVTVHTALGELPELGRLSGKEIAALVGLAPRNRESGRSHARATTGHGRPGVRRVLFNAARAAIRWNPVMRAFYHRLTTVNRRPGKVALTAVMRKILVTLNAIVRDRQDWKHA

SEQ ID NO: 470653 - protein, 416 aa, unidentified
MIRKVIEVIHRSVGGLDVHKKVVVACRRRLIDDTHAEVETKKFKTTTSGLLELARWLGEWGVTNVAMESTGIYWVPVWNVLQDQFKMMLVNAHELKKVPGRKDDVIDAEWIAQCLQCGLLRPSFVPRLEIRQWRHLTRQRARLGDHHTAVVNRLHGVLHQANIKLSDVASNIQGVACRKIIIEISKGESNPEQLASFGKRLKASPEELAESLEGRVEDHDRWLLKQLMGQLKVLEDQILIYDDRVKLTMKNYNHQIELLDTITGVGRRIAENLLAEIGPNMEQFPTDDHLVSWAGMCPGRNESAGKKRSSRTRKANKWLRRILVEAAWAAVRSKNTYLAALFKRVSSRRGKNRAIIAVGRTILQSAWHILTKNCEYKELGSNHFDKLNSQKTRNYFVKRLERLGYTVELKETNAAA

SEQ ID NO: 470654 - protein, 443 aa, unidentified
MSKFKKTFELTYPNAAGIDIGASSHFVAVPTDRDDLPVREFASFTEDLHAIADWLTVCGIDTVAMESTGVYWIPLFELLESRGFTVFLVNSRHVKNVPGRKSDVLDCQWLQQLMSFGLLSGAFRPQGDYAALRVVARLREMLLRYQATHIQHIQKALLLMNILLTEVLSDVMGETGQKIIRAILAGERDGGTLARYRNGHVKASEEEITKALQGSWRDEHLFSLKVAVELYDFYAEQLLACDQQIEQLMKDLARYDLKPEKHKRRGGKPKNAPKFDARLLLMQMCGVDLTRIDGIDVTTAFKVLSEIGADMSKFKSAKHFASWLGLCPGTRISGGKVLSAATKRTANKAAQALKMAAMNLRNSQSALGAYYRRLCGRMDKGKAVTACAHKLARLIYAMLTKGEEYVDQGQTYYEEKYRERVIKNLTKRAEAMGFQLTPASEMT

SEQ ID NO: 470655 - protein, 286 aa, unidentified
MNSRKYIGMDVHKESISIAVRNDAGKIVMECVIETKASVILDFIAGLRGDLQVTFEEGTSAAWLYDLLKPPVTKLVVCDPQKNASSREGNQNDKIDARRLAELLQLNHLSPVYHGEHGLRSLQELVRSYLTITKDLTRVLSRVKAIYRSWAIPCTGKQVYAPRHRAEWIGKITEPGVRRRAEFYYQQLDALRIIRQQVRRELLAESKKHKAWKRLCQIPSIGLIRAAVLLGILQTPHRFRTKRQLWTYSGFGIETHSSADHRRVHGRLERRNRAPFADGTETAITI

SEQ ID NO: 470656 - protein, 416 aa, unidentified
MLLEQPVEPAAILTHLGAIFVSLELSRSKWVITSVSPGAGEKMSRHVVEAGDVAALLARFAKLREKALARTGRSYPIIVIQEAGLDGFCIHRVLEREGIESHVVDAASIPVPRRRRRAKTDRIDGETLLRVLMAFKRGDPRVCSMARAPTPEDEDRRHVCRERKELIGERVEHVNRIKGLLFSQGIDDYEPLHRDRRRALELLHTGDGRPLEPRLKARIGRELDRLELLIAQIKAVEGERDAILKGEIAVQPTVQAPAPVRVEADAEAEAETEAGAGAAPAPSAAAMLAKLKGIGPEFAMVLWTEAFYRSFGNRRQIAAFGGLAPTPWQSGSIAHEQGVSQSGNPRLRTTMIQLAWLWLLHQPDSELSKWFRARGNTGPGARQRSIVALARKLLVALWKYVTSGVVIEGAVMKPAA

SEQ ID NO: 470657 - protein, 342 aa, unidentified
MYYIGLDVHKKTISYCVKDASGQVHREGTIGANRNELDWWMKTLPQPWTVAMEATIFTGWIYDHLLPHAAQVKVAHPVMLRAIALAKKKNDRIDAGKIADCLRCDFLPECHMASTEIRDRRRSLRYRHLLVRQMVQMKNRVSGLLLETGVSHNKQRLHKVRYFQKLISNHEEVPESIRPLLKLSRETIVRCQKTEYALVSSLQRDPLLAERIKRLRTVPGVGPITALTWALEIGDVSRFRSAKQAISYCGLCGDEKSSADKVLRTPLSKQRNKHIQSVLIEAAKLAPRHSPELALIHEREKQKGNANRATLAVARKMVAYLLAVDRRGKDFVPSEERSTAAA

SEQ ID NO: 470658 - protein, 326 aa, unidentified
MADAPRPKNAPPAAVVGIDVSKHRLDIACLHGDAPLPASVENTPEGHAALVEILCQNPPRLIVLEATGGYQRGVVAALATAGLPVVVANPRQVRDFARGLGILAKTDAIDAMVLARFAEKIDPPVRNLPDAQAQALADLLARRRQLVELRTAEKNRLQQASAPRIKASIRAVLATLDAQIAALDDDLDGHIRRSPVWREKENLLLSVPGVGAQTARTLMACLPELGSISRQAIAALVGVAPINRDSGSMRGRRTTWGGRKDVRCMLYMATLVASRHNPVIRAKYQKLLAAGKPKKVALVACMRKLLTILNAMLRTGQPWRTPHEAA

SEQ ID NO: 470659 - protein, 338 aa, unidentified
MEHVAIDLGGRESQVCVRSGDGTILDERRCATRALPAYLEKRPTSRVIVETCAESFSVADAALALGHEVRVVAATLVRALGVGARRTKTDQRDARLLSEASCRMDLPSVHVPSLESRQRKAMCGMREALVTSRTQLVNNVRGWLRTQTHRVGRCGTDTLTARVREAFGSQLPTYVERQLHVIDELSTQIGKADQELVAAAKQDATCRRLMSVPGVGPVTALRFMAALDRVDRFESAHKVEAYLGLTPGEHSSSDRQQRLSITKAGPPRMRWALVQSAWAARRAKGSHPMVAWSFEVEKRRGKRIAIIALARKIAGILYALWRDGTLYDPSQGVGRPAA

SEQ ID NO: 470660 - protein, 394 aa, unidentified
MNSQALGWDIHRKFSKVSLMEKTAEGEIEVKERARLEHIDQDAMRQWLGRLPKGTPVAMEAAFGWPWIADLLEELELDPHLGHPPALKVLAQHEAKSDRCDGDRLAKFQLRGILPESYLAPPEVRQIRERTRYRMALTALRSAVKNRIQALLHRFGILHAYSDLFGKQGRQFLEQLKLPPASRAVLEGSLELLDEIVRQIKAVEKWMEENLQEDEILGLLRTIPGIGLILAHVIRAEIGEIGRFPSARHLRSYSGTAPVSDDSAERHGVRHWSPACNHALRWAFIEAVTGVLLTKGQRGLRLRRLYGRLTHGGHSNKNQAKVALAGELAERVFVVWKKRTPYQEEPAPRPGAIRPEPEKSSRPQENPNHANMRPDQSRHPIARHGTSRAGQALS

SEQ ID NO: 470661 - protein, 524 aa, unidentified
MQPGVGSKPHSMFPAATTSFPPRAGRGGDRAWRRWDESGQGAAAVMPPITKSRTNLKRKCAAPVTALASRDRVDVPTAKRRARRRSGQADPATLPVDVHTVAENRATLPPSGENPDGAPTRSETQISQGAEGRMTMRIVALDLGAKKTSYCELSQGQVVHRTTVSEVESLRPLLGPDQPAAKVAIEACREAWFVHDLLVEWGNEVVLVDTTRSRQLGIGQHGRKTDRIDAETLARALEAGRIPKAHVLSPKRRELRRVLGVRRALVEARAQLVTTVRGLVREQGGKIPSCTTGNFVSRAREQKLASCIAELIEPLLVLAQGIDTQLANTDEQLAVLCAQEPIIALLTTTPGAGTVVAASFMSVVDEAKRFHSAHQLESYVGLVPSEDTSGGKRRLGAISKKGNCYLRSLLVQAAWTIVRSSDKSDPLYLWAKKLEQRRGKRIAVVALARRLVGVLWAMWRDGTVYDAQHLAQQGVRGLHSAVQSLELQKEKLAQAAKKESVKHPHIQSTAKARRSSKTPAVKAA

SEQ ID NO: 470662 - protein, 408 aa, unidentified
MKLFVGIDVSSEKLDTCFLTSEDQILLEVSLPNNVVGASKIKEHISHFADLIRYDRIIIGMEATSIYSFHPSTFLSEDSELKSLGVEVVVMNPKAIHRFKGLFEEDKTDKIDAYRIADFLRFDRFNTSLIKEEQYMALQRLTRSRYQLIGQLTEMKQHFLENIYYKCNTLTKEIDTSVFGATMMDLVTDSMTLEDIANMSLEDLAAILQEKGRGRFSNPEKLAKSLSKAIRDSYRLGKVMQNSVDVILASYAMMIKTIKKQIKELDKAIQQLFEILPESKSLLSIPGIGPVYAAGIIAEIGQIQRFENESKIAKYAGLYWKRKQSGNFESERTTMTKTGNHYLRYYLIEAANSLMRNEPVYREYYLKKYHEVPKHQHKRALVLTARKFVRMVDVLLRNHQLYTPERSV

SEQ ID NO: 470663 - protein, 318 aa, unidentified
MTDAMYIGIDIGKAELVVATPTAVIGTFPNDRGGHRDLVKRLAKLSVAAVVMESTGCYGRAVMTALASAGYKVAIVPPGRIRHFALSLGVRAKTDPIDACMIAKFGESQKPRTWEMPPEALSQLRALVDRRDQIVEMRKMEVNHLETCADARIAKEVRRSIAHLDKMVRGCDRLIAQHIAAHEPMRRLSDALQEETGVGLQTAAVLLAYMPELGTLNRQQAAALVGFAPYNRESGQSKCPRQISGGRRRLRRALYMAATTAARCSEWLKPMYVRLLQRGKLKKVACVACGRKLIIRLNSIAAKALAEMSAPAVLATPE

SEQ ID NO: 470664 - protein, 369 aa, unidentified
MDKAITYVGLDVHKDTIAVALAEAGVRGDVREYGKVANTPGAVKALATKLSRVGNALRFCYEAGPCGYGIQRQLTLAGHDCVVVAPSLIPRKPGDRIKTDRRDAINLAKLHRAGELTAVWVPDPAHEAIRDLVRARLAAVRSLRQARQQLSGFLLRHGRHYNRPAWTLMHRRWMAGLRFEQPAHHIVLEDCIAAVEAATARRDRLEAHIEAALPDWSLAPVVRALQALRGMALVAAATVIAELGDITRFANPRQLMAYLGLVPSEHSSGATKRQGGITKAGNGAARRMLIEAAWSYRFPARISREQLLRQESLAKPIRDTAWKAQERLCRRYRKLARAGKSPTVVTTAIARELAGFAWAIAKHVQIVGA

SEQ ID NO: 470665 - protein, 431 aa, unidentified
MAKAKSSHTVDIVYPICCGMDIHKSFIVACIAITDERSHTKHHLKRFSTFQKGLRELVAWLKSYNCLDICMESAGKYWVPIFNTLEAAGLNVCLTHPKYVKAIKGKKTDKKDAKWIVELFKCDLVRSSFIPPLIIRQLRELCRYYVKLTYALSSEKNREQNCLTICNFKLDDVFTDLSGMSASRVIAKLLEHGNSDFDVAPLLDHRCKATVQDVIDALDGELSPAETEKLKLVRLHKEYLYYLRDTLESLILELAQPLARQIELLLTVPGIKEPLTAVRILAEIGADMSVFETSKQLCSWAGLTPQNQESAGKKKTTRIGRAGQYLKPLLVQIALAVSKSAKHPEIKNKFDSLKKRRGGKKATIAIARRLLTAIYHMLSKNEAYNAELYHKAGKPPKERILSPEQALDFARRHGFLIEGIDPPPDPAIPAA

SEQ ID NO: 470666 - protein, 324 aa, unidentified
MSKCKEFFGIDISKDVFDVIDSSENHHQFKNDPSGFKAFGKMLNEYSHCVMEATGSYYQGLATWLHSRSIDVSVVNPLSVKRFIQMRLKTSKTDKLDAQMIRMYGESEQPDLWNPPSKLIIEASELHKLIEILVRHRAALKNRLHALKAKGISRSPVVTSVRRQIRNLSNEIAELELKLEAVIKEYNPDLLTRLCSIPGIGKRTAIYLIVLTRSFEKFETSRQLISYFGLNPIIRESGSSIRGKSRISKTGNNHIRNLLFMCAFTACEHNKSCSEIYQRITAKGKSKKLALIAVANKLLKQSLAIAKSGLYYDENFRSVNLNNV

SEQ ID NO: 470667 - protein, 339 aa, unidentified
MNRIVVGVDIAKRVFQLHWVEPQTGEIVALQLKREKFLEHFANRANCLIGMEACGGSQHWARSLQKLGHEVKLMSARMVKPFVGGNKNDVADARGIWTAVQQPGIKAVAVKSEAQQAVLALHRMREQLVKFRTAQINGLRGLLTEYGEVMPQGRAGIHRDIPGALGRLADRLPAIVIETLREQHARLGELDEQISQIERRLRQWQRQDPMSQRIAAIPGVGLLSATAAVATMGDARAFKSGREFAAWLGLVPRQSGTGGRVRLLGISKRGDKYLRTLLIHGARSVLTHSKSPPEWLSELVKRRPKNVAVVAMANKMARTIWALTAHERAYHSGYVSRPA

SEQ ID NO: 470668 - protein, 320 aa, unidentified
METPRFVGIDVAKGELVVAALPGEERWTVENDEQGIRTLVERLMRETVALIVLEATGGYELRAVSALANASLPVVVVNPRQVRDFARSTGQLAKTDRIDARMLALFGERVRPEVRVLADEDQQALDALLTRRRQLIEMLSAERNRLGQTLGSKTKLVKKSLKSHISYLERELRVSDTELADMIRSSALWRERDDLLQSVPGVGRVVSLTLLAELPELGRLNRKEIAKLVGVAPLAHDSGTMRGKRMVYGGRASVRAALYMGALVATKYNPVIRALYQRLLGAGKAKKLALVACMRKLLTILNAMAKNNERWRAETRLTTA

SEQ ID NO: 470669 - protein, 396 aa, unidentified
MSKPCQGKRFFGLDLHKKYATICAVSQQGEVVLREEHLPLDQLSTWAARTLTPDDAVALEATANSWWAYDCLSAHAGRVLVVNPIKTRLIAEARINTDELSAEALARLLHSNFICEVWVPDERTRRYRQLISHRIRLVQEGTRLKNRIHAILHRRQIRPPCRNLFSRAGRAWLEKLDLPEVEKLLLRQNLQLLKSTEEAVAEIEPLLARLAQEDERVPILMQIPGINIFGALAILAEIGEITRFASAKKLSSYAGLVPSLHRSGQKNSSGPITKAGRSRLRWVMVEAAHVAVRYDPQLGRFFYRLRARKGTNVAIVATARKMLVIIWHLLSGDGVYRGRRVQMVARKFLEWGWAVGEKYRCGSNKDFVLEHLRQMQINDLTHIKLGSRVYSLTGVK

SEQ ID NO: 470670 - protein, 339 aa, unidentified
MELYAGLDLHSRNTYIGIMDKEFKRVFAKRVSNNLPLIINTLEPFQDQLKGIVVESTFNWYWLIDGLMDAGYDCLHLANPSAIKQYEGIKHTDDQFDSFFLAQMLILGILPQGYIYPKEERPVRDLARKRLFLVRHKTSHILSLQSLISRCCGQRVSANEIRTFTVEDLQQLLEEEYIVLSAQANLDTIVFLKQQIVQLEKAIKNKVKLNKAFQQLLTVPGIGLILAMTIMLEVGDIGRFPQVGNFASYSRCVSSQRLSDGKSKGHGNRKNGNRYLSWAFTEAAHLSRRYNEHFRSYYNRKVAQANTSLATKALSNKLARICYYIMRDQVPFRNNLLSQ

SEQ ID NO: 470671 - protein, 463 aa, unidentified
MAKRVPNGDGRKPDKPKVDWKALDIVHPDAAGIDIGGSEHWVAISPDRDQEPVRCFDCFTEDLQHMANWLIGHGVRSVAMQSTGVYWIPVFEILQSRGLEVYLVNARHTKNLPGRKSDIAECQWLLKLHTFGLLNNSFQPSDEVRRARTLWRHRGGLVAQASSAIQQMQKTLTEMNIQLSNVLSDLSGVSGMAIVQAILDGKRDPAAMAELADRQVKAPKEVIAKSLDGNWRKELLFVLKQEVELYRSYQEKIGACDWELREHLQTMTPKVDLQAQPLGPRPKGKRARGNAPKFDLRAELYRITGVDWTQVDGIDVQVAQSVIAEVGVDLREFATEKHFASWLGLCPANETSGGKVLNRRTPKVVNRAKTAFRQAASTLIRSQSYLGAQYRRLRTRLGAPKAITAMARKLACLFYRLLTKGQQYLDKGAAYYEQRHREQQIQLLLKRAKQLGLQVVTPASSNA

SEQ ID NO: 470672 - protein, 370 aa, unidentified
MKNIIYIGMDVHKETFNLCALHGLTGEILGETKCASDVSLVMKFVRKLKKRHGEDTAILAGYEAGCLGYSLYNQLKSQGVECDILAPTTMYSSIKNKMVNNDRSDAKMIASNLVNGTYKSVYVPQEDHVEVKEYIRMVNDFKTSLKKIKQQIKALVLRHGYKYPGKSSWTLAYMKWLKSLDLKGGVKETLDEYLLQYDTLIDKIQRFSERLEELSHRDSYEEPVAALRCLKGIDTTAAMMVHVEISDFTRFPTAKAFTAYLGLTPSEQSSGEKISRSTITKQGNSTVRSTLVECANALVKGTIGIKSKRVKARQKGQESQVIYYADQAVERLQRKYHRMIYQGKPRNVAITAVARELACFIWGIETQKMM

SEQ ID NO: 470673 - protein, 353 aa, unidentified
MNSLTDLREVVDVVIGVDTHVHTHSAAVVDTATGGVLGEITVEATAEGYAELVEFANNHATLRAWAIEGTGGHGAGLSRHLLESSEIVIELDRPKRAARRNGAKSDPLDAVRAAREAMARPQLGTPRSGGERQALSVLLAARRSAINASTEAQLQVFSLVIAAPEPIRARFRGQKLAAMLNTAANLRVHSSWDVETASTVVALRSLARRAHAMLKEAREHQKAIVVIIRGWRPDLLEEFGVGPIVAATVLCAWSHPGRIHSEAAFAMLAGVAPIPANSGQVTTRYRLNRCGDRQLNRALHTVVQIRIQYQPATRDYVARRTAEGKTSREIKRCLTRYVARDIYRLLESGAAAA

SEQ ID NO: 470674 - protein, 344 aa, unidentified
MRYVGVDLHKQTISLCVVELVGRERKVVQRKRFRCRDEEALLAYFAGLGSYEAVVEATASYEWFVQLIEPTAARIVLAHPGKLRVIAESKNKTDKLDAQTLAEFLALDQVPESWRPTPRVREHRALVRLRSYVQGRITSAKNKLRWIVANYNADRTDLFSRAGRAYLEKIDLSAADRFAADLLCEELDQHATRLQTVDRRLKEFAQDAPLPEQEARAVLASVPCVGPVTTEVMLAEAGDVRRFGSQRKATAYAGLAPGIRQSDKRTKQLPITKAGSRLLRTALVELAWRLTNKTRRWGLLYERLKKRCGAKKAIVAIARRAWCVIVSLLKSGQAYRPIGEPAAG

SEQ ID NO: 470675 - protein, 320 aa, unidentified
MSSENFIGIDVSQSHLDVHVVPDQKSGQFNNDEAGVADLIKFVKAAAPVLIVLEASGGLEMLAVSLLSVKNLPVVVVNPRQVRDFAKAIGQLAKTDKIDAATIALFAHRLRPEVRPLKDEQTQMLSALNARRKQIVDMLVAEKNRLHRAPMPNRKNIKAHIRWLEKHLQDINKDIRRTIRKTPVWRNKDDILQSFKGIGPTSAATLLADLPELGSLGGKKIAALVGVAPFNCDSGRYRGRRRVWGGRSQVRRTLYMATLSATRSNPTIKSFYQRLREAGKTHKVAMTACMRKILVILNAMIKNNTYWQSPHNLVDAEHSC

SEQ ID NO: 470676 - protein, 476 aa, unidentified
MELLYHRCAALDVHKASVVACRVRTLPNGQKEQEIRSFGTTTPELLRLLDWLLEWGCTHVAMESTGEYWKPVYYLLEGHVELLLVNARHVQQVPGRKTDVKDAEWLADLLRHGLLKASFVPQREQRDLRDLTRQRANLVAERTRVVNRIQKVLESANIKLSSVATDLQGVSAQAMLAALVKGEASPEEMAELARGRLQEKREELEAALTGRLREHHRFLLTTHLEQLAFLNRQIAQFSARITAQIDRLSAPSPPPAGTGSGEPPGPVSPPPPATGPRPAADPSPAGAASPAPPGSAPAARLPWTPLPPPTYRAAIGLMDPIPGINVEGAENVLAELGTEMRQYPSAAHAASWTGIAPGNHQSGGKRRAVKTPPGNKALRRALVIAAHGAIKTKDSYFGALYRRVKGRRGHKRAIVAVAHALLGVIYYVLLRQRPYEELGAHYLDERQPEKSAQRLVRRLRELGYQVTVEAREPAAA

SEQ ID NO: 470677 - protein, 344 aa, unidentified
MSEVIIIGLDIAKHVFHAHGADERGRAIFSKRISRGKLLDFFAAQPSCTVALEACGGAHHWARQLTQLGHEVRLIPPAYVKPFVKRQKNDAIDAEAICEAAQRPSMRFVAVKSEQQQAAGLVFRTRDLLVRQRTQLINAIRGHLTEYGWVAPKGPSHVAMLADMIEEEEMVSSLPEAAHTMFRVMLDLLAGLNGKIADLDKEIARRAREDEVSRRLMTIPGIGPISATAITALAPPAETFAKGRDFAAWLGLTPLQRSTGGKQKLGATSKMGERTLRRLLIIGSSAVVQQASKRGAPKGSWLEQMLARKPRMLVTVALANKMARIVWALLVKQENYRAPVAAKA

SEQ ID NO: 470678 - protein, 344 aa, unidentified
MENYAGIDVSLELSSVCVVNAQGKVLKEAKVASEPDALVEFFERLGFAIKRIGLEAGPQSQWLHAGLKGAGFETVLLETRHVKAALSAMTVKTDRKDARGIAQLIRMGWFQPVHAKSVGAQEIRALLIARKQLLGRLIDVELSIRGILRGFGLKVGPVTRRNFEARIRELVAGQATLERIASAMLSARSALEAEYGRIHKAVLVIVRDDAVCRRLMTVPGVGLLVAITYKSAIDDPHRIAKSKAAGALFGLTPKKYQSGEKDVTGGITLAGDETVRTVLYGAANVLLSRITRFSKLKRWGIDVAKRRGSKRAKVALARKLAVILHRIWVDGTTYRWAEAAPMTA

SEQ ID NO: 470679 - protein, 355 aa, unidentified
MNSEKYIGLDVHQATVSVAVMDAQGKVIMESILETKASTLLEFLAGLRGSLFVTFEEGTWAAWLYDLLKPHVTEVLVCNPRKIPLLKQGNKSDRIDARKLAERLRLHDLKPVYHGETGVRMLRELARSYLTVVKDLSRVMNRLKALYRSWAIPCAGRDVYYTRHRSHWLEKIPEAGTRRRAEQLYLQLDMLQHLRQQARRELLAEGRKHAITAKLRKIPSLGPIRSVLAVALIQTPHRFRSKRQLWTYSGLGLETRDSGEYHYVHGQVRRRKKQATIRGLNKDYNHDLKGLFKGAATRASVQPGPFQDFYQRSLAKGIKPTMVRLTLARKIAAITLTLWKKGEDFDVHKLNSQAA

SEQ ID NO: 470680 - protein, 462 aa, unidentified
MDQNKQAGQPKKESAKKKVDWKALEIVHPDAAGIDIGGSEHWVAISPDRDPEPVRRFGCFTADLHEMARWLIEKGVRTVAMQSTGVYWMPVFEVLEQHGLKPFLVNAQYTKNVPGRKSDVEECQWLLKLHAFGLLNNSFQPSDEIRVARTLWRHRSNLVAEASSAVQRMQKVLTEMNVQLSNVLSDLSGVSGMNIIHAILEGERDTQVLAAMVMPGVKATLEDIAKSLEGNWREELLFLLRQHLELYRIYQEKITDCDSQLRKHLESLGSKVDPTAQPLGKRPKGKKIARNAPEFDLRSELYRISGIDWSQINGIDVLTAQTVIAEVGADLSAFASEKHFASWLGLSPTNEQSGGKILSRRTRKVVNRATVAFRNAARTLLRSQSYLGAQYRRLRTRLGAPKAITAMARKLACLFYRLIQHGHQYVDQGTEYYEARYREQQIRSLTKRAQKLGLQLVIPNAS

SEQ ID NO: 470681 - protein, 343 aa, unidentified
MEHYVGLDVSLKLTAICIVDGTGKVVREGAVVSNPEAIAAFVKSHAPHVARIGLETGATSTWLWTELNKIGLPVICIDARPAKAALKMQINKNDRNDAVGIARIMQCGWYKEVSVKGLDSHASKALLVSRALLVKIKRDLENQVRGLLKNLGLVIGRAKMNVFAVRAAELIEDRPELAAAVEPLLKARKSIERQIADLDRKVMQLARNDAQVRRFMTAPGVGTITALCFLATIDDPTRFKRSRSVGAYVGLTTRRYASGEIDWTGRISKCGDKMLRSYLYEAANVILTRVAKWSALKAWGIRLAKRSGLRKAKVAVARKLAVILHRMWIDGTEFNWSSKEAAA

SEQ ID NO: 470682 - protein, 424 aa, unidentified
MRFIGLDVHRDFCEVAIAEAGAVRSAGRVKTEPAALLLFAQSLGADDQVALEATGNALGIARIIEPHVRRVVLANPKAVKGFTRAGAKTDRIDARTLAQLLAGGFLPAVWLPDEQTRVLRRRISARAQLVRQRTRAKNQVHATLVRNLKGRPPVSDLFGVRGRRWLADQELPADEQETVAACLRQIAFLDGEIGQVERALAEQVLASAEMRRLLTLPGVNFVTAAALLAAVGAIGRFPTARQLVSYLGLDPRVNQSGSEPARHGRISKQGPGETRHVLVEAAWHASRTPGPLRAFHQRVAGRRGRNVATVAVARKLAVVAWHMLSRGEDYAFARPSLTREKLRRLELMTGAERQKGKRISVWVTREQHQLDKELAAQAELAYRRLAQDWQPTISKGTGAAPGRASRRPSSGQAARQETAPPPAL

SEQ ID NO: 470683 - protein, 392 aa, unidentified
MDSKVWAGIDAGKEIHWAHVLDASGTQILSRRVENDEADLSGLIDEVLALAEEAVWAVDQPGGGAALLLALLWERDQRVVYLPGLAVDRARDAYPGESKTDARDAHVIADQARMRPILAELAPGEGDLAELQLLLARRRDLVTDQTRSINRLRDALVSLFPALERALDFNNKGALTLVCHYQTSAALRRMGRSRLASFLKNRGVKGADALARRALSAARAQSVSLPAETVASRIVAEIAEEVLALKERLTALDKEIASRFFVRQEAQILASLPGIGPILGSEFLVAAGDLCAFESADKLAAYAGLVPAAHDSGKRVGNDRRMRGGNKVLKRVFYQSAFASLRSSPQSRTFYDRKRREGKKHTQALIALARRRVNVLWAMLRDGTTFKAPSSA

SEQ ID NO: 470684 - protein, 349 aa, unidentified
MILVGCDLHTRKQQVALLNTETGELWDQELSHDGDAVERFYATLPPPVTVGIESTGYSLWFHALLQRLGHTLLVGEAAKIRAMVVRKIKTDRRDARHLRDLLKDDRFPVVWIPDPATRDLRALIKHRLRLVRIRTMVKNGLHAIALNQRLALGPSLWSRAGLAQLHALVLPPHTRRRRDDSLELLQWLNGHIHELDLHVATAAAADPDARRLMTHPGVGPLTALATVLVLGPVGRFPNSKHVVSYIGLAPAVSASADKYRLGHISKQGSALLRWVLGQAAPLATRGDAALKRIYFAVLRRRGRPKAKVALARRLLIRLYVMLRDQIDYDEFCRRGRTQRPGLEPARIPV

SEQ ID NO: 470685 - protein, 324 aa, unidentified
MEQEMQAVVGIDVAKAKLDVALKQPAGKWKTKVVANTAAGFEELRSWLAKHSVSSAHVCMEATGVYWEGVAQDLADHGFELSVINPAQIKAFASALGVRTKTDSVDAKVIAQFCASQAPARWQPPSKSVRRLRALVSRREAMVELRVQEMNRLEVAATDVVRRSIEQVMSTLNEQIAAIEREIAKDVDDDPTLRQQRELLASIPGVGDKTIANFLSHYGGELRFQKTRQAVAFAGLDTRQHQSGSSVHGKSRLSKAGHSSIRRALYMPAVVAMTRTTWGKAFAQRLLAAGKPKKLILGALMRKLLAIAYGVLKSGKPFNPALHA

SEQ ID NO: 470686 - protein, 400 aa, unidentified
MLSIGIDVSKGKSTVCGMKPGGEIVYTPFEVQHTREGMSELVSLLRGSGEEVRVVLESTGSYHCPVVAALLENGIFVSVVNSLRMKRFCSQSIRRVKTDQIDAMQIALYGLAYWQELQPTRLPENTYRELQLLARQYYQMTSLLIKAKVDFNALCDQVLPGMQELMSDHAGRHKLSDFVLRYHHTAHILKMGETRFRKDYCKWAEKKGYRNCERMAVLIFATAQNGIPVLPNAPSTQIVITEAIRVLHTVEASRDAILTQMQALAKTLPEYSLVREMPCIGDTLAPRLIAEIGDVRRFHSKRALIAYAGIDAPPYQSGKFRANNRHISKRGNRYLRKTGYEVMQSYVMHKPANDPIFTFIEKKRSEGKSGKLAMVAGLNKFLRVYYGKVTELYRSLPAIE

SEQ ID NO: 470687 - protein, 349 aa, unidentified
MTEAYDGRQVVGMDLHRRRSVIVRMTEDGRKLETVRITNSPAALRAVIAKAGKNPRVIIEATHGWYWAVDVLEAAGAEVHLAHPLGVKAFSYRRVKNDERDAADLADLLRMGRLPEAWIAPPEIRELRELTRYRHQLVKARTSVKDQVHGVLAKLGIPVTHSDIFGVHGQAWLDELPMPQPYAGKVASLRQLAGDLAGEITLLDTVLADLLAGHEGYAAIQQLPGIGPVLAAVIVAEIGDIRRFPRPGQLGSWAGLTPRHYESDTKVIRGHVTKQGSRMLRWAVTEAIQRQPAGSRPREVKDAIIARRGKEAKNIAKIAAARELLTLVFYGMRDGRIRRPARQQPPSAA

SEQ ID NO: 470688 - protein, 400 aa, unidentified
MNQRLEQAWAGIDAGKAHHWAAVVDATGSTVWSRKISNDEGEILGAIAEICGLAQTVHWAVDISGTSSALLLALLAAHGQHVVYVPGRTVNRMSGAYRGEAKTDARDAYVIAETARVRRDFTAIEVPAQLAADLGLLTAHRADLIADRVRMINRLRDVLTGIFPALERAFDYSAHKGALVLLTGYQTPAALRRRGHTRLTAWLARRSVRNSEIVATTALEAAEAQYTTLPGQDVAAGIVAELARQILDLDEKIKRLDTQIRDTFHTHPQAEIIESLPGIGPVLGAEFVVAAGDLAAYADAGHLASAAGLVPVSRDSGRRTGNLHRPKRYSRRLRRIFYLSAQTSIIRDGPNRDFYLKKRAQGLKHVQAVIALARRRVNVLWALLRDNRVFTPTQPVTQAA

SEQ ID NO: 470689 - protein, 325 aa, unidentified
MNVPGKTVLKPLTFSNNKAGFELLDLSIRQINQDCLIALENTGHYAFNLLNFLHEQGYKVYTYNPLLIKEFAKSLSLRKTKTDKKDAHGIALKLLSDPNREQFQHDNRQVDLKILARHIHRLKKNSLIGKYNTLVVLISSFLSWIKSLESIQNIPTNLLTRYPNPQKRLEARFDKLIEIKRLTASKIQDILSIAPRSIGTTSPAREFEIIEIIKHYKRLIDKAETCVNDLMAEFNSVITTVTGIGGRLGAVILAEIRNIHAFDNPAQLQAFAGLDSSIYQSGQIDLAGRMIKRGSPHLRWALIQAAKACARFSPAFKAYLKTKLE

SEQ ID NO: 470690 - protein, 568 aa, unidentified
MSRSKSKSRINSSGGCVTAEVSALEYLFSANGAVSCKPDTVSTVIQPLARGAAKSSPQKRPAVNNCAATKMKKSEKLSRLRHDRAGRIAPAGSRSCKPHLAKVSPSAPVPLAASVPKSERTIAREAPCIRLTFDRATMHNKKGEPMKEWKEITHYAGFDWARDHHVVVVVDRQGQIVADFQFDHSVEGWKRFRQKTAALESVAVAIETSQGAVVDQLLQYEYTLYPVNPAAAASYRQRKAPSGTKTDHLDAWSLADALRVDGHGWKALAPMDELSAQLRLLCRDEVALIEQRTALVNQLQQALLEYYPAALEAFEDWTMPSTWDFIIQFSTPEALVKAGKRRWKKFLHTHRLWRAQTLEKRLALFAQADQFKAGAAITRAKSQLALSLCKLLRTLQEQLDQYRKQIEALFENHPDHHLFGSLPGAREKLAPRLLAAIGSDPKRYGSFQVLQSFAGTAPISFQSGQLRRAKVRCACDKFLRHTVHLWADCFRKASAWGQAYYRKKRQDGKSHACALRCLGQRLLKILFRMLTERKPYDAELHARNQQKHGSWVLALMPNPTPHISEQLP

SEQ ID NO: 470691 - protein, 318 aa, unidentified
MNIEMNQNINVGVDTGKFQLDIYIRPLDIYFTVTNDDKGINEAIKKIKKHKPERIVIEATGRLEMPFIIACAKANLPFVIANPVHIKRFAGAIGQRAKTDKLDAQLIAHYGEAIKPKLSTLKPDIMQSMSDLVARRNQLLVMQTMEKNRMQILPQHLAMTIKPVLTVFKNQIEKIENKIVSLIESCSDYQAKNIILQSMKGIGKIASASIISNLPELGYISSKQASALVGVAPMNRESGRYKGHRKIQGGRHQVRTVLYMAMMSAIQSNPVFKDTYQRLVAAGKPKKVAIIACIRKMVVILNSMLRDGVMWEAPKAIN

SEQ ID NO: 470692 - protein, 434 aa, unidentified
MLFKIVRFICCGMDVHKDIIVATVGITDKTSLITEYHQKSFGTLNNDLYSLCDWLSSYQCCDVCMESTGKYWIPIYNVLEERGFTICLAHPKYTKAIKGQKTDKKDSKWICNLYKHDLVRGSFIPPKPIRELRDISRYYHKLIGMNSSESNRYQNCLTVSNLGIGSIFTDTSGKSAQRVMEAVLQADDPNELNEDEILKLVHKSCKKSDRLINAIHGCRIEPDQRFKMSEIQTHKKELDLHISHCLAEMFKRATPFFDQFLHIIEIVGISTLAAILIISEIGVDMTVWENARQLCCWAGLTPGNNESANKKKTTRITKAGQYLKPLLVQCALAAIKNKNGYFGIKYQRIKKRRGHKKAIIAIARMMLICIYHMILTGESFKPSDYDELMNPKPRKPRELTIESAVDFLKSSGANLDEIIASLKTPPPEPVASPS

SEQ ID NO: 470693 - protein, 404 aa, unidentified
MLFVGDDWAEDHHDVYLMNDTGDRLASQRLPKGLAGISRLHALIAEHAEDPAQVVIGIETDRGLWVDALTAAGYQVFAINPLAVARYRDRHHVSGAKSDASDAKLLADLVRTDRHNHRRIAGDSPDAEAIKVLARAHQNLIWARTRHSNALRSALREYYPAALETFENLADRDALAILGRAPTPADAKRLSVSKIRAALKAAGRQSNLDTRALEIQEKLRTPQLAAPAAVTAAFGASTRAAVGIIAELNRQIADLEAELATHFEAHPDADIYRSLPGLGVILGARVLGEFGDDPNRYTDAKSRRNYAGTSPLTIASGKKRAVLARHVRNRRLYDAVDQWAFCAITHSPGARAYYDQRRAAGDLHHQALRALGNRLVGILHGCLRHQTHYDEHKAWAHRQAAAAA

SEQ ID NO: 470694 - protein, 379 aa, unidentified
MEKDTRHVGFDVDSEKIVVAVAEAEGEVRSLGAIPNREDSVRRLVKKLGPANRLRVCYEAGPHGYGLYWLLSGLGVHCDVVAPTLVPVRAGDRVKTNRRDALKLARCYRSGDLTPVWVPDAEHEALRDLVRAREVAKKDQLRARHRLGKFLLRRGLRAAAGIKNWTAKHLQWVKTLHFEHAAQEATYLDYLHEVDHAADRVARLELAIEQAMEALPAEMKAVIAGLQALRGIKRVSAATIVAEVGPLSRFPRPKPLMGYSGMVSSEDSTGDSVRRGAITKTGNAHLRRIAGEAAWAYQFRPAMSAELKKRQEGLSEEVKEIAWKAQHRLCTRYRRLLAKGKPRQKVTTAIGRELLGFVWAIGVQVEKEQQSVKHRRRAA

SEQ ID NO: 470695 - protein, 350 aa, unidentified
MLIIGCDYHPGFQQIAYVDSETGEFQERRLKHPEEAEKFYRALWEQGVKVRVGMEASGHARWFERLLEELSFELWTGDAAKIRAKRVRKKKTDREDARHILELLLENRFPKIWVATWQNRDLRQLLWHRHRMVQTRTRIMNQLQAVAINEGVRYKKRLWREAGRKQLESLPLAPWASRRRKDLLEVLDRINPTIAELTRSIEEEAEKCPPARRLMTHPGVGALTAVAFVLIIGEAHRFDCGKQIAAYLGLVPEEDSSGERRRLGHISKQGNSLLRFLLVEAAQATARCDQRWRNQFFHLAQRRGRKIAKVAMARRLAVRLYWMWRREWNYEQLQSFGSHVGQPGHPHGVQ

SEQ ID NO: 470696 - protein, 357 aa, unidentified
MTGIRNVGIDLGKRTYEMKVIGPDGKVSGTGGLTSLSGRKALYRKLRPTDRVGIEVCSLAMVMAKEMEREVGCEVVLLNPSRIALIYRSLKKNDKEDALKLARLVQKYNNEELPKVELPTEHEENLRQMLSELRQLKNDRTKEINRLHAVFVENGITEVKKKDLATDMNRCGAIKALKGIFLSQAERILKRLGLIEEQIADSEGMLAGETAGDKNIERLTEIPGVGKQLAAGYVAFLGDGSRFPNASAVGAATGLVPRQDISSTVVRLGHITKCGNRNLRSLLILAAWSHVRAKKAGALKEKYLYMTQVQSKGKKVAIVAVARKLAELMYTLLKTGASYEKRALPAVSQIAGEALAS

SEQ ID NO: 470697 - protein, 399 aa, unidentified
MNDGYGVYLGLDVGKGDHHAVGLAPDGRRLHDAALPNTEARLRQLFDTLARHGRVLVVAGQPASIGALPVAVARACGHQVAYLPGLAMRRIADLHPGSAKTDARDAYVIADAARTLPHTLRRVDTGDEALAELEVLVGFDDDLAGEATRVSNRIRGLLTQIHPTLERVLGPKVHHKAVLELLSRCGGPAGLRKAGRRKLLSIAIAHAPRMGQRLVAQIMTALDEQTVTVPGTQAAETILPRLADSLRDVLRQRDQVAKEVEGMLDAHPLAPVLTSMPGIGVRTAARILLEVGDGTAFATPGHLAAYAGLAPVTRRSGSSIRGEHPPRGGNKHLKRAFFLAAFASLTDPVSRAYYDRKRAEGKRHNAALICLARRRCDVLFAMLRDKIPYQPRPTSPIPA

SEQ ID NO: 470698 - protein, 349 aa, unidentified
MDHYAGIDVSLELSSVCVVDAKGKIIKEAKISSEPGALVIFLRGLGMVVERIGLEAGPLSQWLHAGLTQAGFEVVLLETRHVKAALSAMTVKTDRKDARGIAQLIRMGWFRPVHCKSIGSQEVRALLVGRKLLLGKLLDVEFSIRGILRGFGLKMGMVTRRSFEARVRELCAGQSMLEQICAAMLVARSALQTEYTKLHKAMLTIVRKDEVCRRLMTTPGVGPLVAITFKTGVDDPSRIGKSKAVGALFGLTPKKYQSGQTDVTGGITRVGDEMVRTALYEAANILLSRVTRFSTLKRWGMDVAKRRGAKRAKVALARKIGVILHRMWVDSTNFRWTKEAPTAPRLIQA

SEQ ID NO: 470699 - protein, 344 aa, unidentified
MDHFAGLDVSVKETSVCIVDDTGKIVREVKVASEPEALLAVLKNSAYHFKRIGLEAGPLSQWLFSALAEADLPVICVETRHMQAVLKAQINKTDRNDARGIAQMMRVGLYRPVHVKTPRSQKLRMLLTHRKLLQSKAIAIENDLRATLRNFGLKVGMVGKVKFEARIKELVENLPDLAALVEPLLIVRRVLREQIVILHRRLLAIVRDDEVCRRLMTVPGVGPVVSLTYRATVDVPARFHKSKAVGAVFGLTCSKYQSGEIDRSGRISRCGDEMMRVMLYEAAQSMLRSKKWSWLKAWAMQIVRRRGMKKAIVALARRLAVIMHRIWVDGTEFRWTREQATAAA

SEQ ID NO: 470700 - protein, 411 aa, unidentified
MLSTYTNEFTPSEGVLGVVLELSRKCWKIAFQDGRHASPSIHNAKDEDASKRLDELKEFIDRQKLKWGLAPNINVVVMYEAGQDGFWICRALQKLGYEALVIDPASIPVERRARRAKTDRLDVIKLIDSLMAYLHGEKGRMHVIRVPDEKAESERHLARDRGEIQKEIGQHRDRICKLLLTIGNWEGVGNGSAFAERLKKGEIKAHDGTALSEEMRQRFERECERLMLAETQFLDLEKEIFNQLPLPVQERIMNLQKLKGVGPVGSIRLQLELFWRNFNNRREVGSCVGLVPQPYDSGDSHRDQGISKQGNRRVRALVIEMAWMWLRYQPESAITKWFHQRTKGCGPNKRGKRIAIVAVARRLVIALWRYGEQGIIPEGALLKGEKPRARTKKFASESTSEVETNNAKQPA

SEQ ID NO: 470701 - protein, 337 aa, unidentified
MEYFAGLDVSMAETHVCVVTRNGAVVHQAKVPSTPADIAAELAQVPTCRRVLFETGRMAPMLYHGLSQLGLPVVCVESRQAYQALKSLGTHKTDRNDARGLAHLARTGFFKPVHVKSLAAHAVRSLIIARKKLVGQRVTLENQIRGLAVVFGVRLPRALSSTFIRQALQASEGIPGLSAAMQGLVAARTAVLAAIVAIDGDIRRMVRASDACRRLMSIPGVGQLTALAFTAAVDDPGRFRRSRDIGAYLGLVPRRHQSGEIDYTGSISKCGDRRVRTLLYEAANVMLTRYKGALKLKEWAFAVAKRSTMRKARIALARRLAIIMHAMLRHGTEFKPI

SEQ ID NO: 470702 - protein, 391 aa, unidentified
MVCIGIDVAKDKHDCCILDSEGTTLVDCFTIPNNMDGFKSLLQTIQDCSQKSDKIKVGLEATGHYSYNILGFLLDNDLLVYVMNPLHTNLYRKSLSLRKTKTDRVDAKTIATMLLSDVDLKSYTDTAYHNEELKSLTRYRFDKVQERAKLKQSVSRLVTILFPELEQLVSSIHGTSIYALLSEYPGAKQISEAHLTRLANILVKTSRGHYRKDKATHIRDAARTSIGSVMPAKSLELKHTIKLIQELTSEINEIEDAIRKIMDELKPPILSIPGMGFHSAAMILAEVGDFSNFNSPDKVLAYAGCSPSTYQSGKLTNCYAHMEKRGSRYLRYALYTATKYVCYWNPVFTEYLTKKQAEGKHYNVALSHATKKLVRLIYALQKSGKAYLAVT

SEQ ID NO: 470703 - protein, 332 aa, unidentified
MYLGIDVHKRYAQVAVMAEDGKIVEEVRVENANLDDLAQQYAGAQAAIEATSNYYHIHDALSEHLDVTVAHPKELNQIADTDKKTDRVDAKELARMVRLNSVPESYVPTDEISEARARVRGRQSLVEHRTEYANKVHGLLSDHGINEDVKPLTQEGREFLRELSLPTPWDSVLASYLEVIETLTDEIQNLEETIEERAGSLEETQLLMTIPGVSYYTALTIYAELGEIGRFDGDKEVVSYVGLNPVIRESGDSRVEGELSKRGSGRVRWLLVQAAHTAVHTCNDGYLGRFYERLASRKNSQKAIVATARKMLVSIYHMLDRGEVYDPPGVSA

SEQ ID NO: 470704 - protein, 318 aa, unidentified
MNSPSMTVGIDVSKQRLDFARFPQGDTFSVAYTDTGLAKLLKRLRGWSPQIILLEASGGYEYGVVAALMAASLTPVLINPRQVRDFARALGILAKTDKIDARVLAEFAFRVQPEPRPLPAAQQQELNHLLSRRRQLLEMIQMECNRREVSPFLRVRQSIDHNVDSLRRQLTDLEREIDDFFNQSPLWVQQDALLRTVPGIGPQTVLSLQAWLPELGALNRHQIAALVGLAPFNRDSGVLRGRRMIRGGRHKVRQALYMATLSAVRYNPVIKVLFERLAGQAGKPGKVALVACMRKLLTILNAMVKNQTTWRAMMPLTS

SEQ ID NO: 470705 - protein, 432 aa, unidentified
MSAPSPVAPSTVASTRRARGPSSRKVADLSPEGFPSGTPTRSEGATKTGAKERSTMRNVALDLGAKKTTYCEVRDEQVVQRATVTSVETLRSLLGPDQAPAKVAIEACREAWYVHDLLTGWGNRVLLVDTTRSKQLGIGQHGRKTDRIDAEVLARAVERGGIPAAHVLSPHRRELRRQLGVRRALVETRAQLVTTVRGLARESGQKLPTCAAEHFLGHARKASLVDGLRVLIEPLLNTLDVVEQQLVTVEAELGKLCMREPVIAQLCTAPGVGAIVAACFVAVVDDAKRFHRAHKLESYLGLVPSEDSSGGRRRIGAISKKGNSYLRALLVQAAWCVLRSADREDPLRQWGNAVVKRRGKRIGVVAVARRLSGILFAMWRDGKVYDPRALGQKTARGLRVSAEDATFRAEAFERVANKRSCRLLTPEVNEPN

SEQ ID NO: 470706 - protein, 317 aa, unidentified
MEETPAADRFVGIDVSKSWVDVHVRPDGTAFRCNTDGAGLAELVRRVQPLMPRLAVMEASGGYESLVAVSLAEAGLPVAIVNPRQVRKFAEALGQLAQTDAIDARVIAHFAEAVRPPPRPLPDHTLTQLQELLARRRQLVVMINAEKQRFAKAESKITQRSCKVMLKSLEAERARIDRAIDKLVHASPLWCGKLDLLTSVPGVGDIVARTLLAELPELGAIDRHQIAALAGVAPFSRDSGKRRGRRFVRAGRVQVRAPLYMACLVAIRYNPPLKTFYRRLREAGKPPRLALVAVMRKLLTMLNAMLRDNKPWTWAQT

SEQ ID NO: 470707 - protein, 264 aa, unidentified
MQATTIGFDIAKSSFQVHGADERGKTVLKKKLARGRVLEFFANLPPCVIGMEACGSAHYWARELIELGHEVRLMPPQYVKPYVKTNKHDPADAEACCEAVQRPGMRFVPVKSEQQQSLLMLHRIRDRLIAERTGTINAIRGHMAEFGIVAAQRGAGLRDLLAIVSDLEDERLPPLARELLVDQAEHLRAIEARIADLDGRLVRQTRDDEACRRLTEAPGVGPVIATAVVATVGDASLFNSGRGFAASLGLTPRQHATGGKERLR

SEQ ID NO: 470708 - protein, 339 aa, unidentified
MLMIGVDYHPSVQQIAFTDTETGKFGERRLIHSNGEAERFYRDLHERGILVRVGMEATGFSRWFERLLAELDFELWIGDPAEIKAKRVKKQKYDREDARLLLRLMREDNFPKIWVPSPENRDLRQLLWHRHRLVQMRTRIMNQLQALAMNEGKRWKSKLWSAQGRAELEKLALAPWASRRRKELLELLDRLNPSIEELTVAVEQEARKRPDALRLMTHPGVGPITALAYVLIIGTTERFHRGRQIGTYVGMIPSEDSSAGKQRLGHITKQGNSLLRYLLVEAAQAAARINPHWRRRYLHLAMRRHKSIAKVAMGRRLGIRLYWMWRNGCEYSPSFEFGS

SEQ ID NO: 470709 - protein, 379 aa, unidentified
MAVDADGETLFSTKVINDEAQVLTLIETARERAEEVRWAVDISGRASTLLLALLVAHGQNVVYVPGRTVNRMSGAYKGEGKTDAKDARVIADQARMRRDFAPLDRPPELVTTLRLLTNHRADLIADRVRLINRLRDLLTGICPALERAFDYSAAKGPVVMLTEYQTPAALRRTGVKRLTTWLGRRKVRDADTVAAKAIEAARTQQVVLPGEKRATKLVCDLAHQLLALDERIKDNDREIRETFRTDDRAEIIESMPGMGPVLGAEFVAIVGDLSGYKDAGRLASHAGLAPVPRDSGRRTGNYHRPQRYNRRLRWLFYMSAQTAMMRPGPSRDYYLKKRGEGLLHTQALLSLARRRVDVLWAMLRDKRLFTPAPPVTQTA

SEQ ID NO: 470710 - protein, 394 aa, unidentified
MYFVGIDVSKYKHDCFIVTEAGEVIKDTFTFDNTRTGFDQFFSILDGLGPKNEIKIGLEATGHYMNNLMKHLSVKGYSFILLNPIIVSRFRHSETLRRTKTDKVDAKLIAQVIASKDFNSYPLQAYHFPDLKTLTRLRDRLIKQRSLYLVMLTNQLDLSFPEFKEFFDGSLKSKTAQFILTKYGISSRIANMNSQSFELLRKVSHGKFSYAKFAKLKELAKNTIGCSSEIDETLFSLTINLYQSIDEAITNVESKISEIMEKLDSPTASIPGIGIMSAATIIAEYGDVSRFANDGQMLAYAGLDSGRYQSGTSDFPGRMVKHGSGYLRQALMNVAETCMMHVPSFYDYYLKKRNEGKSHRVALSHIARKLVRLIYKLETSHTHFDLSVFNSQHQ

SEQ ID NO: 470711 - protein, 353 aa, unidentified
MLAELVDHVIGIDPDRDWITAAVLDANTTGVIATAKFAANNDGYDEAIEWAEIHTTVGDRSWVVEGSGSYGRGLTAALSRVGEWVIEFDRPHQRPTKDGAKTDELDAVRAAREALGRHRLHTPRTHDGHREALRVHTVTRAGVVRARTAAINELKALVLTSPDGLRSELRGLSTMALITRCATFRTTSKRPIAEQCVRNTMRVVARRIQHFNDEIDVHDVAMKQLVNDTAPQLVAEPGIGYVTAAMFIIAWSHPGRCRSEAAYARLGGVAPIPANSGQSQDRHRLNRYGDRQLNSAFYVVALARMCHHEPTKAYVARRRAEGKTDREIRRCLKRYIARKVWRLLEHQAPKIAT

SEQ ID NO: 470712 - protein, 403 aa, unidentified
MTSYSYFAGIDWASQSHSVCVLDAAGCVALRLDLPHNKEGIERLIRQLKSFAGIAIAIERPSGLLVDSLVEAGLRVVPIHPNVLKASRARYRGAGKNDPGDAYMLADILRTDGHRFRTLEPQSDDIRALRALVRTRDDLVDQRVALANQLRSLLESFWPGAAEIFADVDSPIALAFIARYPAPQSAAHLGEKRLASFLAQHSYCGRRPVAALLERLRVAATGCAGELEAEAKGELARSLAAVLERLVAELAKLTARIEHTVASLADGQIIMSFPRSGRVCAAQILAELGSVRERFPTEAQLAAEAGVAPVTYESGKHRSVVFRFACNHRLRRAITCFADQSRHVNRWAADVYHRPRSRGCDHPHAIRVLSRAWVRVLWRAWFTKMPYQPHLHRSSAALNATTG

SEQ ID NO: 470713 - protein, 375 aa, unidentified
MEVTTIGIDVAKDVFGVHGVDGRGQVTMRKRLVRKHLLEFMSKLPACLVGLEACTSAHYWARELGQLGHRVKLMSPRFVKPYRKSEKNDANDAEAICEAVARPSMRFVPIKSAAQQDLQALHRVREQLLKSRTALVNQVRGLLAEHGIVAPRGIARARRLLVETLTEPERHGLSEVFRETLLEIAERLRLFDQRIQAYDLRIERVFQHDERCQRLAAVQGVGPLVATAMVAAVGNAREFKSGRELSAWLGLVPRQHSSGNRSMLLGISKHGDRYLRTIMIHGARAALRCAERRRDPHSIWVTRLKLRRGANVATVALANKNARIIWALLTHDDQYRPSILDQSSVARLAALRSSPPASVRSAGAERSLHSEFKRT

SEQ ID NO: 470714 - protein, 355 aa, unidentified
MERYIGMDVHAASCTLAVISEKGRRLKDFPVETNGQALVEAVRMIPGHKHLVMEEGLQSAWLYETLSPHVDELVVAGITTSRGPKSDKRDAYGLAEKLRVGNLDKYVFKAPRQFTRLREFSRTHMTLVTDVIRTQSRIKSMYRSRGVLVAGVDVYSSRRREEWLEQLPSSTKMRAARLYSHFDFLLDQKKQAEGDLLREANKHPIVKTLETAPGFGPIRAARLVPIVITPHRFRTKRQFWSYCGLGIVTRSSSDWVQTADGAWIKSRVPQTRGLSRQHNHFLKSIFKGAATTVVTQRNKDPIHARYERLFEGGTKPTLAKLSLARMIAATVLRMWKNEEEYDPGRAGLPTQTRKG

SEQ ID NO: 470715 - protein, 317 aa, unidentified
MEDTLIFVGIDVSKAQLDVEIRPSGEKASFANDKVGIKALVKRLAKIGPTLIVLEATGGYERQVTRALVSADLPAVVVNPRQVRDFAKATGQLAKTDSIDAGVLAHFAEAVRPKLRPLPDAVTLELRAFTSRRRQILEMIAAENNRMEMTSKAVAKRIGAHVRWLEQELDRANQELDRAIEQSPIWKENEELLRSAKGIGPVTSRTLLAELPELGTLDRKQISALVGVAPFSRDSGSLKGRRSIWGGRAPVRCALYMATLVATRRNPVIRDFYNRLTAKGKIFKVALVACMHKLLTILNSMIKHKTSWSETFSRQTT

SEQ ID NO: 470716 - protein, 327 aa, unidentified
MAQKMDVVGIDVSKATLDAYALTSQQARQFANDPAGHQGLVAWLQELGVGVAVFEASGGYERAAAQSLRRAGLVAHVVDPKRVRHYAQAAGQLAKTDRIDARMIAAFGAAFLLGKPSGVAGGDDPARQDLAELVGTRQVLVDHRTSLQQQADAVTSAIAKKLLLATLKQFDRQIETSDRQIAAAIARHEPFAALARRLDTVPGLGPVSIAALIAWLPELGQLDRRQLAALVGVAPFADDSGKRTGQRHIQGGRMKLRNVLYMATVGAATRHNPVLHARYRRLLENGKKPKVALIACLRTLLTILNAMVAHQQDWNPTRLPATEPVAA

SEQ ID NO: 470717 - protein, 373 aa, unidentified
MKKVRFLGLDVHAETIAVAMAEPEGEVRSLGIIPNREESIRKLVKKLGPAEQLQACYEAGPTGYVLYWQLTALGVKCEVVAPTLVPVKAGDRVKTDRRDAMKLARSYRAGDLTAVWVPNEEHEALRDLVRARETAKQDQLRARHRLSKFLLRHGRRAPAGIKVWTQKHEEWIKKQVHFEPPAQEYTLLDYLHEVEHMGDRIQRLEQAIAEAVKLAPRRMQEVIQSLQALRGIAQISAVTVVAEVGEISRFEGARQLMGYSGAVSSEHTSGKRVQRGPITKTGNAHLRRIAIEAAWAYRHRPAIGPRLRKRQEGLSEEVKEIAWKAQHRLHKRYRTLSAAGKEKQKVITAVGRELLGFIWAIGVQAERNSKRVA

SEQ ID NO: 470718 - protein, 369 aa, unidentified
MISVGVDVSKEESTVCVMKPYGEIISKPFELSHTEKDLSELANMLLRLDGEVRVIMEVTGVYHLPILMYLKEQGFFVSVVNPYEMKKYRSQGLRRVKTDKQDAITICKGLDYWYQLKNYEANGAIYEELKLLGRQYRNYMKMHIEGVQNLAHLLDCVMPGIKLLLGGWNESSGKNKLSDFASEYWHFDNITKKSERQFSANYIKWAKKNGYHQNQDKAEKIYLLAKSGITTISSGNPTTKMLMQEAVKVLKEVDNTLKKILTQMQLLAKSLPEYAVVRAMGGVGEVLTAKLIAEIGDVRRFHHGKSLIAYDGIDSPPYQSGQFTAQNRRISKHGSAYLRKVGYEVMQSLKTHDAPTDDCVYQFILKKRT

SEQ ID NO: 470719 - protein, 457 aa, unidentified
MNPKRSKPKNDRTMPMIHPNAAAIDIGATMHMAAVRADRTPEPIRSFGTFTTDLHRLVDWFTECGVETVVMESTSVYWIPIFELLDARGFAVFVVNARDAKHVPGRKTDVSDAQWLQRLHSYGLLRASFRPKGQIAELRAYVRQRERLLEYAASHIQHMQKALTEMNLQLHHVVADVTGATGLRIIRAILAGERDSKVLACLRDYRCHSSAEAIEKALTGNYRAEHLFALEQALALYNVYQDKASACDARIEAVLKELSISRGRDAGPLPSPRRRLHGKANGPDFDVRAALFKLLGKDLTQIDGLGSYLSLRLIAECGDDLSAWPSAKHFTSWLCLAPSNKISGGKVLSSRTRRSGSRASALLRLAAVTVGRTDTALGAFYRRLSARIGKAKAITATARKIAVLFYNAVRHGMEYVDPGSSYYETRYRTRVVENLHRRAKAFGFVLLPLESKAGAVS

SEQ ID NO: 470720 - protein, 330 aa, unidentified
MKITTVGLDIAKSVFHFVGVNRAGKLVRKKMIKRTELIHFFSQVEPCLVVMEACGGANYWAREFQKMGHEVKLIAPQYVVPYRQGNKNDYNDAFAIAEAAQRPNMRFVQPKPVEQQDVQMLHRMRERLNKQSTALVNQVRGMLAEYGIVIAKGKASFRSKLPDLLENADNALTVKGRSIFYQLYEEFTDIDTRLKNCDTQVLQETKSNHVCLRLEAVPGIGPVTATAFYAAAGNGKDFTNGRHFSAWCGLVPKLHSCGGKDNLLGISKRGNAYLRTLFIHGARAVLRHSDGKVDRFSRWAVALAERRGFNRACVAVANKLARIAWVIAAR

SEQ ID NO: 470721 - protein, 406 aa, unidentified
MFVVGACVARPRYASNEGCVGMAGAEPHARGRAMQKNIKVFIGLDASKMKISVALAEDGRQGEVRFFGDIENTADAIKRLASKLSGRYQQLLFCYEAGPTGYGLHRLITSLGHVCSVIAPSLIPKRPGEHVKTNRRDALSLARLHRAGELTTIWVPDPGHEAVRDLVRARESAMEDLREKRQQLQSFLLRYGRVYPGLRSWTLVHARWLSNLRFEHPVQYLVLREYRQAIEDAEARLGRLTQQVTNVVSTWSMAPVVEAYQAMRGVAFLTAVTFVAEIGDVRRFETPRQLMAYLGLVPSERSTGEQIRRGRITKAGNPRARRVLIEGAWTYRYPARLSRSLQIRQERLPNSVRAIAWKAQVRLCARYRRLMAAGKRQCLITTAIAREMAAFLWAIGHEVQPSSAVA

SEQ ID NO: 470722 - protein, 397 aa, unidentified
MEELTEEPVELVARVCAVDIGKAGLVVCVRVPHETRPGRRVQEVREYAAVTPALLALADWLRCQQVELVAMEATSDYWKPVFYLLEAEGFTCWLLNAKHVKNVPGRPKTDKLDAVWLAKVVERGMCRPSLVHPKPIRRLRDVTRYRRSLVREQTREKLRLEKILEDAQIKLDSVISDLHGVSGRQMLQALVEGQRDPTVLAQMARGSMRRKIPQLPEALTGHFDDHHAYLCATMLRRIDALAADIAQLDTRIEELIAPFAQAVDRLDEVTGIGLRSAQELIAEIGANMAAFPTAAHLVSWAKFAPIDANSAGKKKGGATGKGNPWLAGTLGEIVAGLSRTDTFLGERYRRRQIFATVAAAIFTGILAWVARDRLGPGYRTPQLSHDPQEHDRAAGQP

SEQ ID NO: 470723 - protein, 370 aa, unidentified
MLDTTTFVGLDVHARSIKAVSLDVMTGEVRAATFGYDAGAVAEWVRSVDPGARCVYESGVTGFDLQKRLSGLGVDCVVGAVSKMIKPSADRRRKNDRNDAEFLARMLSVGNVVEVWVPDDECEAARDLTRALEDARDDLSRSKQRLSKFLLRHGLAFDERTPTGRRKGNWTRAHWSWIESIRFAERADEEVLAYYVDAVRRAAEEKARLEGLVEGEARKPRWRRRVDSLRCLKGVDTASAADLVFEAGEFSRFRNARSFAAWVGLTPSEHSSGESDRRGAITKAGNKHLRKTLVEAAWHYLTCSGRPKDLAKGQAPDRGARRHAAKGVRRLVERREALLARGVHGSKANVATARELACWVWAVGLMAEEA

SEQ ID NO: 470724 - protein, 347 aa, unidentified
MVTLGADPHKQSHSLVAVDDTGRQLGAHTVPATSAGHLDVLRWAQCWPERRWAVEDCRHVTRGLERDLLNAGEVVVRVPPHVAAEGRRSVRERGKSDAIDALAVARAALREPNLPKAQLEQHAREVRLLLDHREDLVGERTRIQNRLQWLLHELEPGFQVANGALSRRPAIRRVEGLLEGRAGIVAELARELTARTAQLSTRIGELEQQLAGMMPALSPSLLALAGCGILTAAKLVGETADVRRFRSRAAFAMHNGTAPIPASSGNQQRHRLNRGGNRQINAAIHRIAVSQIRRSGRSRDYFQGRLAAGNTKREAYRALRRRLSDEVFKLMLADQRTHASSAQSAAA

SEQ ID NO: 470725 - protein, 386 aa, unidentified
MEGETFTPRDYDVFAGLDVDKKSIAATFSSPQGFIRSLHMPYSVDYLLNHVRKHFGDQKVAFVYEAGPTGYGLYDGLVAQGYRCLVAAPSMIPRAPGQRVKTNRLDSRGLSESLRGGQLKSIHVPSPIYRELRHLTQLRDTVVREAAANKQRIKALLLLEGIGFPPATAGRQWTLRVKAQLRKLRCSRTVRFKLDQLLDSLEFCEKQVVSSTKEIRRFCKEDVELFQSIEYLMSIPGIGWIVASQLLARMGDWREIDNVRQLGSFLGLVPTENSTGDSVDRGSITRAGDGRLRSKMIQAAWSAIRQDGELREFYRSVCQRNPRGKGARIAIVAVARKLSTRIYAVLKKQRPYIVRKQVHSAPLTQEETSPQGTTRRCAEPGETDNS

SEQ ID NO: 470726 - protein, 342 aa, unidentified
MQISTIGLDIAKNVFQVHGIDAAEKVVVRKRLRRRQVLEFFKALPPCLIGMEACATAHYWARELTKLGHRLRLMPAKDVKAYVKRNKNDAADAEAICEAVRRPTMRFVRIKSAEQQGQLMQHRTRDVLIRQRTQIINALRAHLAELGVVAAQGNAGVNELRAIVTDEQDTRLPIAARASVIVLAAQLEALESVIGAIEKRIKLQHRSSEASQRVEAIPGIGVIGATAIVATVTDPTIFRSGRDFAAWIGLVPRQDSTGGKQKLGPISKQGDRYLRRILVVGAIAVLRRAQENPGKYPWLTQLLARRPFKVVAVALANKMARMAWALLAHGGTYRAPELAETA

SEQ ID NO: 470727 - protein, 471 aa, unidentified
MRTIGLDLATKGQHKAALGDASGKVIRRNIKVKTRAADLGRLFNRARGENGANEPVRLMMEPTGMGWHPVCVYAQKQGVEPYLVSTNKVHDLREYYKKHYKSDKVDSIVLVKIPFVDDETLHPVHLPSADQLAGQRFFKQLDRLTGLATACKNRIREADRAFWLGQLEEIFSSGDYLGPVGRAFRRQFYNPWRVRQAGVEGLRAFLARVAHGQYDPELPQRLLEAAEEVIAIYGDATGQHSPYLDFDALREELAVELDLLEVYEAQISQAAQRVRDLANKLHPSHNLQTIPGVGFMTEAAVVFFVVHPERFNQRTFRGFHGLIPGANQSSEGESKGVKVTKAGPAPLKKYLFLAAGVGRQWDVDLAQIYYDQMVHKGKHHNQGICACATHLGDRILVILKEDRPYERRDEAGNPIAASEAKAIIEARYTVPEEVRKQRTRRARKERRERQGTKKKRGKPLKVREAGYATST

SEQ ID NO: 470728 - protein, 336 aa, unidentified
MNFVGIDLHKKTISVCVVNQERKVLKRATLYCVEAQRIADFFRGLGAFTAVVEATASYEWLWQLLEPLAQRLVLAHPKKLRVIAESKNKSDRLDAQVLAEFLALDMIPEAYRPTPRQRQHRTLVRQRQQIRRALVRARNRLRHLLGNYNADRRDLFTAAGLAYLAEVPVSAADRFVRDQLLATWEHHREQLAALTKELAALAKKAPAAERAARACLASAPGVGPVTVDVLISEIGDIGRFRSNKKVMAYAGLVPGQRESAGRKKELGITKEGSRLLRWAMVQAAWRLVRPTGRWRLVFEQLRKRRGAKKAIVAVARRLLGVLATLWRTGQRYRLAL

SEQ ID NO: 470729 - protein, 320 aa, unidentified
MQTPTNVLNIGGDVAKDEIVVACSEGSFPTRPLANQRTALQAFLKKLPAGSRIGMESTGIYHELFANIAHKLGFIVFVLNPKDARNYAKGVGMRGKTDRVDAELLARMVAHEHAKLHAWIPPTPEQYEIAQLIKRRAKLSSLRAALGMSLKGVDGFGTDLKALKKRFNQLIARIDQRVQILVDTNPDRKQHDTNLRTIYGVGPVVSAALINTLERVPLKNADAFVAFTGLDPRPDDSGHHRGKRRLSKRGPSELRRLLFLAAMSAAKTEVWHPLYEHYRERGLSSTAVFAILARRIARTAWSIYSHKTEFDPKRLISALT

SEQ ID NO: 470730 - protein, 413 aa, unidentified
MEGLSPLYRRVAGIDVHKMLHVVTTVIEHPDGTIEQQSREFGGFKRDCRALASWLLELDVELVVMESTGIYWKSIYAHLERAGIQAWVVNAHFVKHVPGRKTDMNDSQWLAVLARFGLVRGSFIPPQDLRELRLVSRYRRKLTAMRASEINRLHKILDDGGIKLGGVVSDLNGLSARAMVTGLIEGKPITALLDMARGRLKPRREDLQAALDGDLTARHRFILKHIHEHIEILERSLAELDAYILAAMAPYQWAHRLLQTIPGIDQIASALILIEIGDDMARFGSADRIAAWAALCPGNNESAGKRKSGRTGKGSSVIRYIMCECANSAWKTRSSLASKYKSLMVRKTHKKAIIALAHKMIRLIFLLLTRKVAYHDPQIDYQAISAKKNAPRWIKQLRVIGQWPDNASTSATT

SEQ ID NO: 470731 - protein, 334 aa, unidentified
MQNVALIGIDLGKHSFHIHCQDKSGNALLRKKFTRTKLMQFLATCPSSVVVMEACAGAHFMARRISDIGHEAKLISPQFVRPFVKSNKNDFIDAEAICEAASRPSMRFAQPRTETQQAMRALHRVRESFIRDKVKTTNQIHGFLLEFGISLPTGDAAIKRLSLVLAENEVPEYLSRLLMKLHAHYLYLIEQITELESELNQSIKADATAQRIMTIPGVGPMTASLLSSQLGDGKQFSCSRDFAASTGLVPRQYSTGGKSTLLGISKRGNKNLRRLLVQCARSFMMRLEHQQGRLAEWVRKQFDNKHSNIVACALANKLARIAWAITALQKEYQA

SEQ ID NO: 470732 - protein, 405 aa, unidentified
MEVIIERVCGIDVHKDNVTACIMTPKGKEIQTFSTKTVFLLKLMDWIKSHGCTHVAMESTGVYWKPIVNLIEAEEIEFLVVNAQHMKAVPGRKTDVKDAEWIAQLLRHGLLTASFVPDRNQRELRELVRYRRSIIEERARQHNRIQKVLEGANIKLGSVVSDIMGVSAKEMLYAIADGEEDPTKLASMARRSLKRKKDELELALQGYVSTHQRMMLKTILTHIDFLTEQIEILDLEVTQRVSSYQEDIERLDSIPGIAKRMAEQILAEIGTDLENQFGSAPRLCSWAALVPGHNESAGKRKSTKSKKGNKYLKSALTEAAHSVAASKNYLGAMYRRSAARKGRKRAGIVVAHAMLRIAYYLLTRKEMYVDLGEEYYDKQKEKSIVRYSVRRLENLGYTVSISEVS

SEQ ID NO: 470733 - protein, 402 aa, unidentified
MYNAVGIDVSKGKSTVAVLQPAGVIIRKPFNVNHTSSELDELAKYIGSLEGETRVVLECTGRYHEPVVKALSEAGLFVSAVNPHLIKNFGNNSIRKVKSDPADAKKIARYTLDNWIELRQYSSMDNTRTQLKTLNSQFSFFMKQKVAAKANLIALLDNTYPGVNKLFDSPVRDDGSEKWVDYAYSFWHVDCVRKIGLKTFTERYQAFCKKHHYNFQPAKPAELFLASKDLIAVFPKEASYKLLIQQSIQQLNLASSHVEELRSKMNELASTLPEYTTVMGMYGVGKTFGPQLIAEIGDISNFSHREALTAFAGVDPGVDQSGTHNSKSNKASKCGSNRLRKTLFQIMSTLLQTAPEDDKVYQFLVKKRAEGKPYYVYMTAGANKFLRIYYGKVKECIRNLEQ

SEQ ID NO: 470734 - protein, 323 aa, unidentified
MTKHITICAGIDTGKRKLDVALEGNREQLQVENTSEGHAVLLAWLRRHRVKRVGIEASGGYEQPVVVELRRQRFVVVVFQPAQVRAYAKFHLQRAKNDKIDAALIAACTAAVRKIHAAPDPRLLPFAEQLTMIDQINEDTARLKNRIESCRNARIKKLWNEDIARLEKREKAELKALVASIRKHPDLAKRLGLINSVHGIGLPTAVAILVRLPEIGQITREQAVALAGLAPYDDDSGEQVGVRHIEGGRKRLRRALYTASLAASFRWNQQLIQLYQRLTAAGKEHKRALVACARKMLIFANTVVARGKPWQDCPPEKAALTTG

SEQ ID NO: 470735 - protein, 474 aa, unidentified
MKKHKQAEPKTKSEAIKALGEQEPDSAGIDLGANEIWVAVPADRDQKPVRQFGAFTQDLMAIVQWLIQCGVRSVAMESTGVYWIPLFQLLDEAGLKVCLVNARHVKNVPGRKSDVRDCQWLQYLHSVGLLLGSFRPAQVICAVRSIYRYRQNLLSMASQHVQHMQAALDQMNIKLHHVIDDLTGVTGQAIVAAILSGQRDPVQLAKLRDKRIQAPEATIAKALEGDWRKEHLFVLSKAWAQYQEVQKQIQDCDQELWNYTRELEACTNVIKPAKVMRLKPELVGAELLSKPPTKKRARRKTSKNQPEGPWPQELERFFGVDLTAIPGISVLTGLTLMSELGNDLSAFRTEHHFASWLCLCPGNETSAGKVLRRRTRRSQNRVRQALRMAASSLHHDKSYFGDKYRRLRARLGAPKAVTAMAHQLARIIWTLITRQLPFDLSVFAYHEKVHQQRRLKHLAASARHMGYQLTPIAA

SEQ ID NO: 470736 - protein, 406 aa, unidentified
MFVGWDWGNTTHAVAVIDGQGQTVDRWLCPHSEDGLRATFARLAGHGAPAELPVAIETTRGLVVDRILAAGHPVVAVHPNAFNAVRPRWGAARAKDDPGDAFKLADYLRTDGRRLRTLRPTEQVTLELQALVRAREDQVTARVTATNQLAALLAEHWPGAGMVFARLDSDIALAFCDRFPAPATARRLAPARMRDWLARQHYSGRNDPTVLVAKLRDAPAPASRLGEETNTALVRAQVAVIRALKTAIDELEAQIDTALAAHPWAALIKDLPRVGTVNLAQLIGEIGPLLEHTASADQLAAAAGVVPATPAPGKPRAGLFRYATNRRARQALVRWADNSRHASPWARNIYDTAREQGKRHPHAVRILARSWLRIIYACWRDGTCYDPAAHERRRTEKTDHITALAA

SEQ ID NO: 470737 - protein, 406 aa, unidentified
MAVMIGIDPHKGSHTAVAVTATEEPLGKVRVRACPAQAEQLVAWAAAWPERTWAVEGAPGLGRLLAQQLVAAGERVLDVQPKLAARVRLLQTENTGKSDPNDALSVAVAALRSKGQRPVLADDHATVLKVWAKRHRDLSRAHNQVACRRHAVLCDLVPGGVADEITAGHAAKILGQITPADPAAEARKELAAELLADIRHLDAQRREIKKKLATAVKASGTSTTQIFGVGPVIAATVIGDVVTVARFPRRDHFAAYNGTAPVEVFSGEKKIYRLSLRGNRRLNHAIHMAAITQIRYKHSDGRGYYERKIAEGKTHKEALRCLKRRISDALYARLRADARNAAAASTRDPGGQPGNDSVSSAAGSHPEHRLFGSATPGPAPSLRSATALPQAMRPSEPSAKKTRRDP

SEQ ID NO: 470738 - protein, 313 aa, unidentified
MTTSGAWIGVDICKKHLDVAAMTGTPVRVINDADGRTALARRLKAENVKGVIVEATGGLERVLIQAFDAEGVPASIVNPARVRKFAEGTGQLAKTDKIDAPVLARFGDYMQPARTVLADEHRQKMRDLIAYRSQITQEITARSAQVKQYASSSIVERAMTAIEALRTERKAIEREIEATIKSKDDTQRLYKRLLTVPGVGLIVAAILIAELPELGRLNRRQIAALVGVAPFANESGDRKGYRSIRGGRDDVRQALFNCARVAIVHNPVAKPFYERLRARGKPHKVAIVATMRKMLTILNAMLKTNKDWTCNEQ

SEQ ID NO: 470739 - protein, 272 aa, unidentified
MSVYVGIDVHRKRSQVAVVTEDGQVQLNKNVVNGSEPFLRLIGNLPSGTPVASGAAYGWSWLAELLEDYGFDAHMVHPLRCKAIASARLKNDKGDAAILAQLLRAGLLPEAWIAPAKVRQLRALLRHRISLVRLGTQLRNRIHAVAADHGYDRPASYWTGPGRGWLAELDLPAASREIITGCLTVIDALALLTGRLDGELHQRAKAGPPRVKVLTTLPGAGEFTALVMLAEIGGISRFGSARKLASWAGLTPTVRGSDLHVRHGHISKQGSA

SEQ ID NO: 470740 - protein, 346 aa, unidentified
MLADELDYVIGVDPHRDSHALAVVDVRSGGVVFEATALADGEGYASVLRLADQHAPGRRAFAVEGTGSFGAGLTRFLVSQEERVLEVGRLRRERRSGKSDALDAIRAARSVLGQTRPARPRAGGEREALRALSAAREGAVTARRAGLCQLRGLLVSAPEPLRAELRSLTRAQLLRRLAAVRPEGRQDPELRGTLLALRALARRVKALTVEERELAREIETLTRKLAPQLLAQPGVGPLAAAQVLISWSHRGRITSEAAFARLAGCAPIPASSGQTVRYRLDRGGDRRLNRALHMILVTRRRAHAPTIAYIERRIQEGKSRREATRCLKRYLARNLYRLLENPPMST

SEQ ID NO: 470741 - protein, 353 aa, unidentified
MDGKKYIGMDVHKESISIAVRNAAGKLMMESVIETKASTILEFIQGLRGELQVTFEEGTWATWLYDLLKPHVTKLVACDARKNSRQGNKNDRIDARELADRLYMNKLSSVYHGEAGVRTIKELARSYLTISKDLARVMTRVKAIYRSWGIPCAGKQVYAPRHRAEWLAKISELGVHRRAEFYYQQLDALRSLRQEVRRDLLAESKKHNATKLLCQIPSIGPIRAALLIALIQTPHRFRTKRPLWKYSGLAIETHSSADYRSVEGQLQRTKKQVSVRGLNRDCNHDLKNLFKSAATIASVKPGPFQEFYAAMVAKGMRPEMARLTLARKIAAIVLIVWKKGVCFDAKYLKPQTA

SEQ ID NO: 470742 - protein, 405 aa, unidentified
MPYILALDVSMGHSYSVLYKDDTCLFEDEIEHTQRGFHALLEEIQHLPERPLIVFEATGIYSRPVEKFFQDHHFSYCLLNPLEAKKQMEESTLRSWKTDKSDAHRLAQTHLRNQRQPKEVQSNFYLEMRDLARFYQEIEKKITRLRMDLHNCLQLTFPELEQFFSNRLTPYALTLIRLFPHPDFVLASTRTKIKNKLINETRKKISANRAEQKADQIIHYAQCAYPAVEKDSIHCQKTIYYAELLQDLLEQKEALATQMIKKAEGSPCFLLYQTFLGIGALTAALLLGELGDITRFKTHKQLNAFVGIDIRRYQSGKYTGQDRINKRGNPKARKIIFFTIRNLIRQQRAAPNHIVDYYYKLKKQPIPKKDKVATVACMNKLLKCMHAMVRAHTEYDYAYAVSVDH

SEQ ID NO: 470743 - protein, 336 aa, unidentified
MGSYVGIDLHRRRSVIVVLNDDGDRVSWSRIDNTPVSLAAEVHAAGPDAEVAMEACWGWYWAADVIAECGARLHLAHPLGIAGYANRRVKNDLADATLLADLLRLGRLPEAWVAPPEVRELREVVRYRAKLGRLRTGLKAQVHQTLGKEGVIPELDSIWGQAGGRWLDELQLADAYVERIESLRDLLELHEREIRNCDAWTHRRLRGHPGYEAIQALRGVGPVLGAVFVAEIGDVSRFDNPRRLCSWAGLTPRLRESDAHTQRGHITKQGSRLLRWAAVEAVSGAVRDPQVASVKARVGARRGANIGRVAAARHLLTLVYYGLRDGEIRCLATDAA

SEQ ID NO: 470744 - protein, 343 aa, unidentified
MFDIALDLHKENTYGVVLDDKSGQLVWEGSFASNIKAAKEVLEPYFVHGTKIAIEATSCFYPMHDGLKAIESLSVFVVNTARLEKPAIKTDRKDALRIAHLLRRDELPIAFIPNKESRLQKELCALRMRYVHSCTQCKNRISSILHKEGKRVVGVKDVFSQKGLAQLECMNISRKDELEEELDLLKIFKIKTERVESQIKQAIEKDSKLNKTVELIDSIPGFATTLSFVCATELMPVGRFNNAESVAAYAGLYPCIDSSGGRTKHGGIRRVGRKLLRWALIEGAHCAGRTKSPIGDYYRKKVKQKKSNHAAAIATANKLAKLIYEILSTKKPYNPVKGQQCSP

SEQ ID NO: 470745 - protein, 347 aa, unidentified
MRILALDLGKFKSVSCLFDTVLQTTEYWTLSTDRPYLTTVLQKHQPELVVIEACSIAAWVHDLCGELSFRILVCNPNQEAWRWKNVKRKTDRDDALKLAKLAALGQLTPVHIPARATREHRWLVKYRKTIVGRMNRVQNILRALFQQHGLALPVGARCWTHASLEAIAAQSKPLADCGPEELWRGQLAQELAAYHQLRSELAELEKKLTALAEQDERIGLLETIPGVGRVTAEIIATHLDRPERFTNPRQVSSYAGLVPRQYQSGLMDRQGGITRRGSRLLRSALVECAWAMLRYNAWAREHYLRLVRGQKNRKKKAIVAVARKLLVRCWAMLRDRQPWTAPSPAVA

SEQ ID NO: 470746 - protein, 392 aa, unidentified
MYIVGIDIGKNHHEASIVSPEGKQIGRSLRFATTHKGADSLMSFIFKNIGNSPCVFGMEATGHYWYPIYSFLKAKGYTICVINPIQSDSLRKMYIRQTKNDSIDSFLIAEVIRFGQFGTTSMADENILAMRQLCRYRDSVISSRTEIKLRIGTIMEQIFPEYEKQFSSLWVSTSMGILEKYLTPENIENAPIDELFEIIKDKSHNRLTKAKAISIKDAAADTFGIKIAQDAFSFQLKQLIDRMNFLDKQIEALDIEIMKYYEQFDCYLHTIPGIGMIATATILAEIGDIHRFKSSSALVAFAGIDPTVRQSGEFNSTHNHMSKRGSPYLRHAIFLAATTCSFHNSPLNAYYKKKRDQGKHHLTATGAVARKLTTVIYAVLRDSKPYEPKKFC

SEQ ID NO: 470747 - protein, 350 aa, unidentified
MLIIGCDFHTRYQQIAMMDTLTGELTERRLEHESGEAHAFYRGLQGPVRVGIEATGPIHWFERLLAELGHELWIGDSARIRASEVRKQKTDERDAALILDLLLSNRFPRIWVPTPAERDLRQLLWHRHKLVRMRTMLGNQLQFLAMSQGLCRKKKLFNKKGRSELLQLRLEPWASQRREELLKLLDGLAPAIAELDLAVLQEAKRREDAVLLMTHPGIGPNTALAFVLAVGPVSRFSCSKKIASYFGLNPSEESSGGRRRLGAISKQGNTMVRWLLIETVHHAVRQDLELRQDYQRLKFRRGHAVAKVAIARKLAVRMYWMLRSGAAYAQLVRRQGSPGATLVEATPSLG

SEQ ID NO: 470748 - protein, 375 aa, unidentified
MNDHSEAFVGFDTSKLRNAVAIADGVRGGEVRFLGEFENSAAATAKLVKKLAAKYQRLTFCYEAGPTGYGLYRQIKNLGHECIVVAPSLIPKKPGDRVKTNRRDALNLAKLLRAGELTAVWVPDRGHEAMRDLTRARETAMMDLRSKRQQVSAFLLRQGLHYSERKKTWTKTHMNWLASQKLEYAEQRLVFEEMMLAVRQAQERLERLEQAIRVAVPDWSLAEVVTALMAMRGIDLISAATFLAEIGDLSRFQHPSELMGYLGLVPSEHSTGDKINRGPITKAGNRRARRMLVECAWSYQHPPRVGQEKQEKVAAAPRAVREIAWKAQCRLHGRYRALVRRGKLKTVAVTAVARELAGFIWAVNRAITAARAVAK

SEQ ID NO: 470749 - protein, 353 aa, unidentified
MERYIGIDVHAHSCTVSVKGPSGRLLRTEVVETRGEALVESVRKVIGRKYLCIEEGTQSQWLHELLSPHVEDVAVIVPPQTKGNKSDRIDAEGLAEVARVGKAETRVYKAPGAFAGLRDAARSYQMLSKDVARTRNRLKAVFRSRGLTEAGNDVYSQDSRKPWLQKLPASSRRLAELLGSELECLLPLKKQAEQWLNEEAQRHTEVARLKGIPGLGAIRAAQIVAVVVTPHRFRSSRQFWSYSGLAVVTRSSSDWELRQRKWIRAAVTKTRGLNRNRQPLLKAIFKSAATTVIARMTKHPLHQSYQRLLTAGTKPNLAKLTIARRIAAICLAVWKTEEDYDPAKHESRSTDHA

SEQ ID NO: 470750 - protein, 324 aa, unidentified
MKMYVGIDVAKDTLVVALPQTATSWKVRSIRNAPDAIRKLLNELPDQAHVVLEATGSYSVLLTYLLCQAQVTVSVINPKQSHHFAQLQLAVTKTDESDAVLLARYGQLVQPPRYTMESDVLLRLKQKRTLLRHYKKQQRSLANLQHAFSPLPVQDERVAHSLQQVLHHLQTAIAEVTTEIEHVTTQHFPDQVRRLTSIQGISTTIATALIEVTNGFAQFHSAKALAKYVGVVPVIYQSGKAQITKGICKTGDPHLRSLLYMASWSAIRYNKPCQELYQRLKAAGKAPKVALIAVVNKLLRQAFAVVKFNQDFDPEYQPVLRTLT

SEQ ID NO: 470751 - protein, 343 aa, unidentified
MQRITTIGFDIAKSVFQVHGVDATGEVVIRRQLKRRQVVGFFQKLPACLVGIEACASSHHWSRELQALGHTVRLMPPAYVKPYVKRQKNDATDAEAICEAVTRANMRFVPTKTPEQQSGLVLHRTRHLFIRQQTSVINAIRAHLAEFGIVAPVGRHGVEELLNVVADPNDKRVPEIARACLSAFGAQLRMIKEQVLEFDRLIRAWHRSNEMSMRLDEAPGVGPVLATALVAAVAVPKSFRSGRNFSAWIGIVPKQHSSGGKNRLGNISKQGDRYLRGLFVAGALAVIRYAKIHGTKHRPWLTALLARRPTKVAAIALANKIARMVWAMMAKGERYKEPVALAR

SEQ ID NO: 470752 - protein, 415 aa, unidentified
MSPLPEHSFTAYVGIDWADTKHDICLQAAGDTRREFCCIRHQVAAIDEWANMLYRRFGGPVAVALELLKGPIVAALQKYEFLVLFPINPTTLAKYREAFQPSGAKNDPKDAELALDLLLHHPERFGPLRPQSAAMRTLVSLVERRRQLVGDQTQLTNRLCDTLKQYYPQALEWFYDRGTVLFCDFLDRWPTLRSVKQARTATLEAFFYAHHCRSARRISARIGSIRGAAALTEDPAIIGPCRLHVLALVAQLRAVLAAIVQFEHEIAAVAPTLPDYTLFKTLPGAGAQLAPRLLAAFGEQRERFRSADELQKYVGIAPVTERSGKKSWVHWRLQCPKFLRQTFVEWAAQTIPRSFWAGAYYRQQRAKGSSHHIAVRALAFKWIRVLYRCWQTRTPYNETVYLNVLRKRGSLLLGK

SEQ ID NO: 470753 - protein, 340 aa, unidentified
MFVKLNLKSMNFNLFIGIDVSKSTIDVHLKPIGCYKAFSNDPHGFIAMVEWIMDQAGKFCHKELVFGLEHTGLYSENLILFLDQHDFAFTVIPGLELKRSLGIRRGKSDKADAQNIAEYIYEKREKIKLYKLPSQTLDRLKKLASLRERMVKERAAYQVRMEEYLEQFPDSTFETYLQTQQEIIHCFNSQIERVEKDIERLIKEDSSLSDQYKLINSIKGVGPQTAIMMIILTNGFSSFDNWRKFASYAGIAPFPNQSGTFNGRTKTNKLANKRIKSLLTMCASTAIQFNPEMRKYYENRVQMGKNKMSTLNIIRNKLLARIFAVITRNTPYVEIHKYAA

SEQ ID NO: 470754 - protein, 512 aa, unidentified
MTPAIKNEGEAMGVTVEVEAINMPACGLDVHKDTIEAAVITEDGKMHQKTFGTMRNALYALRDWILSLKCFHVLMESTSVFWVPIYEILEDVIGMDVGVGNARDMRNSPGRPKTDKVDARWNARLSMLGIIRKSFVVGRKFRELREYTRYHKKLVQDRTRQSNRIEKLLQLNGFKLSSVLSDIFGVSGRGLLDKLANKGYVTLDEVKATRDPRCKKPAEEIESAINGKMKLTSRILLKKMLERLDACDMEIAEIYGMMVEAAAPYASQIRILDSIPGLAELSAIYIIAEISTDMSSFANSNRIAAWAGLAPKDNKSAGKLKSSKTKKANIYIKSILTECAWAAVKTRNTRVSNWYHRNSKKIGEKKAIIAVARKLLVYIYSMLKSGEMYDVSLDVADTQKRRAYKLESARKILDNVSSASNAEQQAENANPVSETRKIQRDTQKTQQRERASKPDEAEENKNADATPKKRGRPRKAPDDGKSSGDALTPPKKRGRPRKKAVSDDISTGDTSI

SEQ ID NO: 470755 - protein, 358 aa, unidentified
MNDHRIQNFVVKRKEIFVGLEDSKTTWKIAVRCEKMLIHQVSMEAKYPLLRGYLLNKFPECTIHLLYEAGFKGFNLYDRLMEDHVDCVIIPPHTVTQEKVNKVKTDKRDAKRLALILENHDFRDGCYVPDKERREDRQISRTFIAIQKDIVRTRNRIRKFLHFHGIETPFADKDIWGRKEYRALAQLPLSVPLRISLDVLLAQLEQLWTHHRNLRASLRQLSRKERYRKTFEIAKSVPGIGWFTAIRLVLELGEDLTRFASAKKIAGFVGLTPGEYSTGESTRKGKITGMGSGFIRAALVENSWVAIRKDPVLLNKFRRIWRGTGSKKKAIVAVARMLIVRLRACIISGTPYAIGVVR

SEQ ID NO: 470756 - protein, 398 aa, unidentified
MIAVGIDVSKFKSTVAVIDSDGQILLKPRDYNHTVSDMLNLITLINSYPQDVKVAMEATGHYHYPILKVLLEENIYVSLINPYLMKKYGDNSIRKGKTDKKDAMRIAFYVIEKSYLLKPYTVTDQKYSDLKFLSRQYQQSITLKTKARIQLNNLLDEIMPGIQKLFSSNNAVSPTQNLFLDFLEKYESFDKIRNMGEKRFISSFSKFAVKRRTRNTQYKALAIYELASNSITTRDSDTSTLIALNQCISVLRQCTESTNNLLAQMHSIAFTMTEYSTIRAMNGVGNKLAPQLIAEIGDVRRFTSAKALNAYAGNDAPAYQSGNFEGTNRHISKRGSAPLRKACYEVMQALKLHKCEEDPIYQFMLKKEAEGKPKNVAKMAGVNKFLHIYYARVMELYK

SEQ ID NO: 470757 - protein, 338 aa, unidentified
MNSLTIGLDTAKSVFHAVEKNSRGRVLSKAKLTRAKLFTYFANKPPCTVALEACGASHYWCRVISAYGHKAVMIAPQYVASHRKGNKNDFNDGNAIADVAQRDDIRTVPYKSIEQQDIQLLHRVRERLVRQRTALGNQTRGLLSEYGIVLRQGVAHLRKELPFILEESNNELTELACRQFFLLHEELLVLDEKVKQADNEIQRVALSHPISQRLMTMSGVGPIISTILLVALGKGEHFRNGRHFSAWCGLVPKQHSTGDKARLLGISKRGNTYIRTQLINGARSALRNASNKNDQVSRWAASLAERIGFNKACVALANKMARFAWAMVHNGQDYQLKP

SEQ ID NO: 470758 - protein, 411 aa, unidentified
MHNRQNYLYVGVDLHKEHHTAVIINCWQEKLGEIQFENKPSAFSKFLLEVETYVSDGLSVVFGLEDVGGYGRALAKYLVDHERVVKEVNPALSFLERKSEVMIKKNDSWDAECVARILVSKFNQLPDAKPHDLFWSIQQLVSRRNALVKAQAALKNQLHIQLNHHYPSYKKFFSEIDGKTALAFWQQYPSPSCLEGTNIKRLTAFLLDVSNNTCSVKKASDILKLVKEDGQTMKEYQETRDFLVRSIVRDIVLKKQEMKYIERELKQLMNVLDYQLDTMPGIELVTASALIAEIGDVRRFPNANKLARFAGIAPVYFGSGGKGKAHKSKQGNRALHALFYNLAVQQVQVAKGSKMPRNPVFHAYYQKKLKEGKTKGQALVCIMRRLVNIVYGMMKHKTAYELPVVQEKEVV

SEQ ID NO: 470759 - protein, 342 aa, unidentified
MNTVYVGLDLGSSAFQQVVIRDDGSIRVNRDFNTSEANLIKAFSDQRGEIQVHLEAGELAPWAAAVIAPLVTRVVCSHPQSNAWIAKDADKCDRIDAYKLAELLRLNRFKEVHYPPQQSRREFKTLVQHYDELTQQQARLKTKIKARLRMPGVIVRGEQLFSARGRKAVLAAVKSVAVRTAISQLYAVLDQSLESQTEARLLMRRAAQAFPEIRIFETAPGVGPIGACRFSAYIHTPQRFSSTRKLWKYCRLSVSHRSSNGKPLRRARLDRNGCGRLKDVTRKAFEAALRTHQDNGFKRAYRQALETTHDKTHARLTVQRKIVSTLRAMWINQTPYDDQLMR

SEQ ID NO: 470760 - protein, 385 aa, unidentified
MKPVDDLSRSLVAFDQESAVVAVIELSNASWLVAGTLPGVARRPLKKLDPDPSALEQLLTRWRMEAETAGRPISRIIVAYEAGRDGFWLARWLRARGFETHVIHPTSVAVSREHRRSKTDRLDSAMLMRVFFGWLRGERGHCSMVAIPSLEEEDAKRPSRERESLVGERTRIINSVKSGLLRLGVRGFNPALRRAPKQLETLVTPEGAALPPNTLDEIRRDLTRLAVVREQIEAIERDRLARLEQAPHSRSNAMVVLLARVVGVGLETADMLVQEILSRPLRDRRAVARYAGLTGSPDESGARRREKGLAKSGNARVRRGLIQLAWRFLMFQKGSGLAAWYRFRTEAAPTRRKTLIVALARKLLIAFWRLVTTGAVPDGLILRAA

SEQ ID NO: 470761 - protein, 311 aa, unidentified
MPAKPPPTYVGLDISKDQLDYCLSETAEGRCAYDPAGRAELIKKVRSVPRARVVCEASGGYEKLIVAELLQAGIEVCVVQPGRVRAFAHAEGLLVKTDRIDARLLRRFGEKIDPRLAAPTDPAAATLRELLEHRRQLTTQLSEVEGRLSLAGPTLGPLLTTQRTFLMEQIAHVEKLIDQHIDQDPNLKRKSERLQQVKGIGPVLAATVLAYVPELGQIDSAQLSALIGVAPFADESGHTCSPRHVRGGRATVRHVLYMAAVSASHSNPILTAFYQRLRANGKPAKVCLVAVMRKMACLMNRMLQEPDFVLA

SEQ ID NO: 470762 - protein, 415 aa, unidentified
MEPVLESCAGMDVHEKKVDVCIAHGSLDKSPKFEIRTFSTMTSDLEELTIWLKKYNVKTVGMESTGVYWKPIFNVMEGEFTIVLANAQRLKAIPRKKTDIMDCKRIAKLLRYGLLPNSFIPPREIRELRDLNRTRRKLVGMMTSEKNRLTKVLESANIKLSSVVSKISGVSSMAMIRSLLEKDRLSKEEISQLAKGSLKKKVALLEKALNGKVTDHHRFLLKMHLENLDHLARQIEKIDEEIERKMIPFQKETKLIQTIPGISKVSASAILAEIGTDMSQFPDEAHLSSWAGVCPGNNESAGKKKSGKTQKGNSFLKGTLAEAAWAASKTKGSSYSAFYHNIVRRRGKKRALVALAHRMLIDIYHVLKTGEPYQDTSAEAANERATKRREQSMIRSLEKAGYSVVKTSVAEIAVA

SEQ ID NO: 470763 - protein, 323 aa, unidentified
MQQFVGIDVSKMTFDVYFEQEGKGSHVNLQQNEEGYQVLLHLIGRDRICVMEATGNYHLNLAHYLYQAGIQVVVENPLKIKRFSQMRLQRTKTDKADARLIYDYGKVVLAASEAHLWQPDQTDIGHLKQYDTVRHQLIKQRTALSNTEGALSELTGLNKEVTEVLREMVQAVEKAIKQLDKGMLKLVKEHHTETFDLVTSVPGVGPKTATMIICLTNGFQKFSYDQVKQFISYIGMSPRTFESGTSVKGRAHISKVGNSRLRSMLYLCSWTAKTKNQQCTVLYERLLEKGKPEKVIKVAIAHKLIRQIFGVIKSGTPFSNEYA

SEQ ID NO: 470764 - protein, 346 aa, unidentified
MPIVEAPRPVTGGIDTHLDAHVAAVVDVNGGVLAVESFPTTTAGFAELHDWLVGFGEMERVGVEGTGAYGAGLARHLRGCGLEVIEVDRPNRQARRRAGKSDPADAIEAARAVLAGRATGIAKAGDGPIEAMRSLLIAKRSGREARITCLNQLRHLGFCGPDDLREAFRRVPRTALATRAAGLRPRAGSHDVTYATKLAMRTLGRRVLAIEADNTELDTLLADLVETTAAGLLAVPGVGVDTAAILLVAAGDNPERIRSEAAWAHLCGVAPLPASSGKLTRHRLNRGGNRQANHALWRIVFTRLASDPRTRVYVERRLNEGRSKPEIMRILKRYVAREVYRHLPRA

SEQ ID NO: 470765 - protein, 392 aa, unidentified
MLFVGIDVASRKHDAVITSSHGDILTKPFTILNDLEGFKKLRDEIFSHTEHLDDVRIGIEETGIYSKNIAEFLALCGFTVHMINPVLTSNSRKSQSVRLTKTDKIDALAICRYVEFNYKRLNSYTPTLYIYDEIKSLSRARLDIQTRLIKAKTEWTRLLDISFPEFRSKYNQHSKWVYNLFLSYPTADKIAKMHVNTLIQIIGIQGDRHEAANYIKSIAKSTIGTFSATTRLLLKNTLSDITHYESQMDEFAQEIENLIKDHFSNLLTIPGVGPIVAGLIVGEIGDVTRFHSPEALVAFAGIDPTVFESGLFKAKKVRISKRGSKYLRTALYTATKVAIINPKIKNNKFREKYAKKTAEGKHHNSAIFSAAKNMSNTIFALLQTGQNFDYAL

SEQ ID NO: 470766 - protein, 336 aa, unidentified
MQNTKNEIYKHYIALDWAKENFALASIQANSIKYKVEEYPSTIKKLKECLSKFSGKKILTIEETTTAHWLYVELFEHVDKVLICEPYYNSLLKSGPKNDKSDAIKLCTLLRNGSLKEVFHTTDELYRLRKLVSAYDDFVKASVRLKNQRSAMFLSEGKDHKKEKILSGNGINMFVTQKQNLIIEEIESVRNEFVKVFKKLKRENPTVSQLIQVPGIAEILAVTILAVVIDANRFADKYKYYAYSGLVKYKKVSGGRNYGKKNVRYSRPLKSSYKIAANAAIGGNNDIREYYEYLIQNNTGTEDARNEIARYISKVSYAIMKYKTDYRPYQWRENMK

SEQ ID NO: 470767 - protein, 355 aa, unidentified
MMQSPIIASPKLFIGMDIHKKSWSVHLRTDLFDHKGFTMPPQPQTLVDYVSTHFDGHEVSLTYEAGCCGFSAARHFLSMGWQVKVVNPSDVPRSDKQQYQKTDKLDCRNLCKQLQQDQLHGIYVPTEPEEQLRSLLRQRNQVVKQLRTIKSHIKGLLLFHGIHLPEQFDNPNWSKDFIAWLRDIPWSQSTGAASMQSKLRILELLNKEYLQTSNELRAWCRKNQGKDYYLLKSIPGIGGLVAAAILAEMGNIRRFNNEREFSNCIGLVPAIHQSSETDIKKGITPRCKALLRSYLIESAWVAIRTDPEIQAYYRKHVGKNPKNVIVKVAHKMCRRILSVIKNERPYQISYSKTVK

SEQ ID NO: 470768 - protein, 332 aa, unidentified
MNLKQIYVGLDTHRETIHGTALDENGGIIKCNAFPNTREALQDFVKDFPTWNTTIAIEACNFWRGCHKILKEKGYNVKLANPVICHKIAHEKKTDKVDSKILADLSRVNYLPEIYIPSDEINALRDLTRHKMHFTRFKVRTQNKIKSCLSRGGISYEVDLWNKEGLQWLKEMKNYEIDSFLSLYQLISKEEDIIKKKIDKVAKSKKETTLLETIPGIGYFGASLIYAEIGDIKRFPTVKYLHAYAGVAPGIYQSGTKTRMPSRKSVNYWLKWIVMQCAGRVALKNIKPNKLRNYYLKIKDKKGWKTARKATARKMLTIVWYILNKNIPYQES

SEQ ID NO: 470769 - protein, 358 aa, unidentified
MKRKIPAITIGLDLGDKKHAICVLNHAGEIVEERSITNNRETLKRLSRKYPKSRIAMEVGQHSPWISRLFAELGHEVLVANARKLSAIYTSTRKSDQSDAYMIARLARVDPTLLHPIQHSTEQAQRDLLQVKLRDNLVRQRVDIISSIRFTLKSMGVMVASPNTNCFAKRCRTTLHAQDTALLAMCEPSLRVVDELTRNIRELDRRIEELCVENYPETEYLLQIAGVGPLTALTFILTIGDPQRFESMRDVAPYLGLVPKRDQSGETDKQLGISKAGDAYLRRLLVSAAHYILGPFGPDCDLKRHGLHLAARGGRGAKKKAVVAVARKLAVLMLTLWYNEDIYEPLRNDSLGKRIFFR

SEQ ID NO: 470770 - protein, 381 aa, unidentified
MSDVPAVSYAAFVGVDLHKCTVSLCAVDASGQPIAALTCDTKCVDRIERWLAALPRPSRLAVEAVGFVEWFIDRFRSCVDHIDIADATELANRRGKRRKTDRKDASDVAKRLARGECPLGWIADEPVMQLRKLGRHWRNLSRTLARAKHCMKSMLLAANLRGPRFDGAGAQKWFLAHGHLLKEVQREAFGHFLDIVCLIERQRESLRRRIIFANRERRFAALITILKSVPGIDEIWACVIAAEVGDFSRFPNADALEFWSGMTADLKESAGRTQSGHITKAGSATLRWAICKAAVTLCRSDARQEAVRQRLIRRIGKPKANVAMGRRLLRILFAMARDGALYQGQVKTGHERAANRARLNQQERLKPKRVRERKELERVPA

SEQ ID NO: 470771 - protein, 413 aa, unidentified
MEVMYPRCAGLDVHKETVVACVRLAAGSDTSHVVRTFATTTADLIVLSEWLEENGCTHVAMEATGVYWKPVWQVLVDSSCFELILANAAQVKNVPGRKTDVNDATWLAELLAHGLVRASFVPEPAIQELRGLLRTRKQLVREKASHVQRVQKTLEEANIKLESVLSDVMGRSGRAIIQALIDGETDPAKLAALAHWKVRASTETLSEALRGRIKRNHRFLLRLHLQQIQALDAGIAEIDREVDDGLACFRDAVDRLSTIPGISQLSAQVIVAEIGTDMSRFATDAHLRSWAGLCPRNDESAGKRRSTRLRKGAPWLKSMLVQCAWAAIRSKGTYLHAQYVRLRGRRGPKKAICAVAASILTAAYHMLKDGTFYNDLGPTHFDRRRPETQARRLIKRLAELGFSVELKSMATAS

SEQ ID NO: 470772 - protein, 324 aa, unidentified
MSDAIVGIDVSKKTLDAYCAKGQMQQGRTFANSPDGWKLVRTWLKVMGSKQAHVCMEATGRHSLGVALALHEAGHVVSVVNPAQIRDFARTKLGRNKTDKVDAALIREYAELFKPEPWTPPSPAMRRLCELQTMRAGIIRSRAEWKNRMGSGLGDSIAIELAAATIDHFTTQLEAIDRAISETIDQDAELHDRRDLLISVIGVGDTLAALLMAKMPEPGVLRRSGEIVAYAGLNPSHHRSGTSIDRPTRISKIGNAELRSALYMPALSAMRFNPAVAALVARLKSAGRLKPKQIVVAAMRKLLVLCFGVLKTGKRFDPAIAMSA

SEQ ID NO: 470773 - protein, 349 aa, unidentified
MDHIGIDLHKRDSQIYILAEGGEVVEQRIRTEPERFAAVLGARPRARILIEASTDSEWVARCLEALGHEVIVADPNFAPMYATRSRKVKTDRRDARALAEACLLGAYRPAHRLSDPQRHVRDRLGVRDALVHTRTRDISVIRALLRQQGYRVPSGSADRFIDRVQGLPLPGRLRSVVAPLLAVLCHLNQQLAYSDAMIEHLAVQDPRVPRLRSVPSIGPVTAAACLAAIDDVGRFHHAHQLDAYLGLVPREYSSGETQRRGPITKAGHSHTRWLLIQAAVSILRRHPPQTEALHTWALRIAARRGTQVAVVALARRLAGLLYAVLRDGSVFEPQRGRPPRPTAAALVHV

SEQ ID NO: 470774 - protein, 407 aa, unidentified
MARYYLGVDWGEKHHGVCVREETGTIVWEKMVAHTASGLSDWGRQLDTWRAVGIELWAAIEKPDGRVVDCLLDHGVVVYPVNPKAVDRARDRFRMSASKSDTFDGRVLAEFLRTDHAHFSPLRPSSVAAQEVKLLTRDHTRIVRQQTRTLNQLTSTLKEYYPRVLDLFGDLTTQLALDFLQTYPTPATLTKLRLSSWQRFARQHRLGPARTVALWAQLKAPQVPVPEHVVRAKARLVAVLIAQVLVTHRAVTEYQAEIERFFGSLPAAEWMQTLPGGRSGTMIPRLWAELGDAPGRWASWSHLQAQAGTVPLTRQSGKSCVVRFRVACNKHLRQAIWQLAFQSLRHSEWSKSYYQQCRVRGHRHNQALRALGAKWLKIIFRMWQHQVPYDESYHLANMTRQYLRATA

SEQ ID NO: 470775 - protein, 338 aa, unidentified
MYYTGIDLHKFSSYLTTIDSDGRIVKQANIKNVDYNFLQYFSDIGTEHQTTVESTCTWYWLNDLLTSLNIPLTLAHAKYVKAIAYAKVKTDKVDSHILAQLLRLNFIPQAHKISNENRTLRDALRARLKIVQRCTSVTNSIALVLAKYNLTQPEGLQDIPKLQYEQLSVHASLLKEQMLTLEKSLYPYLIPNDDIQRLLWIPGIGKMNAFTIALETDDINRFADVKNFFSYCRLVPSARNSAGKSKQRSSKDGNRYLKIVFTDAAIHAVQYYPVIRKYHNSLLRKKNKQIAKTIIAKEIAEIVFYILKNKTNFNNKFKGVELQHKKSLQWPRVVSPYA

SEQ ID NO: 470776 - protein, 416 aa, unidentified
MKKRSYRAQKVNEVRWEEMAERVKDKVVVWAIDVAKVEQYGVLMDSERQVVVTLRWAHPAETPALVERLRGLACGSLTAVMESTGVYGDTLRRQLREAGIEVHLMSAKRVHDACEVYDGVPSMHDAKAAQVIGRLYFEGASRVWVEASEQQRSHDAIGRLYRLYQKQHQQQQNRLEAALQRHWPELTEYLELDSVTLEDLLLSFGCPAELSVRAEEGRERMRRISRGRLAAEKIEAVLESARRSIGVPCVAAEREYLMALGAELRHSREQKDRVGLRLSALTQADPELHALGITLGRVTTGLLIAEGLDPREYANSASYCKALGLNLKEKSSGQHKGQIKITKRGSGLARRDLYLATLRLINHNGIVNRWYEKKVQAQDGRDKLKIVVALMRKLSRALWYVARGQAFDARRLCAVG

SEQ ID NO: 470777 - protein, 338 aa, unidentified
MKLYGAIDLHSTNNVTVVIDEQDRVVHQKRLPNDLALILNELSVYQSEIEGIVVESTYNWYWLVDGLMEQGYKLHLANTAAIVQYSGLKYSDDDSDAVWLAKLLRLGLLPEGYIYPKEQRAVRDLLRRRSRLVQQHTANVLAVQNLFSRNRGHSLSANKIRQLTPDTVQELLPDANLALAVQSTLLAMRGQEAAIDLLERQACAQMKGTLAYRHLVSTSGIGKVLGLTIVLETGPVERFARVGNYVSYSRLVGSERLSNAKRKGRGNTKSGNKYLAWAYLEAANFAVRYNPTIKRYCQRKRAKTNAIVAIKTVAHKLARACYFMLREGSDFDVARAFA

SEQ ID NO: 470778 - protein, 315 aa, unidentified
MTNSTRLFVGIDVSKRKLDIAFENSIKTIPYTAAELGKLMDSLRQSAPTLVCLEATGGLERQLVAELHKARIPVAVVNPRQIRDFARATNQLAKTDAIDARIIARFAQLMTPRTTPELTDSQQEIKDLTSRKRQVTQLIVQEKNRLGSTADKSIQKMIRQTIRLFEKQLETLRTRLQNIIDADEETQVKARIIESVPGLGPATVSTLIAELPELGQLNRQQIARLVGVAPTNRDSGTLRGRRTTGGGRAQIRTALYLPIVVAKRCNPKIKEFYDHLVANGKPKMVALIAAMRKLLTILNVMIREGKTWNQNIEFT

SEQ ID NO: 470779 - protein, 408 aa, unidentified
MNTLYVGIDVSSKSNVVYLMLPNGDKHSNFSVTNSHEGSTQLVKRILSALTSHSLDTVLISLEATSVYGDNLVYFLREDATLAPFNRKIHVLNPKQVKKFHDAYNDLPKNDYVDSFVIADCLRFGRINKEVYMGDYRYKALQNLTRARFFAVQNLVKEKQRFMNVLFKKYSMMTQEKVFSDTFSTTALAVYDEFESAEALANMDLHELTDFIIEKGKNRFPDPDAVAKAIQKAARSSYRLPKTVNDSVNQVLSISITSMKALESQIKEFDKAIKAQMELLPNVLISIPGIGPVYSAGIMAEIGDINRFNSQAALAKYAGLAWKQHQSGGFESEVTRLIPSGNRFLKYYLCEAAFSLVRCDKEYSDFYHLKYKEVNRYQHKRALALTARKFVRLVFRLLKDNRLYCPAK

SEQ ID NO: 470780 - protein, 330 aa, unidentified
MTNVSELTTEALFVGIDVSKDTLEVALGENAKTQTFGNDQAGVAALLGQLKPVAHRIAVVLLEATGGLEQVAAAALCAHGFAVIVVNPRQAHAFAKALGHLSKTDSIDAKALAQFARTLHNSDKRERLLYKLPTPAQELLLAMVTRRAQLIGMRVAESNRLASAHVSQRKSIERHIKILDKQIGQIDDDAQRHLRSHFQDKLALLKGLKGVGVGTQTMLMAALPELGSLKGREISKLVGVAPLNCDSGKFKGKRITWGGRHHVRAALYMAALTASRHDPVIKAFYERLTLAGKPKKVALVACMHKLLTIMNAVIKSAQPWQASYPQPNSV

SEQ ID NO: 470781 - protein, 344 aa, unidentified
MELYVGMDVSLKETSICVVDGSGEIVCEGTVLSEPAAIAAFIKAKAAGAKRIGLETGPTTTWLWHELRALGLPVICIDARHAKAALSLQINKSDRNDAVGLARIMQCGWYKEVQVKSLPCHAVRAVLNSRSQLVKVKRDLENQIRGLLKNRGLLIGKAGGTLFLRRAEELVGEHRLLQEAVRPLLGVREIVRREVAGLTRSLLALARDNEESRRLMTVPGIGPINALAFCAAIDEPTRFRRSRSVGAYFGLTPRRHASGEIDWTGRISKCGDGMVRSYLFEAAGVLLTRVPHWCALKAWGLRLAKRIGFKKAKVAVARKLAVILHRMWRDGTDFIWSTKKEAAA

SEQ ID NO: 470782 - protein, 354 aa, unidentified
MKCMTKYVGLDVHQATTVASVRGESGRMLARAILPTEKPAIVEFFRGMRGAVHTTFEVGTQSQWLYELVSPLVDGVVVCDPRRVARQGNKGDRVDADRLSELLRLGGLRAVYAQSAHQSDLKELTRTYRTLVDDSTRVMLRIKALFRARGIKTPGAAVYHPTKRMQWLTQLTDRGVRFRAEALYAELDVLRELRPKAKAMMVAEARRDPAWSVLQTIPFFGPVRVALLLATMQTPWRFRTKRNLWAYSGLAVRTSSSADHKFIEGQVVRRRRAPLTRGLNRNHNRVLKDVFKGAATAAASQPGPLQEFYAALVARGTREEMARLTLTRKLAAITLRLWKRGEQYDPEKLTRQVS

SEQ ID NO: 470783 - protein, 319 aa, unidentified
MTLEQTQYVGIDVSLDYLDVGLYPLKKVERFENSASGILELCEFVKAYTVEKVVLEATGGLEYSAALTLKKQGFAVCVVNPARTAAFRAMQGNLTKTDAQDAKLLAEFAKRMEPEEGGVLDENQKHLKELVVRRRQLVGLITQENHRQLLMTSPEMKRSLKTVVTALKQELSYIEVLLLSAIHAVDELRERFNLLKTIPAIGPVVAATLVTEMPELGNLTRKQATSLTGLAPHNNDSGKKQGYARTQGGRRTVRSALYMSAVVAMRRNPVLKSFYERLVLSGKPKKLALVAVMRKLIIIANQILKSQRPWQEDFKVMTS

SEQ ID NO: 470784 - protein, 344 aa, unidentified
MQVTTIGIDLAKNVFQVHGVDANERVVFNKPLRRSQVLPFFAKLAPCLIGMEACASAHYWARELKKLGHNVRLMPAKDVMAYVKRGKNDAIDAAAGCEAVRRPTVRTVPVKTPEQQARLMQHRVRDLLIRQRTQAINALRSHLAELGIVAAQGYEGLKVLLAIVADASDTRLPEDARASLSALVAQIASCQAEIGTIDKRLLAQHRKNVDSKRLETIPGIGFLGASAIVATVPDATIFKKGRHFAAWIGIVSREDSTGGKQRLGPISKQGDRYLRRILVTGAFAVLKQARAHPEKYPWVAQLLARKPAKVVALALANKMARVAWAVLTKKEIYRVRPITTPASV

SEQ ID NO: 470785 - protein, 338 aa, unidentified
MNDSVIGLDSAKNIFHMYSIGVEGEVIKKKLKRRELLTFFANYPESLIGIEACGGSHHWARELIKLGHEVILLNARYVKSFVVGNKNDYNDAAAIFDAVTRPNKRVVSIKTIAQQDIHMAHGVRKERVDFRTALVNQTRGFLSERGIIMAKSVNQVRKLLPDILEDAENGLTPLSRELIAEKYEQLKQLDNEIKAHDRRINQLCKDNDLSRRFLEVPGVGPLTASYAAADIGDGKGYQRSKDYSASLGIVPRQHSSGDRLVYLGISKRGNRHLRTLLIHGARAVLKYCSNKQDRQSLWLQQLIERRGFNKAAVALANKNARILWAMANTGKAYTSLTT

SEQ ID NO: 470786 - protein, 426 aa, unidentified
MNAIGIDVSKGKSMVAILRPFGEVVAKPFNVMHTSAELDELTNLILSLEGESKVVLESTGKYSQPVVKKLCEAGIFVSVVNAKLIHDYAVDTIRRVKTDKVDSLKIAGFCLDRWAILKRHEPVEQIRQTLKTYNRQLHEYNKVKVMLKNNLISLTDQVFPAINTMFTSAARDSDGHEKWVDFLARFWHLECVSKVSLSAFTQSYQKWCKKHGYNFLQAKAAKIYTLAKDNFGILPNDDFTKTLITGAVSQLNSICETIAALKTEMNNIATTLPEYETVLAMHGVGKTLAPQLIAEIGDITRYPKRSSLTRFAGIEPPENQSGAYNQHSRRISKQGSPYLRKALFQVMRCVLQNKNADEATFQFLDRKRAEGKPFKVYMIAGANKFLRIYYARVIDSLKNGNNAITSKQDRAMQECNLSGCAGSQYR

SEQ ID NO: 470787 - protein, 351 aa, unidentified
MSIIGCDLHTRYQVVAWIDEGTGEIQVRRLEHEGEEVRKFYAQFARGTVVGLEATFPALWFERLLAELGHELWVGDAARIRASEVRQQKTDPRDAELLLDLLRTGRFPRIWVPSVEERDLRQLLVHRMKLVRARTAVKNQLHALAISQGVCRKRKLWSAQGRAELEKLALLPWAARRRKELLEQLDYLDGVVRELDRAVEEAGRARPEVTLLRTHPGVGMVVALAFVLTVGPIDRFPHSRKLVSYWGLNPREHSSGGHQRLGAISKQGNPMMRWLLVEAAQTAARLDPQLRRIYQRLKSRRNSGVAKVAIARRLAVRLYWMLRTRNNYAQLVRMSGSPSSAVVPPEAGSNV

SEQ ID NO: 470788 - protein, 370 aa, unidentified
MSQSRTLFIGMDVHKDTIAVAYVAQDHGAEVTYLGTIGPRQCDIDQLIRKMQSKAKHLIFVYEAGPCGYWLYRYLRKKDYDCWGVAPSLIPKKAGDRIKTDRRDALQLARLARSGDRTAVYVPKVEDEAIRDLTRAREETLSDLKDAQFRLKAFLLRHDIRYTGQANWGPAHLRWLSEVVCPTPAQHIVFQEYVRAVTEHTARLQRLDQELHEHVQAWRLHAVGEALQALRGVQCTVAVTMVAEIGDLTRFDTPRELMKFLGLIPSEYSSGERRHQGSITKAGNTHARRALVEGAWAYRYPAKVSRHLPLRLEKQPKMIQDISWKAQVRLCKRYRQLVARGKHTNIVTVAIARELVGFMWAIAKQLPVAA

SEQ ID NO: 470789 - protein, 432 aa, unidentified
MQKIRENAAGIDIGAKKVFVSIEGQEVRCFFTFTEDFEKLRDYLCEHKIKTVAMEATGVYWNILYEILEESDIDVWLVDGRQTKQVPGRKTDVKDCQWIQQLHSYGLLNRCFVAEADIKELRAYQRLREDHIRSASMHINHMQKALTEMNIRLTEVLSQIHGVSGIAIIEAILQGERNKETLLKLCDRRIIKNKKEDVLKSLNGRYTKHGLFALQQAFDSYLFYQHQIEQCDQMLSEVIGKIGKGKPDQNPQGTRKPIRHNKPDINDLGGSLLKIFDGKDATALSGITDYSWMQLLSETGTDLSRWPSEKHYTSWLGLAPGQHSSGKMKRTKRKKGHPQAGQIFRQIAQSLITSKHIALGAFGRRLRTRKGSQIAIKSVARKLAILYWRIMVKGMAFVEEGTKKYEEQLLLQKHKSLERLAKDLNVQIAYNV

SEQ ID NO: 470790 - protein, 355 aa, unidentified
MNVYTGVHAYYCGIDLHARTMYVCVLDKDGKKVYHKNIPCRPDRFLQTIEPFRGDIVVGVECIFCWYWLADLCEEEGIDFVLGHALYMKAIHGVKTKNDRIDSLKIARLIRGGNFPVAYVYPPEMRATRDLMRRRNHFVRKRAELLAHIQNTTMQYNLEPLGTLSRPHHRRDKDIVGHFPDPVVQLIVETDLQLIDHYDPIIKNLDKQILRLAKGHDPTSLHLLKSIHGVGDVLALTMLYEIHTIDRFPSRGEFCSYARLVKGQKSSAGKNYGTTGGRIGNAHLRWAFSEAAVLFLRKNTQAERYYNRLINRHGKSKALSIVAKRLGIAVYYMLRRGNPFNIKMFLQSHMATEKA

SEQ ID NO: 470791 - protein, 410 aa, unidentified
MEVLHAHCAGLDIHKDSVVACVRHMVEGKVTSQVKTFNTTTQELMALSDWLWAEGVTHIGMEATGVYWKPVWHILSDGEFELVLANAAHVKNVPGRKTDVNDATWLADLMAHGLIRPSFVPDEPTQQMRDLLRTRKQFVRERTGHTQRIQKTLEDANIKLDSVISDIVGISGRRMIEALIAGRTDPQALAELADGRLKATPAELEASLRGRVTAHHRFMLRLHLDQLDALDAAIGRIDKEVDCNVEPFRVAIEMLKTIPGVSRLSAEVIVSEIGIDMSRFPTEGDLISWAGLCPKNDESAGKRRSTRMKKGAPWLKTTLVQCAWAATRTKQTYLHAQYLRIRSRRGAKKAIGAVAASILTAAYHMLKNGTLYEDLGANHFDKRAQGKHVLQLVNRLKNLGFAVQITPMAA

SEQ ID NO: 470792 - protein, 309 aa, unidentified
MKEELVYLGVDIAKSHLDAAIGAQKHRFCNDTVGHRQLVRWIQQTEAAVQVICESSGGYERRLVQALARARIKVSLVQANRVRQFARAAGILAKTDRIDAEVLCEFGKVMQPQTVTAATLEQEHLRELESQRRHLTHLLVMEQNRGARVSDASVVRLNRSLINQIKKQIEKLDLLIKEHIEQSPRLSAKAEKLTSIKGVGLRTAALLLAQMPELGQLNRREVAALVGVAPFNRDSGKMRGKRAIYGGRRFVRHGLYMAALVAARHNPILRNFYLRLRAAGKPAKLALTATMRKLLIVLNSALKHDLRYA

SEQ ID NO: 470793 - protein, 386 aa, unidentified
MQKAITYVGLDVHKDSIVVSLAEAGLRGRLREVREYGKVLNTPAALKAMATKLAAGGNELRFCYEAGPCGYGVQRQLSAMGHHCAVVAPSLVPRKPGERIKTDRRDAAKLAKLHRASELTPVWVPDPAHEAMRDLVRARLAAVRNIREARQQLSGFLLRNGYHYHRHPWTLMHRRWMADLKFDQPLHYIVLQDCIAAVEASEQRRDRLEAGIIAALPEWSLAPLVESLQALRGIALVSAATLVAELGDIARFSNPRQLMAYLGLVPSEHSSGRSRRQGGITKAGNAAARRMLIEAAWSYRFPARISRYQLSQQKRLPKLIRDIAWKAQERLCRRHRKLMRAGKPKTVVCAAIARELTGFVWAIATETSPANGKKGTGKPATMGAVS

SEQ ID NO: 470794 - protein, 434 aa, unidentified
MEPQFAALIAIDWADQKHVWAMKIPGQTKPQMGSLSHTPEAVDAWAAELAGRFGGQSNAVALEQSRGPLVFMLTKYPHLIIYPVHCSTLANYGKSLRPSGAKDDPIDAKLILDILARHSDKLRPLRTDTVETRTIQFLVEEQRKLVDQKTACTNRLTAHLKMYFPQALEWFGELGSPIAVAILERWPTLSDVPKSRPATIRKFYTSHNSRTDGDYLDKRIDEIRTAISATHDEAVIAGYSVAVLAWAGLLKQLLLAIKDYDQRIELLANKHPDYALMKSFAGVGPVIAPRLIAALGSQRDRYESAYEIQCYSGVAPVVSSSGKKHHVHCRWACPTFLRQTFHEWAQHSMVSSQWAREYYQHQRKAGKGHNTAVRALAFKWIRILFRCWKNNVNYSELVYTNAAALKKPKPKSASPVEIKWETKMGMSKFTRLAT

SEQ ID NO: 470795 - protein, 338 aa, unidentified
MKLDGGIDLHSNNSVVALLDDADRVVYRKRLANDAALVLDALAPYREAITGLVVESTYNWYWLVDALMDAGYRVHLANTAAIAQYSGLKYSDDDSDAAWLAKLLRLGLLPEGYIYPKEQRAVRDLLRRRRRLVQQHTANVLAVQNLFSRNRGRSLSAHAIRRLTPRRVGELLPDVHLALAVQSTLLAMRGQEAAIDLLEREACAQVKGQPAYRHLLSTSGIGQVLGLTILLETGPIERFARVGNDASYSRLVGSERLSNGKRKGRGNTKSGNKYLAWADLEAANFAVRYNPKIKRYDQRKRDKTSGVVAIKTVAHKLARACYFMLREGTDFDVDRAFA

SEQ ID NO: 470796 - protein, 406 aa, unidentified
MLFVGDDWAEDHHDLEVQDERGQVLKRARLPEGMAGMSRFHEIVASFLPDDAQPSQVRICIETDRGPWVRALVSGGYQVFGVNPKQAARHREVLGNSGAKSDKGDAHALADMARTRGHQLAQVAVDSDVAEAVKVVTRAHQTLLWERTRHMLRLRAALRDYFPAALEAFTPLGLTSPAVLALLAKAPTPASAARLTISQISAALKGRRDIAGKAARIQQVLRSEQLGQPEVVAAAYAGAVRALVAVITTLNTEIKTLEGEVEAHFGRHPDAEIYLSQPGMGVILGARVLAEFGDATGRYVSAKARKNYAGTSPITRQSGRSKTVHARFIHNDRLVDALHLQAGCAILHDPEVRAYYDELRARDVGHNAALRQIGNRLVGILHGCLKTRTVYDRTTAWQHRHDTAAA

SEQ ID NO: 470797 - protein, 388 aa, unidentified
MIYIGIDVAKDKHDCFIVNSDGEVIKDVFTIPNTLDGFNTLLEAIPNVSKDKIKVGLEATGHYSLNLMRFIIDNQFPLIVLNPLQTNLFRKAHTLRKSKTDKIDAKLIALMLQSGNFKPHSDVSYHLRELKSLTRHKSRIKDNLAKYKISLHRILDIMFPELASVVYSLNQKSTYELLKAFPSKQAITSAHLTKLTNLLIKHSKGKYRKEKAILIKETAAKSIGTDSRAISFELSQTLSFIEVYSNEINKIDNEIKSIMDEIQSPILTIPGISYGLASVILAEIGDINRFDSPSKLLAFAGLEPSTYESGRFVATGMKMVKRGSSYLRWAILEAARLVAMRDPTFKEYYQKKKSEGKHHYVANSHVAKKLIRVIHHLLTNNLQFYPQK

SEQ ID NO: 470798 - protein, 397 aa, unidentified
MYIVGIDIAKRKHEAAVIDGEGAVIIKPFSFTNNCSGYNRLLAMLAKAKLPLDEVSFAMEATGHYWLALFTRLQKEGFRVQVINPVQTNSIRSFYIRQAKTDPRDALLIAEVIRFGHFSESTLHPENIYELRELCRGRHAIVSMQADIKRKVVALLDQVFPEYETAFTNLFGDTSMAILQACPTPKELSEMPLEEFCHLIEVPSRKRFRTEKAQELQALARNSFGFAMAGGVFSTMIRLYAKHLDFLKQQVREMDRKIAEIMETLDTPITTITGIGPTLGAYILSEIGDISRFSSAAKLAAYAGIDPTMRQSGEYNGVRNRMSKRGSPYLRHAIWLAASSAVLHDPALKLYFQKKRDEGKPYMASVGHACRKMVSIIYAVMRDNKAYTPCIPNEISA

SEQ ID NO: 470799 - protein, 388 aa, unidentified
MEECTRLSSQNVGVDVSKDTLDVVFSTMDLKRQVKVKASRKFSNKLHGFKDFIKWIDDKSIEGFEPTILLEATGVYYEQFAWFLYERKYAVSVILPTKAKRYFQAIGNKSKNDKIDATGLSRMGLEQRIPLWQPLSKDFYRLRLLTRQLEDFNEQRTVILNQLHALSHSAYSVKEVEKNFKKLLKELDKGIVSINKSIEKLLMEDAKLRPKVEKIITIPGVGVRTIAVLLAETNGFETFENQGQLVSYSGYDIVHNQSGKYSGKTKMSKKGNAHIRRAMHLPAFGVVRCQVAPLAALYKRLIERGKTKMQAYVAVQRKLLILIWALWKKDQAYDPTYHIKNISDNEESKLLFSLVSKGDTKKIALERTRATLDELPYNESPEVLFSLL

SEQ ID NO: 470800 - protein, 397 aa, unidentified
MYIVGIDIAKRKHEAAVIDGDGAVIIKPFSFTNNCSGYNRLLAMLAKAKLPLDEVSFAMEATGHYWLALFTRLQKEGFRVQVINPVQTNSIRSFYIRQAKTDPRDALLIAEVIRFGHFSESTLHPENIYELRELCRGRHAIVSMQADVKRKVVALLDQVFPEYETAFTNLFGDTSMAILQTCPTPKELSEMPLEELCHLIEVSSHKRFRMAKAQELQELARNSFGFAMAGDVFSTMIRLYAKHLDFLKQQVREMDRKIAEIMDTLDTPITTITGIGPTLGAYILSEIGDISRFSSAAKLAAYAGIDPTMRQSGEYNGVRNRMSKRGSPYLRHAIWLAASSAVLHDPALKLYFQKKRDEGKPYMASVGHACRKMVSIIYAVMRDNKAYTPCIPNEISA

SEQ ID NO: 470801 - protein, 429 aa, unidentified
MQESASTAPVEGVAAYVGIDWADQKHDVALRSASEPGKVEHRLIAHEPEALMDWLGELQQRFGEKGKILVCLEQSRGALIYHLMGYEFLELYPVNPSQLASFRETFSPGGAKDDQPDAALLCELLYCHRDRLKAWKPDDELTRKLAFLNEGRRKAVDQRTQLANEIKSQLKVYFSLALQVLDNDTSTALAADLLLQWPTLDSLQKQSAHKLRKFFYAHNCRKEQKLLERLELIKVAKPLTRDPAVIEPAALRVQLLAQQLKSLLPYIARYEKWIAELFDAHPDSFLFRDLPGAGPALGPRLLTAFGTDRGRFEHSINFSSLSGIGPIRRASGKKTGKNASVHFRHACPKFLRQSLHEFGLHSIRSCPWAKALYQSLRARGKGHHAAVRAVTFKWIRILFCCWKNRVPYNPERYLQALQTRGSVYAEAAG

SEQ ID NO: 470802 - protein, 327 aa, unidentified
MTRYVGVDLHRRRSVIVVLDADGTELWTKRIDNDPLTLGLEIEKVGPAPEVVLEATWGWYWAADVITEAGGRVHLAHPLGIKGFENRRVKTDRVDARLLADLLRMGRLPEAWIAPEGVRHQRELVRYRRKLSQLRAGLKAQVHAVLGKEGLRPPITHLWGPGGSVWLDETDMADAYETRVRSLRRLIKIYDTEITKLDARIASVFEGNEGYEVIQQLNGVGPVLAAIFCAELGDVTRFGSAKQVTSWAGLTPRHRESDTTVHRGSITKQGPPLVRWAAIEAISKNHGDDHIKEHYRRVSERRGRNKGRVGQFPVQSVDLLIRPGVHK

SEQ ID NO: 470803 - protein, 450 aa, unidentified
MEILYTNCAGLDVHKKTVKVCLLTQTSTGQPHKEFRTYFTTTEELLKLGDWLKEQECTHIAFEATGVYWKPVFNLLEGCFELIVVNAQHIKAVPGRKTDVKDAEWIADLLAHGLLKASFIPSGPQRELRDLTRYRVRLTEEKAREVNRVQKTLEDTNLKLGDVVSDIMGKASRMILQAIVDGETDPGRLATLAVGRVRATQEQLESALRGHVTDHHRFLLSEHLTQISHLEQAIERVTAEIARRFTPPPPEEASPSQKDEEAVQEISPALASPQESPASSPAALSWTVAVVLLCSIPGIGERAAMGILAEIGINMQEFPTAAHLASWAGVCPGNHESAGKRLSGKTRKGNPWLRCLLVQAAHSASHQKQCYLAEQYRRIAKRRGAKRAAIAVAHSILVIIYHLLSHQTTYQEKGETFFEEQERQGAEKRLVRQLSRLGYHVELQPVTQAG

SEQ ID NO: 470804 - protein, 391 aa, unidentified
MILVGVDVAKDKHDCYIMTSEGEVLFKSFTIANNMEGFNQLYEKILSVIDNFDNVKIGLEATGHYSYNILGYLLDKGLTPYVINPLHSNLYRKSLSLRKTKTDKVDSRIIASMLMSDVSLKPYSNTLYHNEELKSLTRYRFTKVQERAKLKISISRLVTILFPELEKLVPTLQMNSIYALLYEFPSAHAISKAHLTRLTNLLNTTSKGHYTKDKAVLIREAAKNSIGSNMPAKSLELKHTIKLIKELTSEINEIEEEIKIIMNKINSPILTIPGIGLSTGAQILAEIGDFKNFSSPDKLLTFAGLSPSTYQSGNMYSSNAKMEKRGSKYLRFALFNAAIYVSYWEPTFSQYLKKKRVEGKHYYVAISHVVKKLVRLIFHLEKTNERYSTVV

SEQ ID NO: 470805 - protein, 340 aa, unidentified
MEHVAGADLHKRVTQLALLRDGRPPSQVRFANDRVAVEGALTQLPTGTTIAVESTGSWWWFVDTARRLGHQVVLSHPKLTKAIATARLKSDKVDAVMLARLLKADLLPMVWIPEERERHLRELLAHRGRVVRTRTAVINELHALYSKRNLEVPRYLWHRQAPEPWQPEALGGYGPQIVHENVALLKALHEQIRGLDDALKALAQEDPEARRLMTHPGVGAITAVAVRAWVGDIRRFASAKHLVSYFGLAPRVRQSADTERHGHISKEGNRMVRALLVQATLSAMRHTGGPVRRQYLGVVKRRGKQIARIAATAKLLGVLFQMMKQGLTYQELYQRGGSAQ

SEQ ID NO: 470806 - protein, 457 aa, unidentified
MNRKRTKSKVDRTMPMVHPNAAAIDVGATIHMAAVSADRTPEPVRSFGTFTTDLHRLVNWFKECGVEMVVMESTSVYWIPIFELLDARGFTVFLVNARDAKHVPGRKTDVSDAQWLQRLHSYGLLRASFRPKGQIAELRAYVRQRERLLEYAASHIQHMQKALTEMNLQLHHVVADITGTTGLRIIRAILAGERDPKALAHLRDYRCHASAETIEKALTGSYRAEHLFALDQALALFDAYHEKVSACDVRIEAVLKELSISRSRGSGSLPSSRRRTDQTNAMAFDVRAALFALLGKDVTQISGLGPYLSLKLIAECGDDLSAWPSAKHFTSWLCLAPSNKISGGKVLSSRTRRSGSRASALLRLAAVTVGRTDTALGAFYRRLSARIGKAKAVTATARKIAVLFYNAVRHGMEYVDPGASFYETRYRKRVVENLHRRAKAFGFVLHPAEPTPSVAVS

SEQ ID NO: 470807 - protein, 355 aa, unidentified
MNDAKYIGMDVHQATISVAVLDSAGTLVMEAILETKAETILQFIRGLRGSLHVTLEEGTCAAWLHDLLKPHVAQVLVCDPRKNASMKAGNKNDRADARNLAELLYLDKLSPVYHGETGIRPLKELARSYLALTRDTTRVMNRLKALYRSWAIPCAGQRVYAPRDRSEWLAKITEAGVHRRAEIYYQQLDALRSLREQVRRDLLAEGRRHSAMKLLRQIPSIGPIRAVLLIALMQTPHRFRTKRQLWAYCGLALKTSTSGEYRIVEGRLKRAKKFVAIRGLNANHNHDLKNIFKGAATRAAAVPGPFQEFHAGLVAKGMKPTMARLTLARKIAAITLIVWKKGASFDAQYLKQQAA

SEQ ID NO: 470808 - protein, 401 aa, unidentified
MKRLSGGIDVGSESHHITILDEEDNILYNQKVAHKLNEFAESIKLFKQIERKEGGKISFALEGKNGYSAPLDRLLLNQGFTLYNVDNFKLKRFREAFAGEWRDDQRDSLMLSKMLKLKDYINNQREKVFIKIEEPSLVTESLKLLSRHQQTLIDEKVRLTNRLSKKLLEVCPQILKLGKLKNKKIIAILTKYPDFSNYKSITLCSLLKIRGIGKKGAFFLLKRLNNIEYMPGLTDIYKTIILSYAKRISELQKEIEDIDKKLDEIGEKDKGVIHLKTIPGVATKLASRLIGEIGDIDRFPSEKQLAIYSGIACVDNNSGKVTKAKAVYKANKICKQTLITMAGGSIRLSLQCKAYYLKKRAEGKSHNHALRCLARQMIKVIHRMLTEDRDYMVRKELRKVA

SEQ ID NO: 470809 - protein, 427 aa, unidentified
MAAREKVGEPEFVAFVGIDWADQKHVWCLQAANSAKREGGELEHKPEVVEAWVSELCQRFGHGPIAVAVEQVKGALVYMLGKYECLHLYPVPSTMSASMRAALYPSGAKDDPRDADLLLELLVLHRDKLRRLTPDNEATRRVQNLVEERRKLVEEKTAQLNRLTGYLKVYFPQMLEWFAKLDTKLVCDFLERWPSLEELQKVPSAEVKKFFRHRRGRQGELTEWRMQGIGQAMPAIRDGAVIEAKRAVVQVIAQLLRTLLEGIATLDRKIAEAAEAHPDFFIFQSLPGAGAALAPRLLAALGSQRDRYGSAAEVQKYSGIAPVTERSGKKKWVHFRWACSKFLRQSFHEWAGHSIAQSVWARAYYQQQRERGKEHHAAVRALAFKWIRIVFRCWQDRVAYDESRYLVALAKRGSHLTSAFAAAAVSM

SEQ ID NO: 470810 - protein, 415 aa, unidentified
MYYVGVDIAKDKHYVCVLDEAKELVIKPFSISSDIKGLLELLKKLNSISLDKTSFLIGLESTGAYSENLYEFLKEYEYKVIILNSYQTAKYRDFSTIKKVKTDMIDSFIIAELLATGKYKASYISNDEYNSLKVLNRLKKSIENKIKNIKREISTVIAVCNPEITEVFPNIFSKTVLILLKEYPTATELKQASPEKLVKLFRKVKGNNFSLQKAKQVVYNATNSIYSGKAYKERSLMIKSYINILLLLLQEKEEVEVKIKKFIDTNLDTGNNSPIQNLKTIPGISDKTIVAVLSECGNLNRFNSVKSFFGYLGFYPTIYQSGKTSISGSLAKRGIPIAKHALYLAAVASIKHNNQMKKLFYDKVSSGKSKKEALIIVAKKLASIMYAIFKNNTTYNPNRVFNQFHKNSNKTTLTL

SEQ ID NO: 470811 - protein, 391 aa, unidentified
MFLLGIDIAKLNHVASCIDSSTNEVVFSNFKFKNDFKGFSALLNKIKSFDAKNLIIGLESTSHYGENLINFLFIHDFKVALINPLQTSHLRKANIRDAKNDNLDSLNIAKSLVFTKLNFVSKKNIECFSLKKLTRFRSNLIKQRSKAKIQLTSLLDLLFPELQYLFKSKIHSKAIYSLLKKYPSAEEIAALKDDEISNLLYASSKGHFKKEKSVELKSLAKTTVGIKDTSISLHLIQLIELIELYTKQIKDIEIKITDIVNNLDTTLLSVPGISVIACAIILGETNNFENFSSSKKLLAFAGLDPKIRQSGNFNASSCRMSKKGSPYLRYALIFTAWNIVRHSEKFNKYYSLKRSQGKSHYNALGHVAHKLVRILFTLIKKDISYQEEKLE

SEQ ID NO: 470812 - protein, 412 aa, unidentified
MRAIIERCCGLDVHQETVVACLLIGAPGAQPNREVRRFGAVTRDLEELRGWLREAGVTHVGMESTGVYWRPVYAVLEGCFELIVGNARHMRNVPGRKTDVKDSEWIADLVRHGLIAKSYVPPRPLRELRELLRYRRKLVESQTAERNRLLKLLETANIKLASVASDVFGVSGRAMLRALIEGEASPEAMADLARGQLRRKRADLILALEGRVEEHHRFLLAMQLRRLEAIEADIGALDSRIGERLEPYGAQHALLMQIPGVDWVVAAVLIAEIGVDMSAFLSVYHLAAWAGVCPGNHESAGRQKSGRARKGNVHLRAILVGAAISAARTKGSYLKDKFHRLKARRGALRAALAIAHKILVSAYHMLSKNLPYRDLGEAYLDQIGQTRTVANLKRRLQRLGYRVILEPNVQPT

SEQ ID NO: 470813 - protein, 464 aa, unidentified
MQDSGDKTSNADSEVEVDGLPVVRPNVAGIDLGSEKHWVCAPRVDGAGREVEQFGATTPELERMVAWLKKRKVESVAMESTGVYWIAPHEVLDRYALEVVLVNTRELGRVPGRKKTDRVDCKWIQRLHSCGLLRGSFRPKEQVCMLRTLVRDKGNLVAEAADWLRRMQKSLDQMNVRVHRAVADIEGVTGMAIVRAIVAGERDPRQLAKLRHPGCHKSAEEIAEQLSGHWRADHLFSLQQALRMYDAIQERIADYEQEILRKLAEMEREECRGQEAPKLKNPRKAKTIRNRGQEPMRQALYRISGVDLTGIDAIGVETVQAVLSEYGPDLSRFPTEKQFISHITLAPHQPMSGGKPVKKKKKRGSASSRVAAALRMAAVSLRHSNTALGAYYRKIARRTGADVAVFATARKLATLIYRLLRWGQPYLDEGAEAFEKRHQQVRIQRLTAMAKDLGYQLAPQIAQA

SEQ ID NO: 470814 - protein, 325 aa, unidentified
MTTPELGIDVSKDTLDVSILIRGKPRRQHFANLPSGWTALQAWLRQNRVEHVHACLEATGRYSLGVALALHDAGHVVSLVNPAQIRDFARSRLGRNKTDQVDAAHIRDFAALFAPKPWTPPSPALRRLCELRTMREGFVASLVEWKNRAGSGMDDRTALALAQTTIRHFTLQVEAVDRAIAETIDGDDDLRGRRDLLLSIDGVGETLAAVILAEMPGPDVVQTAAQVVAYAGLNPRRVQSGSSINQPTRISKIGNATLRTALFMPAMVAMRFNPVIVAMAARLRQRGRLKGKQIVVAAMRKLLMICFGVLKSGRPFDPAIAMPPA

SEQ ID NO: 470815 - protein, 370 aa, unidentified
MGNRSMFVGLDVHKETIDVSIAEGARHGEVRHYGVIKSDLEPLDKVVRALRAPGRRLHFVYEAGPCGFGIHRHLTNRGEDCVVVSPSMIPKRSGERVKTDRRDSQMLARLHRAGELRAIYVPDDTDEAMRDLVRAREDAVVVGTQAKYRLKAFLLRQGRRYPGREGWTLPYRRWLTDLSFPSGAQQVALQEYRDAIAETEQRIDRLTEQLRQLAPAWRWAPVVNAFQALRGVSFITGVSLVAELGDLKRFRQPRELMAYLGLVPSEHSSGPRVRRGAITKAGNPHARHLLAEAAWAYQGKPRIGRKHADRQEALPKVVCDIAWKAQLRLTARFRRLVARGKAKPKVATAIARELTGFIWAIAQEVSPALQ

SEQ ID NO: 470816 - protein, 425 aa, unidentified
MDFKQNQKINQVTEQTLVVGIDIAKRTHYACFVDDRGRVLHNSFSVSQARNGFELFYQRVLAAMKEHEKSEVIVGIEPTGHYWLNLAYFLEERGIPLVMVNPMHVKRSKELDDNLPTKHDRKDALVIARLVKDGRYSYPRILKGMEAELRAGSTFRSKLTEELGAVKNMIIRWLDRYFPEFVQVFPSFGKMALAALECTPFPSDLRQKQADEVLSLYRKVEGLKCPQRPKAVRLIEVAASSIGVTEGLEMARIEIATLVCRYHQLEQDIESITQRLVELVKTSVEYEWLSTVPGLGDTTIVDLLAEIGSFSHYQDSRQLIKLAGLTLRENSSGLHKGQKRISKRGRRKLRALLFRVMMPMIRHNEAFRKLHEYYTNRQVNPLRKKQSIVVLCGKLLKVLHGISTKHKAFDAQRMMRDIPGLAEAE

SEQ ID NO: 470817 - protein, 449 aa, unidentified
MSDRSGVSRGDRNRNARLARLREAVPVVNAIAGIDLADCKQMVVVTDHESRVLARRAFRRRAWELGAALDWAAARAAAAGFAGVSVAVEPTGHRWRVVGQLAAGRGMAFVCVQPLMSAWARRAEDLTFDKTDDKDAVLIARLAAQLRCYLPEPADETWGRLRHLGTRRARLVAEQTAQVQQMRDLLECAWPAVLDAARQPFKSTTWRAALTVALARAADGDLSRVSGLGRRRFDAAVRRQVARWDAVHPWRKIIDGVFTACADPAGVTALRRGALERVALLLADWRDTQARLADTEQRMVTVLGELGLADLATSITGLSAVGAASVLAETGDPRRFTTGRALVKHSGLAPRQKNSGNSTGRTRTTGQGRPALRLAAWRAVWGALKSNPVYAARFTHLTSREHNKLSTGQAHAVLAAALLRHLHAVITSGQRWDPAIAAGGRTSPALAAA

SEQ ID NO: 470818 - protein, 346 aa, unidentified
MTIVEAARSVTGGIDTHGEVHVAAALDELGSLLATESFPANPDGYSALVAWLRGFGEIVKVGVEGTGSYGAGVARYLARAGIAVVEVDRQNRQARRQSGKSDPLDAVEAARAVLSGRAHGKAKSRDGSVEAIRVLVVAKRSARAARIKALTQMRQLTFSAPDQLQSRLKGLPIAQFVAAAQGLRPTRSPDPVTAATKASLSSLAHRVADLEDEITELDAMITPLLEAIAPELLDVYGVGIDTAAALLVAAGDNPERLRSEAAWAHLCGVSPLEASSGKVTRHRLNRGGDRQANRALWHIVITRLASDPKTQAYMERRVKDGRSKREAIRMLKRYVAREVYRYLPRP

SEQ ID NO: 470819 - protein, 342 aa, unidentified
MNTVYVGLDLGSSSFHQTAINHEGAITVNRSFPTSEANLRAAFSELRGELHVHLEAGELAPWAASVIAPLVTRVVCSHPRDNAWIAKDNDKCDRVDAYKLADLLRLNRFKEVHYAPDQPRRDFKQLVQHYDELTGHQARWKTKLKARLRMQGVIVTGERLFSPAGRKAVLTRVKSREVRTAISQVYEVLDQSVAAQEQARLLMLRAAQAFPEIKLLRTAPGVGPIGACRFSAYIHTPQRFSSKRKLWKYCRLSVSHRSSNGKPLRRAKLDFSGCGRLKDVSRKAFEVSVRARTDNGFKRTYERALETTHDKTHARLTVQRKIASTLRAIWLTRTPYRDELSL

SEQ ID NO: 470820 - protein, 366 aa, unidentified
MLQKAGLSEEADPENYLGGSSETMYYIGLDVHKKTISYCVKDAAGCVLSEGKINASRRDLDVWVRTLPQPRMMAMEATIFTGWIYDHLLPHAEKVKVAHPLMLRAIAAAKRKNDRIDAAKIADCLRCDFLPECHMASTGIRDRRRILRYRNLVVKQSVQMKNRISGLLMETGVTYNKRRLHKVGYFADLMATNAEIHDCIRPLLRLSREHIERAQKLAYALVTSLERDPLLKERLRRLRTVPGVGPITALTWALEIGDYTRFHSIKEAISYCGLCGDEKSSADKVTRMPLSKQRNRHIQRVLVEAAKLAPRECHELAVVRERELERGNPNRATLAVARKIVCYLLAVERGQRDFVPAEEFSRTAAA

SEQ ID NO: 470821 - protein, 337 aa, unidentified
MKFIGIDIAKSSFVVAYPRQTGFKTTEFTNDAKGIKKFISSFSHSDHHCVMEATGNYSTLLLYMLCSRGIAASLINPKQTKHFARMMMATIKTDQVDARLIALYGEKMKPEIYKVPSEDIILLKQKRVVLRQFKKQLTALKNLKESFDALPTTDKKSLSVLSKTTTFIKKQITLIEAELCTIVSESYQSQVKSLTSIPGIGKTIANALIITTGGFSQFENAKQVSRYIGLCPTYQQSGTSIKIRGAINRNGDSELRALLYIATWSAIRYNRPCKEFYERLKANGKPSKLALVAVANKLLRQAFAVCKSGGVYCNEYHQYDKRNSEASYSFPLIVEAT

SEQ ID NO: 470822 - protein, 344 aa, unidentified
MEYFAGIDVSLRSCALCIVDGKGTVLLERELPCEVSAIAECLGTFPHPIERIGFEAGTLSQHLFFGLKAEGFDVVCMEARQVNAALSAMRNKTDKNDARGIAQVLRTGWFSPVHMKSRQAHGVRALLSTRKALLKKTMDLANEVRGLLKIFGVRLPMTVKHGSFDGVVRPLIEMDDVLVHALEPLLDARVVLYQHFLELDRRVKRAASQDEVCMRMMTVPGVGPIASLTFKAAVDDPTRFNRSRTVGAHFGLTPRRYQSGEHDNPGRISKAGDRDVRATLYAAANALLMRTMAGSQIKSWGMRLMRTKGRRRAVVAVARKLAVLLHRMWVDGTEFRQDQVGGKA

SEQ ID NO: 470823 - protein, 341 aa, unidentified
MDIVVLGIDLGKNSCSLAGLDASGRVILRRRMRRSSVESFVNGLGRCIVAMEACCGAHHLGRVFTAQGHETRLMSPEYVRPYVKAQKNDELDAEAIAEAATRPTMRFVTVKSQAQSDTQALHRARERLVSERTALINHLRALLLERGIVVPQGRRKLQEELLVFADEDAIEAVSPRIRLLIEDLRSEWRALDERIAAFDGEFVRMAREDDAVRRLTTIPGIGTINATALTAAVGDARAFARGRDMAAWLGLTPRQMTTGGKPRLLGISKRGNRYLRKNLIHGARAVLPYLVERETPLGRWARGLLARAHKNVVVVALANKLARIAWAVLARGCTYDAEAAA

SEQ ID NO: 470824 - protein, 389 aa, unidentified
MYENGKKVIYVGIDVHDETFTCCFYDPDDKQAKKGLRTVKIFSSAAQVRRCLADFCKDNPFNISEFTFRCAHEACGYGYELARSLHSSGIDCVLLAPSTINEYHNNQRIKTDKRDAFTIAKSYANGEASPVHIPDKHDEEVDNLIRVRDMYKDTAKRYKQQIIAFVKRLGYKYEEHGHYWTQKYMKWLANLPLSTVNRYVLDNLLNSLAQASDSLAELNGQIASISENDKRYAERVRRLRGLFGIDTYTAMAIVVKSGDFKRFAKAKSYMAYLGLIPGEASSGGTVHKKSLTKTGNPRLRQLLTESAQCYLRKPNLLKSKAFKKRQEGLPEEFITYADRGLMYIVRKGKKMLYNKKNWNVIVSALARTLAGFIWGAMTNHLDRNPKAAA

SEQ ID NO: 470825 - protein, 340 aa, unidentified
MHRLDERCQYTYIVGIDVASATLQLSLLMPTLQQYRAWEVCNQQSGFEQILQLLLCEGATPQNCIFCLEATGVYSERVCQYLHSQGFRVACEAPQKVQRAMHKSYKNDQIDAAQIAEYAWRYFDQLHWWTPRSATAERLRALGNARELFLQQKRAAHNMQQALARKVVDCAEAEAALGCMQQFLQQQMQQLQQQMQEIVQQDQQLKAAHELLMSVPGVGSLLSIQILLLQQTLPQMQPRVVASYLGICPHAHQSGSTVLRPPRSRRSGPSISRRLLYLAAMCLCRNLPRFRDYIKAKTLQGKPKRLLLNNIANKLIRLICAVLNSGLAFDPNFMAAPRAA

SEQ ID NO: 470826 - protein, 334 aa, unidentified
MDKITTAGIDLAKRVFALHAVDAAGRVVLRKTVRREQLMEVVASLPPCLIGMEACSGAHEWARRFQELGHTVRLMAPVFVAPYRKSGKNDGNDAEAICEAVSRPNMRFVPVKSAEQQAVLALHRVRQGWIEERTATINRLRAVLTEFGIVLPNRAPHVRRGAQAAAEALPALARRAVEELRAHLALLDERIGAYDRELQAQARQSEAAQRLMQIRGIGPLSAVAIVATVGNARDFRSGRQFAAWLGLTPRQHSSGGKTRLGHISRRGDAYLRCLLVQGARSVLLTATRHSDRLSRWVLSVQARRGYHKALVAIAAKNARIAWALLSKNQTLRAA

SEQ ID NO: 470827 - protein, 332 aa, unidentified
MGMDVSKLWVDITVMCVLNHQKQPAACERFDNTTAGIKALDKWLKKQQVSFDENSLLVIENTGVYHRLVWEYCSTHGLPLHIGNATHIKWSFGIARGKNDKIDSQRLCAYAFKNADELKATPVLDPVFLKLKDFMTARSRLLSQKNSITSYLGEVKLSNSKETQSIMEQAHKAALEGINQSLKMVEKQIKELVNQKAAIKNNYELLLSVPGIGHLTAVYLICCTNNFICRITGKQLASYAGVAPFTNSSGTSIKGRNKVHKMANKDLKKLFHMGAISAITHYAEFRDYYQRKVTEGKHEQSVINAVRSKIALRAVAVINNQEKYVDNYKKAA

SEQ ID NO: 470828 - protein, 322 aa, unidentified
MSVSVLGIDIAKQKFDAALLLDGKTKHKSCKNSVEGFETLIIWLEKQGIQKVHACLEATGNYGEDVAIYLHEAGHTVSIVNPARIKGFAQSELIRTKTDKIDAGIIARFCLAMKPEPWIPPAPEIRSLRALVRRVDSLIDMRSQEKNRISTAHESVMHLIKEHIAYLDKEIEKIRRQIADLIDQNPDLKQKKDLLDSIPGLGKATIPHLLAELNDLGKFRHVREVVAFIGLAPKETLSGSSIKGKPRLCKIGHVRLRKALYMPALVSIQCNPMMIAFYNRLKEKGKNGKVIVCAIMRKLVHVIFGVLKSGKKYDPNYKPVLA

SEQ ID NO: 470829 - protein, 426 aa, unidentified
MRVLYDRVAAIDVHKDMVKVAIRVPGAKRGTRKTDVLEFRTFYGVLQAMGRELRGRGVTHVVMEASGVYTDPVYYALRELDFTEVMVINPAHAKALKGHKTDAKDAIRLLDLYECGLLSGSYMPSEDLREVRDLARYRMKTVQARTSEIQRLQKTLETAGIKLSSVVSDVTGGSATAMIEALISGERRGSVMADLAQTRLRTAGKMADLSMALTGRFTDHHALMCRLHRDRITIFDDAVKDLDAKIAPLVARYAREAGLLKTLPGFGDVIAAGWLGAIGPAPHQHFATASRLASWATICPGNYMSAKKSKGGRTGDGGAYIKPLLIQAAWAAIRVPGRLQARFRRLVRKFGGPRNKGAQKRAITAIAHTLLKIAYSVLKTGKPYADLGADFYTRRESPDARQGYLMRQLQKLNPGCVITIIPAEAA

SEQ ID NO: 470830 - protein, 349 aa, unidentified
MKATTIGFDLAKNEFQVHGVDAAGKTVVRKKLSRAQVLPFFARLSACTIGVEACGSAHHWARKLTELGHTAKLMAPHFVKPYVKANKTDAADAEAICEAVARPNMRFVPVKSVEQQAILAVHRVRSGLVAERTAQLNRLRSLLAEFGLIAPRGRRALMERLPVLFADETLPGVARTLFERQSARIRQLETEISAEEAVILNWHRNNELSKRLDAVAGVGPITATALVASFGEGREFDNGRQMAACLGLVPRQHSSGGKTRLLGISKRGDTYLRMLLVHGARAVIRTLERRAKAAGNPTDRWLAKLLARRNPNVAAVALANKTVRVIWALLAHGRTYDRNWSGHRAVAAA

SEQ ID NO: 470831 - protein, 413 aa, unidentified
MTNNIITAVGIDVSKGKSMIAIRRPGGEVLRMPFEVKHNTTELKSLIKLLKQIGGEMRIVMEHTGAYWYPIARTLHEAGFFVSVVNAILIHNFSDNSLRKVKTDKTDALKIANYALAFWKTLCQYTPEEETRLILKTQSRLYERTIDSSVVLRNGLISLLDQTFPGINKLFTTAYRNASGHYKWVDFVRRFWHRDCVAGMSEHTFSESYAKWCAHEGYQYSAVCAARIYQAAKQTVAVFPKNDSVKALIVQAVDTLNSVYDSLQVMREEMQRLAEQLPEYEVVMEMYGVGAVTGPQLIAEIGDVRRFTNKAALVAFAGVDAPPYQSGTFDSKSRHISKRGSPHLRRIAFMICSTILQKSNLNNQIYAFMDKKRAEGKHFYVYMVAGTAKFLRIYYARVVEHLNSLELISRIPT

SEQ ID NO: 470832 - protein, 316 aa, unidentified
MKHSIIFCGLDVHKDSITIALADGDRNEEIRSQGTISGDMASLDNAIRKFRRSGVELHFVYEAGPCGYEIYRHLTAQGFHCEVIAPSMTPKRSGDRIKTDRRDAITLARLYRAGELTPVYVPREDDEAMRDLVRGRDDAIKATRHARQRLSAFVLRHGFRYSGGTSWRVAHLRWLADIKMPHPAQQITLQEDIHSVEECTERIDRLTEQISKLLPTWRMAPVVTAFQSLRGVAPVVAAVMVVEIGDLRRFENPRQLMAYLGLVPSENSSGQTTKRGGITKTGNGHARRALIEAAQTAFPPESAEHFGNVKRAFRVR

SEQ ID NO: 470833 - protein, 352 aa, unidentified
MDYFAGLDVSLAMTSICIVDADGVVVKEAKIASEPDDLVAFFAQCGMAMKRIGLEAGAPSQWLYGGMAEAELPVVCIETRHAKAALSAMPNKTDRNDARGIANIMRTGWFRAVHVKTQTAQELRFLLVARQTLVRKLMDIELAIRGMLRSFGLKMGVVSKRNFEARVLELAGDRTMLMRALNPMLAARRALAGEYANLQKVGLDFARHDDVCRRLMTVPGVGPIVALTYRATIDVPSRFRRSKSVGAHLGLTPRAYQSGEVDWNGRVSKSGDAMARAALYGAAHVLLTRVKRWSSLKAWGMRLVKNRGHKRAVTALARRMAVLMHRIWVEGTTFLWKTGDGQAIAPKPVPGV

SEQ ID NO: 470834 - protein, 383 aa, unidentified
MLSAQGNDTTNGEAILAVALELSQKCWKIAFQDGRHDKPSIYDVRHEEAEQRLAEARAVIEAQKMKWKLPSDCRVVVMYEAGQDGFWLCRALKQQGYEALIVDPASIPVERQARRAKTDRLDAIKLVSCLLAYLRGERDRMHAIRIPEDAAEAQRHLARDRGEMQKEIQQHRDRMRKLLRTVGNWDGVGPNFETQLHAGQVRCHDGAALPPALQERFSRECERLALVKKQLAALESELVTQLPLPVQARIGHLLRLKGVGMVGSERLVLEFFWRDFNNRREVGACTGLAPQPYDSGESRVDQGISKQGNRRVRALLIEMAWMWLRYQPESALSRWFAQRTGGTGANKRGKRIAIVAVARRLAIALWRYLEQGVIPEGARLKAA

SEQ ID NO: 470835 - protein, 310 aa, unidentified
MANLYIGIDVAKATLDVAIGSDGEVVQVENSEGGIARLIERLRESAPTLVVLEATGGYESLVAGALAGQGIAVAVINPRQVRDFAKATGVLAKTDRIDARVLARFADAVRPEPRALPTKEAKELEEFLSRRRQIVDMLTMEKNRLSIAATERAKKSLKKHITWLEEALRRANDDIDTAVRNSPAWREQEDLLRSVPGIGPVSARTMLAELPELGTLSRKKIAALVGVAPLNRDSGTIRGSRICWGGRASVRQVLYMAATSAVRCNPVIRRTYLALRARGKKHKVALVACMRKLLTILTAMVRDQRRWSPS

SEQ ID NO: 470836 - protein, 370 aa, unidentified
MSVRRILAKTIDTDLEYEAIGIDLAKNCVSTALLTTDGEVVCIDRLDYSELEKSAQVLTPTTFAMEPCTEMNYLVQKLEAWGHRCLVIGGKNVQNYVENHYSGQKTDLNDAQALAFLAQDKQLRTIKAKDIEQQKYASLTTLREQYIKQYRQTIVSLKGICQAWGLNISKGISGKAQLKDLIENHAAFPEELRESLVDMVTHAQTTQKVLNKITKTLEVLAKNDKVCQLIQTIPGLGTICSCRLRATIGDIKRFKNPKDFPAYYGLVPRSIATGHNEKKGKITHRGDRTMRSLMVQGAGCVIRLATCGKLKSKQLTKWILKKQKEKMPWGKLVCAVAAKLLRIVRAILISSKPYNPKIAGVAKCSLSKGS

SEQ ID NO: 470837 - protein, 417 aa, unidentified
MVARVCAIDIGKAGVVACVRVPHATKPDRRVQEVREYATVTPALLALADWLRVERVELVAMEATSDYWKPVFYLLEAEGFTCWLLNAKHVKNVPGRPKTDRLDAVWLAKVIERGMCRPSLVHPKPIRQLRDVTRYRRSLVREQTREKQRLEKTLEDAQIKLDSVISDLHGVSGRQMLQALIDGQRDPKVLAEMARGSMRRKIPVLREALTGHFDEHHAYICATMLRRIDALAADIAQLDTRVEELIAPFALAMEKLDEITGIGVRSAQEFIAEIGVDMTVFPTAAHLVSWAKFSPIDASSAGRKKGNSTGKGNPWLAGAIGEVVAGLARTNTFLGERYRRLARRRGKKRAIVAVGNSVLTIVWHLLSNPDARYHDLGPGYHESRINNQRRQRDLIRQLEQLTGHKVNLQPLPEPALA

SEQ ID NO: 470838 - protein, 451 aa, unidentified
MSARKKIPFKSNTQLPALHPHAAGIDIGAAAIQVAVPSDADPKPVRTFTTFTDDLHALRDWLKACGVKTAAMESTSVYWIPLFQILEAAGLEVYLVNARHCKNLPGRKTDISDCQWLQYLHSVGLLRASFRPPEHICAVRSLLRHRSALVRYASDHVRHLHKALTQMNLQIQNVISDLTGVTGLSILEAILQGERDGQTLAALKDHRIKASRDTIARSLQGDWRAEHLFVLQQALDTWKHDQRLIAQCDEQIERDLAAFESRPAAHALPPPATSHRQAQRNEPKFDARAQLHRLCGVDLTQVPGVQVNTALVLFTELGPDFVQRFPTAKCFGSWLGLCPDNRITGGKIISVKTRDVKSRTAQALRLAAQSLWRANNYLGDCFRRWKARLGTPKAITAMAHKLARILWHMIKFRKPYDPTVWTLAEEKLKKKRIKRLQQSAAALGFKLLSAS

SEQ ID NO: 470839 - protein, 339 aa, unidentified
MDHVAIDLGSRKSQICVRNGEGEILEEKRWETLELKRYLATRPKSRVIVETCAEAFLVAEAARELGHETRVVSATLVRTLGVGARRTKTDQRDARVLSEVSCRIDLPSVHIPKVQSRERKTFCGMRDALVGARTKVINTVRGWLRGQGRRLGKGSRATFSERVRIACGPELPEYVERQLRVVEALTVEIDGADKALEAQAEADDICRRLMTVPGVGPLTAVRFVAALDEVERFSNAHQVESYLGLVPGESSSSERQQKLSITKAGPPALRWVLVQAAWALRTRSRQAAAVPLQLWAHRIELRRGKRTATVALARKLAGILYAIWRDGTEYDGSRGAQMI

SEQ ID NO: 470840 - protein, 381 aa, unidentified
MRTTYDAQHRTDDRVLAVALELSKASWKVALSDARHNPRIKNADAQQPLARLGQVLALLEDARARWALSEDVRVVVLYESGQDGFWIQRALAAQGIETLIIDAASLPVERKARRAKTDRLDACRLVEALLGWLRGEQQRFRVVRQPSVAQEDSRHWGREREQLQREMQQHRDRMVKLLVTQGCWEKLDRRFAQRLANGELRDWEGEPLGATLLVRLQRELTRWQQARDQLKQLEQERAERFSVQQQAQLTQLVQLRGVGPVSAQCLVLELFWRHFANARQLGACVGLVPQPYDSGTMRKDQGISKQGNRRVRALLVELAWMWLRYQPGSALSRWFASKVQGDSKRSRRVAIVALARRLLITLWRYLERGVPPEGSQLKAVA

SEQ ID NO: 470841 - protein, 412 aa, unidentified
MEVLYPICCGLDVHKQSITACLSAVSATGGRTKETRTFLTVTDELLALAAWLRQAGCTHVAMESTGSYWKPVYNILLGKFEVMVVNAAHIKGVPGRKTDVLDAEWIADLLQHGLLRASFIPDQFQRELRDLTRTRTILIDERSAAVNRLQKVLEDANIKLSSVATDVMGVSGRAMIEAILEGQSDPATLAELAKGKLRKKREQLEQALSGRVSDHHRLLLAMHLEHIDFLDESVNRLSQEIAERLAPFEEDLVRLDGIPGVGRTTAEVWAAEVGFDMSHWPTAAHLASWAAMCPGNRESAGKQMGGKTRKGNKWLRRALIEAACAAGRKNGSYLQAQYRRLKYRRGQRKAAVAVGHTILVTGYHMLTRREDYREVSPTLLDERRRARAERRAIDQLQALGYEVALTHKQPAA

SEQ ID NO: 470842 - protein, 450 aa, unidentified
MNSSPQTVLPVASGLDVHKSFLVAVIKSTSNQGTVNTVKKRFSTFRADLEDLRDWLLQNDCHHVCMESTGKYWIPVYNVLESAMNEVRVCNPKWLSLEKGEKDDNKDAARICDLYRNGMTKSSYIPNKQIRTLRELTRLRQKYVQQRTSDHNRLINCLTVSNYKLDMVFSNVRRRSAFLIINLILSGEPYTDEDILKCVSSRCKAPREDILRACHGFELDKLQREKLRIIQDHIDGLTKEIEKLDQLIAEACEDHKDYIRLLMTMPGVSEISARKIIAELGTEMDQFVKGSRVAKWAGLAPGSDESAGKIHSRHITKGGKYLKPVLIEAAWAAVRSKNPYYRCKFEILSLRLGKKRAIVAIARKMIISIFHMFSDMKEWHPKDCDDCFVPRSLSVQKESRKLNKTVNTLKAMGLTEHQILKTIAAGLDDPEISDDEGNRYDLITGEYRTA

SEQ ID NO: 470843 - protein, 418 aa, unidentified
MKKDNNSAKKSEPTVKRAKSRAPVQRDAKEVLAEVLGKLTGKLDAPAVSTSSKENRRGNTVGPNRDRMTVGVDLGDRWSQYCILGLEGETLAEGQLRTTQEDVGEFFQALTVARVVIEVGTHSAWVQDVISEWGHEVLVANPRLMEGSKRRKRKSDRIDANKLARLGRVDPQSLYPIRHRSREVRQDLVVLRARDALVSVRTELINTARGLVKSMGTRLPRCSSPSFAEKVKHAIPVEVREALLPLVQLTETVNDCIARYDQKIEELGQKKYGHTTLLRQVKGVGPITALAYVLTLEDPQRFSNSREVGPYLGLVPKQEDSGDSQPQLGISKTGDRMLRRLLVGSSQYMLGAFGPDTDLRRYGLRLCERGGKNAKKRAVVAVARKLAVLLHHLWVTGDVYEPLHRSGAGTGTAHAAAA

SEQ ID NO: 470844 - protein, 331 aa, unidentified
MEIKEVIGIDASKLTLDCCLHKSGAQEVFDNTVEAIAHMADWSMKSSGLGKDELLFVFEHTGLYTHQLARYLSEQGYYFHLVPGLEIKRSLGIARGKDDKADAKRIALYGYRLREEIKPYQLPKESLETLKRLMSMRRKLVAQRAGHIATLREQKRVLDKELGPMLFQVQQEIIGVLDVQIAKIEKELDRIIQQDPELQDLYRLLMTIKGIGAVTARFLMVYTVGFTAFATWRKFASYCGIAPFPNRSGTSIRGRTKVSQLANKEGKTLLNLCAGSSIQCNPEMKAYYERRIANGKNKMSTLNIIRNKLLARAFAVVIRGTPYVNTMGYVS

SEQ ID NO: 470845 - protein, 340 aa, unidentified
MEQIIGIDLAKRVFQVHIVSAQGEKKANKMITREKLMAFIAQQPLSRIVMEACGSANYWSRQFKTFGHDVRQISPQYVSPFRMGNKNDKNDATAIVEADSRPGMRYVPEKSLEQQDIQCIHRVRQRLMKNRTALINQIRGLGLEYGIAIPEGAHKIMTCLPDYLEDAENELTALSRQLFHEIWLELQDCQQRIKTLDVRLEQISTQNEDTARLVNIPGIGPLGASALTIALGDSRSFNNGRHFASYLGLVPGEHSSGGKPRLLGITKRGDGYLRGLLIHGARSVVYRTVNLPDERCSALQRWLKGIIVRGGVNKAVVALANKNARVAWALVNQRTEYRIQ

SEQ ID NO: 470846 - protein, 424 aa, unidentified
MEVVVERSCGLDVHQSTVVACVLTGEPGRNPRKVVRTFGAMRRDLEEMRDWLKSLGVTDAVMEGTGVYWMPVYAVLEGHVEPWVVNAHHVKKVPGRKTDVSDAQWLASLLRMGLLRKSFVLAKEIRPIRDLSRYRRMLVQSETAEKNRILKLIEMMGIKLASVVSDVFGKSGMAMLRAIAAGNISVQALTQLARGRLRSKLPELALALDVLVKDHHRVMLRGQLARLDRTTAEIAQYDDYLEQVMEPYSEQLALLCSIDGIQRTAAIEIFAEVGPDLASFPDEAHLASWAGTCPGMNQSAGKRSKARRRRGNPYLQSILVECALAATKKKNSYLKDKYHRLRGRRGSMRALFAIAHKLCRAVYRVLTTGVPYRDLGDQYLDRLHRPRIARALAQRLQALGYDQDSVRELFSQPRALNSCEPAHL

SEQ ID NO: 470847 - protein, 420 aa, unidentified
MEVAQDDQEIIARVAALDIGKAEVVCCVRVPGQGPRARRMQEVRTYTTMTRSLLAMADWLTELGVTRVVMEATSDYWKPPFYLLENTFETWLVNARDVKHLPGRPKTDRLDAVWLCKVAERQMLRPSFVPPPAFRELRDLTRYRVDLITTRTSEKQRVEKLLEDALIKLSVVASDIFGVSGRDMMAALVAGERDPKVLADMARGSMRGKTARLEEAFTGRFTDHHAFLLRTMLARIDGITADMDIVQDRIDEQIAPFAAAVTRLDEIPGVGVTTAQAIIAEIGLDMTRFPTPAHLASWARFAPGISESAGRKKGNSGTGKGNRYLARALGEAAVGVRRTDTFLGERYRRIAHRRGKKKAIVAVGRSILMIVWHLLSDDDARFVDLGSDYYESRVNLNRRTRNHVRELQALGYKVTLEPAA

SEQ ID NO: 470848 - protein, 415 aa, unidentified
MSCPREAMGRAAEVVAPSSSIRTDGGYPVAQVNDLSRSLTAFDPISTLVVVVEMSKASWLVSGAVPGVERQPLKKLEPDATALLRLIERWRNEAVRAGRPISRIALAYEAGRDGFWLARWLIARGIEAHVIHSASVAVSRERKRAKTDRLDAAMLMRVFLGWLRGERGHCGMVAIPTMEEEDARRPSRERECLVNERSRITNRMKSALARLGVRGFKPHLRKAPERLAGLRTAEGTGLPMNIIEEFRRDMARLALVREQISSIEKTRAERLERAPDTGPHAMVRLLARVIGIGIETADMLVREVLSRKLRDRRAVARYAGLTGSPDESGLKRREKGLAKAGNARVRRGLIQLAWRFLVFQKDSALARWYRTRTEGPSGARKTTMIVALARKLLIALWRLVTTGEVPDGVKLRPAL

SEQ ID NO: 470849 - protein, 354 aa, unidentified
MNTTQNSTKSKIVKVIGVDLAKDHCDVIGYDENGKICLRLDGCSYAKLREILANLPQAVVLMEACKGSMFHARSIADLGHEVRLVKGTDVKALRNVNHKNDLRDAAYIANLYFVPGIKYVYIKSQQQQSLQFLQNEYKSLQELRIQVGNQIHAGLEEFGCPVRKSSKFIKTRMVAHLEKHAELIPEDVMASFKRRREIWLNLLQQEEEAKRRLEQVAATDDNAKRIMTVPCVGPQTAVGLLVHVGVDFGRFKNSRQFAASLGLVPKQNSTGGNNTLNHITKCGPKSLRSNLVQCAQLVLMYAEKWKGNFGDWVRKMRDSGKKHGVIVCAIAAKLARIIYRLMKDKVDYTPILSC

SEQ ID NO: 470850 - protein, 344 aa, unidentified
MKSTTIAIDLAKSVFEVGISERPGHVSKRKTVKRPDITRFMAEQPPATVLMEACGSAHYWGRQFEKFGHEVKLLPPLKVRPYVQGSKTDRTDVKGMLEAWRNSDIRPVPIKTPEQQQLMALHRIRSGWMMTRTQRINTARGILREFGIVFPLGAAALAGRVKEVIEDADQPLPTMVRSVLKELTLEIGELETRIESVGEQLEALASQTPQVDMLRSIPGIGLLTATALAGFVGNVQRFPSGRHFAAYLGLTPLEHSSGGRRRLGHISKMGDVYLRTLLIHGSRAVLIAARRQTKPDRLRTWALDLQRRVGNNKAAVAIANKLARIVWAVWKSGTPFKSKAQATA

SEQ ID NO: 470851 - protein, 402 aa, unidentified
MNCVGIDVSKGKSMIAVMRPFGEVVVSPFEVLHTDSELSKLAGLLKSLDGETRVVIESTGNYHAPVAWLLHDAGLYVSVVNAMLVHDYGNNSLRRAKTDKKDAIKLANYGLDHWLILPRYVPEEDTRLMLKTCYRQYQQYSKVQTMLKNNLISLLDTAFPDANRLFTSPPRADGSEKWVDFVAAFWHCECVCGLSEKAFTAKYQKWCKKHGYNFSKGKALDIYASSCGHFGVMPKTDTAKLLVEQAVSQLRATSAALAALKQEMQSLAASLPEYPVVMEMFGVGPTLGPQLMAEIGDVRRFHSKKALVAFAGIDAPPYQSGQMDVRSRSISKRGSASLRRTLFLVMGVLLQCAPMDEPVYQFMNKKRSEGKPYRVYMMASANKFLRIYYASVKAYLDSLEHD

SEQ ID NO: 470852 - protein, 421 aa, unidentified
MEDTDEVRKIIFVGIDWGSETHQTCAMDGARRIVLEKAVPHSGKGLADLSAALLRLVNGDVKRLAVAIEVPRGAIVETLLEKQIPVFAINPKQLDRFRDRHTVAGAKDDRRDALVLADSLRTDRAAFHPLRLGDPLLVQLRELSRMHDELKAERVATGNRLREQLHRYFPQLLELASVYEARWLWELLEIAPVPKQAKKLALGKVRSLLKNYRVRSLTPEQVLEKLRSEPLHVADGVTEACSRHVALLIPRIRLLHEQQAQVEREIENLLEQLSTAVEGKAEHRDALLLQSLPGLGKLVCATMLAEASEPLEDRDYLRLRSLCGVAPVTKRSGKQYAVRMRAACNQRLRTAIHHWTTNAIQRDPHWKARYAACRAAGHSHGRALRGIGDRLLATLVALLKSQTHYDPTRRTVTPGLGIMPA

SEQ ID NO: 470853 - protein, 386 aa, unidentified
MPQLNDLSRSLVVLEQDATLIAVIEMGQSNWLVAGIVPGVERSPLKKLAVDESAMLKLLNRWREEAEKAGHRIERIAIAFEAGRDGFWLARWLRARGIEAHVIHASSVAVSREHRRAKTDRLDTELLKRAFLGWLRGERDHCKMVAIPTLAQEDAKRPNRERESLVGEQSRIVNRMKAALARLGIRGFNPKLKKAVERLDGLRTPEGEPIPPNTLAELKHDMERRRLVRSQIRDIEGTRLERLKQTPGDGPHVTVRLLARVIGVGVETADMLVQEVLSRNLRDRRAVARYGGLTGSPDESGKKRREKGLARSGNARVRRGMIQLAWRFLMFQKDSALAHWFYARTKNAPQTRKTMIVALARKLLIALWRLAREGAIPEGIVLRPAL

SEQ ID NO: 470854 - protein, 355 aa, unidentified
MLGTKYIGMDVHTATISVAVLDAAGKLIMDSVMETKARTILQFIHGLRGDLHLTLEEGTWAAWLYDLLKPHVTNIVVCDPRRNALLKEGSKSDRIDARKLAELLRANLLRPVYHGEKGLRTLKELARAYLTIGKDLTRVMNRVKAIYRSWGIPCAGRSVYNPRHREEWLRRITQASVRRRAELYFEQLDALVLLRKQARKELLAEGKKHQAWRLLRSIPALGPIRAAVLMAIIQTPHRFRTKRVLWKYSGFGVVTHTSADHRYVQGHLERSKKPALVRGLDPVHNHDLKDVFKGAASQASTGKGPFRDFYEALVAKGMRPEMARLTVARKIAVITLTVWKKGVAFDAKYLKPQTA

SEQ ID NO: 470855 - protein, 324 aa, unidentified
MQESDGVFIGIDVSKAHLDVAIHGSSEVRRVRNDEKGIEELVSEFLDVRPTLVVLEATGGFEMPVAVALAAVQVPLVIVNPRQTRDFARSTGQLSKTDAIDAHGLALFAARVRPEVRELPSEEAQELDALVSRRRQIVGMLTQEKNRLGFALGPVQKGIRKHITWLERQLSDVDADLDARIRKSPVWASKSDLLQSVPGVGPNLSRTLIAELPELGTLTHKQIAALVGVAPRARDSGKFRGKRMIWGGRAPVRTALYLSVWSASRWNPVIRLFYDRLRAQGKPPRVAQTACMRKLITILNAMVRDGRFWDPSIPLAQLQLQHSC

SEQ ID NO: 470856 - protein, 400 aa, unidentified
MIDTSDIDVYLGLDVGKGEHHATALTPAGKKTFDKRLPNSEPKLREVFAGLQAKHGTVLVIVDQVASIGALPLAVARDLGCHIAYLPGLTMRRIADLYPGEAKTDAKDAFIIADAARAMPHTLRSVDLDDETIAELQMIVGFDDDLAAEANRLSNRLRGLFTQIHPHLERVIGPRIQHPAVLRMLDQFGSPAQIRKAGRRRLITLIRPKAPRMAERLINDVFTALDEQTVVVPGTDAAALIVPSLANSLQAVLDQRKILAHRIEELLEAHPLSKVLTSMPGIGIRTGARILIDVGDGTAFPSAAHLAAYAGLAPATRSSGSSIRGEQPSRRGNKQLKRAFFLSAFAALADPASRTYYDKKIAQGKHHTQALLCLARRRADVLFAMLRDKTFYEPQPAAAR

SEQ ID NO: 470857 - protein, 303 aa, unidentified
MWYSGIDQHKRDSVITTYGPDGPRVKQARVANTPLVMAQYFADFPGPHKAVVESTGGWYWLADVLAPLDVELVLAHATRLKAIAAAKVKTDQVDSDTLALLLRADLIPVAHMIRADQRGPRDLMRTRLRLVEKCVSAQNSIDRLLEKFNVSDVGARDELYQLPAACQAAQIALLTQQIATVERALYPHLLPNADVQRLLWIPGLGKVNAFTIYTEIDGISRFPSARQFFSYSRLVPGADNSGGPHPASLGLQGGEPLPQARVRRDPRRAVQPRDPGLPESESSAQADPDRAHARRLGDRAHRV

SEQ ID NO: 470858 - protein, 338 aa, unidentified
MPLYSGIDLHANNSVVVLLNEQDQVIYQRRLANQLPALLEALAPYQADLIGVVVESTYNWYWLVDGLMEAGYRVHLANPAAMQQYSGLKYTNDQSDARWLAHLLRLGVLPEGYIYPKAERAVRDLLRKRAHLVRQRTAQVLSVHNLMVRNTGVRFGAKQIDEFTPSELASLLPNTEQVLAVTSSLTVLHCLGQEIKTSEKAVQKRLKHTPAYTQLQTVDGIGPILAQTIVLETGDMRRFPTVGHYASYCRCVGSTKISNGKRKGQGNIKNGNPYLEWAYMEAAQFAIRFSPTVQRFYQRKQARSHLMIARKAIAHKLARACYYIMRDLVPFDVHKAFG

SEQ ID NO: 470859 - protein, 407 aa, unidentified
MRPIYERCCGLDVHKKTVVACRLTPEGSQTRGFGTMTGELIQLRDWLLEAGVTHVAMESTGVYWKPVFNLLEDQGMELMVVNARHVKAVPGRKTDVKDAEWLAELLQHGLLKASFIPDRESRERRELVRYRRSLVEQRAHLVQRIQKLLEGANIKLGDVASDVMGVSGRAMLQALAAGVDDPAAVAGMAKTALRNKIPELERALTGSVREHQRFLLRSQFRLLESIETEIAALDEEVAERMRPFQTALDRLDEIPGIGRRAAEQILVETGTEMSRFPTSGHFASWARVCPGNNESAGKRQYASIGGGNRWLRTALLEAAWTVSHSRKPTFFTARYRRLAARRGRKWAAVAIAHSLLIAVYHVLKDGVVFQDLGPTHFERRNQEAIVRRSLHRLEALGYKVTVEAMPA

SEQ ID NO: 470860 - protein, 382 aa, unidentified
MNKIIRIGIDTSKSVFVLHGVDAAEQPVLRRKLRRSQVLEFFRKLEPTKIGMEACGGAHYWARELQALGHEVVLLPPQYVKPYVKRNKNDAADAEAICEAMSRPTMRFVPVKTTEQQAALMLAGTRDGLIGRRTQLSNTIRGYAAEFGLTTAKGLDKIELLLAGIAASAELPTLAKELFAAYGREYAQLQRQIIKIEARLMAWHKDNELSRRLVEVPSIGPIGATLLVMKVTNPHAFRCGRDFSAWIGLTPKDHSTAGKTRLGVITRAGDEALRSVLVAGATAVIQQAQKGRGYAPPWLVELLKRKPRKLAAVALANKMARVAWKLMVSGERYNPARTAAQSAAREGRGAALRGGSAPRPSLASRITPLGGGCHDRGVTSSA

SEQ ID NO: 470861 - protein, 344 aa, unidentified
MDVLHDRCAGLDIGKKDLKACVRTPSPTGRRSRRQEIRTFATTTNALLELRDWLVDQQVTLVVLEATGDYWRGVYYLLEDTLNVILVNAAHAKGLPGRKTDVSDSAWLAQLGECGLVKASFVPPEPVRHLRDLTRYRKTLTVERTREAQRLEKELEDAGIKISSVASDILGASGRAMLTALIDGQDDAQVMAEMARGRMRSKIPALVQALTGNFGEHHSFLCRLHLTRIDELTATIEELSARIDAEMRPFVPQIERLVTIPGVKKTTAEVIIAETGADMTRFRTPANLASWAGVCPGHHESAGIQRSGKRRHGNRWLGGALGTAAMSVGRTREQIGRASCRERV

SEQ ID NO: 470862 - protein, 313 aa, unidentified
MDSTEIFIGIDISTKTLDVAQHGGEVSSFEHTPGNIAFLAQRLRGLQPRLVVLEATGGLEIALAAALVEAEIPVAVVNPRQVRDFARATGRLAKTDALDAKVIAHFAAGVRPPVRPLPDNAVRELHAMVLRRQQLTEMMTAEKNRLRTMPCPMDERVAAHIAWLEQELADLDRDLEDTIQKSPVWRAEDDLLQSTKGVGPVLSATLLANLPELGSLDRKQVAALVGVAPFNRDSGKFKGKRTVWGGRASVRAALYMSALSATRHNPAIRAFYQHLLAKGKLKKVALTACMHKLLIILNSMVKHKTYWEPNFCR

SEQ ID NO: 470863 - protein, 427 aa, unidentified
MARQRKGEKHMTKMSRQWFAGVDWASSKHDVTLTDDSGRIVGRRIFPHSGDGLAQMADWLLRETGVPPAAVHVAIETPHGPVVETLLERSFNVYSINPKQLDRFRDRFTVAGAKDDRRDADVLASSLRTDAKAFRALAPADPAIVELREWSRMADQHGRDLRRYMSRLREQLQRYFPAFLALGGDDDAAWKLALLELALTPAMAASLPRAKLAHLLKAHRVRCHDADAVRAIIRAPAPAVSEATIAAASAHVRALLKSIRLAAEQLKEAKATLDRLTDALAEPEENTSGQIVQRDAAILRSSPGIGRIILATLLAEAPQAVHERDYHALRCHGGIAPVTRQSGKRRYVVRRLACNRRLRNALSHWARLAIQQDARSRAKYEALRARGHSWARALRGVADRLLYVACATLRSGTLYDANHASEANKSA

SEQ ID NO: 470864 - protein, 328 aa, unidentified
MSDDVAALFVGIDVSKARLDCAALVGETVTQSKSFNNDSAGHERLLRWLQDGECQPGLIVVEATGGYESAVVAMLATAKLPIAVVNPRQARDFAKATGVLAKTDAVDARVLAQFGRAIRPQVRGPKSEELSLLEALLTRRRQLVEMITAETHRRGVATSPVIARQIDRHLRWLERQVQAADDDLNGMIGKSSLMQRKLDVLTSVPGVGRVTAVALLAQLPELGGLNERQLSALVGVCPFSRDSGTLRGRRVIWGGRARVRAALYMAALVASRHNPILRTFYRRLLNNGKAKKVALVACMHKLLLILNAMIKRDQMWQPAYVHPGAQVA

SEQ ID NO: 470865 - protein, 481 aa, unidentified
MFEFATIPFRRVPVLRDSGRRLVAGEKTMARKRKKEAKTNHAMLPVLRPDAAGIDIGATEIFVAVPANRAAENVRSFPTFTQDLYALADWLHQCGVKTVAMESTGVYWIPLFQILEDRGLEVCLVNARHVKNVPGRRTDVSDCQWLQFLHSVGLLRASYRPEQEMCAVRSLLRHRESLVQMAATHVHHMQKALDQMNLQVHHVISDITGQTGQAIIDAILAGERDPLVLAKLRNERIQATEAVIAKSLVGDYRAEHLFTLRQSLVAYRSYQSLIDDCDGEIRRSLEGFKPPRQQDASAEDNPQAHPKRTTNPGVLRSELRRVFGIDLTQIPGIRVGIAQTLFGEIGPDFTKFRSASAFASWMGLCPDNDISGGKVLWTGTRKVKCRAATALRMAAQSLHHSKSALGNFYRRMRAKLGAPKAITAAAHKLARIIFHLITTGQEFNDSHFAADQWRYQKRQEAKLRAKAKAMGFELIPLDQAG

SEQ ID NO: 470866 - protein, 461 aa, unidentified
MQVVYQRCCGLDIHKKLIVACLVLMSSQGVHKEIRTFSTMLADLYCLRDWLVASECQMVAMESTGVYWKPIWNVLEEELALMLVNAQHMKAVPGRKTDMKDAEWIAELVQHGLLRASFVPPRPQRELREVTRYRSKLVQERARLKSSIQKVLEDSNVKLASVATDITGVSGRAILRALLDGEDDPEQLAELARGRLRSKRGELAQAVQGTLRDHHRFLLTSQLRQLDFYDLQIAELDQEIARRLGVQTGPDDLEPQGGEPTSGQPASSADPVPDGGTDLAARSPQLSSDPARSQAEVIRILDEVTGINQRIAQIVVAELGIQLDQFPSEGHVVSWAGLCPQAKISAGKRLSTKTGKGNRWLKQALIEAAHGAARSKNTYLGAYYQRLKKRMGSKKAIVALAHRILVIIYHLLKEQQSYRELGPGHADEQAAESSKRWAIRRLEQLGFAVTLAPKDHEDEVA

SEQ ID NO: 470867 - protein, 379 aa, unidentified
MSSATAVTSIIYLGLDVHKDSVTIAVLPMDAAAPTRIDKYPNDFAKLRRVVERHAKDGEVRACYEASGAGYVLQRAMQGWGYHCDVIAPSLIPIKPGVQRKHDKYDAGQLARLYRAGELTAIRIPSEAEERGRDVVRCRETLQREVVKSRHYILKFLARRGFIYRGGVNWRPAHYTWLRQLTGTTSPLAAEDRLVFGEYFALLEYKLSRRDALDQHIAELALTPAYAPAVATLQCFRGLQVHSAMVLATELVDWRRFASPRQLMAYLGFVPREHSSGPRERRGSITKAGNSHCRHVLVQAAWAYRLHPKIGPALAVRQRGQSPAVTLHAWKAQQRLYTMYHRLSLRRGPQIAVVAVARELVGYLWAVMRDLDASTPAAA

SEQ ID NO: 470868 - protein, 379 aa, unidentified
MIENITHVALDDHKKRHQVAVLLPGMDREEVITWRIENTRAGIRKMVRKVLRIAPGDVRFCYEAGPNGYVLLRQISEFDRVSCVVVAPSKTPRRPGDRVKTDRRDAKKLVSLFRAGELKSIVPPLEEEEAVRDLCRCRKAAQKRVTASRHQVDKFLMRNGYVFRDGKNWTRRYREWLRSLKFDDWRRERTFQAYLFGIEQDEDRVKRLDLEIVRAAEEEPYRTLVGFVRCFRGLDTLSAMILTSELYAIGRFTTAPSLMGFVGMVPSEDTTGWDPHRGPITKAGNEHVRRILVEAAKHYRHPARVSKALTQRRKGQPDWVIAIADKAQTRLHQKYWRLVMGKGKHPNVAAIAVARELVGFIWAVLIQAATTANIEELVA

SEQ ID NO: 470869 - protein, 316 aa, unidentified
MDGTNQVSIGIDVAKATLDLHLLPSGQTQTLPNTKAGCEQLKQALPDPATCLIVLEATGGFEREVVAELTDAGYRVAVINPKRARDFAKALGMLAKTDRIDARVLALYAEKVQPAPSEKTPEKQVEIQQLVARRRQLIDLRTQESNRWDVTQAKAARKSIQAVINTLEAEIRGINKLIEALLESDDDWQNKIRLIQSVPGLGNVTAATVVADVPEIGKLNRQQISALIGLAPFNRDSGAMKGKRSIGGGRKSVRCVLYMAAMTAKRFNPVIKAFAARLTQHGKPHKVIITACMRKLLVILNSIIKSGRPWMAQTTS

SEQ ID NO: 470870 - protein, 352 aa, unidentified
MFYVGLDIHDKRIAICVLNEAGQVARRAQVRTIDEMMRILESLPDRFEVCYEASCGYGHYHDLLRPIAARVTVAHPGRLRLIFRSKDKNDRKDAERLAKLLYLGEAPAVHVPSADVRTWRELITCRGRVIAKRTRAKNSLRTLLRCAGVVPPGRPALWTKNGLEWLRRLELPTPSQQLRRDLLLEEIEALTRQVRRIEQQLNHEAGRSPAVACLRSIPGVGVRTAEAVAAFVDDPQRFGDAKAVGRYFGLVPSQDQSGDRNRLGHITREGPAVVRQLVAEASWQAVRRSPTIRAYFERIRRDDPQRKKIALVATAHYLVRVMWALLKDGATWEEDRTPVEEPNGATPVFANV

SEQ ID NO: 470871 - protein, 353 aa, unidentified
MFISVDTHKKTHTLVAIDDHGQPCGTRTVANSPQGWTIALRWMRDHGDVGCWGIENSGSLGKGFAQFLLAQGETDVREVSPQRTAQYRRRGRSQDKTDHADALAIARLLHAEGEQLPLVQADDESTELRLLSDHRDNLVAERTRLVNQLHAQMLQIDPCYADKSGSLTSRTGVRYCRELDRARANGVLQTRLLIVRQLTDQLLRLWEEIEKVEIALRQRIAATETPLLQLCGVGAIVAARLIGELGCTPRIRSAAALAALAGIAPVAVASGGRHGHRLNRGGNRQLNRVFHMIALSQLRHEPLAQAYYAKKRAEGKTARSALRCLKRRLVDVVYRLLPTSKPATLELSTKIAA

SEQ ID NO: 470872 - protein, 330 aa, unidentified
MKKWEFTLGVDVSKNTLDISCSELNEHVKIKNGTEGFTVFLKWCKHFKIDLKQSFLVMEFTGGYEYKLIQFCESRGILYTRIPGLAIKNSLGITRGKNDKVDSSRIAQYGEEKHKSLTPSRPLNPAIVSLKELLSFRKRLVRENAGYQATIKERIHMYGGNKKDIIVKKLEQKLKGNIKNIAAIEAEMLNIVAQDEKISINYSLITSIKGIGKINGLMTIAFTENFTSFTNPRSYAVYVGVVPFDHSSGISIKGRKRVSHIANKELKQELNQAARSAMEWDKEMRSYGEEKLKTKCYKIVLNNIKFKLILRMFAVVKREEIYVENYRTVA

SEQ ID NO: 470873 - protein, 344 aa, unidentified
MPYYVGLDVSQELTAICIVDEEGTVKYESMVPTEPDDIITYLNSTGESYGRIGLETGSFSHWLYHALYEAGFPVVCIDARHANSILKAQIAKTDKNDARGLAQMMRTGWFKATHVKSAESQKIRVLLNNRVCLNSKRIDIENQIRGTLKIFGRKIGNVTKARYEARIRDMIEDDMELKSYIEPLLLSREAMSQQVLVLEKQIRNMAKNDDVCRRLMTIPGVGPIIALLYKATVDNPYRFTRSNTLGVHLGLTPRKYASGEIDYDGHITKCGDRLMRTHLFEAAKVLLSRSGQWSSLKAWGLSIAKRSSMKKACVAVARKLAVLMHKMWVENTDFKYKTEDLATV

SEQ ID NO: 470874 - protein, 387 aa, unidentified
MKKDSIFEKDSRKKGKGTKKGDLSNQELVAKIEALQREREAALKLTIGLDLGDRSSCYCALDEKGEVIGRGVVVTEGKEMEQLFVQLPASVVALEVGGHSPWVSRLLEKVGHRVIVANARRVKLISQSSGKNDRLDAEFLGRLARADEKLLAPIRHRSETAQADLMGIRVRAELVELRTETVNAARGLVKSFGQRLAKCDADSLKESHAKDLEPAIRGHIERLLRVVGELTKEIAACDEELEKLSAERYGEETKRLKQVPMVGTITSLAYVLTLDDASRFGRSRDVGCYLGMRPKRDDSGQSQPELRITKEGDVYLRKLLVQCAQQILSRRGPDCDLKRWGEKIAAKGKKKAKRRAVVAVARKLGILLHRLWVSGQAYQPQRHKQAA

SEQ ID NO: 470875 - protein, 449 aa, unidentified
MREPEDVEDDEHEQVVARVAAIDVAKATGMVCTRVPHPARPGRRQTKVWEVDADTGSVMELADHLAGERIGKVTLESTSDYWRIWFYLLEAAGLDVQLVNSRDVANVPGRPKSDKLDCVWQAKLTERGMLRPSFVPPAEIRRLRDYTRLRTDLTRERTRHWSRLEKLLEDALIKVTAVASKTGSKSVRDMLEALIAGERDPEVLAGLARGKMRAKHDRLVEALTGRFDDHHGELARVLLDQIDSLTTHIDKITSRAGELIAAMPGAWGVDADGVTGPGAGLGSGAPVLPAVARLDEVTGIGAAAAQVIIAEVGLNMGVFPTPGHLVSWAKVSPRTIQSGAKNQSGRTGKGNPYLKGVLGEAAAAAGRTATFLGERYRRIARRRGKLRALVAVARSILVIVWHLLADPAARFRELGTGYYASHIDKNRKTRSHVRQLEALGYTVTLAQAA

SEQ ID NO: 470876 - protein, 358 aa, unidentified
MTAAVGRGVITAVQVVIGVDTHQDQNVAVAIDQQGVRLAECYVPATTHGYRDLERWSRKLGEVRAVGIEGTGSYGAGLARFMTGRGFTVIEVNRPDRSIRFQKGKSDPTDAEMAARAVLAGVANATPKSGEGETEIIRMLKNTKDSAVKARTQAVNQMKALVVTAPAKLRETLDGLTAAALAARCKSFRPGRLENPTAAAKYALQSLACRYLQLDREIRDLQAQLERLTRMTAPALVNIFGVGPDTAAALLISAGSNPQRIHSEAAFASLCGVSPVPASSGKTNRHRLNRGGDRQANAALYRIVLVRLSHDLRTREYMDRRTREGVSKAEVIRCLKRYVAREVFSALRHSSKVPCVAP

SEQ ID NO: 470877 - protein, 366 aa, unidentified
MKKTSTVRVNGNMIFKGHKLTIGLDLGDRWSFYCVLDEAGEIILEQKVATTPEAMKQTFEKIPRSLIALETGTHSPWVSRLLSELGHQVLVAHAQKVQLISKSNRKDDRHDARTLARLARIDPELLGPVRHRSAKAQIHLTVIRARAELVRARTALVNAARGLAKSYGERLRKCGTAQVSRELAAALSVELREALKPLLAEVESLNERIKEYDARMEKIATESYPQVALLKQVKGVGTQIALTYVLTLEDPHRFPKSREVGCFLGLRPGRRDSGESQPQMHISKEGDRYLRTMLVQGAHYILGPFGEDSDLRRWGLKLAARGGKNAKKRAVVAVARKLAVLLHRLWVTGEVYEPLRNSHKAMLAAA

SEQ ID NO: 470878 - protein, 406 aa, unidentified
MLFVGDDWTQDHHDVELMDSTGRKLAKARLPEGVEGITALHELIGHHLDQDAETAHVLVGIETDRGPWVRALTAAGYRIYAINPLQVARYRERRSVSGAKSDAADAHTLADMVRTDAHQLRPIAEDSPDAEAIKIVARAHKTLIWERTRHTQRLRHQLRDYFPAALDAFPDLAATDSLSLLTKAPDPVSAARLTVKQITAALKRARRRSIADKADAIQTALRGGQLGQAPIVTAAYAAAVRAQVAILTALAEQITMLQDQVETHFGRHPDAGIILSQPGLGMILGARVLAEFGDDPKRYASAKARKNYAGTSPITRQSGKKKTVLARYVHQDRLVDALSWQAFAALSASPGARAYYDRLRARGAGHAGALRQLANRLVGILHGCLASRTLYDETTAWSHHSQAAAA

SEQ ID NO: 470879 - protein, 342 aa, unidentified
MNSTKNVVGIDTAKQVFQVHWVDAETGEVFSKQIKRAKFLEHFANLAPSLIGMEACGGSQHWARRLQEMGHEVKLMPGKAVKAFAGGNKNDVADARAVWLAVQQPAVRSVAVKTEAQQAVLALHRMRQQLVKFRTMQSNGLRGLLTEYGEVMAIGKAALNRGMPDALARLAARLPAVLIDTLREQWDMLARLDEQIAKIEQRLLAWMKQDPASKTIAQIPGVGLLTATAAVATMGDASAFKSGREFAAWIGLVPAQTGSGGRIRLLGISKRGDTYLRTLLIHGARAVLTHSKEPGQWLQDIGKRRPPNVVTVALANKIARTIWALLAHDRSYNKGYVSVRPT

SEQ ID NO: 470880 - protein, 412 aa, unidentified
METVVERPSALDVHKEQVTACVRVPGKGRSREQHVAEFPTTVAGLLTLRDWLAAFGVEQVVMEATGVFWKPVWAILEDEFDCVLVNARHVKQVPGRKTDVKDAEWLCQLAEAGLLRASFVPPKPIRALRNLTRYRKTQIQERAREANRLHKALEDTGIKLDCVATDILGVSGRAMLDALVSGTTDPEILADLARGKLRKKIPALKEALEGRFDHLHAVWIGAILAHLDFLDEQISNLTEAIGEQIAPFEKAVELLCTIHGVQRRTAEVIIAEIGVDMSIFPTAKQLASWAGQCPGNDQSAGRRRSGKTRKGSKWLDWALEEAAMAAIRTNDSYLAAQYARLRPRRGHKKALGAVKHSILCICWHMLSTGELYTDLGGDYFRKRDPERITKRLIAQLESLGHKVTLEELPQAA

SEQ ID NO: 470881 - protein, 371 aa, unidentified
MPEFSKSLYVGLDVHKESIAVAYAPEDRGAEIVSLGAVGTRQCDIDKLIRKLQSKGAALVFVYEAGPCGYWLYRYLTRQGLSCHVVAPSLIPRKPGDRVKTDRRDAMALARAMRSGDLTSIYVPGVEDEAVRDLSRGREDTMRDLKATKHRLKAFLLRQDIRYEGRATWTAAHLRWLAEVVCPTATQQIVFQEYVRAVTEQTERLRRLETALHEAVKSWRLYPVVQAIQALRGIELTGAVILIAEVGDLTRFDTPRQLMSYLGLTPSEYSSGERRRQGGITKAGNGHARRALVEGAWAYRYPAKVSRHLQLRLEHQPVEIQAISWKAQVRLCKRYRHLLARGKHVNQVVVAIAREMAAFAWAIARTVPVAA

SEQ ID NO: 470882 - protein, 323 aa, unidentified
MNKGIKYFGIDISHLVFDVTDSDGNYYQFKNNVSGFKKFTKLLSSDSHCVMEATGYYHYQLAYYLLESGMKVSVENPLAVKRFIQMKLSKIKTDKSDSKLICEYAKQVELKLWQGNSKHQIECLQMIRLLSVYTKQSTMLKNKLHGEAVLGNPSKVVVASLKRSLKQVQKELETLEVKLLILVKQVHQDLLTRLETIPGIGRKTAIMLVVLTGGFDRFSSASELCSYAGLTPVIRQSGSSVKGRPRISKIGNQKLRNLLFMCSFNACKYNKACRDLYERIVAKGKSKKLALIAVCNKLLKQAFAIAKSGLIYDDTYRSTLVKN

SEQ ID NO: 470883 - protein, 372 aa, unidentified
MNYNTVYVGMDVHKESFTLCSMTIEDEKASHYQKTEADYKKVLKYLEFLRTIYGGNAKFICGYEAGCLGFTLYHQLTSQHVECIILAPTTMLEQRSKKRIKTDKRDAEIIAKCLAQHNYSPVHIPTSTDEQIKEFLRMRDDHKLALKKIKQQILAFCLRHNCRYDGNSHWTAAHLCWLKSLQPEALYKEPLDEYLLTYTTLNDKIERFDKRIEELASKDEYKESVQKLRCFIGVRTHTALSVLVEVGDFNRFASAKNFASYLGLVPGENTSSDDRNLLGITKAGNRHIRLLLTEAAQSYARSQIGYKSKDLKARQSVNSAQVIGYADKANERLRRRYYKMVLGHSKKHNVAKVAVARELACFMWGMMTEHIS

SEQ ID NO: 470884 - protein, 340 aa, unidentified
MNNLNTIAIDLAKNVFQVGLFSPQHIMMSNKQFSRQKLTSFMAKQEKAIVVMEACYSSHYWARLFMKMGHIVHLLPAQHVKPFVRGNKNDRNDSIAIAEASWRPNIKFVPLKSIEQQDIQALHRIRDKLISRRTSIINQTRGLLSEYGVVIPQGLKSFTQHISALIDPEDERITVRMKQQLRAVKEEYDQLSRRSKAIETELKQYAQQNPLCQRLMTLPGVGVLNATALYAAIGNGSQFENPRALSVWLGVTPKQYASGEKSFYGGITKRGNHYLRKQLIHGARSVMHRIKAKDDKLSVWVKQLVERRGKNKAAVALANRLARLAWILLHRNENYHSVAS

SEQ ID NO: 470885 - protein, 384 aa, unidentified
MPRPMKELTEVEHHTATLFASLELSQTSWLVTSLSPGSVTMSKHSISAGDGAGLLGLLARMRVKAESVAGVPVEIVVIQEAGLDGFWVHRLLEANRIKSHVVDAASISVPRRRRRAKTDAIDGETLLRTLRAWTRGEPRVCAMVAPPSPEQEDQRRISRERAILLRERVRHVNRIKGLLSSQGITDFEPLHKDRRIRLDALRTGDGRPLPPRLKAELLREIELIELLLLQIAEVETERDSAAEFGTAQNPSPIALLTRLRGIGSQIASVLYFEGLYRHFGNRREVAAYAGLAPTPWRSGTIDREQGISKAGNPRLRHIMVELAWLWVRHQPDSALARGFRARVGTETGRVRRIAIVALARKLLIALWRHVNLGEVPEGAVLKSA

SEQ ID NO: 470886 - protein, 320 aa, unidentified
MENIALIGIDLGKNSFHIHCQDHRGKAVYRKKFTRPKLIEFLATCPATTIAMEACGGSHFMARKLAELGHFPKLISPQFVRPFVKSNKNDFVDAEAICEAASRPSMRFVQPRTESQQAMRALHRVRESLVQDKVKTTNQMHAFLLEFGISVPRGAAVISRLSTLLEDSSLPLYLSQLLLKLQQHYHYLVEQIKDLESQLKRKLDEDEVGQRLLSIPCVGTLTASTISTEIGDGKQYASSRDFAAATGLVPRQYSTGGRTTLLGISKRATKRSELCWFSVPGYSYKNWNTSLASWPTGSGSCCVGKATLSSPVLWQTSWPE

SEQ ID NO: 470887 - protein, 391 aa, unidentified
MICVGIDVAKDKHDCFILSSEGEVLADVFTIPNNAEGFDTLLQTIRSCARPVDKIKVGLEATGHYSYNILGFLLNKGLHTFVINPLQTNLYRKSLSLRKTKTDRVDARTIATMLMSDLDLKSYTDTSYHNEELKSLTRYRFDIVQKRAKLKQSISRLVTILFPELEKLVPTLHIPSVYALLSEFPGAHQIASAHLTHLKTMLYDASRGHYGREKAIEIRDAARNSIGSRMPAKSLELKHTIQLIRELDAEIEEIEIEINSIMDEIHSPITTIPGIGTRMGAMILAEVGDFSNFASADKILAYAGMSPSTYQSGQLTNCYSHMEKRGSRYLRYAIFNATKYVCIHDPTFATYLARKRAEGKHYNVAISHAAKKLVRLIYAMERSGQPYRPTA

SEQ ID NO: 470888 - protein, 350 aa, unidentified
MMVIGTDPHKAEHTCAAVDAATGELRSSETVGASGAGHQAALAWGRALDCERVWAIEDCRHVSGRLERFFVARGERVVRVAPKLMAGQRRSSRQAGKSDPIDATAVARAALREGVASLPAAELDQRALEIKLLLDHREDLVRERTAIQGRLRWHLHDMWGADGVPTGGLDRAKWLDRLARRLARCEQTVRVRICREQVTRLRQLARRCRELEAEIGVLVAAYSPALLELKGCGALSAAKIVAETAGVKRFATDARFARHAGIAPIPASSGQNQRQRLHRGGNRQLNCAVHRIAVTQGRIHPPAIDYLARKQAEGKSRIEALRCLKRHLARTIWRTMTTNANAPAPTLALT

SEQ ID NO: 470889 - protein, 401 aa, unidentified
MKRLSGGIDVGSESHHITILDEEDNILYNQKVAHKINEFTESIKKFKKIEKKERGKISFALEGKNGYSAPFDRLLINQGFTLYNVDNLKLKRFREAFAGEWRDDQRDSLMLSKMLKLKEHINSKREKVFIKIEQPSLVTESLKLLSRHQQTLINEKVRFTNRLGKKLLEVCPQILELGKLKNKKIIAILAKYPDFSKYKRITLKSLLKIRGIGKKGAFFLLKRLNNIEYMPGLTDIYKTIILSYAKRISELKKEIEDIDKSLDEIGEKNKSVNHLKTIPGVATKLASRLIGEIGDINRFPSEKQLAIYCGVACVDNNSGKVTKAKAVYKANKICKQTLITMAGCSIRFSFQCKDYYLKKRAEGKTHNHALRCLARQLIKVIYKMLTEGRDYMVRKELRKVA

SEQ ID NO: 470890 - protein, 413 aa, unidentified
MLAVVVADVEVEGEYEFERCRFSTSPEHLRLLAEWLIEKQVEEVVMESTAQYWKPVWGALERYWTPTCKEREGTGPMSGALHRAQALSNRGRRGRKNDFRDAERLVKRLVAQELTLSFVPDTEQRLWRTVMRGKCQLTRNHVRLQNRLEALLEEAHIKLSSVVSDLLGVSARRMLKALAEGETNPTALATLADKQLRATPAQLCDALGACTELNPVYRRLLKMALEELQLIEPQIGKLDQEMASLLSQHQDAVRRLAEIPGLGPDSAQQIIAEVGASAATFPTAKNLSSWVGVCSGDEESAGVNPNHRSPKGSRHMRRILNQAANAAVMHKGSIFEMVYRRLVPRLGHNQTIGAIAHRLCRLIWLILHQGVGYEERGPAVSQRSKQRRTAKMIRELRSLGYRIEPISVQASNA

SEQ ID NO: 470891 - protein, 401 aa, unidentified
MNAVGIDVSKGKSMVCVMRPFGEVVLKPFEVLHTAQNLNDLAGKLKALDGETRVVLEATGNYHKPVAFVLHDAGLFVSVVNPVLIHDYDNNSLRRVKTDRKDAVKIANYTLDKWRWLRQYLPEDATRLALKNCYRQYQQAVAIRTMLKNNLISSLDLTFPGANKFFTSPAKSNRHEKWIDFIRDFWHSECVSCLSPDTFSRKYLKLCQKHGYYFTRSKSDEIYACAVSAASLPKSATSKLLIQQQVAQLKAVSQSVAAFQQEMLRLSRQLPEFDTVMEMYGVGPSLGPQLMAEIGDVRRFSSKKSLIAFAGIEPQLNDSGKVVGNDKGISKVGSAVLRRTLFLIMTVILQNQPQNEPVYCFMDKKRSEGKLYKVYMIASANKFLRIYYARVKAVIDSTSSN

SEQ ID NO: 470892 - protein, 364 aa, unidentified
MDDPRQTHEQVTLGVDTHAEVHVAAALDERGRLLGTCTIPTTAAGFTELLRWTSQYGELSRVGMEGTGSYGAGLARWLRARDVVVIEVDRPDRRTRRRRGKSDSVDAEAAARAVLAGTATAQPKAGTGAMEMVRTLRVARQSALKARTQAANELHALVVTAPDAMRAELRRLKIPQLVATAAAFRRSAELTTPTAATKLALKSIATRYQHLAAEIEALDKHLDQLVAVAAPALVAIKGVGTDIASTLLTIAGDNPERLASEGAFAHLVGVAPIEASSGKITRYRLNRGGDRQGNRALYLLAVGRMGWDPATKAYVARRTAEGRTKPEIIRCLKRYIARELYPVLLVMTPEARPGRSPKSSLQTA

SEQ ID NO: 470893 - protein, 342 aa, unidentified
MKFYCGIDLSARDCHVCVIDQQLKVLVQQKLRNELPKVCQLLEPYKASLKIVVESTFNWYWLIDGLQAAGFEVVLAHTLGLYLITGAKVKTDRRDAYSLAKLLLAGVVPAAYIYPVETRPVRDLLRRRTRLVQVRAGEYGSLRRLLLRQGILSSKQQEIKTATETELEQWFEHPLVRLHASQELQRIELYSQQIAELEKTILALAQTEQSYELLLQLPGVGQTIALTILYEVGELTRFANVKVFSSYCRVVPGIAQSGNVTRRGRASKQGNHYLKAAFSQAAVHAVRCYPKVRRCYERQLKRHQGRGRQMICYNIIAHKLAQAAFHVLKEQTEYREELLFGR

SEQ ID NO: 470894 - protein, 313 aa, unidentified
MNNKEQVVGIDVSKAALDVAVLPSGEVLQFANDANGIEELAKKLAAVDLVVMEATGGYETAVATALVAAGLRVAVVNPRQIRDFAKATGRLAKNDRIDAQVIAAFGQAIEPEIVRLPDEDARELEALLVRRRQLVAMRVQEVNRLALMQGAMRKRIKAHIDWLEKEIDKLNVDLTAGLRSSPAWRAKDELLRSFKGVGPITSSTLVVALPELGQLDRRAIAALVGLAPFNRDSGVMRGRRSIYGGRSQVRTLLYMAATTAIRSNPVIRAFYERLKSRGKPHKVAMVACMRKMLTILNAMVRQSTPWTPETNPV

SEQ ID NO: 470895 - protein, 349 aa, unidentified
MSMVPDQLEFVIGVDTHKSRHTVAVVDHLGGLIASTSVAATAAAFGWLMEWLKERAPGSRVWSVEGSSGYGAGLTGYLQERGEMVYEADRPKRPPRQRGAKSDEIDAIRAARELLSRQHLGEPKMRGHREAVRLLLVSRKLAVDAATKHLILIKALLVTLPLELREQLEGLSDGRLVSRCRGLRTRKGSTPEMQFSVRTLRTIAARISGLKRDAAADERELAKLIGELAPQLLRQPGISTVLAAEIYNAWSHPGRIRSEAAFASLAGVAPIPASSGQVVRHRLNRSGDRRLNRALHIVVLSRLRYHPQTREYVERRAAEGKTKAEVRRCLKRYVARQVFRLLETDGALT

SEQ ID NO: 470896 - protein, 385 aa, unidentified
MTYYAGIDVSLESANVCVIDAAGKTIREGKVASEPEALREWLEAVGSSVERVGLEAGPLSQWLYAGLRQGGIAAELLETRHVRRAFEIMPVKTDRKDARGIADLMRLGWFRPVHCKSIDAQETRAALTARKLVQKQVHEVESSLRGILRGFGLKVGKTTPTRFEARVKELVAGNSRLEGIAQSLLAARAVLRREFNGFERQLRGMARTDARARLLMSTPGVGTIVALTYASAIDDPSRFKSSKTVGAHFGLTPKRYQSGETDYTGRISKLGDASVRAALYEAAHVILTKPLKGCTALKSWAMRFASRAGISKARSRSRASSPSSCIGCSPMARPSTQPSAVLGTIKDAARRLRRWPEAILDSACARRSRELRSGRGNVDPSRTRE

SEQ ID NO: 470897 - protein, 384 aa, unidentified
MTQHNILFIGLDTHKVFSEVAYIEDQRGSKPVHHGRISSTKTAITKLVRQFQSKYPHATLHFVYEAGPCGYWIYRLLTKLGHCCYVVAPSLILKKPGDKIKTDKRDALKLAKLLKSEDLTPIYVPEAEDEAIRDLSRARETAMKDLNDAKYQLKALLLRNNIGYKGTANWSLKHLRWLSEIILPHPAQHIVLQEYLQTINERLRREKRLVNELTHQVQQWRYYPVVKAIQALRGVALLVATGVIAELGDLSRFDHPRKLMSYLGLVPTEHSSGDSRRLGRITKCGNGRARRLLVEGAHAYRYPARVSTDLQKRLEGLPKPIVDIAWKAQLRLCRRYQRLMHKGKIRNVVVTAIAREMIAYIWAISREVVLPAVDPKSRMVRIPA

SEQ ID NO: 470898 - protein, 375 aa, unidentified
MKEKVRFLGLDVHAETIAVAVAEPEGEVRSLGTIPNRAESIRKLIKKLGPAARLRACYEAGPTGYVLYWQLTELGVECEVVAPTLVPVKAGDRVKTDRRDAEKLARCYRSGDLTAVWVPDEGSEALRDLVRAREAAKQDQTRARHRLSKFLLRSGQRPPTGVRPWTRPYLIWVAQLRFTQIAQESTRQDYLHEVEHMRGRVERLEQAIMEAVKLASPALQQVINDLQALRGIADISAVTIASELGQVSRFESARQLMGYCGVVPSEDSSGKRTRRGAITKTGNAHLRRIVVEAAWSYRRPPGIWYGLRRRQESISEEAKEIAWKAQHRLHKRYVKLGAAGKDQRKIVTAVARELLGFIWAIGTRAETISRQQVVA

SEQ ID NO: 470899 - protein, 365 aa, unidentified
MHYANNTELSSHEGTRGQFNGRSATIKLGIDVHQEFYVVVCQEGGSNPKPPQRFRKAAFLGWAARLKEKHGGAQIHAVYEACGFGFGLQRQLSALGVECQVVCPQKLDERNQRVKTDGRDARTLCLKLSRFVEGNKEELAVVRVPSEAEEQARALHRQREQLVKARKQLEAQGRSLLVNHGFEPVNNWWKRRTFTALALPEWMKELLGNSQPILLALEEKIRALTLQLQAAAAPAQPRGLGALTSVVIDREVAHWERFRNRRQIGSYTGLCPGEHSSGNTRLQSCVTKHGNPRLRAALVELAWRLVRFQPDYKPVVKWRKVLAKGALASGAARKKAIVAVARQLAVDLWRIRTGRLRPEALGLKN

SEQ ID NO: 470900 - protein, 356 aa, unidentified
MNGLKHQKEKRSMDHFAGLDVSVKETSVCIVDDTGKIVREVKVASEPGALLAVLKNPAYHFKRIGLEAGPLSQWLSGALAEAELPVVCVETRHMQAVLKAQINKTDRNDARGIAQMIRVGLYRPVHVKTLRSQKLRMLLTHRKLLQSKAIAIENDLRGTLRNFGLKVGMVGTVKFEARIRELVENQPDLAELVEPLLVVRRALREQFVILHRRLLAIVRDDEVCRRLITTPGVGPVVALTYRATVDVPARFRKSKSVGAAFGLTCSKYQSGEIDRSGRISRCGDEMMRVMLYEAAQSMLRSKKWSWLKAWAMQIARRRGMKKAIVALARRLAVIMHRIWVDGTEFRWTREQAPAAA

SEQ ID NO: 470901 - protein, 322 aa, unidentified
MQKNYFGIDVDSENLVVAYTSSSKKVSIKNFKNTLKGITSLLKWARTYSDPHLILEATGTYSKRLFHTAVAEDIAVSQLTPSQGRSIGVLLKKKNKTDEEDARSLLTYGQLMSPLSSTAPSEKQEQVRQLISYISYLQKEKTKISNKLHALSFEHFPCAYVIKELEQAQDLKDLKLEEALEKLKKLKGKELEPAIKLAETVTGIGYKTAMYLMLLTGGLDNFTTAAQLVCFVGVCPTRFESGKSTRKSSHISKKGSKILRALLYMCARSARIHNPGCKDLYDRLRAKGKCHKAAMVAVGHKLLRQVFAVVKNKVAFDKKLAL

SEQ ID NO: 470902 - protein, 350 aa, unidentified
MKTKQSIIIGIDTHKSTHVAVAIDMQGARLGALSIPANSKGYLELERWSCGLGDVSAFGIEGTGSYGAGLSRSLLSQGHNVVEVTRPNRQLRYTHGKTDSLDAEGAARSVLSGQATSRPKTQTGSSEMIRHLKIARDTAVKSRSQAMVTLKTLIINAPADLREVLDQVKGRIALIRHIAAFRPGEIHNTLASAKAAMRALAKRWLMLHEEILGHDKELGRLVTKRAPDLMKSHGIATLTIAEMLILVGDDPTRIRSEAAFAKLCGVCPIPASSGKTQRFRLNRGGNRQANAALYRVAIVRMRSHEPTLAYVKKRTKEGKSKSEIIRCLKRYIVREIYSQLCVPRSMQNAA

SEQ ID NO: 470903 - protein, 428 aa, unidentified
MNEVDSIRLKQFRQLRKEIRGSKDYLIVGIDVAKDRHHAFFGTATGKTLLKRLVFENTIEGFERLLIQTEALKVQHGLTKTVFGLEPTATYHKPLGEFLIKCAHMVVLVSGVAVKRNRELLDGRWDKHDTKDSANIADLISQGKCLFFEYPPLQLRELRSLLSLKRRLKKGEHGLRVRIRNHLLAAYFPEMDRHFARSGSEGLAIVKWCLNPSVIAGLEYEHFAHLVAPGKRARGQQERLKAIWRKAPDSIGCDAGEALEFEGKVVVEELERMREALRATTSKIEDVCLQFPEYRYLLTIPGFGPDVSSRVLGALGNPFRFNTREQVVKVAGYDLSADRSGKRSDAARPVVSKKGKADLRYALYQAALIASSRNRDFTVYYTDKLRGREKEKGITTKMRVKLAAKLLIVAWTLMKKKESFNPDYLTID

SEQ ID NO: 470904 - protein, 346 aa, unidentified
MMIIGCDFHPSWQQIAWLDTETGETGEQKLVHASGDAKTFYQKFPAPALIGMEATGNSQWFLELVQDLGHEIWVGDAAQIRASYVRKQKTDKRDAAHILKLVVEGRFPRLWTPDGEQRDLRQLVLHRHKLVEIRSRVKNELQHLSLNKGMQRKAKLWSQAGQKLLRELPLRPWTACRREDLLGLLAMLDQQIGKLDAAVQLAADEHPQARLLMTQPGVGPNTALAYVLTLGDVTRFPRGKQVASYLGLIPREESSGGRQKLGAISKQGNRLLRSLLVEAAQIAVRFDPGFRQQYLHRCHQKPKAVAKVAAARKLAVRLYWMLRTQKPYPEIVRIESSPRVPLVGAS

SEQ ID NO: 470905 - protein, 470 aa, unidentified
MGKSTKKMGGRSKRKSKLDVTKLPKHLEQINLMAAGIDIGSRSHFVAIPEGCAEEPVREFKSFTADLHELANWLKDCGIETVAMESTGVYWIPLYELLDSKGFDVKLVDARKVKNVSGRKTDVLDCQWLQQLHTYGLLGGAFRPEEETCVLRAYLRQRSMLIESASKHIQHIQKALTQMNIQLHNVLSDVTGVTGLKIIRAIVSGERDPKKLAGYRHKNCKNPLEIIEKSLTGSYREEHIFALTQAVELYDIYKEKIADCEQVIETQLLTLESRSVDGTTETTNSQEKKSKSHCKNKFSFDVKSHLKRICGVDLTEIPGIEASSALKIISEIGLDVSHWKSSKQFASWLGLCPGNKVSGGKRLSGRSKRCPNNTASILRMSASTLHGSDSSLGAYFRRLKSRLGAPKATTAAAHKLSTIIYNMLKCGTTYIETGADYYEKQYHKRIVKNLKRRAEKLGYELIKTPDFSTA

SEQ ID NO: 470906 - protein, 418 aa, unidentified
MKKHSKSLQRSEPTLKRTKARGPVQRDAKEVLAEVLGKLTGKLDAPAVSTSAKENRRGNTVGPNRDRLTVGVDLGDRWSQYCILGLEGETLAEGQLRTTQEDVREFFQALTVARVVIEVGTHSAWMQEVITEWGHEVLVANPRLMEGSKRRKRKSDRIDANKLARLGRVDPQSLYPIRHRSREVRQDLVVLRARDALVSVRTELINTTRGLVKSMGTRLPRCSSPSFADKVKDAIPVEVGEALLPLVQLTETVNDCIARYDQKIEELGQKKYGHTTLLRQVKGVGPITSLAYVLTLENPQRFSSSREVGPYLGLVPKQEDSGDSQPQLGISKTGDRMLRRLLVGSSQYMLGAFGPDTDLRRYGLRLCERGGKNAKKRAVVAVARKLAVLLHHLWVTGDVYEPLHHTGAETRTAQATAA

SEQ ID NO: 470907 - protein, 317 aa, unidentified
MAMKVQAVILGADVSKEWLDFNRYGEESVARIDNQRASIDAFLKGYPHAALAVEATNTYHELLVERARRAGWVVYLVSGYQLKHYAVSIKQRMRTDAIDARLIARYLAHEIDALKPYTPKSPQVQRLWQLLKRRAVLTQSRQQLRQSLVGVPELKNAQRPLAATYRRVIALIDRRLAVLAQELGWHADLARLMSLPGVGRLTALALLVAYRAGTFIHHDPFVAYLGLDVRAKDSGKFKGQRKLTKHGDEEYRRLLFCAAMTAARTEPYFTDRYQTLTARGLPTTAAFVVIARKLARLAFWLLRNQSTFQPERLQPQS

SEQ ID NO: 470908 - protein, 385 aa, unidentified
MNSAAFIPMEYDIFAGLDVDKRRIAVTFTDHQGGMRSVVMLYMMNKLVNYVRKHFPDKKVAFAYEAGPTGYGLHDGLEAQAYRCVIASPAMIPQAPGQRVKTNRLDRRKLAESWRGGQLKPIHVPCGPYRELRHLTQLRDAFVSELVGMKQRIKSLLLVEGLEFPPAPAGSQWSGRVKQQLRQLPCALTVRFKLDQLLDSVEFTEKQVVKTTREIRRFCQTEPELAQCLHYLMSISGIGWIVGTQLLARIGDWRELKNVRQLAGFLGVVPTEHSTGEKPVRGSITHSGDPRLRSKLIQAAWSAIRQDGELREFYRSVCHTHPRHLAARVAIVAVARKLSVRIAVVLMQQRPYEVRKKVCLTPLTQEETAPQGTTRRQAETGEYLS

SEQ ID NO: 470909 - protein, 337 aa, unidentified
MSYLGIDLHTNSLTVCYRTQQGKERIRTFALKELDVFCKTLRKRDRVAVEATGNTRWFVEQIRTRVNKVIVVDPNKFEVITKSVNKTDKHDAKTLAYFLSKDMLPKARMKDAKSAQLHSLAETRDKLVKQRTALINKVHNVLNGHGIKLKKESLGTQKGLDTIWAWDWPIVVEVELRVLVEQIQHLNKAIKQLDDELSSRGQKLKGHANLSSIKGIGPKSATVLLSVIGNVKDFKSEHKLAAYFGIVPRVSNSNETCHHGRITKRGSKLGRTTLVQCTLIAKKYNPYLARFYERIKARRGSGKAIIATARKFLGIIYNTLVNGWLFEDFPNFVLAKS

SEQ ID NO: 470910 - protein, 399 aa, unidentified
MLAVGIDISKSKSVAAILNQDGSMHTSPFEFHHTQPELDAFIKYILNSKQSATILMENTGHYHYPVLKAFQEAGLPVCMVNAYQIKKFGDMDLRKAKTDKKDAVRIARYALEKSYSLVPYTSMEQKYEDLRFLARQYNQRMLTLKTNKVFLLNLLDETMPGITNILPLTTRTPETSLSVLFINRFKSYDRIKKMGKSRFLDAFEKIARKSRNRQTKTYGLAIYEAALRNITTRGENEYTLAAQDQCLELVCESQKAADSIILKMKTLAETLPEYAVLRSMAGVGDRLGPLILAEIGDIRRFHSGKALNAYAGNDAPPYQSGTFESHNRHISKRGNAALRKYCFEVMQTLKLTRPQDDPVYLFLLKKEQEGKPYNVAKMAGVNKFLRIYYARAMETLKQQ

SEQ ID NO: 470911 - protein, 403 aa, unidentified
MVFVGIDWAEAHHDVCLLDEQGKLLGKRRVSEGLEGVRRLHELLAEQAEEPEQVVVGIETDRGLLVQTLVAAGYQVYAINPLAVTRYRDRHTTSRAKSDSGDAKLLADLVRTDRRNHRPVAGDSEQAEVIEILARAHQNLIWTRKRHTNQLRSQLREFYPAALAAFDGDLAGMDAIAILERAPTPYQGRSVSRAQIVSALRKGGRERNLETKAAEIQACLRAPQIQPPPEVTQAYGRSVTALVRLLRHLNQELVSLEKELGDTFETHPDAEIYLSLPGLGNVLGARVLAEFGDDRTRFANPKARKNYAGTSPITRASGRSRVVVVRFVGNRRLVDACYLWAYAALRPSPGARRYYDALRARGQTHNQALRAVANRLVGILHGCLRHSQPYREEVAWPLMEAAA

SEQ ID NO: 470912 - protein, 329 aa, unidentified
MYHVGIDVSKVKLDICLLADGLDGKRKTKSLPNGISSAEAVINWLVMQKRDPKQARIVMEATGIYHEHLAYGLHREGLSVSVVNPCRIREFAKGMGILTKTDKVDAYVLACYSSLKQPQEWQPPSEEIRKLRALLQHRDVLLEDKLRTENRLNTLSSTQSTEEVMMSLSLMINHLKDELARIEALISKHVDNHPGLKDDLSLLTSISGVGPQTGLNMLVVLRGNTFESASQAAAYLGVVPIERRSGSSVRGKSRLSKTGPSKLRAKLYMAALTAISKNMHVKNQYERLLLKGKAKMQALGAAMRKLVHLCYGVLHTQQPYSQDFGMATE

SEQ ID NO: 470913 - protein, 393 aa, unidentified
MRKPEQQHKPLNDLSRSLTPFDPNRTLIGVIEMGKRSWLVAGMIPGVERQPLKKLAADENELLKLLERWRAEAEKAGHKIDRIAVAFETGRDGFWLARWLRARGIEAHVIHAASVAVSREHRRAKTDRLDTQLLMRAFLGWLRGERQHCKMAAIPTLAEEDAKRPHRERETLVGERTTIINRLKATLARLGVRSFNPKLVKAPERLEHVRTPEGEPIPRNTQAELLRDMQRLRLVREQIGQIEKARLEHLKRNPNTGPNLMVSVLARVIGVGIETADMLVQEVLSRNLRDRRAVARYGGVTGSPDESGSRSREKGLARSGNARVRRGMIQLAWRFLEFQKDSALAKWFRARTENAPRSRKKMIVALARKLLIALWHLVRDGVVPEGVVLRPAH

SEQ ID NO: 470914 - protein, 346 aa, unidentified
MNPLYVGIDVSSKTNVVYLMKPDGSKINNFSVDNSLDGSKKLVKIILSALENHSLDKVIIGLEATSIYGDNLVYFLREDCSLSKHLTKIHILNPKQVKKFKDAYNDLPKNDFVDSFVIADCLRFGRINKEVYLSDYRYAALKTLTRARFYAVQNLVKEKQRLINIIFKKYSSLTQDKVFSDIFGTTALAVYTEFDSVDTLVNMDLHELTKFIQKKGKNRFSDPDSVAKAIQKATRSSYRLPKTVNDSVNQVLSISINSIKSIEAQIKALEKAIAEQMDLIPNTLTSVNSIGPVYSVGIIAEIGDINLFDNQSALAKYAGLVWKQHQSGGFESENTHLIHSSNRILK

SEQ ID NO: 470915 - protein, 383 aa, unidentified
MASMTSPIPTAQPDRVVIGGIDTHKDIDVAALLDCAGMVLGTAEFPTTRAGYWQLLGWMGSAGHFGRVGVEGTGSYGAGICRQLSAAGVEVVEVNRPDRSQRRRRGKSDALDAAAAAEAARSRNRIAIPKSRDGQVEALRVLRLTRASAVKARTKALQLLQQLIVTAPEQLRDQVGELPGMGLIRCCAAWRPHSHDAADPTVATRIALKKLARRYLQLAEEISDSDTLLDGLVTDLAPQLIAVTGIGTDTAGQFLLTAGDNPERVHSEPAFAMLCGVAPLPASSGKTQRHRLNRGGDRQANRALHVIATTRKRCDHRTQAYLKKKIAEGHTRREATRSLKRLIAREVYYLLNPAPHTGRFLHPGQPAGAQTRSRWSPPRAERP

SEQ ID NO: 470916 - protein, 403 aa, unidentified
MIFVGIDWAEAHHDVCVLDEVGVVQAKGRVPDGVEGVARLHAMVADHAEDAAEVLVGIETDRGLLVGALVAAGYRVYAVNPFAVSRYRDRHGTSGAKSDPGDAKVLANLVRTDRHNHREVAGDSELAEAVKVLARAHQSLIWTRQRQVSALRGALREFYPAALRALPELGTVEACSILGMAPTPERGRRLTLAKVRRSLAASGRTRNLDRRAAEILEALLAPQLEAPPILSEAYGSVVGSLVVVIDGLLHQIARLETELAERFERHPDAEILRSLPGLGLVLGARVLAEFGDDPARYADPKARKNYAGTSPITRASGKRMVVLARVAHNRRLADACYLWAFASLNASPGARRYYDARRTAGKTHHQALRALANRLVGIFHGRLQHRQLHREEVAWPTGLDAVA

SEQ ID NO: 470917 - protein, 428 aa, unidentified
MKYTQNEKILQVTEKTLVVGVDIAKEIHVGRAFDFRGVELGKRIEFENRKEGMGKFLDWANKIMKAHGKENVIVGIEPTGHYWLCFEQYLRENGIKVVLVNPFHVKRSKELDDNTPTKSDIKDPKTIAMLVKDGRYTEPNIPAGIYAEMRVAMNIYERLQKQLNVLKNQIINWLDIYFPEFLEVFSDWEGKVALLTLKEMPLPCDVVEKGVEGIIECWRDKVDKRAISRKRAMELVEAAKRSIGKKEGRKLARQEMRYLLEEYELLRKQLEGIEDEMAKLLKDVPNGEKLLEIKGVGVKTAVGFISEVGDIMRYEDAKQIQKLAGLNIVENSSGKHKGQTCISKRGRGRLRSSLFKAMITIVAKNEEFKKLHMYYTMRQNNPLKKKQSLIALCCKLIRIFYAILKKGIKYDGNKMLSDIKREALATTA

SEQ ID NO: 470918 - protein, 452 aa, unidentified
MEEPQEVQDEEYERVWERVAAIDVAKASGVVCTRVPDEARPGRRRTKVWTVTATLSAVTELADHLRCHQIEVVTLESTSDYWRIWWVVLEAAGLTVQLVNARSVKNVPGRAKTDKKDAVWLAKLTERGMLRPSFVPPYDIRRLREFTRLRAGLVHERTRYWARLEKLLERALIKISAVVSSLDTLSARAMIEALIAGQRNPRALADLAVGRLRPKRAALAEALEGRFEPHHGELARILLDQIDALTGQIDQLTARITELIAAIPAAQGVDADGATGPGAGIGPGAPVLPAVMRLDEITGCGVIAAQAIIAEIGLDMAVFGTPGRLVSWAKRCPQTRQSGTKTSTGKAGKGNPYLNGVLGEIAASAGRTDTFLGERYRRLARRRGKRKAIVAVARSILVIIFHLLADPEARFRDLGPGYYDTHIDRQRKIRNHIRQLEALGLDVTTVPRHDAA

SEQ ID NO: 470919 - protein, 397 aa, unidentified
MKADSLHYEAVRIGSNGAPRMQKPSTIDIDPVIYLAIELSASTWLVVSKIPTSEKTGLHRMEAGNSQALIALIADLRKKVSAKLGVESAVMSCFEAGRDGFWLHRLLSEHGVINHEVEPTSILVNRRARRAKTDRLDAQGLLRILTAHAKGDHDVCSVVHVPTIEEEDAKRQHREREHLVQERVRIENRIAALLTTQGVRKRPSLRSWQKDMEEMRTGDGHPIPPLLRAEVNRLRRRLVMTLEMIREVEAEREQALQKQDDTASRTIQALRQLRGIGDNFAAVLTREVFYRSFENRRQIASYLGLTPTPFQSGGMDRDRRISRAGNARARKTLIQLAWLWLRYQPDSSLACWFRERVGNLQGRTRRIAIVAMARKLLIAIWRYATDGIVPEGAQISI

SEQ ID NO: 470920 - protein, 341 aa, unidentified
MNLSKTVVGVDTAKRVFQLHWIEQETGEIVSLQLKREKFLEHFANRASCLIGMEACGGSQHWARKLAAMGHQIKLMPAKAVRPFVGGNKSDVHDARAIWTAVQQPGVKAVAVKTEEQQAILALHRMRQQLVKFRTAQINGLRGLLTEYGEVMPQGKAGVKKGIAEALQRLSDRLPAMVIDTLREQWARIGMLDEQIGEIERRLKVWLKEDTASKRIAEIPGVGLLTATAAVATMGDAKAFKSGREFAAWLGLVPRQTGTGGRIRLLGISKRGDTYLRTLLIHGARSVLTHTKEPAPWITELRQRRPLNVAVVALANKMARTIWALLAHERTYQKGFVSQPA

SEQ ID NO: 470921 - protein, 406 aa, unidentified
MYNAVGIDVSKGKSTVAVLQPGGTVIRKPFDVSHTSQNLNELADYLSSLDGTTKIVMECTGRYHEPMVKALSEAGLFVSIVNPHLIKNFGNNSLRKVKSDPADARKIARYTLDNWTELRQYSGMDNTRTQLKTLNSQFSFFMKQKVAAKANLIALLDNTYPGVNKLFDSPTREDGSEKWVDYAYSFWHVDCVRKIGLKTFTERYKAFCKKHHYIFQQDKPEKLFNASKELVAVFPKEKTYKLLIQQSIQQSNLASEHVERLRREMNELASTLPEYSTVMGIYGVGKTYGPQLIAEIGDVSRFTHREALTAFAGVDPGVDEPGQHKSKSNRASKVGSARLRKTLFQIMTTQLQNAPEDDSVYRFLDKKRVQGKPYYAYMTAAANKFLRIYYGRVKEYLASLEGTKES

SEQ ID NO: 470922 - protein, 402 aa, unidentified
MNCVGIDVSKGKSMIAVMRPFGEVVVSPFEVRHTASELSELARLLKSLDGETRVVMESTGNYHAPVAWLLHDAGLYVSVVNAMLVHDYGNNSLRRAKTDKKDAVKLANYGLDHWLTLPRYVPEEDTRLMLKTCYRQYQQYSKVQTMLKNNLISLLDTTFPDANRLFTSPPRADGSEKWVDFVATFWHCECVCGRSEKAFTTQYQKWCRKHGYNFSQDKALDIYASACGRFGVMPKTNTAKLLVEQAISQLQTTSAALAALKQEMQSLAASLPEYPVVMEMFGVGPTLGPQLIAEIGDVRRFHSKKALVAFAGIDAPPYQSGQMDVRSRSISKRGSASLRRTLFLVMSVILQRAPMDEPVYQFMNKKRSEGKPYRVYMMASANKFLRIYYASVKAYLDSLEHD

SEQ ID NO: 470923 - protein, 388 aa, unidentified
MMLIGIDPHKSTHTATAVDPGTNRDQASIRIDGTLQEYQRMLDRARQWPQRRWAVENARSLGHHLTSWLLARGEQVVDVQPSATARVRQLSRGAGRKNDRIDAAAAACVAAVQGDARPVQPETSTDALALLDERRSNLAQARVRAVNQLHALLRALLPGGAPRDLSAAKAEQLLETVVPVGPAETTRHALAADLITEVRAWDVKLKDNAKAMASLVAESGSRLTDTPGIAAVTAARLLGRTGNPTRFPTACAFAQYAGTAPIEIASAGRAHHRLSRRGDRQLNAALHTVAITQIRMPGTRGHAYFQAKIAEGKTPREAQRCLKRRLADHVWRTMVGDERRRTRTTSPGGQPGATTASSAVGPTPTADSSDKSLPGPAETEPTPPHQTP

SEQ ID NO: 470924 - protein, 323 aa, unidentified
MDKNTNYFGIDISKDVFDVMNIKDQHFEFQNSNKGFRAFKKILTPDSICVMEATGYYHLKLAYFLLESNIKISIVNPLSIKRFVQMKLSKIKTDKADARMIRLYAQNNELRFWKGQSENQIETLQISRLLDIYAKQSTALKNKIHGEQTLGNPSQIVVRSLKRSLKLIKKEQVLLEQKLLELVKVDNQQLLSNLESIPGLGRKTATILIVLTDGFSRFDSAAALCSYCGITPIIRKSGTSVNGRPRISKMGNQKLRNLLFMCSFSACKPNKACNDIYNRITNKGKSKKLALMAVSNKLIKQAFAIAKSGLPYDEKFKPVLSHD

SEQ ID NO: 470925 - protein, 316 aa, unidentified
MSNQKLCCGIDVSQNSLDVAYQNNLGDIFHIKVDNNNGGFKKILEHTGPSYHFVMEATGVYYVRLAFFLHAKGCDLSVVNALSIKRYIQMQLERNKSDKKDAQWICRFAIDQTPSLWEMPDSAYFESKQLYNTIRQYSEEIKRFNNQLHSLSILPVQNKAAIRSLQKMKVCFEKEIKLLEEKLEALLLAWKPEQVKSVSSIKAIGRRATAMLIIYTQGFKYTENHRQLISFAGLSPREHSSGTSINGRPKICKKGGKPIRDVLYMCAMSAIKTNTACKALYERLRSNGCVSIEVSEKMAYIGTAVVGIFENRQDLN

SEQ ID NO: 470926 - protein, 375 aa, unidentified
MKKNRSGCKSPKARMKATRATNVSVGIDLGDKTSRYCMLDENGEVLREASVATTKKAMTQVFATMKPRRVAIEVGTHSPWVSRLLQSCGHEVIVANARQVQLISKSSRKNDRMDAQTLARLARVDPRLLRPIQHRSEQAQGHLRVIRVRAALVEARTMLVNAARGLTKATGERLPSCDADQMGVELMESLPAGLQNSLRPLLEEVGSLTEKIQALDQQVEQIARTDYPETDLLRQVSGVGPLIALTFVLTVEDRERFQKSRDVGCYLGLRPRQSDSGESEPQLRITKEGDPYLRKLLVQGAHCIMGRRGPDTDLKRWGLKLSARGGKNAKKRAVVAVARKLAILLHRLWVTAEVYEPLRNSQSGPPVKKSRKAVA

SEQ ID NO: 470927 - protein, 343 aa, unidentified
MDYFAGLDLSVKETSVCIVDDTGKIVREARVASEPEALLQVLTNAIYRFKRIGLEAGPLSQWLFSALAEAGLPVICVETRHMRAVLKAQINKTDRNDARGIAQMMRVGLYRPVHVKTLRSQKLRMLLMHRKLLQSKAISIENDLRASLRNFGLKMGLVGTVRFEARIKELVENLPDLAALVEPLLIVRRVLREQIGILHRRVLAVVRDDEVCQRLMTIPGVGPVVALTYRVTVDVPARFRNSKSVGAVFGLTPAKDQSGERDRSGAISRCGDEMMRVMLYEAAQIMLVRSAKWSWLKAWAMKIARHRGMKKAIVALARRLAVIMHRMWVDGADFRWTRELAAA

SEQ ID NO: 470928 - protein, 352 aa, unidentified
MSDGISVRRRCVGVDLHLHRSVIAGLDEVGKQLGWVRIDNDPAALVREVGAAGGRGCPVAIEATYGWYWAVDALLAAGFEVHLAHPLGMKALRKRKRVKTDPVDAYELANLLRLGSLPEAYISPPDLRELRELVRHRRQLVKLSTAVKAGIRALLAKHNIRLSATQLESDTATGLLDALALPGSYATRLASQRRLMLVLADEIAATEVELHRRLRHHPGYRDLLTVKGIGPVLAATFVAEIGDVTRFPSAGALSCWAGLTPRHYESDTTVHRGHISKEGDTHVRWAAVEAVQRQTEPAVKAVKDGIIARRGKTARNIAKVAAARRTLEVVYYVLRDGQACCLITADTGGAAA

SEQ ID NO: 470929 - protein, 309 aa, unidentified
MDIVVGIDVSKDRLDVHVSPLEESFVVGRDAAGLTALHERLKTLDVACIGIEATGGYEAIVVASLGGAGLPVVVLNPAQVRAFAKAVGQRAETDPIDARLIARFVAATRPEIRPLAHEATRLLAELVARRAQIVAMITAERQRKRQATNPRLLKSLTRILTALDKELATIEAEIDDAVRGSPVWREKEDLLASVPGVGPQTARRLIADMPELGTLSRRKIAALAGLAPFTRQSGRWRGKSFIAGGRATVRCALFMAAMVAVKHNPILKAFADRRKATGMSRLAAITASARKLLTILNAILRDKKPWKHA

SEQ ID NO: 470930 - protein, 426 aa, unidentified
MWDAKRRVLKIKSLKHGIIQDKRGNVMRAVFGIDVSKTSSEVAILVNGEKVHGYTILNDAFGFNRLLGDLKTVHNPEIIFEATGVYSRRLQAFLEEYGYAYTRLNPLEAKKQLDSLRVRKTDKIDAEKLAKSQLVHNRKPTYVQEEVYQHLRDLSRFYQNMTEDLVRTKNRLHKVLQVTFPELENLLSTPTGEQYWNLVMAFPCKEFVLSLSQSNLCEIIRQSTSKRISEKRIAYLTDKLIKLAKQSFCAVKKTSPMLEEVRYYAQELLRLSERRQVVLNDMVALAQPLPEYDILRSIPGIAETTATSIIGELGDIRRFQSTNQINAFIGIDLRHYESGNFLAKEHITKRGNPYARKILFKCIHNIASASHTNPCHIADFYEKRKRQSTIASTKPHTIASIHRLIRTMYYLITHNKLYDYTSTQNR

SEQ ID NO: 470931 - protein, 447 aa, unidentified
MQVQWGVAPRAPVQGLISIAAVRGHSGDSDMSDNVRFYAGVDWATEAHQVCLIDAGGKVIDERAFAHGGVGLAEMCGWLETTSGAEPSAIVVAIETPHGPVVEILLERRFQVDAVNPKQLDRFRDRHTVAGAKDDRRDAYVLADSLRTDRHCFRRLRVEDPIVIELREWSRMAEDLQQERNRLANRVREQLWRYYPQALELGDDPAADWFLDLWAVAPTPAKAARLRESRAASLLKANRIRCIDAAEVVRILRQKPLVVASGTVEAATAHIAAVAARLKLVNQQIKQAHRSLDELCARLTESREQDAPGQRPEQRDVTILRSLPGVGRIVLATLLGEAAEPLRKRDYHALRSLSGVAPVTRRSGKRCIVLMRQACQLRLRAAVYHWARVAIQHDARSRARYAELRKRGHSHGRALRSVADRLLAVACAMLRTQTPFNPHRAAVADAA

SEQ ID NO: 470932 - protein, 377 aa, unidentified
MSKVRFVGLDVHADTIAVAVAEPGGEVRSHGVIPNRLESVRKLVGKLGPVKEIRACYEAGPTGYVLYWQLTQLGVACQVIAPSLVPVKAGDRVKTDRRDAEKLARCYRAGELTAVWVPDAAHEALRDLVRAREAAKKDQLKARHRLGKFLLRHGRRPEGMKAWTKQHLEWIGTHVHFDQPALEATLQDYLDEVKHVAERIVKLEKVIDEAVRQAPPQIRAVVEALQALRGVAQTTAATIVSELGSLSRFESPRQLMGYSGLVAREHSSGNRVQRGSITKTGNAHLRRVLVEAAWAYQHRPNVTGFLLRRQKSLAISDEVKQVAWKAQHRLNKRYKAMSARGKNKNQIVTALGRELLGFVWAIAIQVEKQQHAQAAAA

SEQ ID NO: 470933 - protein, 391 aa, unidentified
MVYVGIDVAKDKHDCFIISSEGEVLQNVFTIPNNMTGFDDLFQRIRSVSGNLDKVKVGLEATGHYSYNILGFLLDKGLTTFVINPLHTNLYRKSLSLRKTKTDKVDARMIASMLMSDVNLKSYTDTAYHNEELKSLTRYRFDKVKERAQLKQSVARLVTILFPELEKIVPTLHMVSVYALLSEYPGAGQIAAANLTHLKALLNDVSRGHYGREKAVEIRDAARGSIGSRMPAKSLELRHTIKLIRELDTEIAEIEAEIKSIMDELESPILTIPGISYRMGAMIIAEIGDFSRFDSPDKILAYAGLSPSTYQSGQLTSSYAHMEKRGSRYLRYALFNATKFVCHWDPTFAAYLAKKRSEGKHYNVAISHAAKKLVRLIYALEKSRQPYNPAA

SEQ ID NO: 470934 - protein, 392 aa, unidentified
MNTTKVLENQEFVNVGVDLAKNVFQVAYKEPRTNTLINQQMNRTQFVKFLKDSKIKFKVVMEACSTCHYWGRECRKYGHLPMIIPAEITNSINIGSKDDKNDARAIWQASFLPDIKTINVRSEENQTEGHLLKTRDFVLKLDTQMNNKLKAILTEYGCECSTIGYEKTKAVAQAFLDKAFQDNQPWASKLKIILDAIDKIREKMQEAEKQLHEKIVETAKNNELAQRLMTIPHVGPITSLAFVNVMAEPTLFKNGRQFADYCGETPYHTGSGGKIIVLGVNRKGNSVLKRSLYEAASGLYNRVKTGIESKTCHYYQSDWILNLVRSKPRKVAICAIANKMCRIAWAVAATENGRYDRTKTSLVSVLMKSPEQIEQQKAAKAQAKAQAAAKAA

SEQ ID NO: 470935 - protein, 373 aa, unidentified
MKKVRFLGLDVHAETIAVAVAEPDGEVRSLGIIPNREESVRKLVKRLGPAEQLQACYEAGPTGYVVYWQLTALGMKCEVVAPTLVPVKAGDRVKTDRRDATKLARSYRAGDLTPVWVPNEEHEALRDLVRAREAAKQDQLRARHRLSKFLLRHGRRAPAGVKAWTQKHEQWIKGQVHFEQPAQEYTMLDYLHEVEHMDDRIRRLEQAIEEAVKLAPPRMQKVIQGLQALRGIAQISAVTIVAELGEISRFDGARQLMSYSGAVSSEHSSGKRIRRGQITKTGNAHLRRIAIEAAWSYRHRPAIGASLRKRQEGLSEEVKEIAWKAQHRLHKRYCHLFAAGKEKQKVATAVGRELLGFIWAIGVQVERNSKALA

SEQ ID NO: 470936 - protein, 345 aa, unidentified
MFAGQQDYVVGVDTHRDRHALAVIAAATGALVLETEIGADRCGYELALAFAGEHARGSRLWAIEGSGSYGAGLARFLAEQGEQVVEVERPQRQERRQGKSDRIDALRAARAVLRETALPRAAGAREALRALLTTREGAVATRRAGLNQLRALIVIAPESLRGELRRLTRARLLAHCARLRAERQLDPQLRGTMLALRACARRVQAATIEERELKREILRLVEELAPQLLAEPGVGPISAAQLIVSWSHQGRFAGESAFARHAGAAPIPASSGQTLRHRLNRGGDRALNRALHTIIVSRRKHHPATIAYVQRRTSEGKSVREAIRCLKRYLARHLFRLLEAAPITA

SEQ ID NO: 470937 - protein, 341 aa, unidentified
MKNLFIGIDFSKEKVDVAVIFAEGLAETSVRVFNEFKNSVSGYKQLVKWVEKNANGIDSSLWLFCGENTGDYSKPLCNHLYGRGYDMWLENSKCIKDASGIRRLKSDRADAAMIAEYAMRNHDKAIIYEPLSESLAQLREYYLYRQMVVRHRCSFEVRRGEKRLMMEKSAAKTVIAQSGKHIVSELNKEIAKIDRKIASLIESSDELSEVYRIVTSVPGIGTQNAVCLMVYTDNFRKFNYDARSIACYYGIAPFGQDSGTSVHVDPHVHYMANRHIKAMLTQAALAAVRFNPIIAQYYQRLIGRGKKMPVAMNNVKNKLLHIVTSMVKNKQVYKPEYRFSA

SEQ ID NO: 470938 - protein, 331 aa, unidentified
MNYSHFVGLEVGKKTFDASLMSADEKELSHKSFDNTPEGIQSLLDWIAGYHLSLSKLLFCAENMGSYVTELSVSSVSMGFSLALVCPLTIKKSIGLQRGKNDRIDAKRIANYAVLHYRKLELYKLPDKDLVRLRGWIIIRDNLVKQKVSSIKLLETFSQMAKLANVTEAISFLEEQLKSIKEKILEVEEDMEQLIAVSTSLYTNYLLLRSIKGIGIINAIVLLCVTDNFQRFDNPRKFACYCGVAPFEHTSGISIRGKTQTSSLANKEVKVYLTRAAITAISWDPQMKAYYKRKIAEGKHKASVINAVRAKIIARSFAVIRRQTPFVTLAV

SEQ ID NO: 470939 - protein, 352 aa, unidentified
MKISRVGIDLAKNVFQIHGVDGRGKVVWKRQLKRSHWLRVLVEKIDTDCEIGMEACGGAHHWARELQSRGYQVKLIPPQFVKPYVKGNKNDASDASAICEAMGREDMTYVAVKTVAQQDIQSVHRVRASVMGRRTASSNQIRGLVAEYGLVAPKDLGPLRRAIPDWLEDAENGLTDRFRALLHKLWEELLRLDQRVAELDREIEVIAETHADAKRLLKLRGVGPLVATALVARFGDASHYQRGRQAAASVGLTPRHHGTGGKNRIYGLSKQGDRYLRSILIHGARAVVSQANQRDDRLSLWVTDLKERSHMNVAAVALANKTVRMAWSMLKHGTDYEPELAAGERYRGWVMA

SEQ ID NO: 470940 - protein, 339 aa, unidentified
MKITTIGIDLAKNVLQVHGVDERGKVLLKKQLKRDQMITFFANLPACLIGMEACGSAHFWANKLQGLGHTVKLMAPQFVKPYVKTNKNDAPDAEAIYEAVTRPTMRFVPIKSSEQLAVLALHRARQGFVKARTAQANQIRGLLAEYGLIIPQGITHIGQRVPEFLEDSENCLPGTFRLLLMRLHEHLKELHKQVNELEEASVRWHRDSVASQTLAQLPGIGPITHSALVASIGNPRNFQNGRQLAAWLGLVPRQHSSGGKQTLLGISKRGDSYLRTLLIHGARAVLRVAEHKESFAGSWLAGVMARRNPNVAAVAQTARIIWALLAHDRKYDAHNGMAA

SEQ ID NO: 470941 - protein, 352 aa, unidentified
MTMTTLARQITGGVDTHLDVHVAAALDERGGLLGVESFETTPKGYANLLNWLQDFGTVELLGVEGTGSYGAGLTRHLHSQGVRVVEVDRPNRQRRRRHGKSDPQDAISAARAAQGGDATGEAKTRDGNVEAMRVLRVARASARKGRTQALNQMRSLISTGPDCVRAELRGLNVYRMLVRASSYRPGSKRDLVSINKFTLRMLARRAIELEEEVKEIDAILKVMVAETAPELSALSGVGTDIASALLVAAGDNPERLRNEASFAHLCGTSPIDASSGKNQRHRLNRSGDRQANSALWHIVITRMVSDPRTRHYIERRMKEGQTKKEAIRCLKRYIAREVYNNLPIEHLALDSP

SEQ ID NO: 470942 - protein, 413 aa, unidentified
MTSHVIDWFAGIDWGSERHQVCVLNCNGEIIAERAFLHTGSGLAELGTWLASFTVEGRNMAIAIEVPHGPIVDLLLDRGFVVYAINPKQLDRLRDRFSIAGSKDDRRDALVGASGLRTDRHLFRLVQASDPAIVELREWSRLAEELQQDRVRLCNRLRQQLWRYYPQFLELVDDIAAEWLLELWMMARTPEQAKRLRPSTVSRLLTRHRIRRFDATAVLYILTKPTIPAAAGVTEAAVLHVRSVIARLELANRELRTAEKKLDQLLKARIDDAGCGQNQEPSDAAILNSLPGIGRVTLAILLGDAFDPLIRRDYAALRSLSGVAPVTRRSGKSHIVSMRYAAHPRLRNAIFYWMRAAIQNDPGIRNRYEALRKRGHSYGRALRGVADRLLELACILLQRRQMFDPARRNSNVA

SEQ ID NO: 470943 - protein, 393 aa, unidentified
MKSNTQNAKIEAITEKTLVLGIDVGSEMHYARAFDYRGIEYSKKPFKFSNTEAGFVTFKEWILNLKERHEKDKVVPGMEPTGHYWFNLGKFLQDNEMKPVLVNPHHVKKSKELDDNNPTKNDRKDPKVIAGLVREGRYMIPYLPDGVYADLRTASNIRFQLQAELTRIQNRISRWFNIYFPEYKTVYGKPDAKSGMLILKAAPLPEDILTLGIDGVNQIWRDAKLRAVGKARAKTLIEAAEHSVGSKEGAVSARMEIRMLLEDYESRNTRLQEVMVLIEELIRKIPMAEKLLEIKGVGIRTVSGFLAEVGDISRFNNPKELQKLAGLALVENSSGKHKGETTISRRGRKRLRYLLFEVAMSLVSKNQEFRELHNYYITRRLNPLKKMQSLMAI

SEQ ID NO: 470944 - protein, 323 aa, unidentified
MNKDIKYFGIDISHLVFDVTDSDGNYYQFKNNVTGFKKFIKLLNDKSHCVMEATGYYHYQLAYYLLENCKAVSVENPLAVKRFIQMKLSKIKTDKSDSKLICEYAKQVDMKLWKGNSKHQTECLQMTRLLAIYTKQSTMLKNKLHGEAVLGNPSKVVVSSLKRSLKNIQKEMKSLEEKLLILVKQSHQEVLTRLKTIPGIGNKTAVMLVVLTDGFDRFTSAGELCSYAGLTPIIRQSGSSVKGRPRISKIGNQKLRNLLFMCSFNACKYNKACRDVYERIVAKGKSKKLALIAVCNKLLKQAFAIAKSGLIYDDTYRSTLVKK

SEQ ID NO: 470945 - protein, 369 aa, unidentified
MLLPRDKLARGAKDKEHAMPATAQTAIAVVGIDIGKNSFHVVGLDERGAIVLRQKWSRSQVETRFANMRPCLIGMEACVGAHHLSRRLKALGHDARLMPAKYVRPYSKGQKNDFRDAEAIAEAVQRPTMKFVATKTTDQLDLQAQHRVRERLVSQRTGIINQIRAFLLERGIAVRQGQRFLRVELPRILATPPDVLSPRMVRVIEDLAGDWRRLDERIEALSSEIEALARGDAGCERLMSIPGIGPIISSAMVAAVGTGDGFSKGRDFAAWLGLVPRQISTGDRTILGKISKRGNRYLRVLFVQAAWVVLVKVKPTRWDGHGLKHWIEAAKKRLHHNVLAIALANKLARIAWSVLARGRAFEASKLHAA

SEQ ID NO: 470946 - protein, 338 aa, unidentified
MNIVFLGIDLAKNVFQLCGLNQAGKPVYTKRTGRKELLQTLANIPACLIGIEASTGAFYWQREFEKLGHKVKVISPQYVKPFVRGQKNDGNDAQAIAVALMQPTMQFVPPKSPEQQDIQALHRARQRIVNHRTATVCQIRGLLLDRGIPIGSAVSRARRAIPLILEDAENSLSSRMRRTIAELYDLFNDLERRIHFFDKEIETVFRQSEACQRIAKVKGIGPKTATAVVAAIGKGTEFKNGRHFAAWLGLVPRQHSSGDRQVLMNMTKKGDKHLRTLFIHGARAVVRVATNNNDGHMNQWVNQLKERRGFNKTTVAVANKNARIIWSMLRNDTEYQVV

SEQ ID NO: 470947 - protein, 351 aa, unidentified
MPHKTDVTVVRTIGIDTGKSTLHMVGLDERGAIVLREKVSRHRIAARLVNVQPCLVGIEAGMATHYVARALSALGHDVKQVPPAYAKPFRQGHKNDFRDAYAVAEAVQRPSTRCVPIKTDDQLDLQALHRVRSRLIGDRTAVINQLRGFLLEHGITVRQGHRFLRQQLPQILTTRTDVLSPRMVRIAADLVGDWGYLDERIERVTDEIEGLAQTDVGCGQLMTAPGIGPIVASATVAAIGNGAAFAKGRDFAAWLGLVPKQMSTGDRTILGRITKRGNRYLRMLFIQGARAILLHPTSWAKHSFGPWLTAAAKRLHHNVLTVALANKLARIALTVLVEGRNYETRITPAAA

SEQ ID NO: 470948 - protein, 438 aa, unidentified
MSNKVFFNLDDLFISVGIDVGADFSWMSIALPNQQFVGKPYKILHNSIDSLTTAVSKIKEAEELYSLESRIFLESTGIYHYPLFCYLRDKGFNCSVINPIITKNSTNINIRKVHNDRFDSKKAALVGLKPDLKVSLMPSDLALNCRNLCREYYDLMDNRSAYVNKLQGELRMAFPQYLGIFSKVTINTSLTLLETYTSPSAFLKADKQEIIDIIKSTARFGLTYAQNKYNAIIQAAADANQFGYIIDSNIKRIRLYISFIRKYDEEINNILESLHELVDANEDADFVKQIHLIETFKGAGFLSAVSIMGEIGDFSAFSKPKQLFAYFGLDPAVKQSGKFEGTKVQMSKRGSAIARRVIHTLTLQSISISRNREAKNPVLREYYLKKCDSKPKLVAMGAVSHKVCNMIFAILRDNKPFKIIAPQEHIKQYNAAKCDIAA

SEQ ID NO: 470949 - protein, 355 aa, unidentified
MESVKYIGLDVHQSTISVAVLNAEGKLIMQSVIATQATAVLDLLKGLRGVLHVTFEEGTYSAWLYDVVSRHVGRVVVCNPRKNALLKSGNKSDQIDARKLAELLRAGMLSPVYHGEQSTRTLQQLVASYTALTEDTGRAMRRIKALYRSQAIACAGKKPFGKRYRGEWLARLSDSGQRRRAEWLYQELDAVQILRREARHAVMVECHKNQAAKLLCSMPFFGLLRAAVLIARVQTPHRFRTKRQFWTYCGLGLETRSSADYVEKDGQIMRRRKPVYIRGLNWNYSHELKNVFKSAATTASAMDGPFGAFYASRVANGMLPAMARLTLARKMAAIALILWKKGETFAAEHLKLQAA

SEQ ID NO: 470950 - protein, 334 aa, unidentified
MNYNFFIGIDVSKKTLDFAVFKGKELHFKWVGENDEPGIKKFWGQLKLQQGFCVKEAMFCMEHTGIYNQYLLNFLYSKKAFVCLEAAVHIKLSSGLQRGKSDQIDAVRIAQYACKNSSELRLWQPKREVIQRLKHLSGLRNRVINARKQLTVALNETIGFDKNAACECKKLCKASLKALDDDIKRIEVKTDQVIASDTELKKLFSIVTSVEGIGKVTATEMIITTNEFKDITDPAKFACYSGVAPFEHSSGSSLKGRPRVSHKANKTMKSLLHMAALVAINYNADMKAYYQRKVEEKKNKMLVINAVRNKLIWRIFACVRNNRPYQKNYQLSLV

SEQ ID NO: 470951 - protein, 334 aa, unidentified
MENIALIGIDLGKNSFHVHCQDRNGKAVYRKKFTRPKLIEFLATCPATTIAMEACGGSHFMARKLTELGHTPKLISPQFVRPFVKTNKNDFVDAEAICEAASRPSMRFVQPKTESQQAMRALHRVRESFVQDKVKTTNQMHAFLLEFGISVPRGATIISRLSTILEDNNLPLYLSQLLQRLQQHYHYLLEQIKELEAQLKQKLNEDEVGQRLLTIPCVGTLTASTISTELGDGKHYASSRDFAAATGLVPRQYSTGGRTTLLGISKRGNKKIRTLLVQCARVFIQKLEHQKGKLANWVRELLCRKSNFVVTCALANKLARIAWALTTRQQTFAS

SEQ ID NO: 470952 - protein, 273 aa, unidentified
MEEVVTVGLDIAKSVFQVHGVDAAGAVVLRRRLTRSKLIAFFEKLPRCRVGIEACATAHYWGRRLTELGHEVGMMPPSYVKPYVKRQKNDAADAEAICEAVSRPSMCFVAVKTSDQQSVQVIHRTRMTLMRHRIEVSNTIRAHMAEFGLVAPIGRMGLQGLIGIVRDDGDERVPASARVCLKMLVDQLDLVNRQALENDRMVLADARSSEVGRRLMAVPGVGPVLASAIVAAVPDPRAFRSGRNLAAWIGLVPRQNSSGGKERLGGITTQGNR

SEQ ID NO: 470953 - protein, 393 aa, unidentified
MICVGIDVAKDKHDCFILSSEGEVLADVFTIQNNAEGFDTLLQTIRRCVCPGDKIKVGLEATGHYSYNILGFLLDKGLDTYVINPLHTNLYRKSLSLRKTKTDRVDARTIAAMLMSDVDLKPYTDTAYHNEELKSLTRYRFDKVRERAKLKQSVSRLVTILFPELEKLVPSLHLASVYALLIEFPGAKQVAGAHLTHLKAILSDASKGRYGRDMAVTLRDAARCSVGSVMPAKSLELQHTIRLIRELDAEIEDIETAIQSMMDEMQSPITTIPGIGVRMGAMILAEIGDFSRFDSPDKILAYAGMSPSTYQSGQLSLSGPYSHMEKRGSRYLRYALYNATKYVCLWDPAFAAYLAKKRGEGKHYNVALSHAAKKLVRLICALEKSQQSYRNAA

SEQ ID NO: 470954 - protein, 368 aa, unidentified
MPSTARSPKGDGITTIAQRQRPRVTVGVDTHLDVHVAHAKDALGRRLATVSIPTTPAGYRDLLAWARGLGEVDAWGVEGTGCYGAALARFLVAHGQVVLEVNRPDRQARRRRGKSDPVDAEAAARAVQAGEVTAVPKASSGYVEMLRSLRVARATAVKARTQAINALKALVVTAPADLREQLRGRSATMLVREAAALRPGPLDDPTAAAKLALRTLARRHQALRAEITTLDTELDRLTAKAAPRLVALFGIGSDSAGALLVAAGDNPDRLRSDAAFSMLCGSSPIQASSGKTIRHRLNRGGDRQANAALHRIVVVRLRWHQPTKDYMARRLTQGKSKNEIIRCLKRYVAREVFAVLNQMDQDALTPAA

SEQ ID NO: 470955 - protein, 337 aa, unidentified
MSLYIGVDGSRDTLAVALFRAGQDSSPQYLGSFPNRLEKFETLFRQVQQQSRGEEVIWVIEPCGGYERPLMYWLYEHRQCILYPNPRQVRQWQQGRGYRAKTDPLDSQMLALYGAEHRQDLHPWKPWPEPAGHLLRLAERWRELEVERQREQNRLEAYLSQGISPDAPEVRDLQEHIQFLEGLIRRTKKHIGRLYRDFPDLDGLRRRLLSVPGVGEKTVHALVALLIRWAQLGRRDAKGLVAYLGLDPRIHQSGKRPPRGRISKQGDTRWRSLLVAAARGGLRGTSSPLAQFYRRLRQRGKPHMVALVAAARKIVVWAWAVYCCGEPFDLRRHIARV

SEQ ID NO: 470956 - protein, 424 aa, unidentified
MKVTFQTCCGVDVHKSFLVATIIKTSSGIEPSYQKRRFSTFNNSILEFKKWLLENECLYVCMESTGKYWIPVFNLLEDEINVTIANPKWVKAVKGNKDDTKDSKWIGDLFRLGLVRGSYIPCKKIRILREFTRYRYKLVSCRSSEKNRYQNALTVCNVALDSVVSDIFGKSSTSIIDYLLEQSGTSIDHEVIASKLLKRLKAKEDAVIESIEGYQMTDSQKYRMHLVRAHMDYITAAINDVDSEIESLISSDPDYENAVELLCTIPGVKYDSAITIISEIGIDMSQFCSSKRLCCWAGLTPGSNESAGKKKSVRITRAGVYLKPALVQCAHAAVKSDKSPYYKKKYESLVKRRGKKRAIIAIARMILTAIYQMLSTGEQWNPSDLYKVDMPEALLEKQKQKAIKQAQKLLIREGLLPPTEPIAS

SEQ ID NO: 470957 - protein, 401 aa, unidentified
MRFAGIDIGGERHVVAIVDQSGAVVLKATPVMEDATGYKRLLELLGSASDCLVAMEATGHYWRNLFAALVTAGFKIALINPLRSSRFAEEELQRTKTDAIDAVGIARFAAQKRPEITQLPDPALQELRELVRLKERLVQEFGDRVRQLHRAVDLGFPEFSRHIRTLDSELATAVLGRYPTAAALRTVSVRRLARLCYDGSHNVGEELARALLEAARQSVGAHHGEPYQLQVRYACEDLDVLRRRLRSLDHDIERRLEQHEVGKLLTTIEGIGPQTAARIIAEVGDPARFHSARALASYVGVIPRVHQSGKRKFSSSAKVPLGNARLRRALWMPAITAIHHNPWLHAYYQHLRAAGKRPKVALVAIIRKLMTAVYSVAKHRRPFVLPPFFTPAAGGAEVPST

SEQ ID NO: 470958 - protein, 344 aa, unidentified
MDHFGGLDVSVKETSICIVDDTGRIVKEVKVASEPAALLKVLGNQAYRFKRIGLEAGPLSQWLFSALAEAGLPVVCVETRHMKAVLKAQINKTDRNDARGIAQMMRVGLYRPVHVKTLRSQKLRMLLTHRKLLQSKAIAIENDLRGTLRNFGLKVGMVGKMRFEARIQELVENIPDLAVLVEPLLIVRRVLREQIVILHRRLLAIVREDEVCRRLMTTPGVGPVVALTYRATVDVPARFRKSKSVGAVFGLTCSRYQSGEIDWSGKISRCGDEMMRTMLYEAAQSMMHSKKWSWLKAWAMQIARRRGMKKAIVALARRLAVIMHRIWVDGTEFQWTREQAAAAA

SEQ ID NO: 470959 - protein, 406 aa, unidentified
MLVYLGIDWSEQKHDLSFQNELGAEILHLRIPHSENGFLTLNQSVANLGASPAECMVGLETAHNLLIDFLWAHGYTQIYVLPPNLVKSNQGRHRQSGAKDDRCDAALIAELVRTDRSHLYPWRPGSLLLQQMRAKVSYLYFLTRDIVQHTNRLRSILLRYYPAATQVFSALDTKICLDFIQAFPTPQQAAQLDFETFSAFARSHHYPQPKRLLLNYARLQQPQPIPAAETVQAFQDEAVQLCQLVKMLVQRKEEMLQELDRLYQQHPDHVIFASLPGLGARLAPAMLVKFGEDRQRFPQPELVQALAGTCPITVQSGKSKYVRFRQSCDHEFRHYVQQWAWHSLQHSSWAEAYYLRVRPNCRSDSHALRCLGNRWLAIAWKLWVSETPYDETYHLRQHALRLRPRA

SEQ ID NO: 470960 - protein, 364 aa, unidentified
MSTITIGVDLAKSVFSVCEMDSAGHVLRRLELKRDAFAVWLSQLPAGSVVAMEACSGAHHWARRSLEYGLQPRLMAAQFVTPFRKSRTSKNDRNDAEAIATAARQGNMRFVPVKEVDQQARLAWHRVREGYKTESLAIGNRLRGLLAEFGIVVAQSDAALRHVLADLDQAALPDEFKELIRGLQAHWAQVRMALDACDARVEAHARADARCVRLRAIIGVGPITADALVASVGNAREFKNGRQLAAWLGLVPTQHSSGGHTRLGTISCRGDTYLRTLLIQGARSSLQRAKAVSVETSTPEQIWIRQLSSRMGFGKLLVAIANKHARQLWAMLAHEETYDPDAWLKHPMVQRPAGKHASTVSAMA

SEQ ID NO: 470961 - protein, 363 aa, unidentified
MITIGIDPHKSSLTAVALSPTGVPLGQLRLAVTKTVGTELVEWAKAWPERQWAVEGASGLGRGVAQLLAATEPTVLDVPAKLAARARLLGSGSARKTDVTDAASVAAVAQRNERLHQVRAEDDTVILRLLSDRRDDLVAERTRTLNRLHVLLRDLHPGGAKRDLSTVQAAALLRTIRPLTPVDAQRKALARDLLADVRRLDTAIKAGMKAIGTVLEEHHSTLTEVHGLGPVLAAKILAHSGDVHRFPSRHHYASYCGTAPIEASSGDLRRHRLSRAGNRQLNSAMHVIAVCQARDPGPGRDHYRRKLAEAKTPAEARRSLKRQLSNVVYKHLVADQRAAIASSTGPTAVAAGASNDQSPEIWC

SEQ ID NO: 470962 - protein, 346 aa, unidentified
MLIVGCDYHPRWQQVAWLDTESGETGEQKLVNGDGEAERWYRQLPVPSLIGLESTGNSQWFIDLLRQLGHEVWIGDAAEIRASYVRKQKNDRRDAGHILKLLREDRFPRLWVPSREQRDLRQLLIHRHKLVQIRTRVKNGLQHLAMNQGMQKQSRLWSVKGQQAFLQLPLAGWTQCRRHDLLELLVFLDAQIAPLDRAAQQAAEQDPQARLLLSQPGVGPITALAFVLTIGDVTRFARSKQVASYVGLIPREHSSGGRQRLGAITKQGNGFLRMLLVEAAQSVVRLDEGFRKQYAHRCHSKPKGIAKVAAARRLAIRLYWMLRTPTRYPEIVRIESSPRVPLAGKS

SEQ ID NO: 470963 - protein, 443 aa, unidentified
MCGDSVNASPFTILKSGGLNLKVVYPICCGVDVHKTFFVATLITTEGIQPKYKKRRFSTFNNQILAFKAWLLENNCRDVCMESTGKYWVPVYNLLEDSINVTVANPKWVKTVKGNKDDAKDSKWIGDLFRIGLVPGSFIPTKDIRILREYTRYRFKLVSCKSSEKNRYQNVFTVCNVALDAVVSDMFGVSASSITDYIVNSDTFDPEYCVSLLKRSLKKKAVEVVESIDGFQMSTPQKDRAKMVKEHYDHLVGQIQKLDDALDELAKPFESAISLLCTIPGIRRHSAITILSEIGTDMSLFDSSKRLCRWAGLTPGNNESAGKKKSVRITRAGVYLKPALVEVAHAAVKSKVTPYYRLKYERIAKRRGKKRAVIAIARMVLTAIFHMFSTGEFWNPVDLEKIDMPPELREREMQKSLRQAAKLLVAQGVVAPDAIRLPAAAPA

SEQ ID NO: 470964 - protein, 313 aa, unidentified
MQYIGIDMSKDTFHAAFDENIVSIFQNNPTGIKQFLKYLRQDVVIGVEATGVYHLLFARKCTEAGFDVKIINPLLTYRMISTSLRKVKTDHHDALAIRKVLILGAGYIFSETPELIALKTLIQEREALVRMRAETKQRIHAHKTKELAAGIKLPNPYAPVIKSISKEINTLTKQMQGFEKDTQALLKSIPGVGKVTAAALSAYIGDITRFDSPEKLTAYVGLDCRVHQSGTSIHGKGFITKRGNTYLRFTLFNAAFVARQHIPELKTFFNKKISEGKHYFSAQVATERKLVHLIYAVWKRGTPYETRINAKVA

SEQ ID NO: 470965 - protein, 373 aa, unidentified
MSVYVGIDVHRKRSQVAVVDQAGQVQANRNVPNGVETILKVIGDLPIGTPVAFEAAFGWGWLVELLDDYGFEPHLVHPSRCKAIASARLKNDKVDAHILAQLLRADLLPEAWIAPPAVRQLRARLRHRIQLVRLRTLLRNRIHAVLADHGHDRAEGCWSGPGRQWLAGLELPAASREVIDDCLGMIDALQAPIDRLDVEVRAHAKADPRVRVLTRLPGVGELTALVILAEIGDISRFGSARKLAAWAGLTPTVRGSDLTVRHGHISKQGSTWLRWILCEAAQTAKRSPQFAATYQAIARRRGKKIATTAVARKLLTRAYHLLTDFETTDNGVATTATVTTCMPDRHRAGPKTGRITKPRASSQNRMSRPSRAR

SEQ ID NO: 470966 - protein, 356 aa, unidentified
MKKLTAIAIDLAKDVFQVAGENARCEVVLSERLKSRQAMHKFIQTLEPPVTVAIETGPGAQAWAREIAARGVEVRILPAQHTAAHRSGNKNDANDALSILRALHDASVHPVPIKTQDQLAMQALHRARRGWRGRMTAITNQVRGVLLEQGVVIARGDLALVRKVDRLLEDATLPIPDRLRALVADLMGEWRGLGERMAAIDGELAVLSRTDPVAKHLCQTRGIGPIISTAMACKSLHPDRFANARQFAAYFGITPSQHSSGATVRLGRMSRRGDAYLRSALIEGAHAVIRQIRRDATDPYSRRIQRWVQRCGPKGAAVRLANHNLRVVWLLLKHPDMVFSSHPGHRGTDVREAAMH

SEQ ID NO: 470967 - protein, 350 aa, unidentified
MNVNHYIGFDVHKKSINYCVKMADGQIVEEGRLRATHDALRRWAGRRQEPWRGAMEATLFSGWIYDTLKPFAAELQMGHPAMMKAIGASKKKNDKIDSRKIADLVRCNLLPACYVAPAEMRELRRLLRYRNVVVAQGVRMKNKMSGLLMEVGAEYNKQQLHGKKYFTELMGNLEEVPESVKDLLRLSRGALEMFEATQRQLLDRLRKEPRLVERVAVLESIRGVGEVTALTWALEICDPQRFRSIADAESYCGLTSALDCSADKQHRRPISKQRNGHLQTVLIEAAKLAPRWNPQLAQVHERELQRGNRNRATLAVARKLVAYLLAVDKSGQPFRIRNQPAPTTEVATAA

SEQ ID NO: 470968 - protein, 321 aa, unidentified
MKKGKSRQAKVVGIDVSKDTLEVGVVPSGEEWSSGQSPAEVGALADGIAALKPALVVCEATGGLELPIVYALVERGVPVHRCEPKRARYFARSLGLLAKTDRIDKFALARFGATGELAPQTFPSEGTRQLDALTTRRRQLVEAISAEGNRLKATTDPAARASIERHLAWLRDELKALDAQIDACQAACPDLQAKVERLRSVPGVGAVTAAVLLSALPELGTLDRWQAAGLSGTAPLNNDSGRHQGRRRTWGGRKDVRCALYMAALVGTRHNPVLRNHYARLLAQGKEKKVALTACMRKLVVILNAMLRDGTSWRPTAPAAG

SEQ ID NO: 470969 - protein, 386 aa, unidentified
MERNDLSRSLVAFDQNSTLVAVVELSLKTWLVCGLVPGLTRQPLKKQDADANALLALLHRWRDEAIKFGGKIERIVVAFEAGRDGFWLARWLRTRGIESYVIHPTSIPVSREHRRAKSDRLDTGLLMRALLGWLRGEAKHCSMVAIPTLTEEDARRPNREHEHLVGERTRILNRLKATMIRHGIRAFNVKLRKAAERLGDLRTPEGVALPANTLAELGRDMERLRLIREQIKAIEQERLERLRTAPHAGPHPMVLMLAKVLGIGVETADMLVHEVLTRELRDGRAVGRYAGLTGAPDESGSKRREKGLARAGNARVRRGMIQLAWRWLMFQKDSALAQWFQARTAHAGRIGRTKMIVALARKLLIALWRYVTTGEVPAGAKLRAAI

SEQ ID NO: 470970 - protein, 380 aa, unidentified
MGLIVPTTIHPAREDQPLPYEWFVGIDWGSQQHQVSVLDRDRRRVGERVVDHDGASLARLADWLWTLSAGQPQRVAVAIEVPRGAMVEGLLERGFHLFAMNPKQRDRFRDRHTVAGAKDDRRDAFVLADSVRTDQPSFRRLHLEEPQLLLLRELSRAEETLLEAFRRSANRLREQLHRLYPQMLQLCSAADEPWLWDLITLAPTPAHAMLLSEEQVQRVLKAHRIRRIKATEVLACLQAPALPVAPGTAEAAQAHCGFLLPCLRVLAEPLQACSQQVGTLLRTMADEPGEGESPSDVAIVQSLPGVGRKITAWLFAEAAQPLAERDYQVLRTHGGVAPVTKQSGKRRQVVMRHGCNPRLRHALYHMARVAMQRDAHFNSV

SEQ ID NO: 470971 - protein, 410 aa, unidentified
MELQHERCAGMDISKRDAKVCVRTPGKRFGTFDKTVTVWGSTSREVSRLHQFLLNEHVSVVVMEATGAYWKPYYYPMESDLNLMLVNARYARNLPGRKTDVADAQWLAELGAHGLVRPSFVPPEPIRELRELTRTRTVFTRERSREVQRLEKLLEDSGIKLSSVATQITGVSGRAILAALIDGQHDPAQLAELAKGRLRNKIERLTEALEGNFRARHAFLAREHLDRFDSLTAAIDRLSERIETAIAPSTDSVTLLATMPGVSNTIAQIIIAETGGDMTQFPSAAHLASWAGVCPGHNESAGKVKSSHTRPGNHYLKGALGIAAMAAARTNGTYLQARYKRLAGRRGPTRALVATEHSMLVSVWHMLTAHQPYEELGADYFSRVNPGLTRRRALAQLANLGFEVTLTPTA

SEQ ID NO: 470972 - protein, 351 aa, unidentified
MKRDITVGMDMGDKNHSICMLDAEGEVLGRGTVTNTGNAIRKYFGKLEPCRVALEAGTHSGWVSRLIEELGHEVLVGNPRKLRVIWDSDKKDDDRDAEMLARIARFDSHLMHPIHHRGKEAHSDLAVIKARDMLVKTRSSLISHARGAVKAMGERISKCSAECFHIRLREEMPSELEVALEPVMKSIGELTARIRHYDKLLEKLSRGKYPETEGLRAISGVGPVTALAFILTIEESSRFEKSRTVGAFLGLVPRRDKSGQIDKQLRITKAGDAYLRRLVVGSAQYILGPFGPDCDLRRFGLKLAARGGKNAKRRAVVAVARKLSVMMHHLWRSGEAYDPFHRRNIKQTKVA

SEQ ID NO: 470973 - protein, 403 aa, unidentified
MNMNAVGIDVSKGKSMIAIIRPYGEIVSLPFEIQHTSNEISSLINQIKSIEGESRIVMEHTGRYYEPLARELSQANLFVSAVNPKLIKDFGENSLRKVKSDKADALKIARYALDSWNDLKQYSLMDEIRNQLKTMNRQFGFYMKHKTAMKNNFIGILDQTFPGVNTYFNSPARDDGSQKWVDFAAAYWHVDCVRKLSLHAFTDHYQKWCKRNKYNFSQSKAEEIYGAAKELVPVLPKDDLTKLIVKQAVDQLNIASKTVEQLRILMNETASKLPEYSIVMDMKGVGSSLGPQLIAEIGDVRRFTHKGAITAFAGVDPGVNQSGTYEQKSVHTSKRGSPTLRKTLFQVMDALIKTKPQNDAVYQFLDKKRAQGKPYYVYMTAGANKFLRIYYGRVKEYLTVLPQ

SEQ ID NO: 470974 - protein, 450 aa, unidentified
MNDKITLDVINKNAAGIDIGSRSHWVAVGQKDSQIKEFGVYNENLYQLADWLSEHGVKTVAMESTGNYWQNLHAVLISRDFEVTLCNGKFTKNIKGKKTDVKDCQWIQKLHSLGLLSSSFLPDQDTETLRTFTRHRHNLIKQAASATKKMQKYLRLMNIRLDVVVKDVVGLTGLKIIRAIVLGESDPKKLASLRHYNCKKSEEEIAKALHSNGRKDFLYALKDELDTYEFIQKKIRECDDQIASKLDEIIGKDPEKGVHYIDKKPYKRINKNTPKNIDINLKSYQMFKGVDLMAIEGMSYNTVLALMSEIGYDGIKKFKTAKHFTSWLRLAPNNKVSGGKVLSNKIGKGSSRLKIALRNAANSIGNLKNSTPLRDFFHRIIFRKDRVSAITATARKLAVIIWNMIVKGIAYNNPKGYLYLDQKRKLGLVKRMRKQIDKYGLTNNDFQLTE

SEQ ID NO: 470975 - protein, 345 aa, unidentified
MLIIGCDFHPSVQQIAYLDTETGEYCEQRLSHSNGEAERFYRELHRKTDGIRVGIEATGHARWFERLLGELGCELWIGDPAQIRAMRVRRQKTDRQDAQLLLKLMLDGRFPRIWSPNPKNRDLRQLLWHRHRLVQMRTRIMNQLQAVAMNEGVRRRQGLWSKAGQAQLKALSLDPWATRRREDLMRLLDQLNLNIDELTKALEKEASDRSEVRYLMSHPGVGSLTALAFVLVIGSPDRFHCGKQISSYLGLIPCEESSADRQRLGHITKQGNSLMRFFLGEAAQTVVRCDPDWRRQYLHLMMRRSRQIAKVAMARKLAVHLYWMWRKEMERQRTLKIGPHARLLV

SEQ ID NO: 470976 - protein, 406 aa, unidentified
MRYVGIDIAKKDHQIAAVDEFGNVILKSFSAGNNESGFAKIAEKLEAARIESDECLVGMEATGHYWISLWEFLDANGYEVVVINPIQTDAFRKVDSLRKTKPDAIDSVLIAEYLRFANPESSKMANPDVEQLRELARFRSFLVEQATQLKNKAIRVLDQAFPEYGKLFSNTFGEASKALLKQCPTPEEVLATDIRTLTRILKENSGGNCGRAKAEAVKDAARSSIGAKFGARALSFEIKLLVKRLSFTQVQIEELEDEISELLHRSDGHWLTTIPGIGDSLAASIAGEIGDPDRFETPKKLIAYAGMDASKYQSGANQDTNGHMSKRGSSELRRALMLAADKVRIYDPYFGEYYDSMKARGKHHYVALSGVARKLAGVCLSLMREQRPYESEPPEHHLPGHLQRQA

SEQ ID NO: 470977 - protein, 276 aa, unidentified
MNKNWFIGIDVSKKTLDASIFVADVVINKFPHTQVRNDKEGFKELLRWLKEQGVRPQDALIGLEFTGYYSDALEQFLTSKKLCYAMLPTTVVKHYQRGARDKNDKIDSAKIADYLFRFHDTECIKLRVLPSKAMQDLKALKSERKFYVRHRTDCENRQKVAKSRDEQKNLQKIIDLYDKEIERIDQKMADVVTSDEEIHLTYMRLMSIPGIGSVNAINTIANTQNFTAFETARQYAKYVGVAPSEHSSGTSVRWRGRPSPHADLRRKEKSPQCSQV

SEQ ID NO: 470978 - protein, 362 aa, unidentified
MEYFCGLDVGMDETAICVVDDKGNAMLQIAVVTDPEAIKVALKPYLGRLRRAGHEAGSLSPWLHPELLRLGLPAVCLETHHVRAALKAQRNKTDKADALGIAHIMRTGWYRQAHIKTEACYRLRLLLTHRRNLKRKFLDLENAIRHSLKAFGIRLSGTGRGGFAQAVRAAVADDALTTELMDAMLNARAALWKEYCRLHDLVVKFVAGHELCRRFMQIPGVGPVTALSFMTAIDDPTRFRRSRDVAAYFGLTSRRWQSGTSVDVQGRISKAGDGDVRRALYEAASALMTRFKRKDKVKTWGMMLAKRSCHRKAVVAVARKLAVIMHAMWIDGTFYNGDPEARAADVAAHATVKDRRLLGVHA

SEQ ID NO: 470979 - protein, 322 aa, unidentified
MAMLSFGGIDVSKDRLDVVVLPEEECSSVPNDAAGWAELVERLRGFSITAIGIEPSGGYERGAMRALLAAGMPVRQVNPFKLRQFARASGVLAKNDPLDARMIASFVTIMPTRPAQRQTPAAERLAEMLAIRRQLSAEKVAAENASRLLEDAMLQRLSRRRIVRLAADIDLLDKRMVEIVATDDALVHRYRLLTSMPGVGAVLACTLIALLPELGRMSRKQVAALVGVAPYAFESGTLKGRRCIWGGRAHVRQVLYMAAMSASNWNPVLKAFHDRLTAAGKLPKVAIVAVMRKMITMLNAMVRDDVVWADRLSGRHVLPTAR

SEQ ID NO: 470980 - protein, 324 aa, unidentified
MTNAVLGIDVSKNTLDTSLLAGAKPRSRSFANSPDGWRKLIAWLTEHKIRQVHACLEATGHYSLGIALALHEAGHIVSLVNPAQIRDFARTKLGRNKTDQVDAAHIREYAELFKPHPWTPPSPALRRLCELQTIRAGTVAGLTEWTNRSTSGMGDDMALSLAKATIKHFTSQLEAVDQAIAETIDSNPELCARRDLLVSISGVGETLAGIILAELPGPDVLGSSAAVAAYAGLNPRQHQSGTSINRPARISKIGNAVLRTALYMPALSAMRYNPAIAALVDRLKAQGRLKGKQIVVAAMRKLLVICFGVLKSGKKFDPAIALGQ

SEQ ID NO: 470981 - protein, 348 aa, unidentified
MQFYTNLHPFYCGIDLHARMLYVCILDERGEILVHKKIKDSPEQLLNLLAPYIGNIVVGAECMHCWYWLSDFCEHHNIDFILGHALYMKAIHGGKTKNDKIDAYKIAKLMRGGNFPLAYVYPKEKRAIRDLLRRRTHAMRHSAELKAFIKNSLSQYNLPVPEKSDLSYTTGRDAMRGYFPNPQVQRSIDMNLRLIEVYDHEVSSIECHVEKLTKHDNGRDYYLLRSLPGVGRVLALTILYEIGSIHRFDSVQKFASYSRLVKCKAESAGKACGTQGNKIGNAHLKWAFSEAAVLFLKGNPPAQAYLLKLQKRMSKAKALSALAHKLGRCMYFMLKNQTVFDSERFLAG

SEQ ID NO: 470982 - protein, 334 aa, unidentified
MITEPSPIVGVDIAKDKFDVCLVLPTRHFCAVFPNTTSGVARLVAWLAHAGAEAASTRVCMEATGVYSRAPCALLHAYGFTVHLENPARIAAHAKALGKRSKTDAQDAFVIADYCRANLAKLHAWKPPVKNIALLRELLRHREQLTGLLTAQGNMREACADAAIVASCKRVEHTLRAELKATLKRIAELLASDEILTAHRDHLTAMKGVGVLTAAELICHVLTHEYETARACAVHTGLTPAHRESGKSIHGAARISRRGDAHIRHALYMPAIAMTRYNAAARAWVGALLLRGKAKKAARCALMRKLVHIAYGVITTNTTYDPLKAFPTVSGGLT

SEQ ID NO: 470983 - protein, 328 aa, unidentified
MSKERFYVGIDVGCSEVWVVAGKSKARKFSHNDQGVKQLYRWAKEKSGELLLHFCMEATGVYSQSVAVRLLGRGRCEVSIVNPAQIAAFAKAQMRRSKTDQIDAQVIWDYAQSQQPHPWQPERQAIQHLAALVTQADALQKTLRSWQNRCHTHQYYSDLPRTVQQTTAKVEQMLQRQLEKVQQEIHRLCQADTELKRDVGLLCTIPGVAELTATRLLAYGKSALTERSPKELTAHAGLAPRHRQSGTSLNGKSRLCKQGDARLRFLLYMPTIVAVTFNPIIRYHYLRHLANHKPKMVAIMACMKKLLLMAQAILISHQPFNPNLKPLT

SEQ ID NO: 470984 - protein, 395 aa, unidentified
MFIVGIDIAKRSHEAIIIAEDGQVVRKAFSFRNNCTGYNLLLEQVRRLTLVKSQIVFAMESTAHYWLALYARLLKDGYAVMVLNPIQSHSLRELYIRKAKTDARDSLIIADLVRFGRCKASNVPQDKILALRELCRSRAYLVDMAADLKRKLIALLDRIFPEYESLFDSVFSKASIAVLCKYSTPQKVKNANLRKLTDILMESSNGHFGEWKAHQLKEAACSSFGIDDSGGVYSTLLGMFLEQILSLTAQADSLEKQISVFFQEFNNPLASIPGVGTVLAATILSEIGDITRFSSADKLLAYAGLDPSVKQSGEFKSNQNRMSKRGSPYLRRAIWLASTVAVHRDPMFQTYYEKKISEGLHYMNVIGHVSRKMTAVIFAVLRDGQPYQPILQSAG

SEQ ID NO: 470985 - protein, 346 aa, unidentified
MSQIIRIGMDTSKHIFQLHGVDAAERPVLRRRLRRHEMLAFFVKLPPTIIGMEACAASHYWARQLGELGHEVKLIAPQHVKAYVKRNKNDGRDAEALCEAMSRPTMQFVPVKTEEQQAALMLMGVREQLIKRNTQLGNAIRGYAAEFGLITAKGTDKIEPLLARIAQDGSLPELAREMFAIQGRDYARLQVELKAIEARLRVWHRANADSRRLAKIPGVGPICAVTLVLKAPDPHAFSSGRHFAAWMGLTPKDHSTAGKTRIGKITRAGDERLRSVLVSGATSVIQQAKKGRGRQPPWLVALLARKPPKLAAVALANKTARIAWKLLTTGESYDGGQMSGASAIAA

SEQ ID NO: 470986 - protein, 402 aa, unidentified
MSSVFVGIDIGKKKHQSALMGEKGETLARTLSFTNSLAGFQSLLKQLDPWSKEDILIGLEATGHYWLDLYAKLVDTGYSVVVINPLQTDGIRNMYVRKTKNDRCDAVIIADVLRFGRYRESSVPEEDIAQMKALSRLRTGMVQSMSNVKRKTIAILDRLFPEFEACFNDIFSKSSMAVLDEFADPEELALCPLEKLTDLLFESSKGRLGAAKAEHLKETASGSFGTCYAKRSMKFELKLLLEQVRFIQEQILEIEEILKELMKDHQLITSIPGISDILGSAILGEIGDISRFENPKQLVAFAGLDPSVHQSGNFNATSMHLSKRGSPHLRRALYIAAHVARIHDPVLKEHYEKLVNRGKHHRQAQNAVASKLARVVFSVLYFKEPYDIEKLRSKPKLEEMSA

SEQ ID NO: 470987 - protein, 343 aa, unidentified
MQSVTTIGLDIAKSVFQVHGIDAEGNVVIRRQLKRRYVLAYFQKLPPCLIGIEACASSHHWSRELQGLGHTVRLMPPAYVKPYVKRHKNDAIDAEAICEAVTRPNMRFVATKTPEQQSGLVLHRTRHLFIRQQTAVINSIRAHLAEFGIVAPVGRNGVEELLNVVADASDKRLPDVARACVAALGTQLRVLKAQLLEFDRMIRAWHRSSEMSMRLDHCPGVGPALATALVATVADPKAFRSGRNFSAWIGLVPKQNSSGGKDRLGRISKRGDRYLRGLFVAGALAVIRYAKIHGTKHRPWLTALLARRPTKVAAIALANKIARMAWAMMAKGERYKEPVALAA

SEQ ID NO: 470988 - protein, 389 aa, unidentified
MSSESTAVTALAAVARSIIYLGLDVHKDSITTAVLPKGAATPTRVERLPNDLPRLKRFLDRLARDGDLRACYEASGAGYVLQRAMREWGYACEVIAPSLIPKRPGVKRKHDKRDATELARLYRAGELTPVRIPSEAEERVRDVVRCRETFQREILKSRHYILKFLARRGLVFREGTNWCTPHLRWLKHLTTEQSPLSPADRLVFREYHALLEYKLQRRDDLDREVARLAELPTLAPAVQRLQCFRGIALQAAMVLVTEIVDWRRFERPTQLAAYLGLVSREDSSGDREWRGSITKAGNSHCRHVLIQAAWSYHHRPAVSMDLKRRQAGQPPSVIAHAWKAQQRLHQRYNHLSYRKQRQIAVVAVARELVGFLWAVMQDCASPAIGESAA

SEQ ID NO: 470989 - protein, 412 aa, unidentified
METLVQRPAGLDVHKQQVTACVRVPGPGGGREQHVAEFSTTVAGLLALRDWLAAFAVEQVVMEATGVYWKPVWAILEDEFECLLVNARHVKQVPGRKTDVSDAAWLCQLAEAGLLRASFVPPKPIRALRNLTRYRKTQIQERSREANRLHKALEDTGIKLDCVASDILGKSGRAMLDALVAGTTDPEVLADLAKGKLRPKIPALREALQGRFDHVHGVWIGAILAHLDFLDEQIASLSTAIAEQIAPFEKAVELLCTIPGVQRRTAEVLVAEIGVDMSVFPTAKQLASWAGQCPGNDQSAGKRRSGKTRKGSKWLDWALEESALAAIRTKDIYLAAQYRRLKPRLGHKKALGAVKHSMLVACWHMLSTGELYRDLGGDYFRKRDPERITKRLISQLEALGHHVTLQKTPVAA

SEQ ID NO: 470990 - protein, 356 aa, unidentified
MISRRALNVPRIVVGVDTHKDEHVAVVINKLGVRIGQRNLPTTNTGYVGLEHWANGLGEIEAFGVEGTGSYGAGLARFLRGQGHSVIEVNRPDRSTRRRLGKSDTTDAEMAARAVLAGVARDQPKSGVDEVEMIRMLKSTKDSAMKGRTQAINQMKALVVTAPVELRAVLSGLTVSQLVSHCARWCNGQLETPTTAAKYALRSLARRYAQLTEEIEGLNKELSRLTAAFAPMLMESLGVGPDTAATLLVTAGSNPERLKSEAAFAALCGVSPIPASSGKTNRYRLNRGGNRQANAALYRVVIVRLRYDARTKTYLQRRTEEGKTKTEVIRCLKRYVAREVFGILHDIGMRHAVQNT

SEQ ID NO: 470991 - protein, 351 aa, unidentified
MIHVGLDMHKKFSEVAVMESDGRLLDRRRLLHADKQGIHDYFSQLPAPVTVTMESTRTWYWLYELLEEYADVKLANPRKVRLIADAKVKTDKIDARTLAHLERTGFLPESYIPPREIRDKRELLRYRASLVSIRTGVKNRAHALMDKLGVIHPFSDLFRKAGREFLASLELRPIYRRALDGYLQLIEWLEELEREATTEITKIIKDNDDAKRLMTIPGVGVITANLLLCEIGDIERFPSAKKLCSYGSLTPGTKQSSDHIWNGPVGRKGNLYIKWAMIEAAQHATHMDPAVGAFYDKLRISKGNAKARVAVARKLLTAVYYILKRKEKYKPNSLCTIHLGKPAGLPGHRRW

SEQ ID NO: 470992 - protein, 321 aa, unidentified
MNYVGIDVSKATFVVAYSSAKGSETKTFENTTKGVHKFIQTITPEDTHCVMEATGNYSMLLVYLLSKAGITVSMENPLKIKNFARVMLSVVKTDKIDARMIAMYGEKMNPASFKLRSDSLMVLKQKRTVLRQLKKQLNANTNLQESMEALPFIDSVCKKILDKTVKFLRKQIQEREEELSSLANIEYKKQMDLLTSIKGIGVTLATALIVATGGFTYFDNAKQLTRYLGLSPTYQQSGTSVNLKGHINRNGDSYLRSQLYVAAFSSLRCNTECKACFDRLRANGKPGKVAVVAVANKLVRQAFAVVTQGKEYVDGFISAKK

SEQ ID NO: 470993 - protein, 372 aa, unidentified
MSVYVGIDVHRKRSQVAVIDGDGEVLANRNVPNGTETILGVIGGLPAGTPAAFEAAFGWGWLLELLEDYGFDPHLVHPLQCKAIASARLKNDKVDAAILAQLLRADLLPEAWIAPPAVRQLRALLRHRAQLVRLRTLLQNRIHAVLADHGQDRPSGCWSGPGRGWLASLELPAVSREVVEDDLALIDALQVPIDRLDAEVRQRARSDPRVKILAQLPGVGTFTALVILAEVGDITRFGSARKLASWAGLTPTVRGSDRTVRHGHISKQGSAWLRWILCEAAQTAKRHPGYAASYAAIARRRGKKIATTAIARKLLTRAWHLLTDAERTASHQATATTSAPRAPRPGCGHQPGGVAKPRVSSQNRMSRPSRAR

SEQ ID NO: 470994 - protein, 350 aa, unidentified
MKKICIGIDVSKETLDVTVIHIESYELMEKLGYSKFENRPSGFRSMTAWVRKVIKSRGQMDEALFCMETTGSYDLPLCHWLHKNGLNVWRESALQIHCSKGFQRGKSDKEDSEIIAQYAARHQNRYTAFVPDAEAIADLKELICYRDSLVERRKECKVRLANKKETLVNKNSKAWKCIERLSKAEIKRLDKVIGECDEEIRNLMKEDEQMEKNYQHLTSIVGIGLINGAALIAYTGNFKKITTPNKMSCYCGCFTFYEDSGTSVHRKSPYRNACCRMLKGYLRMAAKSAMLANTELRKYSERLREKGKPYAVILNNVANKLLHIMFSLVKHDYDYEYNHEVVRRMGREIA

SEQ ID NO: 470995 - protein, 305 aa, unidentified
MIAVGVDVGKALLEVAIHGEVKLQRFDNTATGVRRLVGLLKARGAQRIVVEATGGYEEAILDACAAAGLWVARINPRQARNFARAIGQLAKTDGLDARMLAEMAAVFHARLRQHSVAEPWQVELKSWLRRRNQVTEAISCTRQQMAMSLSAIRALTKKTLTALQRERTVIDATLKRLLQQHATPALRSSKGMGPMFQAAALALLPELGQLNRQQLAKLVGVAPLNRDSGQSQGKRKIYGGRGQMRVALYMAALSAVRWDPNLRAHYQQLRARGKVAKVALVACMRKLLTILNARRREELRVENYA

SEQ ID NO: 470996 - protein, 368 aa, unidentified
MEQKERRFVGIDLGKTKYTIKVILSNGKVIGWEGKTTPAGRNDLYKQLLPTDRVGIEVCSLAMKMVREMNEKVGCDIALMDAHQLAVIYNSVKKNDKEDALKLARLVQKNSNEELPVVSLPSEQETKRRNLLTENKELKQSRTQEINRLHAIFLRCGYTEVVKKNLATKENREEISCLLKGFDLEQARRIMHRIDIIEEDINTVDSEINIEVKGDKRIELLESVPGVGMLTAMAFVAYIGDGSRFHSASQVSASIGLVPKIDMSGSINRYGGISKHGCGYLRSLLVMASWSLIRSKTDSALKLKYNYMVKFQSKNKRKAIVAIARKLAELLYIMLRTGSKFEVRPFRKSSTKELAECAINQKEESGAA

SEQ ID NO: 470997 - protein, 356 aa, unidentified
MVTGLKHQKEKRSMDHFAGLDVSIKETSVCIVDDTGRIVREVKVASEPEALLQELAKSAYRFRRIGLEAGPLSQWLFSGLVEAGLPVICVETRHMRAALKAQINKTDRNDARGMAQMMRAGLYRPVHVKTLRSQKLRMLLTHRKLLQSKAIAIENDLRGTLRNFGLKVGVAGAVKFEARIKELVENLPDLAVLVEPLLIVRRVLREQLGILHRRLLAIVRDDEVCRRLMTVPGVGPVVALTYRATVDVPARFRTSKAVGAVFGLTPSQHQSGESERTGAISRCGDEMMRVMLYEAAHIMLVRSAKWSWLKAWAMKIARHRGMKKAIVALARRLAVIMHRIWVDGTEFRWTREVAVA

SEQ ID NO: 470998 - protein, 339 aa, unidentified
MKEVSTVGLDLAKKVFQVHGVDARGTVVVRRALRRSQLLAWFAKLPRCLVGMEACATAHYWARELVKLGHDVRLIPPAYAKAYVRRNKNDPADAEAICEAVSRPAMRFVAIKSERQQAAAGIHRVRDLLMKQHTMLRNQLRGLMAEFGIVAAKGRRGLGELLAILADAEDQRIPSPLREGLLLIGATLRETDRKLEIIDRQLAAAGREDATYRHLITAPGYGPILSSAMAAMVIDPAAFRRSSDFAASLGLVPRQEGTGGRVWLGPISKRGNGYLRRLLVNGATSLLNSKRAKQDPWLVKLLATKPRKVVAVALANKLARIGWALMVRQEDFRGLPAAA

SEQ ID NO: 470999 - protein, 409 aa, unidentified
MNDFHYTGLDVHKKTIQYCTKLADGEIMREGRIQATRAGLAEWIARQSHPWKGALEATMFSAWIYDVLKPHAAELKVAHPAMLKAIVASKHASDRLDARKIADLVRMDWIPKVWMAPPEIRSLRLLLRYRNLVVRQATQTKNRIASTLMEHGVEYSKDKLHGKRYFDDLLGRLDEVPAAVRSLLRTSRGSLEMFESVQRMLLKRLRTDPLLAKRVQLLDTVPGVGEVTALSWALEIGDPQRFRCAAQAMSYCGLVAALQESAGKQYRQPLSKKRNAHLQTVLIEAAHFAVRYSPEMRALSEQVEAKRHAGAAVIAVARKLVSYLLAVDKSGQPFQIRTATQAPGSPTGKAACPPAPPIEAVPVARRSSPSRVRKAAAAKPAAPWTAAGRRADNRVAMGGSGGKAARRPN

SEQ ID NO: 471000 - protein, 345 aa, unidentified
MKHFIGLDVSVKETAVCIVDGSGKICREVKVHSHPGDLLAVMTDPSWNIERIGLEAGPMSQWLFEGLASAGLPVVCIETRHVKAFLKAQPNKTDRNDARGIAQMMRVNLYRPVHVKTQTSQKRRALLTARKLLQGKAIAIENDIRGLLRNFGLKVGAVGTVKFEERIRELVEDMPELEELMESLLAARNKLRAEFARLHKKVLMAAKEDATCKRLMTIPGVGSVTALAYTSTIDIPQRFRSSKAVGPILGLTPKLNESGESRRVGRISLCGDGMMRTLLYEAAQTLLTRVTKWSWLKAWAMNVAKRRGMRKAIVALARRLAIIMHRMWLDGTGFRWTREEPASTV

SEQ ID NO: 471001 - protein, 395 aa, unidentified
MVACVRIASGGEVSRAVRTFETTTARLIELAEWLEASGCTQAAMEATGVYWKPVWQMLAGSGFELVLANAAHVKNVPGRKTDVNDATWLAELLAHGLIRASFVPGPEIQELRGLLRTRKQLVREKASHVQRLQKTLEEANIKLESVLSDVMGRSGRAMIQALIAGETDPAKLAALAHPKVRAPQARLREALRGRVKRHHRFLLGLHLQQIEALDAGIAAIDREVDAGLASFRDAVKQLSTIPGVSELSAQVILSEIGTDMSRFATAAHLRSWAGLCPRNDESAGKRRSTRLRMGAPWLKAMLVQCAWAAARTKATYLNAQFVRLRARRGPKKAVCAVAASILTAAYHMLKDGTFYQDLGATHFDRRRPEAHARRLVKRLADLGFSVQLEPVAAVS

SEQ ID NO: 471002 - protein, 431 aa, unidentified
MTICLHMQTYIKFSRFYTVVIKIKTTLLKILIKRAFNLNILYNLANNFNLRPMRRVCGLDVHKDSVFMCILSENGEKVQEKYGVLTKELDTLRDVLVENNVGEVAMESTSIYWMPIWRVLESDFDLKLVNPYFIKQLPGKKSDVKDAEWIAICLQKGLIKGSFVPDVAIQRLRQYNRRIFDLNKDISYKLTKLDMALQRCNIRISNYISSTDSKSYKKVVEKLASGLTDPQELEKCIHGRTVNRFGKDIITASLTGVINETDIDIMSQLKSEIDLAERHKSECLMKMREICMENYPEQLENIKSIPGIKEQSATSIIAEVGVDMKMFLTAAAIVSWCGLRPRNEESAGKIKSRKIVHGNKYLRRTLIECAWAASKTQGCFYNKFSYTQVNIRKKNVLKVRVAVARKMLVTIWNILSKGEAYREILDCIQPQ

SEQ ID NO: 471003 - protein, 380 aa, unidentified
MTRRATRLTEDAAGYAQLDAALVALAPPEATLVVCEATGHYWQNVVAHLWAGGWRVALVNPLRTARYAGEELVRTKTDAMDAVLLARFGREQQPAPVPVTDEATRELTELARLRTRLLQDVQDRVNQLHRVVGYAVCDLTFPEFTRHVKTLDSELAIAILARSPTARALAQVTPRTLAGLVYDGRRRVGDDLAQALVAAATASVGAHHPEAYVGQVRYAAEDLTTLRARLRELDGELRTRVEEHDVGRHLLTIPGIGPITAACVLAETGDLARFPDAATLASYAGLVPALRHSGKRAPSRAGCHPAGNARLRRGLYRATLTAVRYNPWLRTFYQRLLARGKPKLLALPAAMRKLLTAIHSVARRRQPFVIPAEAPALVTP

SEQ ID NO: 471004 - protein, 352 aa, unidentified
MTVTIVETRAQACAITGGVDTHADVHVAAALDPIGGLLGVAEFPATPAGYAQLLGWLGGFGTVCLAGVEGTGSYGAGLARYLAAAGVRVVEVDRSDRQDRRRAGKSDPLDAVSAARAAQSGRAAGAPKGRDGQVEAIRALMVAKRSARSERIQTINQARALIVTGPDDVRARFAAHGPAELVAELALLRPRPGATVGYATRIALRELGRRARFLDGQLRRLDEFIVPLVTARAPGLLALYGVGPDTAAMLLVAAGDHPGRLRSEAAWAHLCATAPLSASSGKVTRYRLNPGGDRQANHALYRIVITRLSSHPPTRAYADRRTKEGLSKKEIIRCLKRYVAREVYPHLRPPAG

SEQ ID NO: 471005 - protein, 368 aa, unidentified
MKKNNTCLKSPKRSKTRKRSITIGMDLGDKTSRYCVLDSEGEVVREGTVATTKKGMKQRFGNLARCRIAIEVGTHSPWVSRLLSSLGHEVIVANARQVKLISTSSRKDDRLDAQTLARLARVDPQLLRPIRHRSEKAQGDLMQVRVRAALVDTRTGLVNTARGLAKAMGERLPKCDADQMGVGKMQGLPAVLVEALAPLLETVELLTQQIKASDQKLEQLAGRDYPETELLRQVSGVGSLISLTFVLTVEDPKRFRKSRDVGCYVGLRPRRSESGESRPQLGISKEGDEYLRKLLVQGAHCILSHKSPDTDLKRWGLKLAGKGNKNAKKRALVAVARKLAILLHHLWVNGEVYEPLRNSRLLEQKAVA

SEQ ID NO: 471006 - protein, 379 aa, unidentified
MGHLPRPPSNRETFRRAVRCHPVALKEWLEPDAGRPARPVLRGRRRSNASLLPDQLHWVEPETGEIISKQIKRAVFLEHFANRAPCLIGMEACGGAQHWARQLIEMGHQVRLMPGKAVKAFVSGNKNDVTDARAIWMAVQQSGVKSVAVKSEAQQAILALHRMRQQLIKFRTMQSNGLRGLLTEYGEVMGVGRAALNRSMTEVLARLNERLPAMLANTLREQWSRLGELDVQIAEIERRLSAWMKEDRSCRQIAAIPGVGLLTATAAVATMGNPKAFKSGREFAAWLGLVPGQVGTGGKVRLLGISKRGDTYLRTLLIHGARAVLSHTKEPAPWVEQISKRRPKNVVTVALANKMARTIWALLAYDRSYESNYVSVKPV

SEQ ID NO: 471007 - protein, 329 aa, unidentified
MCVVDAKGQIVREVKVLSEPDALIAWFKSLDLPLARIGLEAGPLSQWLYAGLAKASLAVELIETRHVRDAFKAMPVKTDRKDAHGIAQLMRLGWFRPVHCKSLPAQEIRAMLTARKLVQAKLHDVEMSLRGILRGFGLKVGHTTPRTFEARVRELVTGHPTLTEIAEALLAARTVLHKEFQGFERRVRTLACCDDRAKLLMSAPGVGVLVSLTYAAGIDDPARFKKSRQVGAHFGMTPKRYQSGEKDVTGRISKIGDRSVRTALYEAANTILIKPVKAGPLKGWAMRLAARAGMKKAKVALARKLAVILHRMLVDGTPFVADKAAMIRG

SEQ ID NO: 471008 - protein, 319 aa, unidentified
MVVMAAQETPSRVVGIDVSKATLDVAVVPSGEQWQVSNDARGIGQLVEQLQQLGPERIVLEATAAYEVPVVAALGSVGLPVVVVNPRQVRQFARSIGQLAKTDVLDAHVLARFGAAVQPQVRPLPDAATRELAALLARRRQLVEMHTAETNRLAKAHERVRPSIRELLRFLDKRIAELDRELHDQLRASPLWREKENLLRSIPGVGRVLSATLLAELPELGTLGHKQVAALVGVAPLNRDSGQWRGKRTIWGGRAVVRAVLYMATTVGVRHNPSLRALFERLMAAGKHRQAALVACMHKLLSICNAVLRSKTVWRYEGS

SEQ ID NO: 471009 - protein, 325 aa, unidentified
MTGQPNATEESITVGIDVAKHTIEVAIGADGPILSLANDAAGFEALLEHLAAHRVALVVVEATGGLESALACTLQLAAYALAVINPRQARDFARAMGQLAKTDRIDARILAQLAQVLARHPERDKFIKPLPTAAQQALAALVARRRQIIAMLVAEHNRLAQAHARTKKSIHTIIQALRRELERIDTDLAAHVRSHFADLSSLLDSVKGVGKNTIATLIAEVPELGKLTGREISALVGVAPINRDSGALRGRRTIFGGRASVRHALYMAALVAARHNPVIKLFYGRLVAAGKPKKLALVACMRKLLTILNAMVKAGKPWDASLHAA

SEQ ID NO: 471010 - protein, 408 aa, unidentified
MLFIGVDLSDKTFDSYISNSSGDVLAINKFDFNDDGFSDFVHKINEHESENQNCIIGIENPRSRLVDFLIQRGYNVIPTHPLSISKYRESRIPSKAKSDPMDARLIADYIREHHKSLRLINMPDDTIRELSILLEDRDKLVEQKVKFSNQLTSTLKEYFPQALEAFGSITNKSALDFLSKFDTHQEVKALSSQKLDDILQECGFFRTDSKERFHGAMSKKPSSISRAVIKAKVRLKNVLVGHLLLLTQQIEDYDKQIQKLMDDTPDSGIFRSLPGADYILGARLLVLYSSREFASASEAQSFFGTCPYTSRSGSMISVGFRKGCNHFGRNTFHQLAFCSLKSSQWSKKQHAKKRKEGKRSHHALRCIANTWVKITFAMWQSKTHYDESRHLASIANHILNQPSYILGG

SEQ ID NO: 471011 - protein, 394 aa, unidentified
MRFAGVDIASETHVVALVDEDGKVLVKPTAFTEDAAGYEKLFEQLGASAELLVAMEATGHYWKNLFAALAARGFSVALLNPLRTHRFAEEDLQRTKTDAIDALGIARFAAQKRPPPTRLPDPATEELRELVRLRERLLQDFGDRVRQLHRLVDLGFPEFTRYVKSLDSELASAILHDYPTAAAFRGVSAKRLAALRYDGRHQVGAELAGLLIAAAKHSVGHHHGEAYRVQVRYACEDLDILRRRLRQLDRDIAGTLGAHEVGTLLTTIEGIGPNTAARLIAELGDPAAFRAPGALAAYVGVVPALSQSGKRKNTRAATTPIGNARLRAALWMPTLTAVRRNPWLRAHYLRLLARGKLPKVALVACMHKLLLAVYSVAKNRRPFVAHLATVETTP

SEQ ID NO: 471012 - protein, 364 aa, unidentified
MANNITWVGMDDSAKTINLAIFKGQEINPREELVVINDSTGLGRMAKKLKTLPGEVRCVYEAGINGYYLQRYLAKHEIACDVAAPSLTPRRVGNRVKTDKLDAKALARLYRAGELTCIVIPQHEQESIRDLIRAREDALEDQLRARHRLARFLMRRGWRYRDGKNWSQGHLRWVKSIRFEDDRDQMVLDEYRSALAEQTERLDRLNVKIEEVSKHPTYDTRVRYLMALKGIRVLTAMTIIAEALDLRRFTDAPAFMAAIGVVPSEESSGEVERRGRITRTGNSHIRRVMIESAWTYQHSSVSGKTVQNRRKGLPAEVLEIARQCDKRLHHKFRRMASRGKDRQKIAVAVSRELAGFVWAIGKVA

SEQ ID NO: 471013 - protein, 318 aa, unidentified
MNIIGLDISKDTIDATLHKINGSIHYIKFKNNDDGLKQFRLWIKGNRIRKAYIGMEATGIYYEKAADMLSSYYTVYVINPLKIKDYGKSRFNRTKTDKADSNLIADYIKRHQDTLIPYQIPKNKALQKLINLKNQLHQHQKQIKNRLHSTEEDFIRNIHQDLIDTIQDKMEQVKIAISEQIKKQTDNNHYRNLQTIPSIGKDTASVLYAQLTEKHFKTANQFVSYAGLSPAIIQSGTSVRGRGRLSRYGNRRLKSTLYMPALCAYRFNAFPKLINNLKKAGKPKMVIIVAIMRKLAKLAYYIVKTGQPYDAERHRLNQ

SEQ ID NO: 471014 - protein, 410 aa, unidentified
MQILYPRCCGLDVHKASLTACILINESNRKERQLRRFGTMTGDVNELAAWLTAHGVRKLAMESTGVYWKPIWNLLEDGFDLMLVNAQHIKAVPGRKTDIKDCEWIAELLQHGLLHGSLVPPEPVRELRDLNRNRAILAQQRATVSNRIEKVLEDANIKLASVASHVLGQSGRTMLQAMVDGILEPAKLADMARAKLRKKIPELRLAFQGRFVERHRFQIEQLLDQLHFLDATVAEFEQQIEERSRPFQDKIDLLMTIPGVDRITASSMIAEIGGDINQFPTAQHLASWAGICPGNKESAGKQYSGKTRKGSRWLRRVLCQAAWAASHTKNTYLAAQFRRLAARRGKQRATVAVAHSILVAAFYILKRNEPYREAGGNYFEQVNPTAMRRYLVKRLERLGHRVILEPATAA

SEQ ID NO: 471015 - protein, 349 aa, unidentified
MVILGIDAHKRTHTVVAIDEAGRQLGAKTTLATTTKAHLELVRWSDRFGTERRWAVEDCRHLSRRLEADLLAAGEQIVRVPPKLMAHARDSARTYGKSDPIDALAVARAAHREPTLPVARLDGACRELRLLVDHREDLVRDRTAHINRLRWHLHELDPSWDPTPRCLIRSKHLDAIAAGLEGMEGMVARIARDLVGRIQELTIGADALHREISQRVETLAPTLLAIPGVGELTAAKIVAEVAGVRRFRSKDAFARHNGTAPLPVWSSNRVRHRLSRTGNRQLNAAIHRIAVTQKRCHEPAKSYLDRRLANHNTKTEALRALKRKLSDVVYRALLADAGSTAVASIGQAA

SEQ ID NO: 471016 - protein, 459 aa, unidentified
MKRGKRKEKSLPPQLAAVNLPAAGIDIGAPEHWVAVPPDSDTEPVRRFGACTADLEALADWLRQCGVTTVAMESTGVYWIPLFELLEARGFTVVLVDAREVQRAPGRPKSDVQDCQWRQRLHTYGLLAAAFRPPEQICVLRSYLRQRAMLVTYAGQHIQPMQKALTQMNRKLQHVVSDITSVTGRAILKALLSGERDPATLAQLRARNCQHSEAEIARALQGTWRAEHLFALQQAVELYECSHGQSAACDRQIEAHLQTFADHSGEKTLPPAPRTPKRRRNEPHFDARLPLCRVTGVDLTAIEGINEPTALVLLSEIGTDLSRWPTEKHFAAWLGLCPQHKISGGKVLARKVRPGANRAATALRLAASCLHHSHSALGAFFRRLKARLGTPKAVVATAHKLARLVYRLLKHGEAYVAQGMAEYEEAYRERVVQNLVRKAKALGYQLLPTPHTTGSVTSA

SEQ ID NO: 471017 - protein, 336 aa, unidentified
MNGSIGCWVGVDVAKSKLDVALLDEHGKLKSRVFANEAKGHAALMAWLGQRGCSRQHIRVCMEATGCYSEALAISLVDAGWCVSVVNPARIKGFGQGELLRNKTDRADAALLARFGQAMRPEPWVAPSLEVRQLRALVDRLHNLKEMHQQEANRLEAAMNQTGMRESIESHMQWLQAGIKQLERQIDDHIDGHPQLRADAKLITSIPGVGNTTAAKVMAYLGDVRRFKNAKALAAFIGVTPRLRLSGSSVRGRSMISRSGHAAMRHALYMPALVALKHNPIIKTFAERLKTGGMAPKAVVTACMHKLAHLIYGILKSGTAFNANFMVVRLDSQDGI

SEQ ID NO: 471018 - protein, 363 aa, unidentified
MSTAHASTQASRYVALDVHRSYLVVGAVDSQQHIVLSPRRFGFERFAAWACTHLSEADAVVLEASANAWVLYDQLEPLVGQVSVAHPLAVKLISAARVKTDERDTIKLARRLSANLIPAVWVPPLPVRELQALVTHRKRLVQQRIQVRNRLQGVLQRHNLDAPEGKAFARGARDWWCSLPLSPAEQLRVRQDQVMLEALDPLIAEVETHLGQLSTTHPWSQQIPFLLQLPGLGMVCAMPILAAVGDISRFPTSKQLVGYAGLGARIHASGQVQRSGGITKEGRSELRTVMVEAAWVAVEHHPYWKGLFERLSGRIGIQKAIVAVARKLLVAVWHVLTRECADVHADVQAIARTLLRWTVRCSS

SEQ ID NO: 471019 - protein, 362 aa, unidentified
MPKDQDADRPRIVAGVDTHKDLHFAAIVDGHDRVIADGSFASTRQGYKKMLTWMQSHGTVDRVGIECTGTYGAGLLRYLQAAGVKVLEVTAPDKGDRRRRGKDDIFDAINAAHAAYSGVRTVTPKSRDGMIEALRVLKSCRKTAVSARRVALQLIQNNIVSAPDHLREQLRAMTRMQLIRTLAAWRPDLTDCRDVTSAYRIALKSLGRRYLELNDEIADQDAMIAMLVDDLAPDLIRRQAIGYETAAQLLLTAGDNVERLHSEAGFAALCGVSPVPASSGKVQRHRLNRGGDRAANSALHIIAIGRLRLDAATRAYVAKRLSQGNSKTEAIRCLKRYIAREVYYSLRSRKVEIGRNKSALDC

SEQ ID NO: 471020 - protein, 466 aa, unidentified
MGKSRLERRGKLFSNLYGENFSPHEIAIMAIDIGKTHAVAGVFGYFGEVLHESFIATPDRRGVEHLCQVAEETAARCGRKHVVFSFEHTGHYHEPVVALLRERNCTVLPLNSVTTKRERESDLDRSKTDELDIHYIAAAVSAGKVVTDRPLRPEDEELRFLSRQRRSLVQRRANAFVELHVLIDRYWPAFQGIPEVVDGKAHVERIFAKTWPERALKFLRHVSTPAEALALGEAGLSGLSRQERLALGSRRIGLILRAADLAPKVPQSLIEQYVARLWAILESIEGLSTRIDALEDRCQELLAGSRGVLLLTMPQIGAVTAAEYMAEIGFLVPSLHSASAVIKLAGTNPVPDQSGHRRWMRKISKQGVAHYRTLTYQIGDNLFYGKGNPYFQAFGRRLVHLKPKQIRIAVGNKAHRVIFAMLKNGEVFAPKTWPGPPLAMNPLTKLKPCYRERAREQLLRLGVAGY

SEQ ID NO: 471021 - protein, 397 aa, unidentified
MRRLRYDREDSSVELHAKGVVMKKNSAGSPRFVGLDVHADTIAVAVAEPRGEVRSLGMIANRPEPVKRLVKKLNAEGAWKACYEAGPTGYALYWQLAALGIECEVIAPTLVPTKAGDRVKTDRRDAERLARSFRAGDLTAVWVPDAAHEALRDLVRAREAAKRDELRSRNRLGKFLLRYGRRPPEKMRAWTKQYLEWIKREVKFELYAHECTLEDYLNEVEHCSLRITRLEEQIDKAVETAPAAMREVVAALQALRGIAKVSAVTIVAEVGQLSRFESARQLMGYSGTVSSEYSSGKKTLRGGITKTGNAHLRRIVVEAAWSQRCRPILSRILKLRQEGLDPEIQEIAMKALHRLHNRYMHLLAEGKCPQQVVTAVGREMLGFIWAIGVAVERKQIA

SEQ ID NO: 471022 - protein, 400 aa, unidentified
MISVGVDVSKGKSTVCVLKPYGEIVCSPFEVLHVEKELEGLDNLLQKLDGEIRVVMEATGIYHLPILSFLQEKGYFVSVVNPYAMKKYAKDNSIRGAKTDRLDSSMIANYGIEKWYKLQKHESDEETYAELKLLGRRYRYYMELHVKALQELTHILDYVMPGIKKLFNSWDEASGKDKLSDFAERFWHFDLITSMSLDEFVDEYLIWAGEKKYHRSRSKAETVYELASGGIPTLSSSTPSTKMLVQEAVTVLRAVDNSLSLILSRMQELAKSLPEYSTVRAMGGVGDVLAPKLIAEIGDVRRLHSAKALIAWAGIDPPPYESGQFVGSKRKITKRGSSTLRKVGYEVMRVLKSHKAPKDDVVYNYILKKEREGKDKKHAKIAGLNKFLRIYYARVMAVYQ

SEQ ID NO: 471023 - protein, 344 aa, unidentified
MSEVIIIGLDIAKHVFHAHGADGKGRAIFSKRISRGKLLDFFAVQPSCTVALEACGGAHHWARQLTQLGHEVRLIPPAYVKPFVKRQKNDAIDAEAICEAAQRPSMRFVAVKSEQQQAAGLVFRTRDLLVRQRTQLINAIRGHLTEYGWVAPKGPSHVTMLTDLIEEEEMASSLPKAAQVMFRLMLDLLTDLNGKVADLDREIARRAREDEVSRRLMTVPGIGPISATAIAALAPPAETFAKGRDFAAWLGLTPLQRSTGGKQKLGATSKMGERTLRRLLIIGSSAVVQQASKRGAPRGSWLEQMLARKPRMLVTVALANKMARIVWALLVKCENYRAPVAAKA

SEQ ID NO: 471024 - protein, 400 aa, unidentified
MISVGIDVSKGKSTVCILKPYGEIVSKPFNITHTQKDLSELSSMLFRLNDEVKIVMEATGIYHLPVLTYLHEKGFFVSVINPYLMKSYRNESLRKAKTDKIDSRIIANYGIDHWFKMKEFQISGVIYEELKLLGQQYRHYMKLHLLSLAELTHLLDLTMPGIKNLLASWNETNRKDKRSDFVERFWHYDVITSMSEQEFTEKYILWAKEKKYVPSQEKAKVIYTLAQESIPTLPSETSSVKMLVTEAVRVLKEVDATLGLILSRMQEIAKTLPEYSVVREMGGVGNTLAPKLIAEIGDVRRFRNGKALVAFAGIDPPPYESGQFVGCNRKISKRGSASLRKVGYETMRSLKMRSRPEDPVYRYVVKKESEGKSKKSAKIAGLNKFLRIYYARVTELYKNI

SEQ ID NO: 471025 - protein, 355 aa, unidentified
MNSLKYIGLDVHLATISIAVLNAAGKLIMEVTIETQAAALLDFIRGLRGTLQVALEEGTCAEWLYALLAPQVAKVVVCDPRQNPRRLGEKKSDRLDARKLAEWLRLGTLKAVYHGNPRGPALRESARSYCTLVSDPVRVMNRLKALYRGRGIRCAGTRVYSPRGRGEWLAQLLEPGVRRRAERLYQQFDWLLPLRQEARAAMLAESRQHAAQKILRSIPALGPVRVALLIALLQTPHRFRGKRQLWAYAGLALVTRSSADYRVVAGQLARSRQPALILGLNANHNHALKALFKDAAASALAHPGPLKDFYTTRVAQGMKPELARLTLARKIAAITLTLWKKGERFNVQHLKPQAA

SEQ ID NO: 471026 - protein, 455 aa, unidentified
MPKTTTDNRPELKPVNLGAAAIDIGSKMHMAAVNPACTDIPVRAFGTFTQDLHDLADWFKACGVTSVAMESTGVYWIPVYEILEQRGFEVILVNPRYAKNVPGRKTDVSDAAWLRQLHSFGLLRGSFRPDAEIATLRAYLRQRERLVEYAAAHIQHMQKALMEMNLQLHHVVSDITGATGMRIIRAIVGGERNPDVLATYRDVRCHSSAETIRAALVGNDREEHVFALSQSLELYEIYQAKMLDCDRKLEVLIAALSSKGAKPVGKLSKPRVKTKQVNTPTFDVRTALYSVLGVDLTEIHGLGPSLALKLIGECGTDLKAWPSAKHFTSWLCLAPGNKISGGKILSSRTRRSSSRAAALLRLAATTVGRSDTALGAFYRRLSSRAGKSKAVTATARKIAVLFYNTLRHGMSYKDPGADQYEQQYRNRVLSNLQRRAKSLGFVLQAIPGDANPAVS

SEQ ID NO: 471027 - protein, 356 aa, unidentified
MVARGRTCPDGIVVGVDTHKDEHVAVAVDQRGVHIGQHRLSTTVQGYADLEGWAHRLGEVGVFGIEGTGAYGAGLTRFLLARGYQVIEVSRPDRSTRRRLGKSDPIDAEMAARAVLAGVAQGSPKSGVDTVEMIRLLKVTKDSAMKARTQASNQMQAMIVTAPAGLRAELRDLTIGQLVAHCSGWRQANMCTPTAAAKYALRLLARRHMELSQETEALNAELARLTAAVAPALVSSFGIGPDTAATLLVTAGSNPERLKSEAAFAALCGVSPIPAASGKTNRHRLNRGGDRQANAALHRIVIVRLRHDDRTKQYLHRRTAEGLTKTEVIRCLKRYVAREVYTILQDPDRCIVTDQP

SEQ ID NO: 471028 - protein, 374 aa, unidentified
MTIVAQTRPFVIGVDCHARTHTYAVIEASTKRQVASEQFPTTPAGISRALAWVGRRTDGDMGCLWAIEGVGTYGARLARAVSDAGYDVAEAPRMNARQRRGIGKSDPLDAAAIGTAVLGLEASQLRAPRRDEGTRAGLRILSAARDQLTRDRTLNVNALLALLRAHDLGIDARKPLVPAQIAMITRWRERQEPMELSIAREEAVRLARRVLEATTQLAANQKRMTELIQQSPAAPLLEMVGAGAVTVATVLTAWSHPGRVRSEAAFASLAGVNPLPASSGNTVRHRLNRGGDRRLNRALHTITMTRMVHDPGTRNYVAKRTQEGRSYREIRRSLKRYIARILYRQLNTLYATAELAFTAGGEDPSRDRRGVRCD

SEQ ID NO: 471029 - protein, 477 aa, unidentified
MTTFPLTDHAGPVPIRHQYYAGIDIGYKNHTVAAIPVEAFGGRKPDTWQRAPVCKFSSDASGFEDLQRYLDKRSVDPNDFLVVMEPTGGNYGLSLLFYLLGKSYKVVQVDNSAVGKYQELLAKETKTDPVDARTMARMGFIHEVIGQEFRIREVRQATEAQVALRILVTDYIRVQADVVRRRNQLQQVAAVGFPELKTFFKHSPTSATACAILAAFATPADIVSAGTEQVRRVLLEARAYTLAHHSDDLVALAKATIGVPLSEGMRLRQTWLLEQIGTLEAQREQLLAQMEQASASHPYRPLIESLPVRSPIWTASLIAAIGDIAHFETPNEFRAYMGWFPMLDHSGKSANGTKLANRGVRLARRALGQMVFVLLTPRTADNPFRIYHQRLVARGMKPLKAVGHDAAKLATVLYYMLKTDRPYDEARHRRRMKLPQAQAAVVRPLDVPLEVLDAQVIEEQRHGYASDEIPQDEGAPL

SEQ ID NO: 471030 - protein, 322 aa, unidentified
MSASVLGIDLAKQKFDAALLVDGKTKHKTCKNSVEGFETLTLWLEKQGVEKVHACMEATGSYGEDLAVYLHEAGHRVSIVNPARIKGFGQSELIRTKTDKIDAALIARFCLAMKPGEWIPPSPEVRSLKALVRRVDSLIDMRTQEKNRISTAHESVTLLIKDHITYLDQEIEKIRRQIADLIGQNQQLKKREELLNSIPALGKATIPRLLAELDDLDKFKHVSEMVAFIGLAPRENLSGSSIKGKPRLSKIGNARLRKALYMPALVSIQCNPVMIDFYNRLKDKGKNGKVIVCAIMRKLVHVIFGVLKSGEKYDPNFNQNFA

SEQ ID NO: 471031 - protein, 332 aa, unidentified
MNLVSTLGIDLAKSLFSVHGVNSNGEVVLRRSLSRAKLSELVAQLPTCLIGMEACSGAHEWARRFLASGHTVKLMAPKFVTPYRKSGKNDGNDAEAICEAVARPNMRFVPVKSLEQQSDLSLHRVRVGFVEERTATLNRLRGLLAEFGHVLPLRAVEVHRRVPLLLEKLPARVAACARDLLEHAARLAAKTQQYEHEIRAHVRSNALAARTQTRTGIGPITASALVATVGNGRDFKNGRQFAAWLGLVPRQYSTGGKTRLGHITKRGDAYLRTLLVMGARAVLQRAASLTDPFSLWAMALRERRGYHRACVAIAAKNARVAWALLSKEPTAT

SEQ ID NO: 471032 - protein, 410 aa, unidentified
MQVVYERCCGLDVHKRKIVACLLTLDGGKLQKDIRTFSTTTNALLALLDWLTGAGCTHVAMESTGVYWKPVYNILEGHLELLVVNAQHLKAVPGRKTDVKDAEWIAELLQHGLLKASFVPPKFVRELRDLTRTRTSIVRDRAQAVNRLQKILEDANIKLASVATDITGRSGRAMLSLIITGETDEKTIAELAKGRMRAKLAELEQALIGAVTDHHRFLLAEQLNLVEYYEGMIERLNSGVEKLLLPFQKEIEILDSIPGVSQRTAEVLLAEIGTDMTRFPTHRHLASWAGMCPGNKESGGKRLSGKTRKGSPWLKSCLIEAAHGASHTKDKYLSAQYRRLVTRRGKKRALVAVGHSILVIGYHLLLRKEIYKDLGGNYFDEQHRRQVKIRLVNRLERLGYKVALQEKPAA

SEQ ID NO: 471033 - protein, 317 aa, unidentified
MSTSVDVFVGIDVAKDQLDVAVRPSGESWTVAHDEAGLSALVTRLRALAPSLIVLEATGGLEVALASALATAPLPVAVVNPRQVRDFAKSTGTLAKTDRLDAQCLAHFADAVRPPARALPDAQAHELHALLQRRRQLVDMLTAEKNRLQTAASRIRPQIQVHIEWLQRQIGQSDDELRALIRSSPLWRETEDLLRSAPGVGPVLATTLVAALPELGTLTRQQIAALVGVAPLNRDSGTLRGRRTVWGGRAQVRAVLYMSTLVAVRHNPVLAAFYQRLRAAGKVPKVALTACMRKLLTILNAMLKHRTRWAPVGAQHT

SEQ ID NO: 471034 - protein, 331 aa, unidentified
MFPVGIDVSKNTLDLCMLYDGIKGRIKTRNIQNNRHSVENILRWLRLQHCSPEDVHVVMEATGVYHERLATELHDAGFRVFLANPHRSREFARGMGIMTKTDKVDAYMLACYAFLKKPHRWEPPAPEIRYLGALLRRRDVLLGDALREENRLEKYLSTDTPADIISSCRRMAQLLREEVSNIERQIKAHIKASPALRRDYTLLTSIKSVGPQLGMHMLVVLRSHNFVSAEQAAAFLGVVPIEKRSGTSVRRRPRMSKIGPPQLRAKLYMSALCGKIYNKRMRNIYDEMCLRGKPKMVAIGALMRKLVHWCYGVLKTGTVFNDEDLKPVLST

SEQ ID NO: 471035 - protein, 386 aa, unidentified
MSTDHLLQTKTGLHSDPDAIFVSLELSRSRWLVTSMSPGSEKMSKHSVTGGDAGALLDLLARLQARTEQRTGASAKLVVIHEAGFDGFWIHRLLTANGIESHVVEPASIAVPRRHRRAKTDILDGEILLRTLRAFKRAEPRVCSMVVPPSPEEEDRRRVSRERRTLIKERIEHVNRIQGLLASQGIFGCEPMRKDFRNRLEGLRTGDGRPLGPLLKAEIIRDLDRIDLVLHQIAAVEAERNVLIQSALTNTEAPAVLLMKLKGIGPEFAAVLWLEGLFRNFANRRHLAAYAGLAPSPWKSGSVNREQGISRSGNPRLRTTMVELAWLWLRYQPDSALSRWFRERVGSERGRIRRITIVALARKLLVALWRYTTLGELPKGAALKTL

SEQ ID NO: 471036 - protein, 388 aa, unidentified
MPKHVEAIRTTTAFDHDSTLVVALELSGKSWDCGGVVPGVARQPRRRLEPRDIPGVLRAIESWKSEARAAGREVGRTVLTYEAGRDGFWIAHCLQAGGIEVHVMHPASIPMPRKRRRRKTDRIDLALLLRTFLAWLRGEPGVCSMARILSREEAELRQPGRERERLVAERLRLENRIENLLCLHGVSGFKPRLKKASERLESLRCYDGSLLPSRTMAELRRAMARHHVISDQLREIEAERDQVVTVADPDRAERMIQLLSRFYGLGVETATVLVREALGFRSFRDRRALASFVGVTGTPFQSGGMEREQGIDKSGNARIRRVLMQLAWRWLRFQPDSALSRWFAARTSGAKGRIRKVMIVALARKLLIALWRYLETGLLPDGARLATP

SEQ ID NO: 471037 - protein, 351 aa, unidentified
MIIIGVDYHPSDQYIAFTDTETGECGERRLNHSDQEAEKFYRELALRGVSVRLGMEATGYSRWFERLLAELGIEVWIGDAAEIKTKRVRKQKTDPNDARLLLKLLLENTFPRIWVPSPENRDLRQLLWHRHRLVQMRTRIMNQLQALAMNEGQRRKKKLWSEQGRAQLEKLPLATWASRRRQDLLELLDRMDPTIEALTAAVEQEAKNWPEVLRLITHPGVGPLTALAFVLIIGTPERFHCGKQIGSYVGLIPSEDSSAGHQRLGHITKQGSSLLRFLLGEAAQAAARCDSDWRRRHMHLAMRRQRNIAKVAMARRLAVRLYWMWRNGREYSQWVKFGSHAGQLGTGHGVN

SEQ ID NO: 471038 - protein, 407 aa, unidentified
MPEQVVTTHVVGIDIGMESCTMSCLTMDKRQVIKATPFANTLQGFDWLFERLEGLGVARKQILVGLEATSRYGENLLQALLKRGYQVCLLHPAQMHAFAQQRGLRAKTDQLDAVTIARALLSGEARFGYVPSEQVATYRELMRLQKQLSDDVVRYKNEIHALLVVLFPAFTQVFADPTRPTALAVLKRYPSAQAIAQTEVETLGKFLRELAPRHYGRPTAQELVGLAKASISSGVAVAARSSSLRILCDQLDHTQKNLEQLQREIDQLLDQDRKATGMLGVPEFGPTTVAVLRAELGDLARFTRIDQVVAYVGLDLQVKQSGKWKGQTKLSKHGSGRVRRILYLAALRSIHLEASPFGAYYQRLVARGMKKGMAVVAVMRKMLIVAVHLIQTEESYDPGKVGVQAGS

SEQ ID NO: 471039 - protein, 365 aa, unidentified
MDNEYYTTIGMDVSDRKAQVCVMAKAGATPKIVMETTIPTTKDGLAKFLSTQDRSAPVAFETGMHCRWMNEVAEGLGFKVYVANPCRLRMITESKTKNDVNDARMLARLALSDPGLLHPVKLRGPEHQKMLNLHEMRNLLVKQRTGIIVQLRAVAKSMGFRIAKCQAASFHNLDRKPWPEEFRDIAWPMIKNLEQLAVTIKTYEKQIRELAQTPTFKAQVERLMEIRYVGLYVATGFVAVTGGDMERFEKPRDIGPWLGVTPKQDQSGDIDRQCHITKAGSPLMRRLLVESAQMILRDGSSDTDLKVKGLRICARGAKIAKRKAITAVARSLAVLMVAMLKKPDMPYVPLSERCEKELLAMRETA

SEQ ID NO: 471040 - protein, 308 aa, unidentified
MKTYVGVDVAKDELVVHVLPAELNRAFPNTPEGLTDLLGWLLPHACERVVFEASGGYERDLLEVLHQAGLMAVRLPAKRPRDLARALGLNAKTDALDARVLAIAAQWLPMVPTPPLLSAAQSLREWLHLRRVLVTERDGYRRRLPQARSPDVHTYLIALVDGLQQRIKEVEKHLKQALAMCTTPLQPAPGLGPILRATLAARLPELGTLDRRRIAALVGVAPYNRDSGHWKGQRRIQGGRSDVRRVLYMATWATIRAGSPLAATYQRLVAAGKPKKLAITACMRKYLTMLNAMQRDQAPWNPKTIAAN

SEQ ID NO: 471041 - protein, 419 aa, unidentified
MSFKIIRKNCCGLDVHKTWIYACIGIADSHDRVEYKQARFSSFTKGLNELCDWLAKYNCTDICMESTGKYWIPVFNILEKHNLWVTLSHPKYTKPQTGNKTDRKDAKWICDLYMCGMVKPSFIPPADIRQLRDLVRYRFKLTCMITGEKNRAHNCLTVSNLKLDDVFSDIFGKSSRSITEQILQHPGEFFDVTPFVDDRCKTPIEEIQAAVDGAISPEQAVKLRQCLEHIDELEKHKSEIEREIFRLSDKYEVALNLIRTVPGFDKNPLTAIQVLSEIGSDMSVFPTAKNLVSWAGCCPRNDKSDRKIKSTRISRAGTYFKPVLVQIANALIKSKKHPEFTNRYRRIKARRGHKKAIIAICRMILTAIWHILTDLKPYTAKGFLEPRPVSKEKVLTASQALNLLKQRGYIIKDEPIFIS

SEQ ID NO: 471042 - protein, 343 aa, unidentified
MVACAIDDVAGEIRTQRVSAKTEAIVEWVRTLPGPVAVTYEAGPTGFGLARALAAIGARCVVVAPSKLERPPGDRVKTDRRDAERLARLLRIGELPAVRVPTEAEEAARDLVRAREDARGDLMRARHRLSKLLLRQGLVWDAAAWTAAHEAWLRAQRFDRLGVQLAFDEAFDAVLTVHARRDRLDTAIAKMAATSSFAPVVGRLCCLRGVGTLTAFGLAVEVGDWHRFTGSAIGSYLGLVPTESSSGQRRAQGGITKTGNSHARRLLVEAAWHHRKPYRPSRELIRRRNGQPPAVRERAERGNRRLHRRWARLDARGKRSTISAVAVARELAGWTWSLATMDD

SEQ ID NO: 471043 - protein, 331 aa, unidentified
MTTPAPAPAAPAPEVFAGIDVSKARLDVAVEGAPPFAVGNTPEGVADLVARLRAVGPALVVLEATGRLESAAAAALAAAGLAVAVINPRQARDFARATGRLAKTDAIDAAVLAHFARAVRPDVRPLPDEAARELGALLDRRRQLVGMRTMEQNRLAAGAAGRVRRDLEAHLRWLDEHIARVEKELDERVRSSPAWKAKDDLLRGIPGVGPVASRTLLAGVPELGRLTNKQAAALVGLAPMADDSGGRRGPRRVAGGRGLVRAVLYMAAQAARRHNPVLKAFADRLTASGKKPKVVLVAVARKLVVIANAILRTGEPWDPATAAVAAGSPGA

SEQ ID NO: 471044 - protein, 343 aa, unidentified
MQNDTRIAVDVAKAVFEIAVSDRPGRVSRRERLPRTQFLAFFAQQPAATVVMEACGSAHYWGRRIEALGHRVTLLPPHQVRPYIRRNKTDRTDAKGILEASRNEDIRSVPVRTVAQQVLTSLHRLRSGWMAERTARLNALRGLLRELGVFIPVGARQVVPAVWALLEDADSDLPEALRPLFAEACHEIRDIEARVKHVERQLEAIAEQLLAVEHLRTIPGIGLLTATALVAFIGNIHRFPSGRHLASWLGLTPREYSSGLKRYLGRISKRGDGYLRTLLIHGARSVLLHARQQQPDQLREWAHKLGETHVHNKAAVAVANKLARIVWAVWSRQQPFAQAPRAV

SEQ ID NO: 471045 - protein, 387 aa, unidentified
MYYVDIDIAKHNHFASVISSDGEVLIKPFKFTNDNDGFCKLLSALAPYECGSLIIGLESTAHYGDNLVEFLVSRRYQVCVINPIQTSTMRKNNIRKTKTDKVDTFIIAKTLMTQPHRFYTLEDIDMMHLKNLGRFRQKLVKDRTRIKIQLTAYVDRVFPELQYFFKAGLHQKGVYALLAEAPTPELISSMHLTHLTHLLEVASHGHFTKEQAKELRVLAQKSVGSSDKALSIQITQSVEQIVLLDSHVKQVESEMTEIMLGLDSVIMTIPGIGYINGGMILGEIGDIHRFAAPKQLLAFAGLDPTVYQSGNFNASHTRMSKRGSAALRYALINAAHNVVKNNTTFKSYYNAKIAEGRTHYNALGHCAGKLVRVIHKMLSDDVAFNLG

SEQ ID NO: 471046 - protein, 341 aa, unidentified
MTTATIIGLDLAKNVFHAHGASEAGAVVFRKKLSRSQVLPFLSEQPKCIVAMEACATAHGWAREIERLGHSPRLIPPQYVKPYVKRQKNDMADAEAIAEAGSRPTMRFVEPKPEDQQISAMAYRTRQMFIGQRTQTINALRSHLAEHGVIAATNMCGLKKLSAMIEDETVSMPCKVRELAHVYVDHIAQLTAQIAEMTGEMREMAKKSAVVKRLQTVPGVGLQTAMAVETFAPDPGCFSRGRDFSAWLGLVPRQNSTGGKSRLGKVSKMGQVYIRSHLIRGAMSVISAATRFGIKKGSWLERLLARKPKLVAAVTLANRMARAIWAMLTKNEDYKNPEAVA

SEQ ID NO: 471047 - protein, 353 aa, unidentified
MAVAEPDGTVIEYGAIPNDPSSVRRLVEKLSRDAQLRTAYEAGPTGYPLHRQLTGLGIENLVVAPSLIPRRPGDRVKTDQRDAVQLARLLRNGDLTPVWVPDEAHEALRDLVRARDDARAEGLRAKHHLSKLLLRQGVIAPARVGRAWSARHQAWLNTLTFRDRAAQVTFDDYLAWVRAATERLRRLDAALLECGASSPHVELLRALQAVRGIGFLTAVTIVAEAGDLRRFRSAPAFMAYVGLVPSEHSSGGSRRRGHLTKTGNRLLRHVLGEAAHHARLQPALSKELSHRQQGVAPGVVEISWRCQQRLHHKYRHLGGRIGRQRAISAIARELAGFVWAIGQALPPAALMPA

SEQ ID NO: 471048 - protein, 369 aa, unidentified
MNTTTFVGLDVHARSIKAVALDAMTGEVRSATFGYDAAEVAGWVSSVDPSAKCVYESGVTGFDLQKRLSSMGIDCVVGAVSKMIKPSADRRRKNDRNDAEFLARMLSVGNVVEVCVPDDECEAARDLARALDDAREDLKRCKQRLSKFLLRHGLVFSETNAKGQRKKNWTAAHWAWIRSISFPDKADDEVLAYYIDAARQAMEDKARLERLVEAEASKPRWKKRVDSVRCLKGIDVTSAADLVFEAGEFSRFKNARSFAAWIGLTPSEHSSGESVRQGGITKAGNKHLRRVLVESAWHYLGCSPHSKDLAKGQAPDPGARRHAAKGVRRLVGRRAAMLERGVHKNKANVATARELACWCWAIGRMVENG

SEQ ID NO: 471049 - protein, 402 aa, unidentified
MIFINCLGIDISKSESVVAHYKDEVLVKEMVIQNNQNGYRYLKNYIKHLDSLFILFESTGIYSRGMKHFCEIHKIDYLEMNPLEAKFKMSSLRLWKTDKSDAHKLALLAFRMKDSKVQRHPEEIYFELRERARFHLEMEINQNRLKVELVETLHQTFPGLEKLFTNRYSKIALNIAQAFPHPDFVCTLTHDELVEKVLHSTDKGISVNKAHKYVQKLIEIKNNSFPNVDKSSFLLQKVQYLCDKLLIGIEEMKEFDQEMIDLAKNTTEFENIISIPGIGELTAALLIGELGNIREFKTNKQLNAFVGIDIKRYQSGTSKSRDTINKRGNKKARRLLYLIIMNIIRGRNHYQSHIVDYYYKLREQPHGKSHKTAVIASINRLLKTIHYLIVNNKLYDYQKAPH

SEQ ID NO: 471050 - protein, 315 aa, unidentified
MTDLYVGIDVSKVRLDIAAGKDGEIWASPNDNDGIAKTVSRLRDLAPKLVVVESTGGLESQIVAHLFAEGVPVALVNPSRVRDFARSIGLLAKTDQLDARLLARFGEATKPIPTQLPSEDEQKLSALITRRRQLIDIRTAETNRLGSIHSSMRSRLEKHLEWLVGEIEELDKEIQDFISQHPDFKAKDKVLQSVPGIGPVTSAIIIADLPELGKYNRQIMASLVGVAPFNHDSGSHRGKRRVKGGRSDVRTVLYMATISASRFNPVIKSFYNHLVGKGKLKKVALVACMRKLLTILNAMMRDFKPWQHESSFAQP

SEQ ID NO: 471051 - protein, 333 aa, unidentified
MDIAKHVFQAHGADASGHVVFRKKITRAKLIEFMASQPPCLVALEACGGAHYWAREITQLGHTVRLIPPAYVKPFVKRHKNDAANAEAICEAAQRPNMRYVAVKDEEQQARTVVFRARDLLVQQRTQLINALRGHLTEYGCIVPKGPAHVARLIAWIEDPASQLPESARAVFTVLIDSLKVVDTQIAGLDAEIARRSREDPIARRLMTIPGIGPITATAITALAPPPETFRKGRDFAAWLGLTPLQKSTGGKQRLGAISKMGERTLRRLLIIGSSSVVHQPCKRGAPAGSWLAQILARKPRMLVTVALANKIARVVWALLAKGEVYRAPVAAA

SEQ ID NO: 471052 - protein, 429 aa, unidentified
MTPIPSTISPAVRVAIDVAKLTHQVLLELPTGKRRSLHVANTKAEIDHFVSLLRSLEYPCEVAFEPTGDYHRPLAYVLGQAGFRLSLVSSLAVARTRDAMYNSWDRNDPKDAQVILHLMKTGTTQRYLDPLVTGHQDLQELANTYQQVSLRKVRLQHSIVTHHLPLYFPEAERYLHSTRAEWFTELLLFTPCPAAVRRHTKAAFVAAASVQIAGRKVDKARWLADFYDTASTSLGLPVSEESEAMRMFRVVLEEYRALCLLRKRLEADAITRLADQPDFRRLQTLPGIGPILAMIILAEARDLRRFGHARQFLKYCGFDLCTEQSGQFRGTTHLSKRGNARLRYAFWMAGTVAIRMQQNSFRRKFEDYIRPDPKNADRRRKAYTAVAAKMARVAHAVIITGIDYRRFPEAARPGGRIPSPGAVEARATS

SEQ ID NO: 471053 - protein, 351 aa, unidentified
MLIIGVDYHPSFQQIAFLIEETGEYDERQLNHSDGEAERFYRDLQQRGISVRVGMEATGFARWFERLLAELGFELWIGDPAEIKAKRVKKRKTDREDARLLLRLMREDRFPRIWVPSPENRDLRQLLWHRHRLVQMRTRIMNQLQSLAMNEGKRWKKKLWNEQGRAQLEKLPLGFWASRRRQELLELLDRMNPTINELTAAAVQEVKSRPEALRLMTHPGVGPLTALAYVLIIGTPTRFRCGKQIGTYVGMVPSEDSSGGKQRLGHISRQGSSLLRFLLVEAAQTAARIDPEWRSRYMHLAMRRNKGIAKVALGRRLAVRLYWMWRNGCGYSPSLEFGSYAGQLGDGHGVK

SEQ ID NO: 471054 - protein, 410 aa, unidentified
MDLLRREVPSSALVVAVDPGKAFNRVWLTSGERGLIGDPVSLPVLRDGVDELERLIIASGVTGAPVIGLEASGALHRAWATELERRWPGSLRLFAPSETTAARAQLGSRRFKTDDRDCAALVWLVRQGAGRPAEPQVVEALRGTVAHRRQLVDARRVLQQRLHAQLNALCPGLSAPAGHGRALELASPTGQAVLACAAAFAGRAPSKRSLLARAPGRTTDATATFWARRWKRLLDPPPDAELRAARLGRDLGRWQALRDDIALADAQLSALLAQSAGQILTTLPGVAAVRAAAFSAYTLPIERWLTAEHLYSATGLAPASYQSSTVTRRGRISRQGLPEHRDALMGIAWGLSQNSDAFRARDTELRARGFRPIQARVALARNACRLCWRLLHSQQPYDDRRYARARRRGR

SEQ ID NO: 471055 - protein, 341 aa, unidentified
MRIVGGLDIHRRQITFDYLDERSGQVCRGRIAPADRMLLRRWLATTLEGAPAAFAVEACTGWRFVVEELQRAGVEAHLAEPAETAVARGPKRRAKTDRTDARLLRELLAADRLPESWIPPEQVLEMRARLQLFRDLREEHTAWVQRVHAILLHQGAPALAGNLLGADNRRRLETAEDLSPAGQEAVAAALRMLDALDAELTALRRQIAAFARRQPGCRALQAHYGVGEITAVALWAELGDTRRFSSSRKAVRHTGLDITVYSSDDKRPPGHLSRQGSPLLRWALFEAAKCAARPGAPDHAYYRQVADRLGGNRAALSVARKIARRAHHTLRALGDEALATV

SEQ ID NO: 471056 - protein, 337 aa, unidentified
MKFSGIDLHSNNAVVAVIDDQDRVLYCKRLTNDLSLIVAALMPWRAELQGVVVESTFNWYWLVDGLMAAGFVVHLANTAAIKQYEGLKYAGDERDAVFLAHVFRLGLLPEGYIYPPQERGLRDLARKRMQLVQQRTLHILSIESLLARQLNLRMNGDHVQRLDDAAVHALALPPHVERSLMANLAILRTLRVEIASLETILHQEVKLRTEFQILKTTPGIGDILAATIMLETGTITRFPGVGHFSSYCRCVESKRISNGKKKGEGNARNGNRYLAWAFIEAAAIALRTCPQARRFYERKKAKRLPVVAMKALAHKLARAAYYMMRDGKPFEVQRCFG

SEQ ID NO: 471057 - protein, 430 aa, unidentified
MLLLLVGDDWAEDHHDVEIMDPAGRTLAKARLPEGIAGLARLHALIAGQLGDDAEQVEVRIGIETDHGPWVAALTAAGYTVYPVNPLQAARYRDRHAVSGAKSDAADAHTLADMVRTDAHQLRPIAGDSPDADAVKVVARAHKTLIWERTRQTQRLRHALREYFPAALDAFDDLDAADTLELLAKAPDPTAAVRLTRAQISAALRRARRRDVDTKTTAIRAALRTPQLGRPAVVVAAYAATTRAAVAVLATLNAQITALEAQVGAHFRRHPDAEIILSQPGMGPVLGARVLGEFGDAPGRYADAKARKNSAGTSPITRASGRRKTVHARHVHNDRLVDALMLQAQSALQASPGGACLLRPPACPQARPQSRAAPTRQPARRHLARLPEDPHPLRRSHRLVASQSTNCRLTFQLLGCLKERGRSRPTSVVF

SEQ ID NO: 471058 - protein, 336 aa, unidentified
MKYYAGLDVSLKETFVSIIDEQGHLVKEGSVASESEALYSYLKCDGFEYERIGIESGQLSIVLCKGLTKKGLPVLCVDARHMAAALSARINKNDRNDARGIAKMLRAELYREVQIKSDTACEEKVLLGSRRQLVRSRQQLMGTIRGLLKIYGVKLGAKAQFTTKVREALQGVSEGVRKSLEALLSSVEAMEKSLKSLDDQLMEIVKGDAVCKRLMTVPGVGPIIAMTYKSTVDEPKRFKRSSTVGAYMGLTPRQYASGEVDRHGRVSKMGHEECRVMLYEAAQGMLTRVQKASKLRSWGLKLVKKKGLKKAVVAVARKMAVILHRMWVSEKEFCAQ

SEQ ID NO: 471059 - protein, 362 aa, unidentified
MMKLKYSICCGLDVHKNVIVATIVITNKDGISEYRQKSFSTINSDIQRFHNWLIENNCYHVCMESTGKYWIPIFNYLENDIEVCLTHPKYVKAIKGKKTDKKDSKWIADLYKFDLVRCSFIPPKDFRQLRELARYRFKLVCMKSSEKNRIQNCMTVSNIGIASILSDPFGKTATEIMSYLLEHTSESMDEKAVRKLIKKGAKAKSDEIIEAIKGYNIETDQAKKLELARAHLDYLDDMITQTEVELYVRIKPYYEFVEFVSSMPGMTELSSTIILAEIGINMDIFDDVKHLCSWCGLSPANNESAGKKKSVRIAKAGAYLKPMMVQCALAAIKNKKEPYFAIKYRRIKKGVVTKKQSLPSQE

SEQ ID NO: 471060 - protein, 344 aa, unidentified
MEVAIGVDPSKSSLAVAAVDPLGRVVGTAEFSNDPRGHRALLGWVGERGPDRVIGIECSLSFGATLSRLLLQSGEDVREVPTTLTHQQRRRRASQGKSDLVDSVAIARIVASGEVLPSAHRLEVLTDLRALVEYRDQLVRARTQVANRTHADLMNVLPGYERRVPNLRAKGHRTTARSLLRGDRSVRAELGRKRLDELSRLDREIAAMDPRIEATVRKTETSLTSIPGVGPFIAAKILGEVGDPSRIRSKPAFAVLSGTAPLSASSGQVQRHRLNRGGNRQLNWALHYIALVQCRIMPEAQAYMARQREAGKSHKEAMRCLKRHLSNVVYRHLVADARRAELAA

SEQ ID NO: 471061 - protein, 343 aa, unidentified
MYEFKTFVGIDISKKTFDAALLKPGDQIVTVHHCFDQNQSGYKAFVLWLNSNDVIIDNNLLICFEHTGIYINGIVNFLVSMNAAIWVEMALKIKKCIGLQRGSNDKSSSINIALYAYRYKDEAKLWRPIDTTLQQLKNLITQRDRIITSITQLTVPINELKDCGSKQQACELAKLQSKAIKGLENSLESVEQAIESYIHKDEMIHQKIKLISSVKGVGKQTAIALFVYTHGLSAFENGKQLACYCGVVPFSKSSGTSVRYKPGVSPFANRKLKKLLHLCAMAALQWDNEIKNYYQRKIKEGKNKMSVINAIRNKLIQRIFAVIRDNRIYVDNHSYLVNSDPKF

SEQ ID NO: 471062 - protein, 387 aa, unidentified
MAQVNDLSRSLTAFDLISTLVVVVEMSKASWLVSGAVPGVERQPLKKLEPDATALLRLIERWRNEAVRAGRPISRIALAYEAGRDGFWLARWLIARGIEAHVIHSASVAVSRERKRAKTDRLDAAMLMRVFLGWLRGERGHCGMVAIPTMEEEDARRPSRERESLINERSRITNRMKSALARLGVRGFKPHLRKAPERLAGLRTAEGTGLPANIIEEFRRDMARLALVREQINSIEKTRAERLKRAPDTGPHAMVRLLARVIGIGIETADMLVREILSRKLRDRRAVARYAGLTGSPDESGLKRREKGLPKAGNARVRRGLIQLAWRFLTFQKDSALARWYRARTEGPSGARKTTMIVALARKLLIALWRLVTTGEVPDGVELRPAA

SEQ ID NO: 471063 - protein, 307 aa, unidentified
METIYIGVDFHAREQTICYLTTETGEFVTRELKHQDKDEVRTFYSQFGGRVIVGLEASGYSPWFEQLLEDLGHEVWLGDATEIRRRARWRQKNDRRDAELILDLLVHDEFPRLHRPSLESREILRMLRYRHKLVKMRTIIKNSLQALALQSGLSRRTKLFTKIGQQELRAAPMSPVMKQQQEQWLELLLVLNQRIVETTLWLKQQSLNDARIRLLRTHPGIGLLTSLGLVHTLDPISRFRNQRKVTAYAGLEPMERSSAERKRFLGISKAGSRLLRYLVIEAAHTAVKKDDDLKRFYRRLQERRGRP

SEQ ID NO: 471064 - protein, 462 aa, unidentified
MKRSQKRRSTALKSTSETAGGIDPHQNPHAAGIDIGARELVAAVPPQSTTGPAVRTFTSFTADVEALRDWLLSCGVRTVAMESTGNYWITAYDLLEEAGIGVFLVNARHVKGVPGRKTDVQDAAWLQQLHAAGLLRKSFRPAQEIVSLRYLMRHRQTLVSAAARQIQAMQKIMTEMNLKIQHVFSDVDGVSAQAIITAIIAGERDPAKLAALRDRRCRSSLADIKSALAGNYREEYLFVLKQCQSTWQRIQDDIAACDEQIAILTQRVHAEAPGPLPDPLTGHQHKASKNSPQIDIFEEAWRYYGVDLSAVPGVSTGLLSVLMSELGTGAQILASFRSGSAFASWLGLCPDNRISGGRILKAKTRQVSNRVANALRMGVFGLHRSQTKMGEYTRRMKGRLGKAEGITAGAHKLARIVYALIATRKPYDEAEAFKITPRSLERQHAQLIKQAQSLGFQLVPAA

SEQ ID NO: 471065 - protein, 292 aa, unidentified
METKVFVGVDVSKNSLDVAIGSQKDIITFANDQKGVDALVKKLSRIDAELTVFESTGGYELLAASSLAEAGLPVVIVNPRQVRNFAKATGILAKTDAIDARVIAHFAQAVKPEVRPLKDRETSELTALVTRRRQIVEMIVAERNRLRLANKRNIKDIKDHIRWLIKRLDKIESDIGKMLQASPIWRCKDDILQSVPGIGPITSASLICDLPELGVLSPKKIAMLAGLAPLNCDSGKFKGRRRIWGGRASVRSGLYMATLAAIRCNPAIKGFYQRLTDAGKCHKVAPPACANC

SEQ ID NO: 471066 - protein, 372 aa, unidentified
MSLLGCGSKEARTLSTRIRSAHLGFTVNEKGIVMTMIGIDPHKATHTAVAVDDDENVIGEFTLEASNNQVERLCDWAEGLGKREWAVESANGLGYLIGRQLVTAGETVFDVPPVLASRVRLLGSGRSQKNDPNDARSIAIAALRSERLGIVKPDDHVTVLRLLVKRHRDMARLRNKHCSRLHALLLEVEAGGIGGKISVTNASELLDRLGVTDEVTRYRILVAREVINDIARLDQTLKASKQRIAVAVQASGTSLTNIVGVGPIGAATIIGYTKDVTRFPTRGHYATYNATAPIEVSSAGNTRHRLNPRGNRILNHAIHIAAVTQLRHDTNGRAYFDKKIAEGKTPKEAIRALKRRISDAVYRQLQHDAASN

SEQ ID NO: 471067 - protein, 366 aa, unidentified
MKKTSTVQVFKGEIFKEQKLTIGVDLGDRWSFYCVLDEAGQVMLEQKLATTPEAVKQTFGKIPRSLIALETGTHSPWVSRLLSELGHEVIVAHAQKVQLITKSNRKDDRHDARTLARLARIDPGLLGPVRHRSAKAQLHLTVIRARAELVSARTALVNAARGLVKSSGQRLPKCGTYQVSEKLAEGLSAELREILVPLFKEIESLNGHIKQYDERMEKLAKEVYPEVSLLKQVKGVGTQIALTYVLTIEDPYRFPKSREVGCFLGLRPGRRNSGESEPQKGISKEGDRYLRTMMVQGAHYILGPFGEDSDLRRWGLKLAQRGGKNAKKRAVVAVARKLAVLLHRLWVGGEVYEPLRNSQKAMREVA

SEQ ID NO: 471068 - protein, 344 aa, unidentified
MSKLPSDLSTVTTVAVDLAKHIFQVHGCDAAGKVVVAKALRRKELLPFFAALGPCVVGLEACGSAHHWGRALLALGHDVKLIPPAYVKPFVKRQKNDRNDAAAIYEALFRPGLRFVAVRSIDNQAMLMQHKVREMLVAQRTQLFNGLRGHMAEVGIIAAQGARNMRSLGALIHEGHPDISDMVQQSLMPLVMQINHLDEAIRDIDTAVAAQAKADPVASRLMTIPGIGPVTASALVATIGDPSGFSGPREFAAFLGLVPRQHSSGGKERLGRITKMGNGYLRKLLVVGAHAVLVHQARHNDPLRAWARKLLETKPFKLVAVATANKLARMAFALMRQDTSYRAA

SEQ ID NO: 471069 - protein, 316 aa, unidentified
MIVLGIDIAKRKFDCALLLGERFRTKVFENNSSGIELCVNWIARHAGGSVHACIEATGPYAQAVAETLFDAGHRVSLINPARSRAFAQSLGARSKTDAVDARILARLCQALNPEPWMPAPRSVRELQELVRRLDALIQMHTQETNRLGSAHERVRGYIEESIAFLERAIREIKQAINQHIDLHPDLRTQRDLLQSIPGVGVATCAWLIAELNAKRFVCARSAAAFSGLTPAHWLSGSLQRKARLSKHGNAQLRKALYWPAITALRCNPIVRALAQRLSARGKHKMVIVAAAMRKLIHIAFGVLKSGKPFNPTLAGA

SEQ ID NO: 471070 - protein, 410 aa, unidentified
MYGKAGPMIYAGIDIAKNDHVVGATDEHGRDASKPMKFANSAGGFDRCVAYLEGLAESKSDLLVGMEATGHYWLPLFCRLQDAGYAVVVINPMRTDAMRRFKGSSRVKTDTIDCVLVAETMRCGDFEPSRLGDESMMELRQLTRLHQELKESVANLKRQVITALDQVFPEYDSIFSDTFGESSKAFLKRCPTPEECLGIRADSLAGTLAKASHGKLGRKKADEIKSIAKGSCGMRMATSALSFQIKLLIDQIDFIERQAEEVEAKIREGIQEIEPLILTIPGIGHILGAQIVSEIGDIRRFHSAPAIVKYAGINPSVSQSGKFSSDDNHITKQGSPYLRRALYLAAMGQLKLKTPFYDYYAKKRADGKSHREALIAVSRKLVHVIYAVLSKQQPYDPNAAKSPELASRSE

SEQ ID NO: 471071 - protein, 337 aa, unidentified
MRIIRVGLDTAKHVFQVHGVDENEQAVLRHQLRRGAVEKFFAKLPPTRIGLEACGASHHWARVLRALGHAVVLMPPQYIKPYVKRGKNDAIDAAAICEAMSRPSMRFVPIKSAEQQAALMLLKTRDLLVKQRTMLINAMRGHAAEFGVIAAKGRVKVSELLQVAQAEAAGVPALAREMLRVLAAQLDRLDGALKALEAELIALHKADPVSRCLATQPGIGPIGAISFSLKVADPKAFSSGRHFAAWLGVTPKENSSGGRQRLGGISRQGDEGLRRLLVLGATAVIRFAKAGRTSPWLINLLARRPRKVAAVALANKMARILWAMMVSGEVYRRPLAA

SEQ ID NO: 471072 - protein, 413 aa, unidentified
MNTEKLVIIGIDWADDNHVFHLIDLDKEPLTGDVKQDPKAIDDLVQAWRKRAPGVRFAVAVETTKGPLITVLLRYDDVVIYPINPAALASYRKAFAHGGGKNDPSDAMLLAEYLQHYVEKLRPLRQDDPLTREIASLAEDRRRLVDQRTAHCNELKAVLKRYFPVILQLNAAKIYADFIIRFVLKYPTLAAAQKTGASRLRKFFYGAGAKQKVEDRVEKIMSAMPMSEDGVLLRTCARRAIALCRLIETYNQQIDRYDQEIKKLVVQHADYAIVASLPAGSHATRGRLIAALGDDRTRYANAASLQAASGIAPLTTQSGKQRFVSSRWACSKFMKQTFHEFAGLTITRCPWSEAYYKMQRSKGKSSQMARRALAYKWQRIIYRCWQDRVPYDEAHYLQRLKATNSPLVALMKD

SEQ ID NO: 471073 - protein, 319 aa, unidentified
MTTISTPPARFIGCDVGKAAVTVFDSADGSTRSIANRAPDLRRLAARLAPDCLVVCEATGGYEARLLQAMIVARVPAHRADARKVKAFIRSFGTLGKSDAIDAAALARYGAERHAALALWQQPDPVREELQSLVATRADLVRLRQAQRNRLQAPGAAAVASALRAVVQTVQAQLRAIEARIAALIRAHPVLARHVAILRDMRGIGPVTAATLLAMMPELGRITGKKAASLAGAAPHPYESGQRLGYRKTRGGRPEVKRALFMAALTASQGHGALADTYRRLVARGKKPIVAITALVRKIIVIANARIRDDLADMALQVS

SEQ ID NO: 471074 - protein, 369 aa, unidentified
MKKNSTVQQSPTRAAARKEVPITIGMDLGDKTSRYCVLGGGDEQSEGSVSTTKKAMAQKFSGMRRGRVAIEVGTHSPWVSRLLSGLGFEVIVANARQVQLISANSRKNDRADARLLARLARVDPQLLRPIRHRSEQAQADLMAIRVRASLVEARTGLVNAARGFAKTLGERLPACDADALDVKKMEALPAEMRDRLRPLLEQVESLTVQIKKLDATLEQIARTSYPETELLRQVSGVGILIALTFVLTVEDRERFQKSRDVGCYVGLRPKQSESGQSQPQLRITKEGDRYLRTLLVQGAHLILNRRGPDTDLKRWGLKLASQGGKNAKKRAIVAVARKLAVLLHRLWVTGEVYEPLRNSQAAQASKQAA

SEQ ID NO: 471075 - protein, 320 aa, unidentified
MMAQNELIVVGIDVAKDKVDACIRALSLRQTSLSTVQDQRKLTAWLRGHQVGKAVMEASGGYERSWAKALREAGIEVRIVDPKRVRSFAKSAGRLAKNDVIDAEMIAWFAETFCEAPGQTHDAARDDLQKLVNARHGLLEIQTTLQNRGEHVAPAPVPQMHARLRKRVATELARLEAAIAAKIKATPHFVERAEIIESVPGLAGTSTANLIVGMPELGQVSNKIAAALLGAAPYDDDSGRRRGERHIKGGRRKVRNAFFMPCLGAATQHNPVLKAFYQRLLAKGKQKKVALIACMRKLIVILNTMIARHEKWDATRYALS

SEQ ID NO: 471076 - protein, 416 aa, unidentified
MFHRTQRKGQGSFIMAKPRRKVIAGIDTHADTHHVAVISETGEHLADREFLAVGSGYRKIMEFITGFGPVTAVGVEGTGSYGAELSRVLSREGLQVLEVMRPNRQGRRLRGKSDPLDAYQAAEAALSGSRVATPKSRDGAVESLRVLRAERTTAMRARVAVMTQIKSILVSAPEAIRAKYRDLARAALMSALEKSRPAGNPVEPAYATAIVLKRLAIRYRHLDDELALIDGELDAVITLHAPMLRDLHGVGTEVASQLLVTVGDNPERIGTEAKFASLVGVAPVPASSGKTIRHRLSRGGDRQANKAIHHVALVRMKSDTRTKNYVARRRHEGKNTKEIMRCLKRYIAREIYEQLLHPQPAPDAGALRALRKAKNITLQTAADNLHAWPSALSRLERGLTRDDAFHQRYESWLNDH

SEQ ID NO: 471077 - protein, 347 aa, unidentified
MLADQLDYVVGVDPHRDSHALAAVHVVSGAVVFEASVAASSEGYAHALSLVEEHAAGRRAFAIEGTGSFGAGLTRFLTARGERVLEVGRLRRERRSGGKTDALDAIRAARSVLAQNRPATPRASGEREALRALMAAREGAVNAKRAGLCQLRNLLVTTPEPLRNQLRPMTRARLLQRLAATRPERRADPELRGALLALRSVARRVLQLTSEERELAREIEVLTRKLAPQLLAQPGVGPLAAAQLVLSWSHPGRITSEAAFARLAGCAPIPASSGQTVRYRLDRNGDRRLNRALHMILVTRRRSHAPTIAYIERRIQEGKSRREAIRCLKRYLARNLYRLLENPPLPT

SEQ ID NO: 471078 - protein, 412 aa, unidentified
MRRVVGIDIHRTFGEVVFWEDGVLRRVGRVDMTRTGLEGLGKSLLATDEVVIEATGNCMAVSRVLSPFVQRVIIANPLQVKAIAHAHVKTDKVDAGTLASLYAAGYLPEIWTPDAATERKRRLTACRYQVVRHRTRIKNEVHSILHAHLIPKCPHADLFNRRGRDWLARQPLPDDERGAIDRHVRELDRLAEDLAVLDREIAEAALEDPDVKRLLTITGVNLTVAAGILAAIGDISRFDGPGKLVSYFGLNPRVRQSGLGAVHYGRISKVGRSHARAMLVEAAWAAAKVPGPLHAFFVRIRAKRGHQIAAVAVARKLTVLCWHLLTKGQDYLWARPALVANKARAMELQAGKPPKKGNQRGPAYAYNVKTLRDQEMRIAEQAERNYARFVDRWKTRPGKNEVRERLNSARIE

SEQ ID NO: 471079 - protein, 333 aa, unidentified
MYYSGIDLHSDNCYVTTIDESGSVVKQQRVENNNELLLDYFRSLPGSHQAVVESTTGWYWLNDLLQDNGIELVLAHAKYLKAISYAKVKTDKVDSQTLAILLRQGLIPRAHKISRELRGLRDTMRIRLRLVQQRSDTLRRLNSIHAKFNGSVPDPYRFQLAVLEHTRDTLTNQILALEKSLHPVLIPNDDIQRLLIIPGIGKLSAFTTYLEIDGIERFDSDKHFVSYCRLVPAADNSNRTVHHRSSKDGNKYLKIAFSDAAVHAIQYYPEYKRFFLKRAKRSGEAIARTVVAKELAKIVYYVLKNKTTYKGLKGQPISRQKSQQWPRLSSPLP

SEQ ID NO: 471080 - protein, 373 aa, unidentified
MENTITYVAMDTHKKEHKVALRYPCRQKIVTLIVRNSSSEISKMVRKIVKTSPGEVRFCYEAGVCGFNLKRRIESLGCKCAVIAPSLTPTKPGERIKTDRRDAFRLLEMFKAGLLTEVHAPDPQQEAARELTRLRQTARQNLMRIRHQLLKFLTRHGYIYTEGNHWTGRHLRWLRGLEFEEPLLQEVFDSYFTEMQHCMQRLDSMDKQVGHLADSQAYKEMVGIVKCFHGIDTLTAISIITEVFDFGRFSSPRDLMSYLGLTPSESSSGEKQKKGPITKTGNKRVRRLLIEVSWHYRHPYHISKALKQRRKDQPQWAIDIADRAGQRLRKRYWYLIHRGKMQCKATTAVAREMAGFIWFVFREYQARNMQMAA

SEQ ID NO: 471081 - protein, 376 aa, unidentified
MEKKLRFLGLDVHAETIAAAVAEPDGEVRSLGVIPNRAESVRRLVKKLGAANQLRACYEAGPTGYVLYWQLTELGVDCAVVAPTLVPAKAGDRVKTDRRDAVKLARCHRGGDLTAVWVPDEDTVALRDLVRAREAARQDQLRARHRLSKFLLRTGRRPSFAGKAWTLPYMDWVRQLRYEHAGQEWTRLDHLHEVEHMAERVKRLEEAIREAVKLAPAGMQEVIHGLQCLRGIAEISAVTVVAELGRISRFESARQLMGYSGMVPSEASSGKRQQRGGITKTGNAHLRRIAGEAAWSYRLRPAVGPGLRRRQQGAPEDIKEMAWKAQLRLHKRYARLAAAGKDQRKVTIAVGRELLGFIWAIGIRTETAATRAAAAA

SEQ ID NO: 471082 - protein, 440 aa, unidentified
MIDTNQKQEIEFAAFVGIDWADQKHAWALQIPGHLDVERGDLDHTPEAVELWAAELARRFAGRPIAVALEQSRGSLLFMLTKYAHLVLFPVNPATLANYRKGFRPSGAKSDPSDAGLLVDLLVHHREKLRRLDPDTEQTRTIQFLVEARRKFVNDKTRYSNRLTAYLKMYFPQVLDWFSEVTSPIAGDFLERWPTLQKVQKARPETLRRFFVQHHSCKSESIDRRLEEIRRAMPATQDAAVTCSCSAAVLALVRIVRAVRDAIVCYDQQIETLAREHPDFAIIDSLPGVGPALAPRLIAALGTQRDRYQSASELQSYSGIAPVLASSGKQCWVHWRWACPKFLRQTFHEWATHSIGSSAWARTYYKQQRAKGKPRNTVVRALAFKWIRILFRCWKDHKPYSEEVFRQALARRHQLAVKSSPVQLQWKTCAGFSKITAITS

SEQ ID NO: 471083 - protein, 413 aa, unidentified
MLKIVYPICCGMDVHKSFVYACIASTNEQGVTTYKSKRFSTFTKDLRFCAEWLASNNCKDVCMESTGKYWIPVFNILEKTCNIVLAHPKYVKAIKGKKTDKKDAKWIADIFKHDLVSGSFIPPADIRQLRDLVRYRWKLTNFVVGEKNRAQNCLTVSNIKLDDVFSDVFGKASSNIISRMLENPSVRITDVTDFRTKGMKATDEEVLAALDGEFCPEQAEKLRIIRFHMDNLELCKLNVESLILTVAEKYTPQINLVSTVPGIQTFAAIGIISEIGADMSVFPTSKHLCSWAGLTPQNNESAGKKKTTRIGRAGDYIKPLLVQCALAAIKSKKNPEIRNRYLSIKKRRGHKKALIAIARMLLTAIYNILKKNEPYNADLYTRSNDLPAHRTVSVDEAIFILQRQGYLVTPATS

SEQ ID NO: 471084 - protein, 392 aa, unidentified
MTTKTQSNSPAKTTAALERAAPPAPLGPNTDGITAGIDLGDKKHAICVIDSAGEIIDARKITNHRESFRRLSKKFPDARIVMEVGSHSPWISRFFSDLGHEVIVANARKLRAIYTNDRKSDELDALMLAKLGRIDPSLLHPIAHQGEQAQIDLLQIRLRDNLVRQRVHIISSVRFTLKSLGHTLKSPNTHCFAKQARANLTDAEAPRLDLLAMIEPSLLVIDAMTTQIKELDRSIEKLGREHYLTTLLLRQIPGVGPITALAFVLTIGDPDRFASSRDIGAYFGLVPKRDQSGDVDKQLRISKAGNSYLRKLLVGAAQYILGPFGPDSDLRRSGLKLAERGGRAAKKKAVVATARKLGVLMHTMWVRQSDYIPVRSIAKAEAERAALGAVTK

SEQ ID NO: 471085 - protein, 311 aa, unidentified
MEHSPVVGIDVAKEHLAAHVRPTDEALRVSYDDAGLAALLTRLRALKPTVIVLEATGGYEVPVVAALADAGLPVVVVNPRQMRNYARALGQLAKTDPLDARVIARFAEAVRPPVRPLPDAQAQALRALTARRRQLVDMLGAEQNRRRLVRDQPVQRQLAAHIAWLEQALRGLDHDLTTLLRSTAAWREKDDLLRSAAGVGRVTSCTLVADLPELGCLTRRRIGALVGLAPFARDSGVFRGRRMIAGGRAHIRRVLYMATLSAIKHNPAIRGFYHRLVTAGRPPKVALTAAMRKLLTILNAMLRDRRPWQPA

SEQ ID NO: 471086 - protein, 413 aa, unidentified
MGYKVAGIDIHKKVLMVVVMLIQAGGLVEKIERRRFGTTTPELAQLAAWLQALSVQEAVMESTAQYWKPVWSALEGKIPTLHLAQAFSNRARRGRKDDFRDAERLLRRLVAGELVLSFVPDREQRNLRTMTRMQVHLTYDRGRLHNQVECLLEEMRIKLSSVLSDLFGVTGRGILGALAKGETDPQKLAALAGNRLKCTSKELLAALTGEVQPMHQRLLGLYLQRLQLIDDQIDELKHMIAEALAAHQEAVQRLAEVPGFGADSAQQIIAEVGPEAATFPSAGEMSSWVGTCPGKNESAAQNHSSRSAKGNRYARRLLTEAANAAVKTKGSHWQVVFRRLLPRLGYQQAVWAVAHRLCRLVWKILHDKVRYVEQGVNRDPKARANRARTLARALRQLGYKVELTSLTPAPAQI

SEQ ID NO: 471087 - protein, 417 aa, unidentified
MKTWNEITHYAGFDWAKGHHQIVIVDRQGQIVAEWEFDHSLEGWKQWRERTASYPDLAVAIETNQGAAVDQLLQSGSTVYPVNPRSAKAYRERKVSSSNKTDRLDAWSLADALRTDGHAWRALAPVDPLLQELRLLCRDELNLIGQRTALVNQLQAALGEYYPAALQAFDDWTMPASWKFLERFPTPQALAKIGPRKWENFLHCHKLYRPQTQARRMEAFRQATGFCGSPAVTRAKSMLVLSLVKLLKVLEEQLEQYRVQIEQLFARHPDHDLFGSLPGSGPKLAPRLLSEIGDDRQLFPDAQSLQCYAGSAPVSYQSGQVHKVYMRRQCNKHLRCALHLWANLSRRTCQWAQVYYQQLRQRGKSHAQALRCLGHRWLKILWKMWQTRTVYDPELHTRNQTTHGSWVLQLIQAQPGE

SEQ ID NO: 471088 - protein, 360 aa, unidentified
MHATTVAVDLAKSVFQLVVADEHWRITETQRLTRTQFERWFVNRSVGLVVMESCGSAHHWARWLNSLGIEVRLLPAQYTRAYVRRNKTDATDAAALLEAARAADIRPVRVKSVEQQALQGLHRIRSLWMGTRTSRINALRGFLREFGIAIPVGARTGVEAISRVLADPNTAVPELIRGSARLLVEEIRLLEARIAQVERELAAAARLSPACTTLLSIPGIGLLTATALVAATSGDVSHFQDARHFASWFGLTPREFSSGNSRYLGRISKKGDRYLRMLLTHGARSVLRAAKMAEGAGKEVCGVRRWALEVQGRTNHNKAACALANKLARICYATLRDKSAFDENSRLSKKMNRQAFVMPA

SEQ ID NO: 471089 - protein, 322 aa, unidentified
MADNVLGIDVSKQKFDVALRHADASGRSRAFANTQAGFEQLEVWLGKLGAGRVHACLESTGTYGLALAQFLHDAGHVVSVVNPACIKAFAQSELRRAKTDRVDAKVIARFCEAMEPAPWAPPAPEIRQLQGLVRRLEGVQQMLQQERNRLEAPGLAGSVRSSLERTVEALQQEVTRLQAEIRTHIDGHPQLRQKQELLRSIPGIGETTAQRLLSEMSALPFSRARQVAAYAGLVPSPRASGTSVRGRSRLSKRGNVHLRQALYWPAIVAMRHNPILRDFAGRLLASGKPKLVVIAAVMRKLLHLAFGVLKHQRPFDPNWMAA

SEQ ID NO: 471090 - protein, 392 aa, unidentified
MIFVGIDVAKDKLDCFISNSDGEVLFNAFTITNSLEGFHDLYQKISSLTKDFSNIKVGLEATGHYSYNLLGYLIDKGLTAYVINPLHTNLYRKSLSLRQTKTDKVDARMIASMLMSDVNLKSYSDTSYHNEELKSLTRYRFDKIKQRAKLKSSITRLINILFPELEKLVPTLHIASVYALLSEFPGASYVASAHLTRLTHLLVKASKGHYDKNTALRLRETARNSIGSVMPAKSLELKHTIKLIQELTFEIDEIEAAIKQIMDEEIQSPILTIPGISYRMGAMIIAEIGDFSRFDSPDKILAYAGMSPSTYQSGKMDNCHSHMEKRGSRYLRYALYNATKYVCHWDKSFGTYLEKKRSEGKHYNVALSHAAKKLVRTIFAMEKSGQAYRATI

SEQ ID NO: 471091 - protein, 409 aa, unidentified
MEVIVERSAALDVHKAQVTACVRVPGPGRERVQEVVQFQTTVRGLLTLRDWLRAHRVRQVAMEATGVYWKPVWAVLEDDFELLLVNARHVKQVPGRKTDVSDAAWLCQLLEAGLLKASFVPPKPIRQLRQLTRYRKALIKERQREANRLHKALEDTGIKLDCVATDILGVSGRAMLDALCQGTTDPEVLADLARGKLRKKLPALKEALEGRFDSLHALLVGSILAHLDFLDEQIERLSEAIEEQLRPFRPAVELLRSLDGIETRTAQNILAEIGVDMSVFPSAAHLASWAGQCPGNDQSAGKRRSGHTRKGSKWLNDALKDAAMAAIRTNDSYLQAQYRRLRPRVGHGRALGAVKHSIICTCWHMLTTGELYRDLGGDYFRPRDPERQTRRLVAQLEALGHTVTLEEAA

SEQ ID NO: 471092 - protein, 356 aa, unidentified
MRVYTNQHRFYCGGDLHARTIHLCILDQAGNVVFDKNIAARPETFLKAIAPFRADIVIGVECMFAWYWLADLCAVEKLPFALGHALYMKLIYGAKAKNDKIDAGKIARLLRGGNFPLAYVYPKGMRETRDLLRRRTYLVRQRAALVTHLQILNGQYNLPPFPKRLAYAGNRQELDIAHRFADPSVPQSATVDLAVIDVLEEHIDALELYLARTAKVDDLQTFYRLRSIPGVGKIIALILLYEIHDIRRFPTEGQFLSYCRLVRCRHESAGKVLGSGGKKIGNAHLRWAFAEAACLFLRESERSKKWQAKQLKKRSEGQVLGILAARLARAVYQMWRKGEAFDEDRFWSSQGKCVEV

SEQ ID NO: 471093 - protein, 410 aa, unidentified
MEVLHAHCAGLDVHKDTVVACARHMVDGKVTTAVKTFKTTTQELMDLSGWLSTEGATHIAMEATGVYWKPVWHILSDGEFELVLANAAHVKNVPGRKTDVNDAVWLADLMAHGLIRASFVPDEPTQQMRDLLRTRKQIVRERSSHIQRIQKTLEDANIKLDSVVTNILGLSGRRIIEALIAGQTMPQALASLAHRRIHASADELEASLRGRVTKHHRFLLKLHLDQIDAFDATIAAIDKEVDGNVEPFRVAIEMLSAIPGVGELSATVIVSEMGIDMSRFETAGHLISWAGLCPKNDQSAGKRRSTRMKKGAPWLKSTLIQCAWCASRTKNSYLQAQYLRLRSRRGAKKAVCAVAASILTAAYHMLKNGTVYQDLGASYFDNRAKDKQALRLISRLKNLGFEVQIKPLAA

SEQ ID NO: 471094 - protein, 345 aa, unidentified
MDHYAGIDVSLESSSVCVVEASGKIVREAKVASEPEALIGWCASLGLGLARIGLEAGPLSQWLYAAMKQAGLAVELLETRHVSDAFKAMPVKSDRNDARKIAQLMRLGWFRPVHCKSIAIQEIRAMLTARKLVQSKLLDLENSLRGILRGFGLKVGKTTRTNFAGRIEELVERHPNLQTIGQALLRVRTVLLAEFNGFEKRVRAMSRLHEKARLLMSTPAVGPIISLTFACAIDDPSRFTSSKQVGPYLGLTPKKYQSGETDYTGRISKHGDASAREALYEAAHLMLTKPIKGCSELKSWAMRIARRAGTNKAKVALARKLAVIMLRMLKDNAPFNPAAAKAATV

SEQ ID NO: 471095 - protein, 479 aa, unidentified
MSSKQQKQKEPNKGVRRARKKRQKGLCLEDRPVLEPNAAGIDIGAREIFVAVPPDRDEHPVRVCSTFTEDLTRMVEWLVACGITTVAMESTGVYWIPLYDLLESYGVRPCLVNAYHMKNVPGRRTDWHECQWLQYLHSVGLLRSAFRPEADVTALRTIIRHRQELVQMSSQHVLHMHKALTQMNLQIHHVIDDITGLTGLAIVDAILAGERDPAELAKLRNWRIKADPETIRKSLVGNWQQEHLFTLQQSREFYRFYQQQIVKCDEQIEQLVCEFEPRVDPKEKPLPPDRKRYRSDKKRARKSGRLETDFNLRTEAYKLFGVDVTQIPGLETLALPLFSEVGRDMSKWPTADHFTSWQGLCPDNDISGGKVLWRGTRKAHNRAGQLFRNAAYSLHHNLTPLGDYLRRMKAKLGPAGAITATARKIAIIFYTMVKKQVEYDETIWATHDLKRKQRLEGRLKRQARQLGYQLVPLQTEPAA

SEQ ID NO: 471096 - protein, 345 aa, unidentified
MMNLNVIAIDLAKNNYQVCKIGQDRQVIYNKEVSRQKLLQLLASEKQSLVAMESCGGTHYWARKAKEAGHTVKPMSARVVKAFRQGQKTDANDALAIGIAAQQPTVKPSRLLSINEQCLQAMSAMREHFVKQKVALGNLQRGCLLELGIPIAKSDNKLIDAVESLLEDANLDVPMAFRASLKIMNEQFKSVMKEIRELEKLIEEEIKNDEVCERLQKLEGVGPVGSMMLKVYFSCIEHFKNGREASACAGLTPVQHSSGGKERIGSISRTSANKKLRSTLYQGALAVVTHVVKRASRTEKDEWLKKLIARRGKKVAAIALANKTIRTAFAMLKKNECYQPTLLTA

SEQ ID NO: 471097 - protein, 339 aa, unidentified
MSIITVGIDLAKDIFAVHGVGASGKAELVKPRVARGQLLELIAKLPPCLIGMEACSGAHHWARLFQAQGHTVRLMAPKFVAPYRLSGKWGKNDAADAAAICEAVTRPTMRFVPIKDVSQQAMLSLHRTRQGFISERTAAYNRLRGLIAEFGIVLPKKIERLRREIIAHLEALPSGVRRCVQDLLANADEMDKRVDEYDKAIHQAVREDARSRALMTLRGIGPTSASALRYSLGVGHDFKNGRQVAAWIGLVPGQYSSGGKARLGRITKAGDEYLRMLLVMGARSVLASLGDKQDRYSRWCRDMEARVGYGKATVAIAAKNARLAWAVLKYGEDFRLTQA

SEQ ID NO: 471098 - protein, 462 aa, unidentified
MQMTLGIDVACRAAHQASLADETGRFAWSGRKFRTTAADLDQLWESIPAGAAVLVVMEPTRNAWVLLAAWFRRRGATVIMVPPEQSADLRDYYSKHAKSDRLDSKMLARLPLLHPEGLRPAEGLGPADALRRASVLRSSLVKRRHVILARLDSYLELLGPAWHAAFGGDLANITPLRLLAAGYADPHAVRRLGLARLTRFVWRYSHGAFGTDYAAGVLAAAAETLQLWDGELSYPDLAEDIAAEARLALTLTTEIRDLERKIAALLHQADPAGILTTVPGVGAIGAAQILARLTDPARFRSMAGARSFTGLVPSLTASGTSGRHGPPTKSGDALLREALFMAANQARRIDPVLAARYHRLMVTCGKHHNSALCHISTAVLTRIIACWRAGTPYQIRDLDGTPLTTAQARAIVTQRYHVSDELRALRRTSHLSAKAGRRHQESPSAPTPARPQPNATARSRNT

SEQ ID NO: 471099 - protein, 338 aa, unidentified
MAIIAIGIDLAKNVFAVHGVDASGKAVLVRPAVRRDALLELIAKLPPCLIGMEACSGAHHWARQFQQFGHNVRIIAAKFVAPYRLSGKRGKNDAADAQAICEAVQRPQMRFVPIKSEDAQGRLSIHRVRQGFIEQRTATINRIRGLLSEYGHVLPQRAEVVRREAGQCLEDLPGWANTAIGDLLSELHRLDERIAEYDRHIEVMAKADERCRKLMEVPGIGDKTATALMASIGSAHDFKCGKQLAAWLGLVPSQYSSGGKQRLGRITKAGDGYLRMLLILGARAVVAAAKKKQDRLSKWVTELAERRGYWKAVVAVAAKNARMAWAMLSKGEAFRPMA

SEQ ID NO: 471100 - protein, 387 aa, unidentified
MSRNARVPVPATTLDQDSTLVVVLELSARSWLVGARVPGIGRMSRYALAPSAEALAAWLDTAKARAGTAGRMVVRVVLAYEAGRDGFWLARYLEARGVEVYVIQPSSVLVDRRARRAKTDALDVEMLMRTLLAWLRGEPGVCSMVPIPEVAEEDGRRPVRERQGLIGERLALLNEIDGLLATFGITGYRPLRQDRRAQLAALRTPEGNPLATNAAARIGRILARLELVMQQIAELEQARDAVLAKEAASGEAETMIRGLARLKGIGAELATVLVWEAYVRSFPNRKALGAYAGLTGTPFASGSTTREQGISKAGNRRLRSSLVELAWLWLRYQPDSKLAAWFRGRTGSAGSRMRKVMIVALARKLLVALWRFCRDDVLPEGAALKAM

SEQ ID NO: 471101 - protein, 410 aa, unidentified
MEPILISCAGMDVHEKKVDVCIVHGPLDKPPIFEIRTFSTMTSDLEVLKLWLKKYAVTTIAMESTGVYWKPIFNIMEDEFDVVLANPQHIKALRMNKTDIKDCKRIANLLRHGLVPRSFIPPREIRELRDLNRTRRKLVGIMASEKNRVVKVLEDANIKLSSVVTKIYGVSSLSMIHALLEKDKLSRDEICEMAKGKLKKKVDLLEKALDGRLSGHHRFLLSMHLENIQYLAGQIKKLDNEIRQKMVPFHEESKLIQTLPGISEVSASAILAEVGIDMFQFPDEAHLCSWAGVCPGNNESAGKRKSGKTRKGNSFLKGALTEVAWAASRTKGSAYNAIYHNLAKRIGKKKALVAVAHRMLSDIYRILKTREPYQETGAEAVNERAVARRERSMIRLLERAGYSVTRAATA

SEQ ID NO: 471102 - protein, 317 aa, unidentified
MESKSVAERFVGIDVSKSWVDVHIRPDGEAFRCGTDSEDLTKLAQRMGLLVPVLVVLEASGGYEGHIAVTLAEAGLPVAIVNPRQVRKFAEALGRFAKTDAIDAAVIAHFAEAVRPAPRPLPEATLIQLQELLARRRQLVVMITSEKQRLAKAESKITQRSCAAMLRSLEAERERIDRAIDKLVKASPIWCGKLDLLTSVPGVGDVVARTLIAELPELGTIDRHKIAALAGVAPFSRDSGRRKGKRFVRAGRVQVRAPLYMACLVAIRHNPALRAFYTRLREAGKPTRLAIVAVMRKLLTILNAMLRDQRPWATAHS

SEQ ID NO: 471103 - protein, 329 aa, unidentified
MKQCLIVGVDVSKDTLDIFCKPSGQHVQIQNKLNGFKNLLRFLKPQISADTEVLIVMEHTGFYSYRFERFLQSKAMSYCKLPALEIKRSIGMVRGKNDKIDAERIATYGWLRREILQADQYPAEALVRLRAMLSTRLKLVRDKSGWQRRLKELLAGEVFEQRDSVITMHRQVIQELSKQIEKIEQFIKEVINADEALKQTYRLLVSIKGVGPVIATAMIAYTENFKRFSNARKFNCYAGLAPFKHESGRSIKKKTKVSHLANKSIKALLSMGASTAIQHDAELKTYYQRRLAEGKEEGQCLNIIKAKLVARIFAVVKRQTPYQPLLIAA

SEQ ID NO: 471104 - protein, 361 aa, unidentified
MISSTKYIGMDVHTQSISSAVMNSVGKVVMESVIETKASTILEFIDGLRGDLRVTFEEGTWAAWLYDLLKPHVTEVVVCNPRKAALLKDGSKGDRIDARKLAELLYMNSIKSVYHGEHGLRTMKELARSYLTITKDLTRIMNRLKALYRSWGVPCAGKDVYAPRHRAEWLGKISEAGVRRRAEHYYQQLDVLRLLRQEVRRDLLAEAKKHKPWKLLRQIPGIGPIRAAVLIAVIQTPHRFRTKRQLWKYSGLGLETHDSGQYHTEEGQLQRSKKPATVRGLNKDHNHDLKDIFKGAATTVSSSRGPLRDFYENLLAKGRKPTMARLTLARKIAAITLIVWKNMPTPRLCRVQASESSQLPH

SEQ ID NO: 471105 - protein, 314 aa, unidentified
MAEINAAIEVGKHELQIALGSGGELFSEPNQARAVKRLAQRLSEAGCVRVLVEGGSYQSVLVAGLRAAELPVVIVNPRRVREFARSTGQLAKTDRIDARVLAQYGERIAPPVRELPTEQSQELRALWVRREQLIEMLVMEENRLEHVPPKAKAVAHNLRSHIDYLRKQIKQADDDMDHTVRNSPLWDQYELLTSVPGVGPVLSVAVLSDLPELGRLNRAEVAALAGVARFNYDSGTLRAQRRIEGGRARLRRVLYVATVAAVRCNPVLKAYYQRLRAAGKPAKVALVAAMRKLLTILNRILATKTPWRTPPCLA

SEQ ID NO: 471106 - protein, 520 aa, unidentified
MSQNKSPESPSRKMHRKIRNAQQRVKKVSAKATAAAATGAKLVPAPEVKNPHAAAIDVHSDNHVVCVGPDQVQTFGAYTVDLHALADHLKQYGVTTVVLESTGVYWVPLFELLESRGFEVFLIEPSQARHCGARPKTDVADCQWLQRLHTYGLLRPSFRPPESVLALRGYWRQRQMQVRYAASHVQHIQKALEQMNVKLTEVAADIMGLTGRRIIEAILRGERDARLLASLRDPTCKKSEEEYAKALQGTWRPEHLFALKQAYALYRFHHEQITECDQRVAEELARLPNRAADKPFQPRPRRCGRKSNEVRFAATEPLFQALGVDLTLIDGIEINTALMILAEIGVDVSRFPTEKHFASWLRLCPQLEESNHTRKKRSPRRGKNRLAQALRMAAQAVSRTKTPLAVFYHRIKGRLGGKGAITATAHKLAVLVYRLLKHGADYVRQSMEEYAAKLKEQMERSLRRKAAQPGLRLGAENACRPTELRIRMAPVARRDGLRAARNAEQKHHPGVTGERGSVCL

SEQ ID NO: 471107 - protein, 356 aa, unidentified
MNKVNANFENQKVFVGLDVHKRSWNAAIFLGDYFVRNIHQPPSPQALQHFLTRNYPGAHYTCAYESGKFGFWIQRHFKQMGIDCLVVNPADIPSTQKDNVYKTDARDARGIGQALSRGQLKSIFVPHQEQEADRQLVRQRKKLWADLVRCKNRIKAFLDYMGIVVPDRFDNPNWSLNFIRWLRELEFEHVTSRVTLNYQLDEMELLRKQMLSICNAIRKLMRSKKYNQLYYLLRTVPGIGPLTAASLITEIGDINRFKDFYNLNSFIGLLPMEHSSGEKEIRSRITIRKHRQLRSDLIECAWTAKRTDPALALYYTEQVKKGKNGKAAIVKVARKLVSRIRYVWRTNQPYQCAVVK

SEQ ID NO: 471108 - protein, 335 aa, unidentified
MKVFYLGVDVSKKKLDLCLRSNGKDILYDVIPNDLSSIKSWLTRTFEKFFLSEDSLVVCAEHTGQYTYPLVCATKSIGVYLCLEDAAKIKYCHGIPRGKNDKIDACRIAMYAERYNDCLQPYTASELIIQKLKNLSTERSMLVADRAKYQSQLKDQVDYMEHSIYIAKCNRVEGIINTFTDYIAQIDLEIKELINQAPVIAHQMDLLMSVDGVGERVALKMIMETDAFTSFTDHRKFCCHAGVVPLVYVSGSSQRSKNRVSNRADKSIKHLLHMAALSVSQVKNSPLKKYYDRKVEEGKNKMSVLNAVRAKLVTIMFAVIRADAFFSRNYQNSLA

SEQ ID NO: 471109 - protein, 347 aa, unidentified
MKFYTNQHKYYCGIDLHTRKMYVCILDEKGEIREHRNMKTDRDAFLKAIAPFREDIVVAVECIFSWYWVADLCHNEGIPFVLGHALYMKAIHGGKAKNDKIDSQKIAALLRGGMTPMSYVYPEKMRATRDLMRRRNHLMRKRSELFAHIQNTNSQYNLPDPFGCISRPQQRNGIIEQFEHPSVQQSIAVDIEMISSYDGILSQLEKSIINMANHHDPVSYALLQTIPGVGKIIALIILYEIENIRRFASVQDFVSYSRLVKCAKESNGKKCGSGGSKIGNAHLKWAFSEAASFFVKNNDPAKKYLDRLINKHGKSKALSIIAHKLGRTVFFMLKNKEAFDQQKFLNL

SEQ ID NO: 471110 - protein, 420 aa, unidentified
MDVVVERCAGLDVHRDDVVATVRVAGGGRRRWDQQTRTFRATLGGLADLAEWLAEFGVTLVGMEATGVYWKTVFQALEDRFECWLLNAHHLRNVPGRKTDVKDSEWICQLVQHGLVRPSFVPPPEIRRLRDLTRLRKAQTNERARTIQRLEKVLQDAGIKLSSVASTTYSKSARAMLEALLSGVSDPEQLAELSKARMRLKIPQLREALQSRFQIEHHGVMVAQLLAHIDTLDAALQSLTERIELVLVPHAQTIELLCTIPGVQAHAAQVLIAECGLDMTLFPTVGHFASWAGACPGHHESAGRRRSGRTRPGPRWLTDQLTECARAAVRTKGTYLAAHFAQLRGRRGEPKAIGAIRHDILVAYYHIVRDEVPFRELGPDWQRKRYSPEHRARRLQRQLEALGYAVTLDQVEQPEIEQAA

SEQ ID NO: 471111 - protein, 355 aa, unidentified
MKQFIGCDTHARYSVFVSVDETGRIGAPVRIEHGGSDLRDYLSGLEKGTPVAVEASGGWYWFMDELEKAGLDARLVNPLEAKHRMSGKNKTDKLDAKGLAILLRNGTLPEVWIPPARLRDLRGLMRTRLATRSHTTVLKNRIHAALRRYGVMDGEPPADLFSPKNRSRLSGVVCKLPEETRRATLHELEILDVIERHIDELEVRIRERIGRLGWVRLLKSMPGVGEILGATIYLEIGDVGRFPTAEHVASYAGLVPTVHASGGKSWHGPTSPQANHYLRWAFVEAAHAVLMHRHTYADQHVIELYDRLKKNKCHGKAAVAVARHLAEASWWVLKKRQQYRPPHVHVVAESSSRNG

SEQ ID NO: 471112 - protein, 403 aa, unidentified
MNSVGIDISKGRSTIAVMRPFGEVVISPFEVRHTGSELSKLAKQLKSLDGETRVVMEATGNYHASVAKLLHNAGLYVSVINAKLVHGYGNNELRRVKTDRKDAVKLANYGLDRWLTLPRYIPEEDTRLLLKNCYRQYRQYSKVQTVLKNNLISLLDTVFPNANRLFSSPIRGDGSEKWVDFVAEFWHCRCASEKSERAFTSKYLRWCRKHGYNFREAKAHTIYAEASGHIGVMPKSETTKLLVEQAVAQLRATSTALAALKHEMQSLASQLPEYPVVMDLFGVGPTLGPQLIAEIGDVRRFYSKKALVAYAGLDAPPNDSGDVTGRHKSMSKIGASSLRRTLFLVMSVYLQTAPLDEPVCQFMDRKRAEGKLYRVYMMASANKFLRIYYATVKAYLESLEHTV

SEQ ID NO: 471113 - protein, 348 aa, unidentified
MSQTLNTAIAVVGIDIGKNSFHIAGHDKHGAIVLRQKWSRGQVEARLANLPPCLIGMEACVGAHHLSRKLNSLGHDARLMPAKYVRPYSKGQKNDFRDAEAIAEAVQRPTMKFVATKTADQLDLQALHRVRERLVSQRTGIINQIRAFLLERGIAVRQGQRFLRAELPRILATPPVLSPRMVRVIEDLTGDWRRLDERIEDLTSEIEAVARQEAGCERLMSVPGIGPIISSAMVAAIGSGDAFSKGRDFAAWLGLVPRQMSTGDRTILGKISKRGNRYLRVLFVQAAWVVLIKPKSWERHGLKPWLEAAKKRLHHNVLAIALANKLARIAWSVLARGRDFEASKLRVA

SEQ ID NO: 471114 - protein, 417 aa, unidentified
MEDNPSASPCRYIALDIHKYYSVVAGVDREGMEILPACRVEHVDLENWSIKHLLPTDRVVIESTTNAWHVYDMLEPLVGGVLVANPIKVGQIASARVKTDKKDTFILARLLAANLVPTVWVPPKEVRELRQLISHRRRLAQMHTQVVNRMHSVAHRHHLNHPKGKDFQPKNTLWQRDRDLSRLEKIQLELDMETRAHLEKQIECLTRELGRMSHAEPWASEMLYLMQIPGCGVVTGMTILAAIGDITRFQTPRALAGYSGLVPGLDQSGVKLRTKSITKEGRKELRWVMVEVAWRAVKADPHWKKYFESLQRRMHKNQAIVAIARHLLTVVWFVLTRHEPYRHYSPERIAYKYLTWSWALDEEQRQGMTRPQFARYYLMRLGIGDDLKRVALNPDYPYRLSSVEDVLRLKPELRPPE

SEQ ID NO: 471115 - protein, 427 aa, unidentified
MKYTQNEKILQVTEKTLIVGVDIASETHYARAFDQRGVELSKLIRFSNDAEGFKKFALWVEEIKARCNKHDVMVGMEPTGHYWFNIAPYLKDHKMRIVLVNPFHVKRSKEVDDNNPTKNDRKDPKTIAMLVKDGRYMEPYIPEGIYSELRTAMETRWQIVKQLNAIRNRVKRWISIYFPEFNKVFGDWEGKAALIALKEFPTPARVLETGVDGIIARWKQDKLRAVGRKRASALIEAARKSVGVSEGLVAAENDLAILIEDYEMRMRHYERTMVIIEQLAYQIPGLPEMLKIKGIGLVTAAGFIAEVGDISRFEHPKQIQKLAGLSLKENSSGKHKGQTTISKRGRRRLRALLFQGIMPVTANNPEFRELHSHYTTRDKNPLKKKQSLILLSCKLIRIFFALLKKGTAYDPQKMLNDIKRPLLQEVA

SEQ ID NO: 471116 - protein, 322 aa, unidentified
MSVAVLGIDIAKQKFDVALLADGKTKHKACKNSVEGFEILMIWLEKQGIKKVHACLEATGNYGEALAMYLHEAGHAVSIVNPARIKGFAQSELIRTKTDKIDAGVIARFCLAMKPETWVPPAPEIRSLRALVRRVDSLIDMRSQEKNRISTAHESVIVLIKEHIVYLDHEIDKIRKQIADLIKQNPHLKQRKDLLDSIPGLGKATIPHLLAELDNLDKFTHVREIVAFIGLAPKETLSGSSIKGKPRLCKIGHARLRKALYMPALVTIQCNPVMIAFYNRLKEKGKNGKVIVCAIMRKLVHVIFGVLKSGKMYDPNYKSTFA

SEQ ID NO: 471117 - protein, 428 aa, unidentified
MEQAERNRLEAFRQLRKEIRGSEEYLIVGIDVAKDRHHAFFGTATGKTVLKRFVFDNTYEGFRKLLDQTEALRVRHQLSKVVYGMEPTADYHKPLGEGLIELGRNVVLVSGVTVKRNRESLDGRWDKHDGKDSANVADLVSQGKCLYYEYPSPALRGLRGLLSLKRRLKRQEHSNRVRIRNHLIAQYFPEMDRSYDRLGAEGLSIVRWCLPASEIARLDVDPFIERVTSRRISKEKRRRLGEIWEKAAESIGCHGVPGIDHEARVMVEGLNQIRATMKETERKIQDLCEQFPEYNFLLTIPGFGPDVSAKVLGAIGAPDRFDNRSQVLKLAGLDLSADRSGKDSDKAIPEISKRGKADLRYALYQAAFIASTKNQDFIRYYTSKLRGREKEKGIHGKILVKLSAKMLLTAWTLMKKKEPYDPSYLTRD

SEQ ID NO: 471118 - protein, 457 aa, unidentified
MSQKKIKKAKDQVVEMTLVRPNAAGIDVGSTFHAVAVPPGRDEPRVRTFGAMTSDLQQIVDWLKKCGIDSVGMESTGVYWKGIFTALIQNGFEVSLTNATQVRNVTGRKNDEDDAMWIQKLHSCGLLKSSYLPDDEQSALRTLVRYRKTLTEDYSRCVLRMEKSLELMNIKVYTVIKDITGKTGTRIIEAILAGERNPKNFLPFVDGRVKASKDTIAKSLEGNWRAEHLFTLRSCYELFKFYKQSIAQCDGQIEQHLQRFDARQNEGVFEPLKKIESDLKTPGKKKKNKNSPLIDIRKYLQNIHGVDVMEIYGISDISALQILGETGTDLNKWENEKHFTSWLNLCPNNKITGGKIVSSKLMKKKPNLSSQSFRNAANAVQRSNHWLGDYFRRMKSKGGNKYAIVTTANKIATIYYKIVQNKEAFKPVDLKQYQDRYKKAKIAYLERKLKQLKNDAA

SEQ ID NO: 471119 - protein, 420 aa, unidentified
MPDDRCRLGSDDVVIGLDLASAEHQAVVLTAAGQRLTRFRIPHTRAGLEELLRRTTPAALGRAGGARVFAFEATGHLWEAVAYVLRARGERYVVVNPLATFRVREARQLSREKTDLTDAEQIAELCRTGLVTRTQLEPRPYLALRRAWGEYVRLREERARLKVLVAHQLYGLFPEFLRVWADLLQPGALAVLRTGLTPAAMAALSLTEFVAQVRAHCAGHRIWRFKLAQVHREAAQTIACPDGLDGLAREVQRAVARMDMLTAHMTALVAEIDVVLAELAEVPYLRTIPGLGWASVAGLLAPVGAITKYHHGRQLIKLAGTNPSRRDSGQTVGRGQRMSHRGRAGLREVLYRATISCLQHNPRIRAHYDRLIQRADRPLPKMQALGACMNKLLLYAFAVMSRREAFQLDHDWQRTMSRVA

SEQ ID NO: 471120 - protein, 418 aa, unidentified
MLSSEGTLLVLFVGDDWAEDHHDIEVVDERGERLVRRRLPEGVAGIEALHALIADHLADAADLEQVVVGIETDRGPWVQTLIAAGYSVYAVNPLQAARYRDRHAMSGAKSDAGDAHVLAELVRLDRAHHRPVAGDSAVAEHVKVVARAHQSMVWSRQRQTNRLRSVLREFYPGALEAFAGVLDGRDALAVLAIAPTPAQGRRLSQARVETALRKAGRQRYVTSRAEEIVAALRVEQLSARPGVEGAYGASVRALVAVISELRRQTLMLAGEVEAGFGRHRDAEIYLSQPGLGPVLGARVLAEFGDDPDRYADAKARRNYAGTSPITRASGKSRAVLARHVRNRRLADALDQQAFAALTGSSGARGYYDARRARGATHHQALRALGNRLVGILHGCLRHHTAYDEARAWQQAVPTPQTA

SEQ ID NO: 471121 - protein, 410 aa, unidentified
MLELFVGDDWAEEHHDVELMDPAGRRLARARLPEGVTGMARLHAMIAAQLGEGVEDVVVKVGIETDRGPWAQALIAAGYEVFAVNPLQAARYRERHSVSGAKSDKADAHTLADMVRTDSHQLRPVAADSPRAEAIKVVARTHKTLIWERTRHTQRLRHALREYFPAALEAFEDLAASDTLELLSKAPDPAAAVRLSISQISAALRRAGRRKIEEKAAVIQTALRAEHLRQPEVVAAAYAASVQSTVAVLKVLVEQVKTLQGQVESHFGRHPVAEIILSQPGLGPILGARVLGEFGDAADRYVSAKSRKNYAGTSPITRASGKKKLVLARFVHNDRLIDALAAQAFAALSASPGARAYYDRIRARGVGHRAALRQLANRLVGILHGCLTTGTVYDETTAWPADATDSPAAA

SEQ ID NO: 471122 - protein, 350 aa, unidentified
MLIIGCDLHTRFQQIAMVNTTTGEMVTRRLEHENCEARKFYAGLGEPARVGIEATGCTQWFERLLAELGQELWVGDPAEIRARAVRRQKTDTRDAEHILGLLLSQRFPRIWVPSVEERDVRQMLRHRDKLVQMRTSVKNQLHYLAMSQGICRQRKLWSERGRQELEGLPLGAWASRRRQELLELLDRLEPRIEELDKAVKEEAERRPEAVRLMQQKGVGPVTALAFVLTLGPVERFANSRKVVSYLGLNPSEDSTGGRQRLGHISKQGNQMMRWLLVEAGQSASQHDPELRRRYQRLKLRRGANVAKVAMARRLAVLLYWKLRSAQKVPLPVRTPGSPARTLVDVSPSTF

SEQ ID NO: 471123 - protein, 343 aa, unidentified
MLYTGIDLHKRSSYFTTVDEHGKVIKQMKIYNDPLRILNYFQDLNDQQKAVCECTIGWYWLTDLLKENNIQISIAHATMLKAIAFAKVKTDKIDSFILAQLLRMDFIPEAYILNPDLRAKRDLMRSRLMLVQKRINCINSVHRLLEKFNLSDPNDLPDLYQLQYQNLDQQVSVLEKQIKTLKKTLRKLIIYNEDLQRILWLPGIGEVHGFSILLEIADIRRFPTVKNFFSYARLVPGARNSAAKTQHVFRKAGNKYLKIAFNNAAIDAICLYPEIRKQYHRLSRKKGKHVARTLIAKELSRIVYHLLYNKADYDFTFKGVELRKKTRRWPCSASPRIEMAEAG

SEQ ID NO: 471124 - protein, 343 aa, unidentified
MQLQPYVGIDLHRRRSVIVQRSCEGETLAVTQVMNDDVIAFAKAVTNAGEHPEVVIEACYGWYWAVDLLHDLGCRVHLAHPLGNAWGNRRVKNDLRDAEDLVDLLRLGRLAEAWIAPKEVRELRELVRHRAKLVSLRTNLKLQVYSVLAKEGVAVPMTDLFGVAGRALLQSVTLAPAYTARIESLLDLIEAFDRQVAIFERDVRRELAEHAGYQAIQQIPGVGEIFAAIFVAEIGDVTRFTSPAHLCSWAGLTPKHRESDTTVHRGPITKQGSRLVRWAAVEAAQRQAAGTKLRADFSRITANHGDTQGARKVARVAVARKIVTLVYYGLRDGTIRSKAIEAA

SEQ ID NO: 471125 - protein, 455 aa, unidentified
MARKRKQGSKTNSAALPVMRPDAAGIDIGATEIFVAVPADRAAQNVRSFPTFTQDLYALADWLKQCGVKTVAMESTGVYWIPLFQILESRDFEVCLVNARHVKNVPGRRTDVCDCQWLQFLHSVGLLKASYRPDQEVCAVRSLLRHRESLVQMAATHVNHMQKALDQMNLQLHHVISDIVGQTGLAIVDAILAGEHDPQILAKLRGERIKATEEVIAKSLVGDYRHEHLFTLKQSLAAYRSYQNLIEDCDREIRAHLEEFQPPSPPAPAEAPSVLVSKKSSADGILKSELRRVFGIDLTKIPGIRTGIAQILFGEIGPDFTKFRSASAFASWMGLCPDNDISGGKVLWVGTRKVNCRAATALRMAAQSLHHSKSALGDFYRRMRAKLGAPKAITAAAHKLARIIFHLISTRQEFDDSKFAADQLRFQKRQEIKLRAKAKSMGFELTPLQHAGSVP

SEQ ID NO: 471126 - protein, 403 aa, unidentified
MNNVAGIDVSKGKSMVSVLRPFGEVVAKPFSIGHTGSELKELADYLKSLDGETRVVMEHTGRYYEPVARFLHEEGIFVSAVNPKLIKDYGNNTLRKVKTDKADSRKIARYGLDNWAELRQHTPMDTIRMQLKTLNRQQSLYAKTKTMMKNNLIALLDQTYPGVNALFDSPVREDGSQKWVDFATTFWHVDCVRNMSLTAFAERYRKWCKRHGYNFSQSKAVEVHTGAQDLIAMLPKDALTKTMVRQAIDALNAVSASLERLKAEMQALAAQLPEYTVVMAMHGVGDSLGPQLMAELGDVARFTHRNAITAFAGVDPGADQSGTHEAKSTRVSKSGPPELRRALFLVMDCLLKTQPQDDPVYRFMDKKRAEGKPYLVYMTAGANKFLRIYYGRVKEYLASLEEN

SEQ ID NO: 471127 - protein, 342 aa, unidentified
MREKHYIGIDLHRRRFTCCVRLENGRNYLSDWSLARLPQFVKTLRPSDEIAVEVTGNTRLFYDAVAPHVARVVVVDPNQFRVISHSVKKTDPNDARNLALYLAKGLLPEVRMKEKAQAEVASLTQTRDRLVKLRTAMKNKVNNLLSARGIELDKEALASEKGLAAILKQRVDGLVRIELEIIVEQIRSLNQSVTRLEQVIKEAAQKLPGYSNLTSIKGIGSLGAGILLSVIGDVKDFQEEGNLASYFGIVPRVQNSNETEHSGRITKRGTKLGRTTLVQCALIAKRYSPYLDRFYERIRTRRGTGKAIIALARKFLGIVYHTLKNNWVFEDFPNFVLAESTP

SEQ ID NO: 471128 - protein, 396 aa, unidentified
MPATTRHARVPALPESTTGQARLLYLALDLGERHWTLALTVGRGQRPRVRTIPAGDLERLTTELAAARRRFGLPPEARVVSCYEAGRDGFWLHRALLASGVTNVVVDAASIEVPRCARRAKTDRLDARKLVTMLVRYIEGERPVWHVVHVPSEADEDRRHLERERETLVADQTGLVNRIQGLLATQGVRLALRGDVPAQLAAVRRWDGTPLPPELCARLEREWMRVEAVRTALRALTTARHRRVTTPTPPAADTAAVHLTRRLAALGAVGETTAWLLATEMFSWREFRNRRQVGGFVGLTGTPDQSGDRIREQGLTRNGSVELRARVIELAWGWLRYQPASALSQWYRQRYGGGNARLRRIGIVAVARRLLIALWRYAMGGPPPAGAHLKDDAVAA

SEQ ID NO: 471129 - protein, 355 aa, unidentified
MDSTKYIGMDVHKESISIAVRNDVGKIVMECVIETKANIILDFIHGLRGELQVTFEEGTWAAWLYDLLKPQVTKLVVCDPRKNVSMREGNQSDKIDARRLAELLRLNHLSPVYHGEHGLRSLKELVRSYLTITKDLVRVMTRVKAIYRSWGIPCTGKQVYAPRHRAEWLGKIAEPGVRRRAEFYYQQLDALRTVRQQVRRDLLAESKKHPAWKRLCQIPSIGPIRAAVLLGILQTPHRFRTKRQLWTYSGLGIETQSSADHRRVDGQLERVKKPSSIRGLNRNCNHDLKNLFKGAAIVASSKPGPFQEFYTALLTKGIRPEMARLTLARKIATIVLIVWKRGACFDAQHLKPQTA

SEQ ID NO: 471130 - protein, 417 aa, unidentified
MERGKIVRVVYEWCCGLDVHKRTITACMLRWLGGQWQKETRQFGTMTKDLLELSDWLMAEGCTHVAMESTGVYWKPVYNILEGQFELLLVNAQHLKAVPGRKTDVRDAEWIAELLAHGLLRGSFVPPPSVRELRELTRYRTSLVRDRARTINRLQKLLEGANIKLASVVSDIDGVSARLMLEALVAGQRDTEQLANLAKGRLKEKRAQLVEALSGRLQPHQSFLIAEHLAQIDYLEGAIERLSGEIEERLRPVEQEIAWLDTIPGVNRRTAEVLWAETGGDMSRFASARHLASWAGMCPGNNESAGKRRTGRTRKGSPWLRHCLVEAAHGAAHTKNKYLSSQYHRLAARRGKKKAQVAVGHSILVIAYHLLTRKQPYTDLGANYFDERDRQAVTKRCLNRLQRLGYKVTLEKLSMAA

SEQ ID NO: 471131 - protein, 356 aa, unidentified
MERYIGLDAHAASCTLAVISQAGRRLKDFPVETNGQALVEAIRMIPGRKHLVFEEGLQSAWLYETLRPHVDEVAVAGVTQSRGQKSDQRDAYGLAEKLRTGSLDKRIFKAPREFTLLRELSRAHITATRDLVRVQSRLKSLYRSRGIQTPGASVYSLTRRDEWEQRLAASARGRARRLYEQLDFFREQKKQIEADLLQESRKHKIVRILETAPGIGPIRAARLVPIVVTPHRFRTKRQFWSYCGLGIVTRSSSDWVQTADGGWIRARVPQTRGLSRQYNRVLKDIFKGAATLVITQRNKGPLYPRYERMLAGGTKPSLAKLTLARILAATVLRMWKDEEDYRPERNRRAMESDRSA

SEQ ID NO: 471132 - protein, 354 aa, unidentified
MADQTAVVGGVDTHTDFHQAAVIDSIGRHLATQAFPTSPDGYRRLLDWLCSHGDVIAVGVEGTGAYGCELARYLRQNQITVIEVDRPDRRARRASGKSDPIDAFAAATAVLTGRAGGIPKAHDGIVEAIRTLRVVRRSAVKARTQTINQIRTLIITAPGEVREQLRALTPAELIKNLARSRPGTQTNDPACAVKVALRRLARRHQYLTAEIDDADAELEALMARAAPELVALPGVGIETAAQLLITAGDNPERLTSEASFAHLCAVAPVPASSGRTNRHRLNRGGDRRANHALHMIALVRMRYDQRTQAYVTRRTAEGMSKKDILRCLKRFIAREVYKYLASQHTPAKPLIQGA

SEQ ID NO: 471133 - protein, 436 aa, unidentified
MHHHDKRQLAQAAAAVVGVDAGKFHHVLVVRPRGRRDSKPLQFPTTRPGFDDALAFIREQAGSAAGVGDGQLLVGIEFAGRYGFTLAHYLRETDERIQIVSVLPAHTKRWKEVTHHQPLKTDAKDALGITDLTAQGHFVRFPFLAPAYAELRSLLSTREKLSTLRRGVIARLRTTLDVVFPEFTTLFVSPVKKTARTLLREYPGPEDLRAAPRRAVLALLRRESRNHLGREMYDGLLEAAAHTIALPSAQGATKDEIPLLIERLDLYESQMRRIEHAMQHHLSVLPAARALLTIPNVAPVTAAVFLGSLGDPKAYDSSREILALAGLTLVERSSGILKGEKRISKRGRPVLRKHAHMFAVRSVHKDGIFRREYEALLARNGHKTIPALTAIARRGLRLLYAVARSERPWTAERPAERPGEKSRVIEPGTGAAEGKV

SEQ ID NO: 471134 - protein, 338 aa, unidentified
MKLYGAIDLHSNNNVTVLIDEQDQVVYQKRLPNDLPLIAQQLSGYRDRLQGIVVESTYNWYWLVDGLMDQGHRVHLANTAAIQQYEGLKYTDDHSDARWLAHILRLGVLPQGYIYPKEERAVRDLLRKRGQMVRQRTANLLSLQNLITRNTGSSISSNRIKTLDAEQVDDLLPNSDLALAVKANLAMIQCADGQIDILERTVTDRIKLRAAFSFLKTVPGIGQILALTIMLETGEIKRFPTVGDYASYCRCVGSQKLSNGKKKGSGNTKNGNKYLAWAFVEAANFAIRYNARIKSFYQRKKAKSHGVLAIKAVAHKLCRACYYIVKDQVPFDVAKAFA

SEQ ID NO: 471135 - protein, 419 aa, unidentified
MRGLGLDVHRDFCEVAIAENGRVRSAGRIATRVPMLELFAQSLAPDDVVAMEATTGTDRIVSVLQRHGIRVVVANTRKLKAITDAKAKTDRLDARALAKLVMTGLLDPVWTPDERTRALRRLTNRRERIVRARTRAKNEAHGVLSRNLCERPPVTDAFGKAGREWLAGLELPVDERLTLDGCLRQVDFLDSEVVAIDREIAKQALAWPEVLRLMTVPGVNVQTAATFMAAVGDIRRFPSARQLVSYLGLDPRVRQSGNGPARHGRISKAGASETRHMLGEVAWKVMMTPGPLRAFFERVRARRGPQIAATATARKLTVLFWTMLTREQDYAFGRPAMTRNKIRKLELLAGAPPEKGRHGIAGGKSKAVFDAERELSRQAEAAYRRLVADWQSSRPVVGASATPGRASQKALEGQSRAAG

SEQ ID NO: 471136 - protein, 364 aa, unidentified
MKKLAYLGVDYHVKTVTITVYLNDEGFYETVRFNNSDKTIAKYLKKLSTHFEIKLCYEASSSGYVFQRKMDKLGYHCDVIAPSLIPRKPGDKRKNDHRDSKKLAENYAKGLLTLVHPPTKSEESIRGLVRCHLAMKNSEKRIKNQINAYLLSKGHRWPKSKWTLEHLNWLSTLELCDDYSHMVLEEYLGHLEYITTRVQALTQEIEKLANSDIYASSVKKLRAFKGIGTMTAMLLIVEITDFRRFPTAGALMAYLGLIPGEESSDSRSKDKAITKAGNTRCRKAIIGAIQHYMTQPRITLSMQRDLGKVDAHSANIAIKCMKRLNKRFWTLIHKGKTPNKVKVAIARELVGFVWAMMQPEPTMI

SEQ ID NO: 471137 - protein, 347 aa, unidentified
MMQGRGTRPECNREKRMEKLNYVGVDVSAKTVTMIIDQQGKRTDPLDLPNDARGHKKLIGMITKSRSHARVVLEATGVYSLDLSLALHRANRVEVMVANPRAINQFAEAYMRRSKTDFLDARILLEFAMRMDFKLWSPPERHIFDLRAISRRIEGMIKTATQEKNRLHAADHFDEMTDVVRADIEDNLEQLKNRIARLRSQALELIDEHPDLARSFGHITSVKGIAEAAGIQILAELSVLPSDMDVRQWVAHAGIDPRQFQSGTSVNKPARISRRGNAHLRKALFMPALVAVQSEPHVKAFYDKLVARGKTKMQANVAVMRKLLHAIYGMLKHDQDFDGEKFYMLGT

SEQ ID NO: 471138 - protein, 344 aa, unidentified
MEYYTALDVSLRSVSICIIDGDGVIQYEDKVSSEVDEIVSCLRGFSEEINSVGFEAGTLTQYLSYGLQAAGFEVICMEARQVSAALAAQRNKTDRNDARGIAQILRSGWYSRVHVKSMESHLTRALLSSRKTVLKKCVDLENEIRGLIRLLGIKLPPRVSHGMFDEHVRQAIEAYPLMADVVIPMLDARLTLYTTYLKLDSKVTAMARRDEVCQRLMTVPGVGAITALTFKAGVDDPTRFRHSRTVAAHFGLTPRRFQSGELDNPGRISRAGDADVRSALYVAAHALVTRSEKWTYLKAWGLRLSKTKGHRKAVIAVARKLTVILHRMWIDEKDFRFASTEVPT

SEQ ID NO: 471139 - protein, 411 aa, unidentified
MEAIIERCAGLDVHQATVVACALIGDADRKQRKEIRTYSTMTRDLEALRDWLRDLGVTHVGMESTGIYWKPVHAVLEGHFELIVANAHHIKTVPGRKTDVKDSEWIADLIRHGLVKPSFVPPPPIRELRDLVRLRRFMTEDLTREQNRTIKVLESANIKLASVASSVFGVSGRAMMKALIENTATPEEMADLAKRKLRRKLGPLAEALNGRLTEHHRYLLAFQLRRIEAIETDLRTLDERIEDKAKPYAEQRALLRQIPGVDDRVALTIIAEIGIDMSAFANAERLAAWAGVCPGNHESGGKKKNAATRTGNVHLKTALVQAAVAAAQKKGSYYRDKYHRLKARRGPKRAAMAIAHKILIAVYHMLARAVPFKELGETFLDQQTAKRTAANLVRRLSNLGFDVMLKPKVAA

SEQ ID NO: 471140 - protein, 352 aa, unidentified
MKPQVKGLDSAEALFVGIDLHKVSWHVTIRTADVELFSGSVPGKWEMLRMLLQRYRGSCVQVVYEAGCFGFWLHDRLIEYGVDCIITPPSLIPQESGNRVKTDRKDSRKLAHLLAKGLLKRIFVPNRQECYHRQVVRRRRQLIGDRIRVQNRVKSELRFYGIDLLNPVGKWTKRYVENLSRFRFEDRFMQESFNRLLEQYTFLSGQIEKQNVLVRELSEMDLYRERVEILKSVPGIGTLAAMELLLELQDVVRFRHADQLAAYVGLTPSQYSSADKIRMGRITKVGKHSLRALLVQAAWQLIRKDLAMKEKYERIKIRAGGKRAIVAIARTLLLRVRRIWLDATPYRLALSA

SEQ ID NO: 471141 - protein, 320 aa, unidentified
MTSRGAEKMNNDTIGVDVSKDHLDAHRLADGATRRFANTKGGHKALIKWVAETPLYRVVFEPTGLYHRAVERALGIAGVPFVKVNPRQARRFAEATGKLAKTDRLDAAILARMGALLELQARPARSELLFELKELYVAREALVKDRTAAKNRGKVLTLSLLKRQNAQRLEQIDRQIATVEAAILQIIEANVSLADRFAILISIPGVSNITAFALLIAMPELGSLEAGQAANLAGLAPIARQSGRWTGRSFIRGGRADVRQALYMPALVAARFNPDMKAKYAHLIETGKPAKVALTAIMRKLVVLANALLKANRTWTPKTA

SEQ ID NO: 471142 - protein, 329 aa, unidentified
MEQEYIGIDLHKAFFQVCVVNGRGERQWEQRWPTTDEGIAGLVARCGVSSRVAVEASSPTWAFVDRIVNHVGAVHVVDSRKTRLKAGYAAKTDRLDAQRLADALRRDSVVGIYYPPPPIRDLRELCRYRCHLARTQASLKQRIHALLLRQGVREPRVSKLFGKRGTQWLDTLQVSGWAGASLNGLRQLLADVRTQLVPVLATIRTTAVADPIACALDARPGFGPVFSVTLRAEVGIIARFPDGPHLASYAGLVPRVERSGGRQWSGRITKAGSPWLRWVLIEAAIHQLRRHDDFGRWARQLAVRKGILKARVAIARALCDELFDVWPRP

SEQ ID NO: 471143 - protein, 409 aa, unidentified
MSNDARTDVFVGLDWAVHTHAVCLIDAAGSVLDRFEVTHDRDGLAELMRRLARHGQRLRIAIERPSGLIVDALVEAGHQVFPIHPNAVKASRPRYRSHGAKSDSSDAYLLADLLRTDGHRWRALAPQSDDIRALRALVRSRDDLVTARVAAANQLTSTLQAFWPGAAVIFADVASPIALAFLRRYPSPRSARGLTEAQLQRFCKAQHYSGRRSAADLLARLRAAAAGHVGAHTEQAMAEVVRAQVAVLVPIVTQIAELTRRIEQFMHSLPDGVLMMSFPRAGQVCAAQILAELGDVRERFPSADQLAAEAGTVPVTYQSGKTRSVAFRWACNHRLRQAITCLADNSRHANAWAKSVYQAARARGCDHTHAIRILARAWLRVIWRAWTDRKPYDPSLHGNAVTLASSQGG

SEQ ID NO: 471144 - protein, 403 aa, unidentified
MNNVAGVDVSKGKSMVTVLRPFGEVVAKPFSVGHTGSELKELANYLKNLDGETRVVMEHTGRYYEPVARFLHEEGIFVSAVNPKLIKDYGNNTLRKVKTDKADARKIARYGLDNWVELRQHTPMDTIRKQLKTLKRQQGLYSKPKTMMKHNLIALLDQTDPYVNAMVDSPIREDGSQKWVDFATTFWHVDCVRAMSLTAFMERYRKWCKRHGYNFSQSRAIEIHMEAQDLIAMLPKDALTKTMIRQAIDALNAVSKSLEQLKVEMRTLAAQLPEYPVVMAMRGVGNSLGPQLMAEIGDVTRFAHRGSITAFAGVDPGADQSGTHEAKSNRTSKSGPPELRRALFLVMDCLLKTMPQNDPVYRFMDKKRAEGKPYLVYMTAGTNKFLRIYYGRIKEYLASLEGN

SEQ ID NO: 471145 - protein, 373 aa, unidentified
MPRYSTAFGMDVHLRSTTVCALDAETGEAVTRRFRGNPWGEVAEWMSGFPGPSLAAYESGYLGFAPQRELSGLGVDCVVAAVSKVPRSAADLSSKNDRNDAARMAKAILSHDVTPVWVPSPEIEGLRDLAAAHDAATARLAAAKQRLLAFLARRGYAYGGTTPAGNPRKYWTYDFLRWLDKVRPADDGGIRALAALRNEVEAADETREALLAEYRAAVAAGPLSAEVEALQSIKGCGFVLAAAFASEVGDFSRFRSGRQVTAYFGLAPKQRSSADSVRLGGISGAGNALVRRLAVEGSWRYAQAGHQPKLMPKGSGVPLEIRMHGRKGSERLLRRREEMLARGMPQAKANAATAAELVRWLWALGMMCREAGE

SEQ ID NO: 471146 - protein, 468 aa, unidentified
MPSAPTHRKRALDELACVHPNAAALDIGSEEIVVAVPPDRDPEPVRVFQTFTADLQALVAWLVACGIDTVAMESTGVFWIPIYELLEAAGIVPYLVNARHIKTVPGRKSDWNDAQWLQKLHALGLLQGSFRPDVEIRTLRTLVRYRSEMIERRAPHINHMIQALKHMNIQLNLVLTDITGVSGLAMLRAIIAGERDAERLAEFRQPGCKHSFAEIVKALTGTWDDAQIFILTQSVELFDYYSTKIEACDRQLEQQYQAMESRWEKDAPLPDLPPAKGESKSKNAMSFNARAQIARVIGVDLVAVMGLSAITVQTIISEIGTDMERFPTVKHFCSWLGLAPHNDISGGKVLRSRTMKVHSRANQAFRQAAHSVARSHSSIGAYYRAMRARLGPKQAIVATAHKIARIVYHLLKTGEPYREESDVEYERKRQEREIKHLARRAQKLGYTLTAVSATASESPPKPRGDGSF

SEQ ID NO: 471147 - protein, 306 aa, unidentified
MFRKPLLDVAVRPSGEPVSVTSDASGITTLIAQLSQVRPALIVMEATGGLERPLLRALVDAALPVIVVNPRQVRDFAKATGQLAKTDALDAQVLARFAEVIRPTLRVCPDPQTQELAALLARRRQVLAMQGAEQNRLDRAPDRVRKRIEAHLRWLRDELARLDEDLDDLIQQSSVWRAREELLQSVPGIGPVMSRTVLAELPELGLLNRKQIAALVGVAPFNRESGRLRGHRTIWGGRAPVRRVLYMAALVATRWNPVIRLFYQRLRAAGKAPKVALVAAMHKLLTILNAMVHHGTPWQPVVAQEA
